United States Patent Application Publication US 2020/0157537 A1 - sequence listing, part 13

SEQ ID NO: 26073 - DNA, 1131 bp, Mus musculus
ggtgtggtggctgttgtcctgacaggttgctcttcagtggctgtagttcctacttctagcctaacaggatctttttctaggccagctcgtaagttcaagcagagcagacaccatctattctcacaatgtagacagaaattcttaatatatttcaaaccagggaatagccatctttcccctcttttccacacccaccaaaaatgccaagaacgtgaaggaataaccccaaccagcaacttcttaagctgccttctgctcatccataccttaggccttggctttgctggttcataaagcagtgtttgagccataaacgtcacttactaacaatctcactgtgctcacatgagctcttgataagaaggcccggcaagtgttcttgtgctgacaaagatggtaaacatatagtgaagagaactgggcaccatctgccagctctaactgtctcgtcctaacatattccagatgcaggcatgtactctagactttgaaaatgaaaaactcgaccgccagaatatgcagcatcaactctatgtgattcttaaggaactccgaaaagcaaaaagtcaaataacacagttggaatccttggtaagctttgaatggctactgtaaaccttattcttcatgcatggatttggatttatggcaggctcatctccctgggcctctcatagtgtcccatgctagagcaaattgtggctcctaaccattgcccagcctccgtgctggcactgaaatgggtcacactgtgagaaggaaaaaaagaaaaaaggaaaaacttattcttcattctttttttgctaccttcccatttgtgtcagctcagtttccaaaccagttacatagcttaacctaaccttacagcatcaattcagaactcggaaggagtggtgccgcggccctcttactcataggtactttactgatgtctgggaccatccctacccaggttgggtgccaccattctagtagttgtttgcagagaggtgagaaggtagaaaagaggacagcatgacattcttttttttgtatttctaatgaatctatgtgcatctatgtccccacatgccccgttagtgcacattcatgtcttgtcttagaactacagaatatttgaaagtagagaaa

SEQ ID NO: 26074 - DNA, 1707 bp, Mus musculus
cagtggtggcacatgcttttaatcccagcccttgggaggcagagataggcagatctctgagttggaggccagcctggtctacaaagtgtattcaagatagccagggctccacagagaaactcttgttttaaaaaacaaaacaacgataacaacaaaaatattgatgagcagaaatccaacacaaactgtctgtagggctgaagcacgcacgcagaggatgtgggagcagttcacactgctgagtgctcaggcttatgttcaaatggtgttcatttgccgtttgttttgcagaagcagctacatgggtttaccatcacagagcagccattcccactccagagagaacctgaaagcagagtgaaagctacctcacccaaaagtcccagtgctgcactcaatgacagcctagtggaatgtcccaagtgcagcgtacagtacccagccaccgagcatcgagacctgcttgtccatgtcgaatactgcatgaagtagcagaaccattcttgcctttgtgctgaaaaagtccacactgtattctatgtttctttataggcactttaaaccacagatgacatcttttatacaagaaactccatctgcccttggcactctggcatatgagggcatccttgtatttttctggccactttgcatttccttggtagccattcctccctgagttggttcgtcatcaggctgcagtgacagattgtggtgagcagtggctatccaaacttgtagcacttcacgctgttgtaatgactagcatttcacacggttcttctacttgataaacagagctatttgggtttttggttatggcttaaagctactgagcagtaagcaaacattttatgctttgggggttttaagagaatcagaaggtaattaaccatggatcttactgttttgttttttttaaataagtgctttgtatactgacacttccatttgatacctcttgctattgtagaacggttactagcaaagttgggaagttttgtaatgttgagtgctgttaactgttctaagcacaaagcaggttttgtttgaagaatgcctttaagtggctgtatatttttactcctattacctggccataactttgacttaaatttcattagtacaggtcagtttcctaaaatgccaaaatgaacaaaactttagcaaaactatcttgcctcatttgatttgcagggattttattatatcattttgttttgttttgttttttagcactcttaaagatggttgggcagtgtaattatcagatgtttgttttctaaatagatatttttatatatgctttatgtaaaccaaaatgtgttttattccttcagattttctaacatgcttacacttgggctactatttagcaatatgaaggaggaaataataaaattatttaataagttttactgtgtctagtatgtgtgtgtatacatatatagtcttaagagctctagtcacagagtggtgttgggagtctaggttgacacacatcataaggtgacaggaactgaggagagaggaggtaaaggagtggaggctttttggtatctctgctgaatagatagcaactcttgatcaataaatatttttctgagttgtttgttacaaaggcaaagcaacaagcctgtgcaggtatatgtaattttggcttttgtaatttgggagcataaaaaaatacagttctgttattgtaaa

SEQ ID NO: 26075 - DNA, 1194 bp, Mus musculus
ttttctgctgtaaaatggttttcaatacattacctgtaatgatacagtcaaaatccttgggggagaggctattgattttccgtttcttatattccggtgggccttcacagtagatgtcttccacagttgcattggtatggccgagccattccaccagccacttcaacttacagtcacaattaaatgcgttccctcttaggtccctgaaacagaaacctctgctgcatttgcagtgcatgggtcctgtcgtgacccacgcgtgaccagcattaacctgcacatgctccgttatctgtgtcgaacttgactgcctattcagcttgggctcagaaggtgatcacagagcacccctaaagccacccagatcctagtaacctatttttgtctggattcaatgctgtcttagactagaagagtagctagagtcaatggaaatagtgcatgagccatatacataagttgcatttttttaaaaacaggggcactaaggaaatgtaaaaatgaacaggtattaataattttaaagttttatttattctaatacattcaaaatgtcatcctctagatgtataatcaatataaacgttatgagatagcctactgattaatcaatactctgttctctctctcactctttctctctgtattatctttgagattctctgattagtttatgcttacatctcaattgtgatgctaaattcgcatcagaaatatattatctgtgtttagagttcataaagtttatagctcaaaaatagatttatattccttaagttgttccaaatgtaattattttctaatataataaaatgagaaaaaaactgcaatctaaaccttaaaaaaattaaggatcttgagtgtagccatgcatgcttagcctgttcaaagatcaaggctcagcctcttggacataaattaataaatagataaataaatgtaaaacgtaaaatgcagtgcctcatttgttctagcagcacaccatcccccatagctaagagtgtccagcaggtaccttactgggtctaaaggacagaattcggtgattgctgtatgattatttaattaaatccagtgagccactggcttttcttcttcatagacatagttaatcctgaccctgttctgtggtctacaaattccactttaataagaaatgacttcagcatagctgagttaaggcagacataattc

SEQ ID NO: 26076 - DNA, 3224 bp, Mus musculus
tcttcctcttcctcagaggggtctttggttccagtgccatgatcctcatgtattatgcgttccagacaacgtccctcgcagacgccacagttattgcgtttagctgtcccgtgtttacgtccatatttgcttggatatttctcaaggaaaagtatagcctctgggatgctttcttcaccttgtttgcaatcgctggagtgatacttatcgtgagaccaccatttatatttggttccgacacttcagggatgagagaaagctattcagagcacattaaggggacgtttgctgcgatcggacacgctgtgctagctgcgatcactctggttattctgaggaaaatgggaaaatctgtggactactttctgagcatctggtactatgtcatacttggccttcccgaagccatcatcatcctctttgtcataggagagtggagtctgccctactgtgggctggacaggctgtttctcatactcattggactcctaggtttggggggtcagatatttatcactaaagcagttcaaatagaaaaagcaggactcgtagcgataatgaagaccatggatatagtctttgctttcatctttcagattgctttctttgataatgtaccaacttggtggacggtgggtggggccctctgtgtggtggtcagcaccactggagcaaccattcgtcgatggctgcagggttccaaatgaagtgtcactgctgaaacctggtttttattttcaagtgtgctgtcacctagctcagacatcttgcacacccacacacatacctggagaatcttcatcactcattggctttctttaatacctttcataaagtgccatttttaaacatagtgcgtttttagttaagagtagctagctagccgggcgtgttggcgcacgcctttaatcccagcactcgggaggcagaggcaggcggatttctgagtttgaggccagcctggtctacaaagtgagttccaggacagccaaggctacacagagaagccctgtctcgaaaaacaaaaacaaaaaagagtagctagctaggctagcctcacagtctggatagcttttatctttgctttggctccttggttgggttaccattgatgagaagggagctcatttgaggaatttcagaaatttttatgagtacaatttttaaaatttatttctgacccgggatgtggatgggagatcctctattttagcagtgcacataagaagctcaacgttgacaatgctgctctagttagtactgtgctaatctgttgattgcaatatcatcccacttaggatgccaaagctgcaacttggtctaggtgcctacctacccataggagtataagcgaaccagccttattctcaaggatcttagagatgattactacacttttaactcatgtgtgccttttcgttttgatgctgggactttttatatgtactctgaacagagccttcagcttgccacatgtggttagcagttctctctttcagaatattaacaactctggctatcattttgaatttcagttgtctcctgttttattgaaattgcactttttttttaacattccgagatttccaaccttgaaatcatgagagcaaaatcttggcgtgatcagtgtgtacattcccatcctgaggtgatttcacttcagatgcggtggtttttctacaaattctctttgaattcatagtgtgatgccaaatacaatttttttctcaggattgtactaggctgggccattatcagattgcccagattctaccgttttcattttcaaaacccacagttctagaaggttcatcccgcaggctcccttcgcattaaaccaaatatttatacctttacagtacatgtctgttaataaacgtacagtctttttccatcttggaatggtatgttataatgcttgtggcatacgaaaaatgtaaagacttgttactccatagttgattggttttcccagtcttttgcatatacggaaagaacacaggtacaagccagtctttgacacacaatcctagtgtgaacttagacagtagattctatctgtggagcaccagcaggccagtactcctctgtgaaagaggaaaacttggtagattgggagtaaatgaccatgcgtctttggggcgctttggatgcctttatggtgaggccattgtggctgccacctcttactttgtcagacactgtctactgttatcattagctgcagacttgaggggctattgctctctcccacactcctcacagctcttctggaggaagggactggtctcctggatcttacatttagctatgaaaggatcttctccagtagttcctaagaggaactttgagtttggtggttttaaatcaccttagccacctgacatcctacatatgtacttagctgaatcacctcagttgcatttgaccccgcatagatctgccaatggtgccgttctaccaacatcctagaaaacacagagtcagcagactcttagtactctggaggggtcttagagggcatcctgagggatgacgggagggagggctgcaatagctggtttccatagcagcctcctcttactgagttccactcctggagtaccaccaaacttacacaatagaagagtgtctgggatagtggaagataacccctttggaaatacattatatttcaactgtgtcttaagtacatggatgtcaggatatgtggctgacattggagacaatgtttcttataccaacctttacagggtatgatttttaaacaatgttcaagtggtatacaaggctatgtattgtaacaattacgggggtttatgtattttccaaagattgtagtttctatatcttgcaaagggaaatatttttttcctaatgtgtttttattttgtaagtaataaaatcataaaagaaagatgttgggttttacaactatagaaagtgtctcacgactcgtttctcttctcgaccgggcgcttcaaaactcattttctatagaagactcgcctctagccgttttgtaggctgtgatcttaaattttcaaactttatctgttcctcatacacaacaaatacaacatctccaaaataaatagtaatctgttaagagaccttcacttttctaaacccacagagctcagagcagcttgaagttgtgttgtcttctacagctaggttctgtagtgccctaggaattctttctaccctcacaatgtctgtcc

SEQ ID NO: 26077 - DNA, 1141 bp, Mus musculus
gcctgggcacaggagcatgacttggtcgcctctctttgcaaagtcatgcctttacgacgagcttgttactgctttcatttacaaggtcctgaggcaggaaaagggttggtcctgcatgtgttctcccgcatctggcaagcactagcaaagtctctctgcaaggataactttgttcctttcgcttcatgcagagtgtggcacaatggaagacaggaacacagaactaccccagaggcatggaatcgaagcagctacaggatgtttgtctttcataatgccgtaagcccagagtcaaccctgcctcccaagcccgattctggggttctcttttcatgacactggcatgaatgaatagcttcaatttccgtttgagattagagaacctttatcatctatgcttatttgggtctcgaccctatacttcaataaggaatcactttgcaagcaggccatgctgagtagcttaagcttcagagagatttagcatcaaattataaatggtgacactttaatagtgagctcaatgtgcctcgagagccagcatgtaggagtctggcagctggaaagccccgtggcttcagattttccagattgtgaacccttccatcaagtaggaactccttcgctttgaaaatttctcctctagagcaagggaaaagttcatctgagtcctaaagtgtttcatagaaaatgcattattcttctctttagtgagacttaggtttttggctcagggtggaccctttagttctttttttaatggccacaaacccaacgagggcgccataatgggattgtagctgttttgtgtggtgtgtgtgtgtgtatgtgtgtgtgtgtgtggtgtgtgtgtgtatgtgtgtgtgtgtgtgtgtgtggtgtgtgtgtgtgtgtgtgtgtgtgtgtgtatgtgtgtgtgtgtgtgtggtgtgtgtgtgtgtgtatgtgtgtgtgtgtgtgtgtgtgtgtgtggtgtgtgtgtgtatgtgtgtgtgtgtgtgtgtgtgtgtgtgtgtatgtgtgtgaagcaaatgtcattaaggagactatattttccattttttttaaaggggatggggaacttcttatttcggaggaaaggaaaaagaatatttgaaattaagaatgacctaggaaatcc

SEQ ID NO: 26078 - DNA, 1182 bp, Mus musculus
cttcatggttttttttttttatttgatttaatttgatttgaattttttatgaatttatttacttattcactttacatccccatcgtagatccctttccttccagtccccctccccccatgactcctccctcccaccccctccctgtcatttctaaaggaatgaaggttcccccctgggtatctacccaccctggcacctcaagtcactacaggactaggtacatcctcttttagtgagttcagacaagacagcccaggtaggagaacagggtccacgggcaggcaacagagtcagggtaggaccagctccggttgttgggggatccgatgaagaccagcctgtacatctgctacatatggggggagggctaggttcagccctctgtgctctttggttggtggttcagtctctgggagcccccaattttgtgaattttttgataaataagttaaagttatactcttgttcattggctcttgttgaatgacacaaggaatgaccaaatctgacctttaaggaggaatgagtgctctcattgctagtgtgagagagagtatgagtcagaatctagagtctttgaagttgggttaacttattacctgagagtgataggggaaaattgctcagtaagatgaaaggtccaagatttccattgtgccataggaatatcggttcctgtccaaccaggaaagtgtttttctcttaaattctttgttgttgttgttttgttttgttttcttttttgagacagggttttgtagaccaggctgaccttgaactcagaaatccacctgcctctgcctcccaagtgctgggattaaagacgtgcgccaccaccgcccaccttaaattcttacagataaaaactgtatatgtttataaatagttataaagaactattttatataatagctattatcattgtagaaatgacttacaaatacaaaatgtgtatgtaaatactttctgctattaactgaataaagtagcttcgatttttacttcctagtcttacgaggttttgtttgttttttattttagtgaaaagcagctcagctaaatagacttagttcagtgccatagaaaccagtcattctgggactcaagagttctttcctcataaaaatgtgaaagcagaaaatccctccacccagaagcgtcagggatggtgacattttttt

SEQ ID NO: 26079 - DNA, 1152 bp, Mus musculus
cttctggccttgctgggttccaggtacaaatatggtacgcagtcacacatgtagacaaaacacctatacatattacaaaaaacaattttaagagaaagaacatagccgggcatggtggcccatgcctttaatcccagcactcgggaggcagaggcaggcggatttctgagttcgaggccagcctggtctacaaagtgagtttcaggacagccagggcagagaaatcctgtctcaaaaagagagatcgagagagagtgagagagcgagtgagagagagagagagagagagagagaacatatgttaaaggtgacttcctaatgtgaatacaactgagctttatcctagaaagggaagaaaataacttttccttttgaactgtttgttttgcttttgctttttccagacagggttactctgtataaccctgtctgtcctgaaacttgctctggagaccaggctggctttgagatccacctgcctctacttcccaagtgctgggataaaggtgtttgccaccaccaccctgactcttttggaatgtttaaagagggcattttagcaatgtgtaagatggaaaaaatggggaatgaagtgagtgtctagcatcttgatagttggatggagcacaggaacaagattagcgtaatttgaaacaaactttcacaaatacttattaggtgtgatcatggcaagtgacagtatcggagtcatcagcgcccctggaaagtggtgaggtcattgagtatgagacttacaggcacctgcagttagctgcctgagaaagatgcttacaagtgcaccgttgcctcgaagtgtgcatttcccctgagaagccttgtggccttccacattcctgtaagcacattgaccatggaagtatcttacctggatgtattcactgtacacagtggtgggtttcataaagacgctgtagtgtgttttatcctctcctctgcatcctttcccttcactcaggcttgaggaagaactttatgtccatttgtgtgtctttgtatactggagaagaccagaacagctacagtggagttggagttagaggcagttgtaagctgcccaatgtgagctgggaatttgagtcttctggaagagtaggaagcactgtcaaagtctgagtcatctttccagtccca

SEQ ID NO: 26080 - DNA, 1134 bp, Mus musculus
ccctctatttttctgttgggtttgtttttgagacagtattatgctggccttcatatcctagggtccccctgcctagcttcccagtgctggctgggattactggagtgtgcatatcattcccttctcctaaggatttcttagcaatttattactgtttgctgcctaagtaatcaatttgttttagttttctacaagtaaggttctttagctaaaattgaggtgtatgttttcatggtaagttacagtatttgtacatttctttaaaaaacagaatcttttaaaacgtagtgaaagcagcttttaacatttggcaagtttagttcttgattagtactatgaagtgccaccaccctgctgcttagttgttgcatatgcaagaaaaggtgatataatcatgggaagttcttaactccatcttagtttttttttttccttgcatttatttcattctgtcaatagagtatgaacactctttgggatttttaatcttcaattttgtagcccatgctgggctggaactcacagtaggtctccttttctgaagtgtgtgtgtgagtgtgagatgtccatttgagtttggagtagctgcaggtgagtttggagctagactaagcaggttgtgagccgtctgacatagcaggaccgctgggaaacaaacctggtacctctgcaagagcagttgtgctttaccagctgagccagttggtcataaagtaaatgtgccagagtccagcttcagcagggttcaggtcccaaagaggtgtagagtcagcaagggaaggagactgacactatctaaagacaaatcaggcaagatcgcaggtttattgaaggctttgcaccttttatactctatgtttgcatatatggtagctgaatcacaggtaatgctgaaagtggacttagtagatgtatgatcttctcacagaatacattcagttcaacttactttgaactatctaaccataaatagaaacccacttagtttaggaaataatccatcctgaaacaagtgatcagtcatatagttcacggtatgtattttgtatgtcagtgttcttcagtatttatttgtgttcgtggtgcacatggaggatggacagaatttgatgttatcacactagttgttttgta

SEQ ID NO: 26081 - DNA, 1235 bp, Mus musculus
gcagagggcaacatagatcacaggttttgttttttttttctgaggttttgttttgttttgttttgttttgagatagcatcttatgtaacccagattggcttggaattcccctatataacaatgactattgaactcttgattctttcatctgtctcctgagtactgggattaaaggcctaggcactgtgcctaggtaacagcaattttaaagttataaaaagatgtagtccctggccagtgagagttttgtttagtttgattagcctaaaagggatttcatatggtatttttcatacatgtcattatacttagttgttaattcctcccctcctattctacctcacccttgttttagtggtttgcgttctttgggttttgtctttggggtttttttttttgtttgtttgttttgttttgtttttttttagacagggtttctctgtgtagccctggctgtcctggaacttactcgtgtagttaggctgctgcctgacttgctgtgtagcatgactttgaatatttgtatctctttaatttagtatggaatatttttctttggataggctcaaaagtcttgggacagagagtccactgaaattcggtaccgcagacttcagcatttgcttgaaaaaagcaatatctactcaaaatttttgttgactaaaatggaacaacagcaattggaggtatgtatgtatgattaactagaaaataggttagaagcattttggaaacagctttttgaggtatagattagtacagttaaatgtagatatttcaattttattctttgagttttaaaaatttattttttgttaatgattttttgtctgcatatttgtatgtgtatataccatgggcatgccagaagaaggtattgggtccccttggatgagttacagatgcttgtgggctaccatttgggtgctgggaattgaacctgggtcctggaagaccagctagagctcttgatagctgagccatgtctccagacttgttttaaccagtcagtgtatagactggtgtaatcaccatcacaattgaaataatgtatgtttccattccaaaaatgtactcttgtgacatcagcaaactctcactattgattactgtactatagtattttatacatagatctttggtttcattttgtttttctatcatgaaactcctaaagccctgggatctccgcagtggtatccttttgaatgctgacatattgacacgtggctggg

SEQ ID NO: 26082 - DNA, 1135 bp, Mus musculus
ggcatgtgtataggattaagaacatgcagtcttggtggctcagtttgtcaaatacactatcaagtataactgtggtagttttcatatgaattacttgttctagtatcttagtggttcttcatgtgtgctctgagtaacttactggtctatatattgtaaatatcttctttctctttcttacctttcctgagacaaggtttctttgtagaccaggttggcttctaactcagatctccctgcctctgccactggaatactaaaagtaaaggcatgtgcagcccacctagtgtagctatttgtttaaagtagtaatggcatctttgggtatatatgtttttgttttaaaattatcaagtgctggtctggtatgagaacatctcaaggcgatacattagtctttttaaactcaataggaacaaaggggaaggcgtgtttagagtgtccctaaggagagaaaaagataactaatgttcatatttatttgttcatgtttaaatcttagattttaacgcctttcctactgagaagactgaagtctgatgttgctcttgaagtcccccctaagcgagaagtagttgtttatgcaccactttgcaataaacaagagatcttctatacagctattgtgaaccgcacaattgcaaacatgtttggatcctgtgaggtaattgtgaatttgaagtaactgttaatgagatgacataacttttttttttttttttttttttttttttttttgtggtttttcgggacagtgtttctctgtatagccctggctgtcctggaactcactttgtagaccaggctggcctcgaactcagaaatccccctacctctgcctcccaagtgctgggattaaaggcgtgcaccaccaccgttcggccatggcataacattttatgactaatttttagtgttttgtctcctcacccattctcagaactttgtgagtaagtaagaccccaaaagcagaaggtactttctgttacttatggttctgctaaacttactggtcatctgtatatcagttgttttgtggtctttggaaataaatgcgtgtttaaaatttacatatctatatgttcaacagcctgggttcatgatcctttatgctacagacaacaagtcagacata

SEQ ID NO: 26083 - DNA, 1151 bp, Mus musculus
ttgtttttgcacagactggccacaaccattttatataagtgaagctggccttggacttcattcagatccttctgcctctgcctcctcagtgcttagatttcagacatgtgctaccacacctctctatacaaaacttttaagagagttgtaggaaatgtgaatcatgttttgtggttaagttcatagttatatttgaacttaatttttggctttttcttgaaaagttaattatatcaatttaaaaatataaataatttgtaatttataacttgtcattgaaagttgaactgttaaggttgggtgtggtaacacatgccttttataccagcactcctattgggaaatagaggcgggaggatctctcagattaaaaaccagaaagaaaaaaaattgagctattaaaatggcacatgattggaaattatattaacattttttttctttcctttttcttgtctacatttaagattgatgaagagttggtaacaaattctgggaagttcttaattttggatcgaatgctgcccgaacttaaaaaaagaggtcacaaggtacttctgactagaattttaggtctttagtttcttatgaatcagtatagttattaacatagatgtgttaaaattctaggttctggtgttttcacaaatgacaagcatgttggacatcttgatggattattgccatcttagaaacttcatctttagcagacttgatgggtccatgtcttattcggaaagagaaaaaaatgtaagacctcacatgaatttcttttttgtgatttctgtcttcatctttgaaataatatgaccaaaaactttgtagtaagattgattaaggataagcattttgagtactaacagactttagttttgagttccatacctatgtatgcacaggcaaccttctgttgcagtctttgtataatagtatcctacttaaccactgctgtgagaataatggcacaataggggttgtattctgctttttatcctagttttcatcttttcatcatgaaaattgtaagcatgtggcaattagtttcctagttggctattattccacccagaacctgccagttaacatctcattgtttctttttatcacacttgtgatgtagcagtaggccattgtatcacttgacaatgttt

SEQ ID NO: 26084 - DNA, 4210 bp, Mus musculus
tgtttatacctttgtatacatagatttggatcagcaaaataaggcttcatattgtttcctctctgttgattggagctgaaataaggcattattaaagtgagctctgtgggtaagggaaagaatatcccacaattctctgtgtctttatataaaattttagagagaggacttgtgacatctcaacattatattagaaatattttacaatatactttggatttaatatgcatttaaaaatgtatgtgttctgatatttctctcttagatcaaatgaaggcttcaagaccaattaaagggaagacagggatattcaaaatactagaaaattctgaagattccagtgctgaatgtttattttaatgtagaactaaatggcttttaaaaactttggtttacatccattctggtaatttgcctgttggctttgaaatccatattgttcactttacttttataatatatcagtttttataatgtaactagtattgcatacttgatgaaaattttgtggattttacttagtataaaattcctataaatttaaatttttcagttagtttttgggactgggtagtacttctgagtttgttattatgtacttaaccattgccaagtttatcagtcttcctgtggaagtttagtgtctcccccaccccctttagtaatgtaattcatgggatttggacttcagttatggagtaggcgtctgatagggggagattgattgaaactgtactttctgttgctgaagtaaagtttttgatttttgggtcaataatttgacttaccaaataaatgtttattataatatgatctggtcacattattttttcaggaaactagtaatttatttaaattagtaagccttatttaatattaggattcaacaatattgtctgaactgacttcgttcttttgtaaggatgtcatataaagattttagcaggaaggcgcaaagaaaatgtaagatattgatgaaaaaacagaatttaggagtgatatattgtactaaggaagaatggaggttgaatggagaatttatagaagggatgcggatacaaccagagcgatatgcataagaaactcaggatacaaattaagggagcataccagccacaaagagaacaatcaaggccctgcccaggagattatatgacagtgaagaagaaatcctgagtttaccttacctaggagaggggatatattcaacaacccatttatttatttatttcctttaaaaaatatttttatgtgtacatgtattgtttgattcccctggagctagagttatagtaggttattagcttcctgacattgttgctgagaaacaaacacaagtcctttggaagagcactgctgagctgtctttttagcccctgaaacatttatctgcttactgattgtcctgtgggaaattgttctactttatgactggggggatcaagacaggtttctctgtagtccttgaactcattctgtagatcaggctgggttaggacttttcaagatctatttgcttctgccttccaagtgctgacagtaaatgcgtgcaccactaccaccaggctaatcttgaacagagtcatcctttcctttctggggtaacagctcttgggaggcatccatatttagtgttaaggaacccagagccttgtacctgctagacaagtacttgactgttcttagacttctttaactcgttttgagagagtgttttaggttgcccaggttgtcctttgttaatatctccttgtctttgtctacttagctaggatcatagtacataccatactcagcttgtttagtttaatagttactctctggagtcaatagaagatttgcatgtcagaaaagtgtatcacaggaactaatataattttgtgattgttaacatgggctctgtagtcagttctgggatcatattttaatgtgatctttgggaaatgaatgacctagtagctatagtttcctgcaaactgtagaaaccataagtctaggcattggtgtaaggattaagttatatgtaatacagctgcaaaataaaattttctttcatctcagaagggggatagtaaatatatatctatctcttaggatgctgccctttaacatgtcagctggagtcttttgaagagattgtatgcttaaagttttcttttctttcttacactgtagctgtctttagacaccagaagagggcatcagatctcattacagatggctgtgagccaccatgtggttgctgggaattgaactcaggacctctggaagagcagtcagtgctcagaacctctgagccatctctccagcccattttggtttttcatttggttagtcttgctgtagttttgcctatataatctacaccagaatcagcttcaagttttgttatttctatgatcatattccattgtttcatgtattcattttattattttctttaaactatgttagataatataaataactgagttttcagtgttgattatttacatatttaaagatgttattttctctattcctttagacattccataaactttgtgggttatattttcacagttatttatctgtttcctaaattttcctgttaaaccaaggatttcttagatacttatcttgcaggtatattacttttaaaagttattgttaccatttacctacattgtgttattttcagaaaacattattagtgtgatgctcagtgcattgtattgcttgcttgtttattgcttctgtgacagggtctcctgggctggcttcacatttgccaagaatgaccctgaactaccgaccctcctgcctccacccatcaagtgcaggcattgcaggcttgctccaccacacatgtatggtgttaacttttagatgattcactttctttttgacttagtacatgatcagttttgtgaatgtcttcatttatacttgaaaaaatatactttttttgattattgctttacaaattgttttattctttaataaatatccataattgcttaatttgttaattttctttttgagaagcttatttgttaaaaatttttagttgtctgttatattctccgtagaattacactactagtttaaagccgccagatacagttgtaggaacagaactgtgatatttcgcaagagttacaagcattctgaaccacgtttcttcagctgaattttctccagtggttttctttatgttgtttgctctgaagaaaattttttttgtttgttttagcaaacttgtatatagacacagaatttgcaagggtatgtacacaccatggctatggttagtcttattaccatacttttattgctttacagtcatttaatttctagccctataaaaagaactacttcacctcaatggtagaggctacagtgagcgcgcacttaggatatcctagatggtctcatcttgcttgctcctggagattacatcacctcagatgacgtcatcccagcctaaaacataccattagcggtaacttcaatccttaattagagatgacttcatcccttccttagtcagaaatgaccttgtttggatagtccttttgttattccccatagaaagaaaagaaaaaaagatgacttcatcccagatattgaaatctccatgccacacacatatggactctgctccgttttacagggcagtgggcgttaattggcatctgttgctttatttcttcatcggatattagggattttgttcagtttctgagcctgctgtgtacttacacacatgacaatggttggcttcttgtactctaagaatacatacatacctaaaattctatgcctaaaagtgatttgctgttgaatgaatatgtcttccccaatgcatgttgaaacctaatctcaatgatgacgttttggaagtgcagtaagagtttgtaaaccaaggtgtaagtagattgccgaaatgcagtgtcggtgggacatatttgcctcttttaccatgtgaggatacaataaaaaatgcttataaatcaagatgtaagtatattgtcaattgcctgacacgtctccaatgctgcataaatgaatttctggcccttaaaagctatctataatttttttctattgtaagagcccaaatggactaagaaagaaattaatgctatcattctaaaaatcagtgtttatcattgcttttcccagggttctcttgattcatataaaccctttcatccacttcagtgaa

SEQ ID NO: 26085 - DNA, 1134 bp, Mus musculus
gagagtggacaaaccatgaaagtgtgggagttgctgggtgttgcgtagcttgggggtaaagtcaacaaatcgatcagaatacgatcagaacttttatcttgacatgatagaggcttttagaatgacgagtcttcccattcacaatccagaggcctgctgtagggcctctgaagaaaccccagacctcacctcagaaagaacagtacagagccctggtgtgactaatggagacccattcttcctttctcctgcagtggtgtgtttgtgaagctgagggatcaccatcgccaccctgaatgctatgtgtgcaccgactgtggcatcaacctgaaacagaagggccatttctttgtagaggatcagatctactgtgaaaagcatgcccgggagcgggtcactccgcctgagggctacgatgtggtcacagtgttccgcgagtgatggagaggacctgccctgtctactgccctccagccagcctgctgcacctggttctcggaatattctggctctctcctccctgacagtcctgtgcttacttagtgttagtcatgcgcaataaacattgggtttcgtctgggctgactgactcccactggcagggtgacatctgcttttatattattgggagatggttttgtccctgtcccttcacccacacctcaatgcaccttcttcacttggagtcttctctgctgcaaatggacattggtccattggaactaagccaaatgtagtatctctgatgttacttggttttacttaataaatttagactttaaagcaatgtgtgacctcttagttgactctgcctgtgttctatgtcttgtttcatgaaatatggagtctctattaggtttggtttctaaagttgtgagagatgtaaggcttttcccaggcatgagaaagctactatgaacaagctgtgtttcttttcatctttgtgacttgctgtaagcatcattgagaacagcaaatattcttagttatttttctgttgctgtggtaaaacatgatgaaggcaacttatagaagaactagttcatttgggcttacagtcttggtagagaggcatgacagcaagtggcgtagcaccaccaactggggaccaagtgttcactgcctgtgtgtgtg

SEQ ID NO: 26086 - DNA, 1113 bp, Mus musculus
gccttaattctctgcccatccctgtgtagtctatagtttacttattagtttgtcctacccacattcctaagcgctagtttcaagacctgacgggtttttatcttgcaaacagctcactgcggtgttccccgcctagaataatctcatgatggatgtaatacattagccaaccttaggaccactgaccccctcgtggttttcctggttcccattcattcgggaagctggacacaggttgaatggatttgtgaaaagtgcagctcctcgcgaccccccgcggtcctggccaatcttttgcgggtctctgcacagatttacatatgaaaggatcatcttgtccctcacccaacacaaaggcctgtgacggccaatgaattgctcatttttagaaatcaaggtcattcctgttttctagaacttttaaaaccccttcttgggctggagagatggctcagcgggtaagagcactgactgcctattccaaaggtcacgagttcaaatcccagcaaccacatggtggctcacaaccatctggaatgggacctgatgtgtgtctgaagagagcaatggtgtactcagatacatcaaataaataaataaataaataaataaaccttttataaaaaggattggggccataactcagtcactaaggtgtttgacttaaatgagcaggaacctgaatttgaccccaaaactcctgtggaagactgagctcaggggcaggcatctgaaattccagctactgcaggatcagaggtcatcaggtcagctggtttagtttgcttggtaaagtcctggggcagtaaaagaccctgcctcagacaaaaggtgggagatacctgaggaatgacactaaggttgtcctctgacctccacacacgtgttcatgcacacacgtacatactgcacccacacacaggaacatacacacacacacacacacacacacaaaacctttttaaaactgctctttggtaaacacataattttactacctcttaacgacaaaagcaaatttacctgctactcatgaattagatatgtttgtctttattgttacataaagaattaagtcctgactgaatatttgatatggtaggacataagagt

SEQ ID NO: 26087 - DNA, 1179 bp, Mus musculus
gcagctcgttttgatatattagccatgcttgcagataaaggcaagccccaaactactcaccttttgcagtctctctgggatcaggaaaagaaaaagcaatcacatgtttgagaagtgggactgtaaatatgtaatgtatatttaactttgtgtagcccatgtacctaccttgtatagaaaaataatttttaaaacctgagcagaaaaggagtaaaatgagggagtcatgaagggtccccccccacacttttatttaaatgaaggaatttcaaataattcacctgcagacttttagcacaaaaatagtccttggaaattgttaacatattcggttgttctttggggaagagaagaccactataataccatttacttttcttttcgaggttctatttatctgcagtagtattaagtcatattgctggaataggttactacccccccaaaagatattattgagaaaaaataaaaatggtctatgtaacctatgaaagtattgcatttaaattgcacaccaagcgcatgtactacgcagacacaggtttttctgttcatctaatttttttccttattgcagtggattgatttgatagacatgttgagttactactttgctgtacatattatttaataaactttattcggaattgcgtggcacctctgtgttctcttccttcattggttcgttcttcccgtgagcccccacccctgttcctgccctctttgtcctaagtcagtggccacctggtttcctccctcgctgctttctcagtagcctagctgtgttcttcggtgaaactaattaaagtgtatcacttgttctgataacaaaagtaatgattctgtgtcttcaggagccaaaaggaaacattatgaaatatgaataagtctcagtctgtgcctcaaagcatggggaaacatggtatttagtatttgaagaccaagagggactgtgtgttttctgctgtggtgagatgcttgggtgttctccccacatcaagtatatcagaacactcagctcacatcccagtccctgcctcccaccaccaccacctcccctgcagccatcctatggctgtgagctgacatctcattcaggtggagcctgctgtgtatatacaggaggtcctcgaagagaaaaaactcaaacctctccccgcttggtctgtcctcctccga

SEQ ID NO: 26088 - DNA, 1903 bp, Mus musculus
cttctgggagctgctctagcccccgctgcttggggaatctgatctggagcatgtccatgagcaacattagccaaaaaaaaaaaaaaaaaatgtgcccagtctttacccactcccattttaaagaggtcccttggggctagataagtcagtccccatccgtgttccacaggtcatagcctgagcatcactgacaactcctgcctctgttcctgagtatcccagagccagcagacctcaagtgctgctagaggctggtctggttttgaagttttccttcagcaccatgacttgatgaagtctaggggaagaaatggtggcagaccaggtgccctagcactcagccttctgggtgatattgcctcttactgccctgatactcagacagaaagccatgccatgtgtgtcccgagcttgggagcaggtggcctggcagatgggctacatttgtgtctccacatgattaagccacaccttggggctctggaagtcacttggagtgtgttcttctcctggtcactaccactggctagccagggttagctgtgcctttcttctctggcttagtatgggcttgatacacttgagcccatagaatacagcctggtttccaggagctctcttagcatgtatagatgcaagctggctgcttgggcaccgtgagtaagatactcgctcgcagacctaggagggactctgcctcctgggttgtccgtggagtctgaacgccacccagaatattgtgttctctggtccttccccctcctcctctccacctcaggccagggtgtcctggtgcacatggtgaggcctccattcagagctcaggtattgctcactggcctgggtatgaggcagcaatcctccttttggtggcagctgtgagtctgtcttctgtgagccccagttatgaggagggggccctttgacacctgggtatccctagttgacatgaagataagtgtggccctgttcccagagctgagcctgccagggtctcagctgagtggacaacataggagaagccaatctagagagaccatgatacgtgcagagggtgtgagaggaagggacgcatttctcctacgagggactctagaaagcagtcagggttccctctcccttggctcacttctgaacaaccggggtgctgggagaccctttgtctgagggcagtttatgtctggaaatattgagattttttttcttttccagattctggtattcttcttctacccaaaattacatgcactaggccacaaataccagggattgtaggtgatatggggtatatactgaaaccctggctctctgcatagagttcagaatcaccccaaccactatactgtcccaaagtctggagtctttacaagtccattcttccgtgaccgcctgctgtcttagatagcatgggaccctaactccccctgccccccaaccaccaccagtcagccacaattctccgaggaggctctcggggaaactgccacaggttgattcacactgaaatataaatggctgatggggaaataaatgtgttgcctcttcccggagacatcctttttaactgagacagagcagagcctttaatcccaagggaaaatggtagaagcttcctgggcagaaagacccggcgagtctatgacctgttgctttgcaagctcagcttccccagccagctgcactgcttgcttttttgactttgtccctctcgaagggaacataggacaaataaataaaagtgcatatgtgcgtttttttacttttctggaatgcagcctttgctctctccgagatgccagccacggctagtgcgattgtatctaaatttcctgaggggtgttttttgattaagtaggtaatgtcaaacacccctttaactacagctagaaaataaaaccatttt

SEQ ID NO: 26089 - DNA, 1131 bp, Mus musculus
tgcatttgtgcacttgatgcatcagtgtgcttttggctggcaagccagaagaccagcagcagcctttgccaataatctgtaaactgcattgcttttcctatgggctggagctttgacaagctgcattgtggctgacttaaatttactccacaccccagttgtggtttggtcttgctgtatattaagtgtgggcccccaagacctggagtctgcctgtaggccacatccccaggttatttttaattgataaacaaagatgccaacagccagtagctgggcagaagagacataggtgcggtttagacataggattctctggcttgaggttggaggagaatgacccagggagtaggggatggaggagggatggaggagaaatcgccatgggttaagtgagaacgtgggttagggctggccaattggagtgaagagcagcccacagaaaacatagtaagtaataacgcagggttattgataagagatacattttaatagcatggagggtagatatctgcccagttcttatgcttttaaagacttagagtgaatataaaggttgtgtctgtcttttattggggaactaagtagtcaaaggtgggataaaaaccctggattgggattaaaattttttatgacacatacccttcagatttcttttcctgccatgattatgttatcccagagggataaactgaagacccactgtgtgtgtgaaacatgtctgaaaattagttaatttccacagaaagatactataaaattctatgaaaaggggttggaggggtggcttaaggccagtgccaggggaatctgacacctctgacctcttaatgcacccacacacctgcacacgactccacacagacacacacctatacacataattaaaaagaagtatccagcaaagagtaacaggcagcacagtgacatttaggacatcctcaaaatgtcccagcttaaagaccagagtaactataactgcaacgcctatgtgtggggcttattcgtcatccatatcccccaaacaccgaggactcgtgggaggggacccgttttgaatcgcatacattttcatcttatttctgtggttctggcatgaagtgcagctgctctgtgctggtttcattcatc

SEQ ID NO: 26090 - DNA, 1199 bp, Mus musculus
ttaaaaagtagtaaaataagacagcaataaagacttcaaaccagaatgggaacaaagaagtaaagagccaaagaaaaaacacaagaaagtcagacagacacagacacagagacacaacacgtttccaacagaaattatataaagacacaaagttagaaaccataatatataagcaaaagacctataaaggtttaaaaaacaaaaaagctcagacaaagcatcatgagaccaaaacttcccaaaaatcccagtgacttcactttgtattgtccatctattgctgggcaaagggcctgcccttaagtatggcttagatactcagtaagactcagttggaggtaactaatttttcctttgcgtaactctgtgtgtggtttaagacaactaccctcacccctggaggagctgggtgggtgctagggttggctggaagaaaggacatttagtcaggacaatcaggcctaggactagggacccaactcacccacagaagctgtgtttttgttttgttttttaatctgctttgggggaacatgttggtcattctgggtcccatcttaaatcccatcaggtagaaagagggatatacagtggagtcttcagggacgcaggtggacatttaatctatccagcaagcatgtggttatgtatactctataaaaagacttggggatttgctgtccacaaggtgggctgtgtgtctactcatccttggagctcagccttgagcgatgaccacagataagaacatgaactccaaggggggttgagatctctgcttatctctccctgtgtcttgatgtggtctctccacttcttaggctccttgaacctgatgaatcttaactatgtgtatggttatacatggagcaaacacataagccaagtgaaaaaaatgcaatttctgggaataataaatgctatgaaagaaattaaaaagaaaagagagagccggagaaagagagtgagggaaagtgaaaaggggcgagagagaccgatttcctatagagatctgaatggaggaaaggaatcagggaggggtggtctcaggaaacagcaagggaaggcagagcctttgaggcaggctgctttggcatggtggagggacaggaagtggggtggtttggctgaccttgggctgggggtggcttagggagggagggatgtgaaatgagatggtagtgtagatgggaaccaga

SEQ ID NO: 26091 - DNA, 1234 bp, Mus musculus
aagcagtttatgtctttgactatatatgtattttacacgcaaaacaaaaagcaaacccaattaaactgctttttatttctgtgtggccttccattgattttcccctccccctttttgtctgaggtcagtactgactctttctagaaaaaaataaaacaacaaaaaaaaccctttttttctaaagtctctgtcatgtggttattgttttaaaaacaaaaccagctataacagcagaacacgtttccacccttatattgtgagccaccagggacgccctgtcccaagaagtgtatcctgtttcttccttcaatggaagaagcattgttaatgtgtttcataagaaggcttaaactgtccaagggctagtggtagatatgggtcttgtcagtgagtctggtgggaagcaggcaggctactgccatccagggagaatttagtgtgatggttgtgtttcctaggctagactaacccaactatctgtagctggacacacaaccctttagaaaagagatacttaccacttttccaatgaatgttgggttgaactcaggcctatcctgtgcccactttaggcagaaccagggtttctctgtgtagtgcttttctgacagcaggctgattcaaacgctacccttcagccttacttactggctttcccaggtcctcagaggcaggcccctcccacagaaaggttggggcctttgcctctttgcagtgcctcctactttcagactccctcgaggtgtcttccttcctctgctcacctgtttctgttagtcttgttgacttccttgttttcttctagtcttcttccaccatattgggagttctggaaagagagaggattctatacctgttacacacacacacacacacacacacacacacacacacacacacacacacacacacacacacacacacacacacacacacacacacacacacacacacacacacacacacacacacacacacacacacacacacacacacacacacacacacacacacacacacacacacacacacacacacacacacacccacacacacacacacacacacacacacacacacccacacacacacacacacacacacacacacacccacacacacacacacacacacacacacacacacccacacccacacacccacacacacacacacacacacacacacacacacacccacacacacacacacacacacacacacacacacacac

SEQ ID NO: 26092 - DNA, 1324 bp, Mus musculus
agcctcaagtatcttcacgagaatctccctgttccccagagaaatttcagctgagaggtgccaggcagtcgggaccgttgtgcgccgtctggcacatggaggctactccaggatctccagagagaacctgatctcgtccctcacttcttggaagggtctgtcttctggacagttcacctatgcttctggctctcctcagcgtttccaaccttagctaatgttcacactccattttggccttcttgggtgtgtctgtctccgtaactggggttgaatctagggccttgcacatggtaggcaaatgctccactgccaggctgtctccctggccctgcagtccagtcctaggaagagaatcgctgttggagacagagaggcttggcttttcccagtctgttcacatcagaggtagaccctaagggacgcatctaccatcagagacaatggaaagtcctggctgccggaacgcctcagtgaggtaaagtctcttggcgttttgactgggaccagcccagccattctcagcctctcgacatgtaatttcatttcttttacgaaagctcgtcttaaggagggctaactccttaaaacctttaacattttcattggaaacggtgactgagacagactgactgtatccactggggagatgaccttggtgtgtctgtgaagttatgggcgcacatcctagacatctgcagtctgtctccggcctggggacacatggtaccttcaaagtagttggaatctgagcatcacgctggagggatgaatttcaggatgttcctacaagtgggaggaagatctacaatcatgcttgacctttttatacaaattattttgacatcctattctcgacctccaggacaaagactagagattattttaatactttagattctccccccccccctttttgagaaataaaattcttataaaagcccatgtgcacagttcgttttctcccttatttgtccttgccgtcatctccactctccctccctggtgacccttcctgccctgctctcagcatgttcctggaagttggcttggtgggtgggaacggtcatgggggagcagtttcaatggaaatggcgaagggaaaccttccagggagggactccggtcttgagaggaaaagaaaacagaacagtgggcaccaagagtttgtagtctgcttatatgatgatttggggctgtgcaagacatgaacatatttgtttctgtcacgtcctccccagcatctgctccaccatgtcaccagcccacatctttggttcactgtggctataactcaattcactctcctgacctgccaagtgtc

SEQ ID NO: 26093 - DNA, 1172 bp, Mus musculus
gatcatttcccactgtggacggttcctaagccacgtgaactggagagagagtttccgtgactcaggtgggcggttctggaaagtgcagttggcatgcgcagatgatgtttttaggtactttcgtgggttttttgtttttttcctttgttttttaaacagcttcaaggaaatagtcacacaccacataattcatctatttaaaaatttcaactcagtgatctctggagtattcatacacttgtacaaccatctccataaacaattatatgttatgttcctcatgacaagaaatctcacacctaagccgggcgtggtggcacacgcctttaatcccagcacttgggaggcagagccaggcggatttctgagttcgaggccagcctggtctacaaagtgagttccaggacagccagggctatacagagaaaccctgtctcgaaaaagaaaagaaaaaagaaacctcacacctattagtagccactgcctgcttgcatccaaatccccatccgtatacaacctccagtctagtttctgtctctgtgggtctccttattagaggtcttatgcgaatggaatcatgaactctgtggtcctcggtaactggcttcgttcacttagtctaatgtgttcaggcttcgtctgctttagaggatacaccaatgctctgtttctttgtattgccaaataatagttctctttgaacataccacattttacttattcggtcatcaattgatgggcatctgtgctatgaattatagtgctgccgggagcctacttttgtatgagtggggttttgttttggttggtttgtttgggttttttgttgttgctgttgttgttttgttgtgttcgtttccatctaagaatgtgaatgttgagcttcacgagagaatgtttacctagcaagaatgggaccctaagccagcctccaaccctgcagttaggagaaagatgtgaggaagagtgggaggagagaagacgtgttgactcgtgtggtaacctggtattaaaaaccaccgtgtttccccacggccgctgtgctgttcggtgttaccacccacagagtatgagggttctaatttgtctgacccttgacgatacccacttgttaacggtgtgtctttctgtgttgcgactgtcttaatgagaagtttttattcctttccttt

SEQ ID NO: 26094 - DNA, 1081 bp, Mus musculus
agtagtgataaaatcttcaaaagacttccaaatgcaagacgacatcccagttccttctgccagtgtaggtgttaatgtgcctgcaaatgatctgaattcaaaatgtaatggacaagaaaaacaaggattgtcagtattacaagatgtgagagattcagaggtgaccactaaaattccaaatatcatcacattacttaagactcaatcagatgcaataataacacaacaacttgtaaaagacaaactccgaaccacaacacaaaattcaggtcctgtatatgttcagaatccatttctaacctcagagcagaaaaatcctgtttttgttcaaactccaaaaggttttattataccactgcatgttgctaacaagcctggattgcacgttttttctggaagaccagttcctttggttaatactcggagtgtgcctgctactctccttgtaaacaagaaacctggaatgcttttggcaactaataatgggaaacctgaaagtgttcccacggtgaagactgagaatgttcatagttacggaactgtgactaaggaaccttgcaaaacaccttttctgaaggcagaacacaataacagttgtcttacacctggactttgttccagcattggaaattgtgtgaacatgaaaacttgctcagagaatacattgccattgaaaggttcttacattattaaaacatcagtaaattcttcagtgaaagctgttcctaacattctacctgagcagcagggccctaagatgaatatcttggatacagtaaagcaacagaatgaaaatttaccaaaagcatctctctacaccctcatgcctgacggtaaacaagctgtattttttaagtgtgtgatgccaaataacactaaactgcttaagcctaagttagtccaaagtagtacctaccaacatattcagccaaagagacctgcaggagcaccacagaaaatactcgtaaagatttttaatcctgttttaagtatgagtgcttttaataatctttcagctagcaactctgcatcctcattccagaaagagattgtaccatctaaaccaactgtacatggagag

SEQ ID NO: 26095 - DNA, 1197 bp, Mus musculus
gccatggacagagacatttagtggaagctactcgggattggaatatgttagaataatatactgtgattaccaaggaaaagatatctcagaaggaaaaaaatgggttggtataattcaggcattttctacattggtatagttttgaacatttctaagagttggttatatttctgtggaagaacaaaagctttatgtgtggtacttggaaataccacagttaacgtatgttttgaaagaaagtaattagcacagaccttgatttagttgtgtaaagatgcatatgtgggacagaagggtaaggaaatttttgacaaaagagttttcccatttgaatttagagactgagtagaagataatggtggacagccctttcttctcccaccagccttaccgacctgacaagagtttctctggaggtgaagaaccttctcacaaatggttccctgctacatataaagatggactgagcttagataaagttactttctgttatagttcatttgaaaggtattaattttctttgaagctacatcttgctggactgtagttaaacttgaaataatgcttgaagagtttagggcaagtcaatgctgttgttgttgctctgccctgtgtcagattggaatgccagttaattgtcttttcctgtggctgtcttccgtcactgcggtaactggggcaatctccagaggagaaacaaacttttttctaaaattcacttgaacgtcaacattttcttgaatttggtcctattttccagtgatccccttgcacagaactatgcttatctgattggaagtgtccataaccaaatgacttttttatctcccttggttggcatcccctcaaaacgaacagaaagaacatagaagcacttcaaagggaatgcttttcttgaaaattaaaactatttttacagagataatattttgaagcaaggttaacaaagcagattatatttttgcttgtgtttaattactgttcttacctaaacatgtccacattaggatagaccattttcaggatgaccaacaacccaaaatagtgttaatagttggtatttgaaaacagagaagcaagcattaacgatggactcagtagcagttcattaaacttgaaaaattcctaagagacatgcccaacaatttcaaaatggattattttcataacaatgcatttaccatatacatttgcatc

SEQ ID NO: 26096 - DNA, 1191 bp, Mus musculus
tttttttgtcttattggataatgaagttatattagaagatgatactctatgtaattttttgttttgttattactatacatgttaatgacattttcattgattagatcaatttcagggcttttttgtatataacaaaaatgtacatatttttgtattgattatgtaaatttgcacaagaagtttatgacacaaaaagtattttctttttagttctctgcatgcattaataaaagtgggtgatttaaaaataagaaaaaaggactgtacccatgttattttattggtttttattggtttttatttctgaccttttttgtttgttttttgttttggttggggacatactttttttttcagggattaaacactattattagcaagtgcctaaaaatgatgtgaaccgtttacacatgccaactgtaacagtaggtcctaaatgggcccattcccctaatagttttgatttaaacaaagccataaatagatgcttcaagctatattgctatgcacattatacttgtactgtttttgtgcagtttatctactttcttagtggaatattttttgtataaaacctgttataattgtgtttcttgaattgagtctgagtggaattgattgaaaatgcacagtatatattgataatgtacatgatgtttaaagaacggtaagcattaatttccttgttcattgttaatgaaggttttcttcaattaaacttaagcttgtgtttacatgagagtttcttcttttttttaactgagctaatggaaattctaatgggaaatcttttcctccccttctgtctatttaatgtctgagaaggctacagaataaacatgggactttcctttttcttcagaaattaatatttgaactttgagaaaggtcatatttagcataacatgtccttggctttgttggggaaagcttttgatctttaggaactttgttgttatgaataggtccataataaagtaggttccctctgtgtctaggagagagaaaaggctatcccagcgtccaaatatatgccaggggctggagagaggctctggttgagagcacttgctgcttttacagaggacccagcttcagatcccaacacccacgtgttgcctcacagtcccttgtaactccagttcaatgggttctgactcttattctccaaggacactacatgcatgtgta

SEQ ID NO: 26097 - DNA, 1093 bp, Mus musculus
tctgctaggtttaggttgagctctggagttgtttgaagtctgcgatgaaaaataatttttaaaagtattaagaacactaaaatggattagaattatcttaaaagatcctttataaaatgacttgtattgattggtttataacttcacacaggggtgacataaatgtatatcttgaaaaagatataggtcacaggtggcttaactctccctagttctcagtagaatagttcaaacaatattacttatgttaattagaaggggcttttgtactccattaatgctgtatttagtttactaatagctgctcagtttgtcagctgatagtctgaatactatcaaaaactaagaacatagttgaagcatgcttcctgaaaattaactacattagaaactgacatccttatactggtctcccaagtacaaaagtaggaagaagccgttaggagctggctagagagactctcgagtgtgctggtgtgctgtgtaggctcccgggccacagtggctgtggagaagcccaggcccttagaagaatcactgtatttgccacctgtacctcacggctgctatgcttgcgtgtttccactgacgatggggcctctttctaaaggcagttgctgcaaattccagttcttccaaaagtcacttgatttaagggttatccacaagttgtgcttattttgatatagcatttgtttcctaaatgtttactaatcactttatgccaaatgtcttgcagatgttatttttaaacttaactgaatttttacaaatataaaaaggaaaaagtatattagtgtaatttgtttaggaatagctacataccgaagggcttctatacatgaattctaggggcaaaagccttttgtagaaacctgcacactgcattccatctgggttttaagttcagatgtgaacattttttagtgcttctttttcttttacttaatgaacatgtgatatgagtagtgatgtgcaaaagcacagacgttcatgttttctatcatgtaaaatcctgtagttaagctgtatattagcagtgaaggtgttagagagatgagatgatggtttgaaagtgtgttgaagactagac

SEQ ID NO: 26098 - DNA, 2221 bp, Mus musculus
tcaagttactctttcctttgtgagctgttaatccacaattactgaccatactaatagtaagtgtgatttgattctaaataatagggtaggtttggctataacagatgcttttaaagcaaatgataccatttaagaaattcagagaggcattacttagaatgctgacataaagacatgaccttgaagaaaagaatagaattctctagagcagagtattttagtatttgtaactggcagactctggttccattgtatttgtttcaaaatgtgtttttgtttgtttgtttgtttcaggagcaatcggttacatgggaacaagtgcctttgttcgaaaaatctatactaatgtgaaaattgactagatatctgagacaacatggaacttcggatcagtttctctttcatgagggtggaacttgcacagaaaagaagaataatcgcaagaagagatttgggcttaacactgggtactttgtgggtctcttttgtggatggcttcaagtaacatctatttccattgatcctaggttcttactgactgctttctccagctgttcacagcagatgcttggattttatgcagtaggctttactacagtacatggctaatcttccccaaactagctcattaaagatgaaatagaccagctctcttcagtgaagaggacaaatagtttatttaaagcatttgttccaataaaataactagagggaaacttggatgctaaaattccataagtagaaaaatcttcctggcacttggtgtttctatgttattgaaaaatgatgttccagaaagattactttttcttttatttttactgccattgttgatgtgttgtgggacatttttatatattgaacctgggttcttttttgatctgttttggtcgtccctccattcaactgcatcttttttttttttaaaaacaaaattaaaagctattcaattctgcatggaatatatctgctgtcatcttaatcttagtttggatcaacctcatttatttatcttaaaattaaccagctttctcagttccatccaaagaagatacagtatgaaagtagaggtgcactctctataatacaatctactgtacagttagcaagcgaagtgttaaatggagaagatgcttgtttttattaaacatttggagatttagataatttacattttaactgaatgtctaaagtgattatcttcccctccctcccccaagttaatcttccatctttgtttttgggtttcaatgaaggctttacataagaaattattaaacaaaacaaggggggcaataaatgtatataacattaataatgtcgcgtaggtgtaggttcctggatgcatttggatgtacagactgactgggggactgtattgcgatgatgattggtgtagaaacgtatgggtctgggtggccttttacatcttgcctaccattgcatgaaacattggggtttcttcaaaatgtgtgtgtcatacttcttttgggagggggttgttttcttcttttatgaaactcctactggagctcaatttgtaatttagaaacatttaattttgttaatcctgtctgggacatttaggtaacatctaaagcattattgctttagaatgttcaaataaaatttcctgaccaaattgttttgtgacagtagatgtgtttataatttgaagatacctgctcagaaggccatattatagaatgtcatttttaaaaaataaaatataaagcatactttcgaaatacaaaggacactcattacaacccccaaactcagatccaggtatgatagtttatgcctataatcccagcaccagggaagctaaggtggaaggttgtttgagtttggaactgggctagagagtgagttattgctcactctgagttctgcgctactctgggggactctgtttcaaggggaaaaaaagaacagagtctgactgcttggctacgtacagtataagtatttcctttctgtgacattgtgacatacaatttaaacactcattgggctgctgtgctgtgtaaagaaagagggactgcagtgtagctcctttagtggtgagacatgaaggctgtggcaatctcaagaaatcattttaatttgtacatatattttcaggttctgcccacactgtgaggtttttctagaatcactgagtttctgatttagtagtttgttctgtagatccccaaagctgtgctgtgtattggtg

SEQ ID NO: 26099 - DNA, 1151 bp, Mus musculus
ctggaagtcaacaaaagcaaagtcctagtttgtaaaataataattacagaggcttgaacaatttatttacgagacaaggtctttctaggtagccaagaatgacctagaacttggtatggagcctgcgctggctctgacttccttgcctccacatcagctttcaaaggctgtgattacaggtgtgctccaccatgcctgacttgaacaaattacttagcatctctcttgttttccctttgaatctgtaaacgtggtgaaataacacggcctagcagttttgagaagactccatgtttacagaaagactttaggcccgcgcctagctcctggagtgtagttataaagtggcagctagcgtcgagctgtcatggaagccgtgcaaggatggtcagctaaagcttcacccgcggagttaagtaaggggcagtaggcatatctgaagggcaagtaggatttgactaattgcagaaaagaagggcattgtggatttcagggaaagagaagaaaagaggtgaagtacatttggaaaggaagagagtgctaaggcattttgactggagcgggcagtgcagaccagtgttgcagtgaaattctgaaggcgggagtaactaggtgaagaacgcaggaagagatcctgactgctctttcagaggtcttgaattcaattcccagcaatcacatggtggctcacaaccatctgtgatgggatcatatgctctcttctggtgtgtctgaagacagctacaatgtactcatacaaataaaataagtaactcttaaaaaataaaaagaaagaaaagaaaaaaggaaagtacccagcacctcttgcagagggccagagtttggatcctagcaccatgtacctcacagctccctgtgccttcagctctaggtagatcccatgcctctggcttccatacacacaaacacataaacataatttaaaaataagtctgatggtgtctgattaatattactatgaattttaaatttatagagaaattaaaaaaaaaaaccctccgtaggttctactgctgggtcacaaaaaggtgatgttggctgccccagacctacatatggctgtatatcatattcaccgatggttagaggtataattcaaagacacagggatgcagggtgagtctttcatg

SEQ ID NO: 26100 - DNA, 1164 bp, Mus musculus
gatgtcctcttccgtctaatgtggaggcctttctgccacaagccactggatccagatggtgtgttgtccatggcaggcagctccctgcagataagaaaggttgggttcgcctgcaatttcttgctggacagacctgggttccagacactccccaaaggatgaattttctcttcctgttaccggcctgtattatcccagaaccaggagtggaagataatttgctatgtcctgaatgtgttcacagcaacaagaagatcctaagaaactttaaaataagaagccgtgcaaagaaaaatgccctacccccaaatatgccgccgtagacaagattttactctgatctaaagggaatggaagaatattctgtgatccctataatggctaaaaacaaacaaacaaaacaaaacaaacaaacaaaaacctggctgtcagtcatcagaagcccctcctcctgtctcccagcagagtggagactctgttgacaaatcagcatccatctctctaacaacagcccgctgcattttaacatctctgactgacagctcctcatggcctcgtgctggattggctaaatgcttagctacctgagaaatgattcggttttactgggtttgttttgctgtactttttttatataaattttcttggcggggggagatggggagcagtttcatattagcaaagcagaaagtacttttttaaaaaaatatataattttttttgagtatggctttatcatgtagcaactccagtggacctggaaattctaggtagaccagacacgtgttgggttttacatgcctgtacaataccacctagccagtactgatgtatgtttgactagtatagagttcattgcttgtgctaaacaacctgggtgttgacaagtgtttatagagtgccatacatttgaaattatatagtatgctaccgttcagattggcttttacctagcaatatgcatgtgagaaatatccatgtcctcgattgatttttcttaatgttgagattccattgtccaagatgtaccttatgaattgatgctattacatgtggatatctggttggtttttatatatccaagacagggtcttttgcagcacaaaaaaaaaaaaagttagtaactgtaaagaataggagagttattaccaaaatctagggaga

SEQ ID NO: 26101 - DNA, 1168 bp, Mus musculus
ggaggacatgtgagcacaggacttaaaagatccttagaaggtgtactgtggatcctctcagtatcttctgtggtgcccatcattgttctagactcctgtttaattgtgagaggcaaggataaaaataagtgcagggcactatcacatgcagcattggaaatgtttattctctatcttactccatgtatgtatgtatgtatgtatgtatgtaggtacgtatgtatgtatgtatgcatgtgttcaagcacggacacactgtaactaaaaatactgaagtgtactggaacaggagggttgtggtttcagttcactctagagtgccagctttgacttacttattaacaatccagtaaaaatctgagagccaccattacaatacagttatctagaaacagaatttaagttttaagtatttaaaccaatttttaaaaattaaatattctaattgtattatactaatttgttctgttggcttataacagttgcctttatgcatctgtgctttggaattttgaatggggagagatttctgtacaaacatttcacacaatatttttgcagggacatttagtcggtctggatgaaccagcttccggagctgggcaagaagctttgcttaagcaagagcacgcaaaaatcattcgactccagagacaagcagaagagttcctcaatgcagtcttttatagaaaaggttggtttcagtggcaaacgacacagctgtctgcttgtcatatattaatttccttaatatagatgtcattttaagttactcttcaaatatttctgtattcctttatcacattaaatttggaataacgttaagacaacccattgtcctctttaattttaaactggggatgagtcttagttaaatagttcagacagaaatgtattgtgaaactttgtagctcattagataagttttagacatataaaatgctacttaataactataaaaattaaatccttaataactataaaaccagctcagtaaattgaaaatctaacctgaaattttgtttgaagtgaaaatgtagttaagtcttacagttgtatttgtaaacatttttgtaagcattgatatcttttaaaatatattttattttgtgtgtgtattttgcttgcatgtatgtatgtgcaccatgtatccagttcactgcaactg

SEQ ID NO: 26102 - DNA, 2279 bp, Mus musculus
ttggagatccttcctcttctgacaggtacccaggaagccagggtttggattcatccgctgcttgctctgaaatcaaggtttctaaaaatcctgctgtaaagcattctaaaagagaaggggactctggtagggtgacatccgagggaccagtgattgacagcatccatccagacaatctggaagaccctgaagactctggtgttagtgagcattcctctgatgaagagaccaagcaggagactgaaggagttggtgtcattacaaggcagactgttaaaaatatgctggcaaaggaaattaaaagggaagagggagggacttacccaaacagtgacccagccactgttggccagccattgcctggggacaatctggaaacccatgtctggtccaagatagatgagagagatgcccatgtgccctcagaaagcattccttgcaagagggatccagagcaggtaaaagagaacccgggacaccttgccatacaggacacagaggctgccgctatgagtgaggtagaccctgaggatacccaccataaagatgatgctggcctcgctccatgtagctcatctgggatatcagccagtcatagtgacggtgctgatgggccaccaaaatcagtaacaaggcctaagagactgccttcttctacctacaacctgagacatgctcattgttcgaatgccttggacactgcaaaaatgacttcagaaaagcaaggcacacaggtaaacccagcagccaaggaaggcggagcttccgagagtgcagagcccttagatgaggaagatgaggactcggtggtggaggagcagcccaagttcataggatggtgtgcagaggaggagaaccaggagctgatcgccagcttcaacgcccactacctgcgggtccagaagggctggatccagttggagaaggaagctcagccaacggcaagagcaaggagcaagtctgacaagctgaaggagatttggaagagcaagaagcgggcacggaagtgtagggggtcgttggaggtgcaaaagttttctcccgttcagatgctgtttatgaccaactttaagctgtctaacatctgtaagtggttcttagagacaacagaaactcgatctctggtcattgtgaagaaactcaatactcgtcttccaggagacatcccccttgttaaacaccctcttcagaagtttcctccttccaccatgtaccctagttcactacaggcagaacgcttgaaaaaacatttaaagaaattccctggagccattcctgctaggaataattggaagacacagaagctatgggctaaactacgagagaatcctgacctgatagagtcagaggatggcagtgacatcagctttggccctagcagtgaagacagcgtggaggaagtcagggaaggcagacatagccatcctcccaccaacttgcctactccagccagcacccggatccttagaaagtattccaatattcgaggaaagctcagagcacagcgcctggacagctcactgtgtggggcttctgaaatgaagcagggccgcaagagcgtgtgcattaacccgctcatgtccccaaagctcgccctccaggtgggtgcagatgggtttcccgtcaaccccaagagggctgaaagaagcaaggggagaagagggaagcagatgccggaaactttgcttaaagtggaaggtcagaacaagcgcaagagagcagaaggctctggtactcaagatggtaaggacaaggggccggcaacaaaagtcagcagaggcctttctgccaagaagctagctgcaaaggacagagccaaccaactctccaagaagatgaccttgaaagcgaataaagtgagagtctgtagaaagggtcctggaaggagctgcctgtcatccaggaaagaaaaagagaatgccaacagaagacctggccatcctgcggcagcctccgaagcgctgacaaagccttcaaaacaaaggggcgcaagagaagcctcttcaaagcccccaaaagtgaggaggagaaaccggaagctgagcagtggtaggggccatgccagacccttagcaaaaagcccagagaaccggactgccccaagaaaaagaaagctcaaggccaaactggactcttcccagggcaaacggaggcggttagaagccaagtgatagtggatagccactgagagcaacgggcccatgagagcaacctttcattttgcattaacagaatctggttttctgagcctctcaagcctttcacggtgtagttacggg

SEQ ID NO: 26103 - DNA, 1111 bp, Mus musculus
gcttgtcacaatatcagaaacaaactgaatcatccaagaagctgcccagtagccaggtagccacctccgtccctgtggcttcagatcagtcagctcaggcctcctcttagcttaaacaagcagtcacagccatgcagaatggactgtgtaaattacactcctgtgtaaattttatgggcacacaacctcgcccttttgcttaccgattgtccatgaagtagattaaatacttagagaaacccacaaagcctaaaataactaaatttacatctttgaagaaacccgctgacccctgcttgagaaaataaccacttttaggaattaatcctctccattccccttctgcctcgtgcctcccatctcagttctgtcctgtgcacacattcgtgtgctcttgctgtaagaggcatgccattgagacagctcctatgtaggctttgaacaagaagtgcatctccctttaaatactttaccccagcccctccatgaaggcactacatcctgtagaccagacttgggagcaaggtgtctttggattctaaaattctgtggcctgacccctgtcccgttcccatagtttgtgatcatagaactgcctctggctgtacttgtttactgaaataagccaagacctctctgatgagcttagctgggggtgcttctggggggcatttagttgtgggaaagtcaaacagcacggaaacaaaagcctagtggcaaccaaagcactgtttataatgtgttcccattgatctgtttttaatcgcacaccttcaaaataattttattaaaggcaagctaacaataaaatggcagtttgtacatcacacttacacaagttccaggctgtgagtcctccctgggcccccaactcaaataagtttctatttattctgcattccagaaagaggttgtcgtgtcagacattttcaaaatggggaccttgtcccctaatgagtggacagtgctgaagaccgaactccaggcctcatggtagacaaggcaggctttctaccactgcacaacgtcccctgcccaaattattttggaccttgcctattctggttatccactgaaacaggaagtgtctatacccaaagcagtcctcata

SEQ ID NO: 26104 - DNA, 1137 bp, Mus musculus
gaggagaaaccacggtggttgccggtatgagcttctcatctggctctcgggatttatgagagtcgcccttcgacacacctgtcaccttctgcacattgacaaaacttggggacaccttgtctttcctcctctccccttctcatcaagcaccctgtgcagatgcagcccctcccactcatctgtaacccatggttctaaaatgcatttagctttgcttctcaggagtcctggtctgcaatccagagcacccttgatatcatggaaccagtgctctgcggtcatgcatggccccctttcccctgtgcttcacccatggacaccccatctgtcacttagtcactcttctgggatggctgggttggcctgcagctccaggactctagggtccttggaggccaggtatgtaggaattacagtcatttatttgaactctagtttgcatatttccttatggcctccctttgtcttttctgaacaaggaaggcacgtgaatggtgatgctggagaaagtttttataagatgctgtttgtaagcaaatctgattctgagatgaaatgtgaatgggtaactaggtgccagggactttagcactgaactagacagtcaaaactttttaacctttgcagaaagtagattctgttctcatctaaatgttcacaagacgtgatgctgtaaatagttttctaaaaaaaaatatttattacatgttctgtatacaaactcatgttctgagtgatgttggtttgcattgtattgtagaagattatattttgaatagtggacttctttcataatacagttcactcatggagaaagaaacaaaaccagcaggttgagagctgtttggggcatttgatctgtaatggaccacccaatccaagctttaaccgcccccctcttctcccctggttgtgttatatatattatatatatatatatatatatatatatatatatacaggtgtacagtacaggtcagtgcttgggtctgcagagcagatttccaggtgtcctttctgatgtgttcccatagcaatatgaccccgggtgctgaccagtcctgtggtctcagaggatcaggttgggggacagctcttgcaatgcctcttgcctttcctaaggggttgctttacttg

SEQ ID NO: 26105 - DNA, 1144 bp, Mus musculus
tgtagggcaggggctacggatccggctccagattcagggagctgagtctccactgttccttaagtttttactggtccctcccggtggcgttgccaaggtcaatcttgtaggtgtttggatgtgctccttttttgctgtcttgtgagtcgtagccagtgctccaggagcccaagggcggggcctctggagggtccaccctcccttaccccagcgcctttcagactagtggagcgaaaagactctgcaaatggccactggccggacagcacgtgcctctgggcctggattccactgttagtgagtgtaggaaaatactgtgtctttaatggatgaaattcaatgtatgctgtgaatttgttggtttgaaacattgaaaaattttcattagacaatgtttacatacctcacctgaagaacctttgagagtgtatatatgaaatttaaaaatatattaagttgctttaaaacagtatgtatagctataaaagttggagttattttaactttgagtatgtaccaagtctcttaaatattggaatctcgtagactttctggcttctgtgttttgctttcctatggaccacatagataactgtgtttttgttcttgataaagggggcccacaccgacgtccaggcttggaaggattttctggtttggttttgaggggaggggtgtggaactagagggtgtgtgggagggatttctctaaccttgacatctgtgagctttttcaaggcgcttattttattgcagcatattaaagttctttgatattaaagtgtgtttgtgtagtcactgcagatggggaggggacagtacagcacagtcccctgcctcactagtgtgtggctgaaagcagactgtcagccatggggctgggcactaccctaaacgattaatgaccctctgagctataccttactcaggggacggatataaatataatggaagcatcgtgggagtcactggacggggcaggaaaggtggatgtgcaacctgaagggaggggacaagccagccagccaagtgctgtccacttctgtgaccccagcaggaatgtgacagaaaacaaacctcgcacttgccagaacgacttctgcgatctgacttgttggatctgctggaagtgagtctgttcaaa

SEQ ID NO: 26106 - DNA, 3129 bp, Mus musculus
tgtggttgttaccttggtgatgtgagatggctgtgtggttgttaccttggtgatgtgagatggctgtgtggttgttaccttggtgatgtgagatggctgtgtgtttgttaccttggtgatgtgagatggctgtgtggttgttaccttggtgatgtgagatggctgtgtggttgttacctttgtgatgtgagatggctgtgtggttgttaccttgcttctttcattatcatcctctcacctagaacatggctggtgccactgatacactctgtgcctggttactgtcactttggaaatgtcatgatctgctacttagaggagcttgctgcagtgtgcatgtggtgaaaacagaagcaggccgaggggctggttggcttgggtaggatgctgtcactcattcctagggatcaaatgtgctgctcacctgtctcctgagagcaggttggcatcaggaaaggcacgagtggcagtctctgcagggtccccagagggagcagttgttatgtgtccccgtagtctagaacagttgcttcctgcccatctccttgtctggatgggtacaggaagtggtggagcgtggagagccactgtctcctgagccgcaggtggcagttgcggatgctgaggtatgggcctggctctgtggaactaactgtgaaaccatgctcaccctactgtggggaaccagatacccagcaaaatacggttccacactgatgatagacagttgaacttgtgttattgttgagatgaaggctgatgttgtctatctgtcggccctctcttccatcctacactgtttcattgctgtaacagcagtgctgaaggaaatgtgatgttttcccttctagctggatagtttgggagcatggaggtgtgtgatctatagtggattttaagttccattctctaaagcagttttaggtcatccttaaggatctttattagcaaattcatttgtctaggtttctgactctttctggtgatgttgttactaagaaaaaggttcttttctttttgaaatatatttcttatgccaggtatatagtgaggtcaaacagaaacctcctttgtgttagcaaatcagagatgttctcctcagcatggagcctgctttcagtgtaccccaccatgctggaatgtagcactatgcagggatgcaagccaagcagtgccttgatgcagccaggagttacacactctgtgagcaagaaagagagagcgcgggactgaggagcctagtgtgggtagagggaagcgatgcccagggatggtctgggtgagagagaggtgccccatgcgcttgctctctgtggctggcctcttgggcagtgagttaccacgtgcatttgggaatgtggatttcatttatttattggatagtcattacttgctgtaagggtattttaggtcattttttcttgtagaagctgtgatccagtgcagaatagacttgaggaaaagcataaccttttgagtcttgtaacatgtggctttgtaacctgtggtatcttcttggaaacgcagacagaagctccatcgtcgtcacagaaggttgctgccgtccttctgacaaggcgtacagttgctgttttgagccagtatttaactaatgtttttaactaatgtttgtttgagacagggtttctctgtggtcctggctgtcctggaactcactctgtagaccaggctggcctcgaactcagagttttcctgcctctgcctccccagggctgggattaaaggcgtgagtgtagtcactgcctagctgacctgtgtcttaagggtttttattatatttattttccatgttggcgtagtctttgtgacagaacctttcttttctttctgggttaatcgtcataggctttgatgttgtgtcaaagtgtcatctggtggttattgttgccaactatgaagagacagatcctatctgatctgtatctgcactaggtaaatgaatagaggctgtgggccctttctctgacgttccacagaagtggattttctcactgagaccagtgatcaggtttgaacccgcccccgccctgtccccccattccccatgtcacatgcactgtgtagggcacaggtgggagacagtattggttagaaccaagtgctggaacattctagaagcacagctgatggggcctgagggaacccacagtggtccctccacacagcatgtgctatactctgaaggtcctcccagagtcagtcaggagtgatgaggaaacaccctgggggatgaggcagcacaggatgctgactggcaggttgtgtgctgaggtctcttttctgtgacatcctttcctctggagacagcatcatccctgctctcctacactctaaagtcttcagactgaagtgagggtccagatctaaaccagcaggactgtcccagagtttgcagagaatctggcttcctaagatgaaggttttgagtgaccttagtcctggtagcctgatgtcagactccctgtcaaaaagctggctttactaggcagccagtgctgaaagctgtgtggaggtagggcagtgaggagatggaggataaataataacctgagtgctttgtcaccatggaaactggagttcctgaggccacagcccatgctgaagagcttttgagcatgcccctgacatgcttggtccagaggctatagagaaggagtgctctcacccaaggcctttcagcaaggcgtgcctgtgcacgctctgtgtgctcgctcgctcatttgcttgctcactcgacccccaaaaggtttcttaggagaaggttgtacctatttgttattttttattattttgcatatatatatgtaattgtaaagaaacaatcatatatattgtcttttatattcatgtaatattctgaattaaattttttctgtttcatatctgtgggttctgactggtctcttggctcacgttgctttgaagagaggtagcttcctgtcctaaggaacttgatactctacaaagggctcgtcctgggttttctaatggagggaggggatgtgggtgggttcaggatgagtgaggctttggctgatggaaatttacttagatgaggtagcacacatctctaatcctagtacgtgggaggcagaatactagggacga

SEQ ID NO: 26107 - DNA, 1129 bp, Mus musculus
atgcagggtctcagatctgtcattgaacttgccttcctcagtcttccacaagctgggctcacagtcctgcacctccatgtatcaacactataaggagagagaactgcctgttctcagtgagacacagcccttttgttcttgtcttcccgcaggaagaaggtgaagctccaggggcagtttaaaggtctggtgaaagccacccagcggggatcccaggcgggacacaaactccgcagaaaggatcggcggcggccctgaatccctctggggaatggagctgttctctgctgtggtccagggcccctttctaactcccatgatgtttaacaccaactccaggtgtgagccttgctaaacctggacagagaatgactcattggaagcaggactcatttctaagagagatagatgcctaggattttggaaactattgtcctttggagacattgccaacatctaggagtggaaatgtgacgtcgctacctctgagaaggccttaagtggtgctctgctttctgtccaatgtggccatgagagcagagtgatgactgtggtctgcgtgtgtaagatctgctctaaccaggcgtagaataaatgtgcatgaccatgtttcagccctgatgagtggcttggccccttcctatccaattcccagtagtctgtctagcctgtagccttcacctgtgtcaggaggactccctgaatcagaagtggcagtaggaggtggaaggcgcagagggtactccatggctggttgctagatcacagggtagagcgccagggccccggaccaggcagacggagaccatgctgaccgctctcagagctgcatcttgcgctgcccctgttcataagcctctgtcaacatctctgtccattgactcagcagagctactgagcccttcctggcttcagcaatcatcaaaggaaccaaagcagagaacgtagaggaatgcggctctcgtgtttgctcacaaggcttgttctcttatacctcccaggaccacctcccacatcagtcagtaattgagaaaatgccctcccgagtgcaggccgtcctcctgatgactcaagctatgtcaagtagacacaaaactggccggcacacccatcttccctcactcttttt

SEQ ID NO: 26108 - DNA, 1193 bp, Mus musculus
agttgtgagatgccatgtgggtgctgagaatggaagtgggtcctttaaaagaacaagtactttgaatcactgagccctggcctcagcccccttatatgttatttagtggtggtgagaatggtttggaaatccagtctggctttgtccctgaagctatggctcctgtttccagaccagcttctctctgaatcctctctagtagatgcttggggaatgtcacaggatggagtggaacccagtccccttccttattatctccacgtctcgtttgccctctcaagagcaaggtccacggtgtacagaagaaggcctaccgcgtgctggaggaggtgtgtgccagttctcagggcccggcagcccgcttcgtgcagagccacctggatgatctgaagaagactctgctggactcgcttcggaccacatcctcgcctgctaaaagggtaagggttccgggctgcctcgtctgcaagggagggagggcgtcaacaggcacgcccaggggtcagggtgacactggaggaccccggtgttgttgttgtgcccacagccccgtttgaagtgcctcatacatattgtgaagacgctgtcggctgagcatgaggagttcatagctgccctcatcccagaggtgaggggttgtggagggatgtgggttgtggtttcttagtgtggattccaagagaggcccgaggagggagggctgtaggtaacagtgggagcacacgctcccttcactgcctagtgcatgtgtaggcgtgaagagctcacccaggctgcccctcagttccatgtcctgacaaaggctgtttggccaggtgatcctgtgcaccaaggaggtgtcagtgggtgcaaggaagagtgcgtttaccttgctggtggagatgggccatgctttcctgcgatttggctccaaccaggaaggtgagagtgtgggctgtggactgagagctggggtggacaaactgccttggcccagagaagacttttttttttttttttttttggtttctcgagacagggtttctctgtgtagccctggctatcctggaactcactctatagaccaggctggcctcgaactcagaaatacgcctccctctgcctcccaagtgctgggattaaaggtgtgcgccaccatgcccagtgagagaaaagtcttaaagcctctgtccagtcttaagagaaaaggtgga

SEQ ID NO: 26109 - DNA, 1404 bp, Mus musculus
ttttccacatgtacttttgtagggatttctgtagtgtaactttctgcagtttgttggtggctcatcttagaatcttgtatactttagtcactctttctaatgttaagaggcttgaaagttgtaattgggggctggtccatggggcactagatccactaagatccactagatccacagaaaggatgttttgtttgttcctacttaagtgctttgctattagtagataaagagtaaatctataggggatgtggactctttcttgtggctgaaaatggtggctcttttaggtctctcagaagaggccatcatggagctgaacctgcccacgggcatccctatcgtctatgaactggacaagaacttgaagcccatcaagcccatgcagttcctgggagacgaggagaccgtgcgcaaagccatggaagctgtggctgctcagggcaaggtgaagaagtgaaggcgaagaggcagactcctaccccgacaccctccctgcctgttcctgcctcctgcaccctccccagcacctgccacactgactatgtctttaggattttaagtttaagttgtagctgcagatgggggcctgtggctcccgttttcattgtagtattttatcccctgcacccactcccttcatagaatctagtcagaataacgcctctgggggtgcaggttctcggaccacatcgagggacagctccctgtaccaggagagttgagagatagtaactatagtttttcttaggtctttgtttactaagggtctgcttaggaagaattcagggaggaactgtgctgtggtgtgaccaatgaaaagctgcagtccagttttgtccctggaacctgtcctgcactcttcctgcagttaggtaactgggggcatagtcattccagtggagagtggaagtaacctcatggtgatttttaaccctaatttctctctgaccctaaaggagctgctggccctagaaggttgggatcaatcttgtcaagtctatgttacacttacttttacaaaaaaaagtatatatacatattatcagcacacaaaagcaactctgaggttgctagtgacatttgaaacagtcctgtgtggtcaccagaaaataagccattcctcatatcagtgggataaactccttgtacctcttgctgtgtttggatcccttggccttgttttgtagaggtgaagtacccctggatcatgtccgagtttttgtctttcactgtctgaatcatgttccagctgcttgaccctaccgtgtgggttcagagctcgtttgggcgtaacaactaagtctctttccagatcagtataataaaggagtgatgtgcaatactttactgtttgtcttgtgtctgtggtctgagaaaaccacagcattcagtttgagatgcaca

SEQ ID NO: 26110 - DNA, 1228 bp, Mus musculus
ttttcactcagctgctcatgactgggtattgatttcctttacccttaagccatctccacagcccatgctgtcactattgggtgaacttgcagtgatatttctgactccatctccccaatgcagggattacaagcatggctaacatgtcttctgttgtctttagcagagagaagaatctaagtagtagcgtgacttttggatcaggtgtatttacctagtggccctcattaactatgcccatcaccaacccatccttttgtgttttatctgatgtgtgcctgcttccctctatgtgagtcgttgtgtagcgtctctggaggccagaagatggcattggatccccggaactggagtcacaagttgtgagctccaactactctcagccactggtctcagccactcttttgttttgtttcttgagacaaggtctgagtactacataataaacctctcactaacatgcattatgtttagtgaaaactgttgtgcctgtgggtgactcaaacagcatgtgagtggctctgaaaatgtttagtaaacatagttactgtgacagagtaggcatccctgaactgttgactctgaattgacaggagaggcaggatgccaccatgtgagatggttgaggattggtgacaagaccaaaagaattgtgaaggaatttggtaagcgtgaaggtgatcctagtgcgtggagatcagaaatcacactctgggtttggggaggaggaaagctatgagctagctaagcatgaagacactgcaggggtggctcttgctgacatgcaaggaccttgaagttcagtgtgctttatccatgctggaggtgagctctgggttcaacctgcctgggtccgtgagctctggttgctaactttcagcaagttagtatgttttatttagttttatcttttttaaagaaatgacttagtatgtgtaagcatgtgctgtgtatataagtgtaggctcgtgcgtagtcagagggcagcttttgggaatcagttcttagctaacttggtttttggtttttttttttttttattagatggccactttttaaagttatgttgtgtaattaaaattgtataattgtgtgcacaagtctgtgccacagcacgtatgacacagtatgtgtttgaaagtcgaaggacagccatgtgagtccgttctctccttctacctttctgtgagttgcagagatcagcctcaggtccccaggcttgcacagc

SEQ ID NO: 26111 - DNA, 1099 bp, Mus musculus
tattacattttttatgtattaattgcttgccacaatatgtctgtggaagtctctccttccaccatgtagcttccaatgattgaatgctaatcaggcttaacagcaggtgcctttacccactgacctgctgatccagtttgatggcctgatagcatgttcttccattgttctccatgtgtatgtgtgtgtggtatgtgtgtacatgcacaaagatatgtatacctggaggtcaaagaacagctaaccaagttagttgtaccaaatgggttccagggattgagctaggtcataaatgctttacctaaggagttatcttgccagtgcttctacttcatttttttgaaacaggatttcccagggaacctcaaacgtgctgctttggcaagatcagctagccagcaagccaggtgctctgtctccactcggctgcactgcagcacttatagtacctatgggtcaatgggactaaaactcgtgtttctcagaaagtactttcccacctgacctatcttccctagccccaacccttctcttaggcagatctctcactgtctaacttagactggctttgaagccccttgcctcagcctcctgaatgctgaataggcttcagtcatcacatcttactatgtaagctgatgtacctactcatttgagttagagattgaattctcaaactgaatgtctaaccccagtttgtctcccacacattttctttttttatttctatccccagatgtgaagccaaactatctgaagggtctgtctcacgtactcaacaggctgcccaagcctgtgcttttaccagagctgcccacagtaagtcctgcagacaccctcagcaaaggagagggctgttcccatggctacagctggtagagggagatccaagaccataacgtgcatcctattttctgttgttccttagcttctttccttgctgctggaagcattatcctgccctgactctgtggtccagctttccactctgagctgtctccaacccctactactggaagcacctcaaatcatgagtcttcatgttgacactctggttacaaaattcctgaacctcagctccagttactcaatggtgcgt

SEQ ID NO: 26112 - DNA, 1197 bp, Mus musculus
gcctttaatcctagcactcagagggcagaggaaggccgatctctgtgagtttgacctcaacctagtctacagagagttctaagacaactagggctacacaaagaaacactggctcaaaaagaaggaaaaaacaaaaaacaaaaacgatacaaaaacaaaaaaagaagtcctgtccaaccaagtgttgtaggacttgggtcttgctcttcagcaaggtatccatgatagcccattctcgtggagcttcctgctcccaggccttgggaagagagggatgggccaaggctctgctaatgctgttcattgtccccagtagggtggccgcactggaggcatcaggaaccctggccactctgtatcctggagccttcagcagacacttgctccccaagcttgctgaggagctgcataaaggtatgtgtcctaactgttccaacccttgccagcagggctttctgagagggccttcacaccaccacacagggaaaacttatctcaccaattgctttcaggggagtcagatgtggctagagcagatggtcccaccaaatgttcccggcatttccgctgtctgcaagctttgtcagctgtttcaacacatcccagcattgtcaaggagacactgcctctgctactgcagcatctctgtcaagcaaacaaaggtaagtagcagtaacactcatcaaggggcaggactaaatggaaccctggtctagggcctgtaagttgtaattgtagttgtacgtagcagtgacatggtaagctctttaaaaccaatatctagtgattgtttatatggttatattaatatagctatacagtaagcggatgtacatttatggttgtacagttcggtgtttcatccaaatacaccataagaaaggaagtggtctacggttagcttacatatcaacccttttggtgtctcggaagtcttgagagtcatttctagttggtattttgcaatattctagaaaccgttgtcatccttagttatcctgttgaacactatatctcttgggaggatcctcggggcttcctggctcaccctcgtagctgattcagagaccgtgcacacccacaaaagctattcttctaatcccgtgtggcacacagtatctaccctctccctcttctccctttcacttcctttccggtaaccaatatttgaaacatgaaaaaaaaatttttcttgtg

SEQ ID NO: 26113 - DNA, 1137 bp, Mus musculus
ctcagctggtctttcttccaggctgcttggttcctctgagagcgtctcacaatttttactgcctatgatgtatacttggggagagggagagactagtgaatctggtcaatttcaaggacttcttaaagatattttaagttgtttgtttcctgtcttagctagcttgcctggaggatagagtactttatctccctgtaaacattctttcttaaaagacccagtttgacatccccatttatcctgggtcttaagcttctccaaaacaaaaggcttaattagcctctgaggaaactgctccacagcacatgtgcatgtgcaggagttggctctcaccttccaccatgcggatcccaggtcgtcagcctcggtgcccgcttccccacactgagccggctccttagtctgtgtgtgaggatagctggtacttaggcgccgtgggatacaggtggatatcagagggcagctttgtggagtcagttcttctctgcactttacatgggttctcagggttggactcagctctagacttatgcagaaagggcctttacttggtgagccatcactggctccatcagtcggtcaatctctctctctctccatatatatatatgtatatatatatgtatatacacacatacatacatacatacacacatattcatacatattccttgctcccttccttgttttgttttgttgaggggaagccctgaacacattgggggaaattctatatgagcttcgttttctaatgacttacatggatagtatgggaacttcttaaaatcattcttattttgccaatcttctttaaaaaacaaaacaaaaaaccttagggactgcctagcacaagaaaaaaaataaaagaaaagaaaaaataaaaagaaaaaagggggaaaaaaaaaaggactgcctagcagaagtgaactgagattatcaataccggtaccatatcccttttgagattatcaataccggtaccatatcccttttgagattatcaataccgataccatatccctttgacctcctggtgcagcactgaggctctcaactgcaccaccgaaactgtagactcctttctgacccagtgttgaaaattaaacttgaaggctctgctacgatgaaggaagaata

SEQ ID NO: 26114 - DNA, 1198 bp, Mus musculus
ggaggcctggctccagactggcctctgtgtcttcttatccctcctcggtgtaagagtgtggttttcttctccctcagctttagctgcgtcttccttacctgagttacagcagacagcccaatccccgtcggtgcctctctccccccttagacatcagacaggatccctttatagaatagccaagtaagaaaccagtgtaaaagtaacttatgacctgcactcctgactcactccagggtgaagggcagacctatccaggctttctgtggaatggcctggaatcccaggaaaggcctgcactgagagctccttcccagcgtaccattggatcaggctcactgtcccctgggtgttcacagacttgggtccatccaagcgtgagaactgtctagcatgggcttctccttttgactctggaagcaagagtcttggccctcaggcctgggacagatcttcctgccaaaatgatcataaggtctccagttagcctagtcccagtcccagccctagtcccagccccagccctagtcccagccccaggtcccatcctccaatctctctcaacagcagactgtggtggaaattatagctgtgtgcctctatttattatctgaactgtactgtagaaacaagtgtttataggaataaaccagtcaccagaactgcctataatttgtgttatgaactttctggacttgggattcatgaatgtcaacctgtttaatatttatggaaacagctgatactgaacactttgctatgtgatgtcatctgtttctcagaacccctgtggggagctggagagaaaagccagccagtggaatgcttgctatgcaagcgtgaggacccgagttcgatcctcagtgcccacgtaaatagctggatgtggctgtgcatgcttagactcccaggtccagggattcaaagacaaagtatctctggtgctgactgtccggccagcttagcctagcctaactagtgggtcccaagtaccagaatggacagctcctgggggacacagaatgtcgaactataactacacacacacacacacacacatacacacacacacacacaccctctgtgaagtagaaggcatgaagtttttaaaaccagcaggttcaggttgtccaggccagtaagtggcagactagatggggtttctgtcctacacattctgattataattcccttccac

SEQ ID NO: 26115 - DNA, 1358 bp, Mus musculus
gcacaatggggggacaagagtgttcctggaccttcagagtgttggggaggctcctgtccaggcaaggagctcaggcggctgaggaggagccactccctcctagcatttggtggctggttgggaaagtcccatctctccctgacaaccctctccatccaggttacctaatatattctgcatcagaaaccaacaaaacaaaaacaaaagaaacaaatttaaatgcttgtaggaaaacctacattagatcctctgacatcagaagcccttaatctagaacctaaatttgctcagacacaggcgctctgatacctagcacttgtttactccatgaactgagcggtcagaggtccatcgctggcccacggacagaagccattcctttctggttttgccaaattgagcctcctcttgccacactggtactgacttcgtgtggcagtgagcaggttcatgctctgctcctctaaggctctgcacacaggctttttctctgccctgctgtaacttgcccggcactcatctgaggtgggaggggctagccttggcagtgtgctctgccaggagtggttgtgtgacgcggaggtgattgacttggcctggttgcatgctgggtgctaggagggttctgtgggagcctggcacagcctcactcctggtccttagttgcggccttccctacctttctgtttggtagtctagtttcccccattttaaaatgagaagttcagtttgggttctggagtggctctcagtaggtgttgtgggtcagtaggttcatgggcagccaggacagcatctctgttcttcatgtgttaactgctgctgcctggagagaacaggaccgtgttctgccccctaaccggcgtgccccttggctcctgccttccgtcttgggatggtttcttctcagcttcttgaagagaggccttcggacagttccccagtgcctgcccagctcagcgtgcatcttcctgcttccatgtcttctcccttgccaggtgtttgaaccctttctacaccaaagcagagaactgacttcaggagggagtgaaaagggggccgagaggccgtaggcagcggcagtggtcacaccctgtgctgtggacccttgagtgttctcacactctacagttggtcagtcagccttggaaagaaatgtcctgaaggcgtgaaacaaccaaagacctggagtgaggagcacaactgtgcctcagctgcttgccgggctcccaccgcctagaggcagggctgaagacagccttctgtcaggtgtggcaggctgctccctgcccattccaacccaggagccagcttgctatgggctttcactcagcaacatgaatctccaagcactggat

SEQ ID NO: 26116 - DNA, 2105 bp, Mus musculus
agcgcctctgaaggatggctacaggagtgtttatgtctctacttttcatttcagagtaccagtgatggggactccagcctctgtcgtgagcgagccacccctgtggcaggtttcaacacctcagacccggggccgcaagcaggcctctgccaacatcttccaggatgctgagctggtccagatccagggcctgttccagcgcagtggggaccagctggctgaagagcgggcccagataatctgggagtgtgcaggggatcaccgtgtagctgaggcgctgaggaggctgcgcaggaaaaggccgcccaaacagaaccactgcagccggcttaggtaggtgcccaggactggagggccgagggtgggggagaaaggatgcctgtcccactgctctggctgtgtggcctagagccggtgacttgccctcattcttcctgtttctagtgctttggtgctggtacctcaaagactattgttattgttagagtcatgtgactctgtaatatccataggaaagaaaggccagtcaaagcagtgctacggtgtttctgtgactcttggccagctagaagggagaactgtttggaaagaaataaaaacttaccagtagtaaaattcaaaggcaatcctagttaaagccttatggggaactagagagataatggtctaagattatgtggagagtctaggtgacaaagcagtagagattatctctgaccatctacctctgcccacgtcactgccagcccaggaatagtgagcctcgggggacccaggtaaactacccggctttaaagccatcactacaagtttctctctaggatcttcccctcatagtctgaacagatcctccggtctgagatggtgagtgagtcttcactgcttgcactaactgatgtcatttatgcctgtcttacacagtgccataaaagccaggctgagaaagtagggaggagccaggcggtggtggcacatgcctttagtctcagcactcaggagtctgaggcagatggtctacagagtgagttccagacagccagggctctatgaaggagaaaaagaaggtggggagagacttgttgagtgtcccaccccccaatccagccccagcctcttaacgttcagttttggaaaggtgccatacagttcttgggggcagaccgtccccttttatagaccctcctgctctctgtgctgacactgacctatctatcacacacttgttttcacagagtgccggagcctggttctacagcgtctgacccccaggccagcaccactgacacggcctccagcgagcagtctgggaactcccggagaacaagtgctagagccccccggaactggaataagccaggccccacaggttacctccaccagatcagacactgactggtgaagggtggggaggtcctccccaaacactgcagggactttggccaaagggcttatggagttgtaaaaaggacatctgagcaggccctgtgtaggtgaagaagaaagtggtaattggaatgccctgagttcagctcagagccagcatctgttggactctgcacttgtgggtccttcttaccaagggaggcaatagaggctggtcacgcatcagcctttctgacctaaaggtgtaactgggctgcatggcgttcctctggaataaaagtattatgcactcaaatgcagtgtctcaccatctctgcatctcactaacttgacagttaatgtcaccacccagccatctgttttgtgccacaggccagtgcaaaagggaaacttgtttaagtggaaaataaagacatttgcatcaagatttgtcagagtgtgctacagaaggggagaatcccaaaaccgacatagccaggtttggaggacaggatattctccaggacatagatctgggctggatgcttgtgcttctgtaattacagccctgggcatcctggtactacagcttcctcttccagaggtgggcagggtgcaagaaaaaatgaggtctctgcagataggcctgatccaaaggagcagaccaggggaaggggagacaggtcagcctacatcagctccacactgcagcacttgggtcctaggtagtgtgtgtagttgct

SEQ ID NO: 26117 - DNA, 1152 bp, Mus musculus
ccctctccctgcctgcgtttccactgcccgcgccctggatccccgacgttcagttctagtctgactgctgtaccgcagctcagcccagatatcagcttccagggacccacgcagccatccgaggcgccgacgcacacacccagttgggccgcttcaggcgaagcctggaagtccctttcctcattccctgtcgagagctagacgtggacaggcgccgccgcgtagatccgggggaggctcccaaattggaaccagtctttggactgcgccattgccccctccctcctgccctgcagtcggaagagcatcccttccctgccccctcttccagcctagggaggtgtagaatgcagtcaggcagctgcaagaggagctggggacaggctttagctagtgctaggatggatgatggatgacgtctttagttgtagtttggctctctccctgcgcagccctacgtctacgaagtctttgggtggagtcagctacagaagtggtggatagcaaaggcctgctggctataccttacttaacgacgcaagtcttctctccgcctaaatccttggtgttcattcagattgggccaactgtactaacttccctggcctctcagatgtcactcactagcttccgccgcactccacctataaatatgtttgcattggggatcccacgtggccaacggcgatcattaaggtgctgcccacctctttgggaacccagatcccgctcttccaaacagctgttctaatattagaagcacactctttcctctaaagcagtgggttgtctagggagccagtactgtgttacttcccaaagaaggggtagaaggcaaacgggtctgtcaatggtgctgccttcccgagcacattcacaatgtttgttagcacaatgcggtctctctgagaagttctgcaggtatcgcagccacacatggtaattcagttcactggagtaactattgggcctaagccatccccaccgcaagactgtgtctatgctgtctaggtcatgcctacaggttgacccactgaaaattaggaagctcttttttccctaactctaactgggggtccacccagtgacaaaggagctaggaccccctccctagctagagacctgagaagagttgaatattcattcacgttg

SEQ ID NO: 26118 - DNA, 1547 bp, Mus musculus
tgttggaggttatggagggtagattatgagttcaaggccagcctgggctacatagttccaggccagctccagtcacacagtaagaccctatcctccaaagaaacaaaacaacaagcaggtttgttgttgttgttgtttgttttagttcctctaggaaaccccagagcatggcctcctgtgttcttcaatgtctccagctagctctgctgcccagctccacaaaggatgattttccctccttcctttcccaccagagacagtagtggtctgtgcctggggggagctttgctgggacaccttgatagccagtgactcttgttcttatgttgcaggtttccatgttgctgaggcctccaagattctcagagcagtcagaatggccctgcctgattggctgaactggtctccctgggaccagcagaaggtttggcagtcttcgctgcttcggggcagtggggaacaaacagtctcttttgcaagtgtctagtggaagagccgtggtagagaagacttgatttctttcttgatacaagaggattcccaagctcttatgttatcatttaggcacaagatctggtcacttgggactgaactctgcccatctcccattgcctaaatgacaggtgtcagttctggctcccattccttacctgtttgcctttcttagatcaccgtctaagctcaggtccagtcccctcaggataggctcagtcccagcgctctgggtctgaggccagcacaccttactcaggagcacacgtcttggcctctctggtgcctcatctaccctcgcgtgcctatagcactcgggagctcacgagctcttctccacgtgccttccagctttgactccagcagcgggcatggcggtccctccgtttgccactcgtgagaagcacagataagattattataatacccacctttcctcaaacggcatagtatgatcgccctgctgtggcccagagcatttggaaactggtagcactctccctggcttatctctctgacaccaggactggggccaggccaagaccacccagacagctccccaccataagtctggggtctcttgtgggcccaggagacaatttctacagtgtggacaaaggccaggcagggtgggttttggtgtagggagggtagttacagagaggggccatgtgccttatccagtagtgtattcatggtcaccccagtatgcttttttggaataaagtttgttttgtctgatcttgtgtttgggtctcacggcctggtcctctgtggtaactttctgctgggttccctcagactcagcccttgccttctgggagagaagggaaaatgagctcacaggtttccactgtggctagtcagggcctgagggcagatgcagaagaagaaacactctgttttgggttggtgctgaatagaactacagagctttctccctcctgtctgctctctactggcccctacttatgagtgccactccctgtcaggctgggagtgactgtttgtagagccagcagggttctgttttggtccagcccattgtatcatac

SEQ ID NO: 26119 - DNA, 1224 bp, Mus musculus
ctctcctccctccactgtcttgtcttattgctctaaatgatctttaggcaaaagctgtgcaactccgtgcaatggaatcagaaatgcgcaggccctcaccagatagtcttagaacctaaggcgaggcctagacatcctctaaggcatgctggaacagtctctctgtcctgcagtcacacctctgctggtgggaccccctcaaactcagatcccaggtgaactaaaaaaaattcccgaagagtgtttccccgatgtccttcatccttgccgctctcagctcaaggtcaccgtagtagaggctgtggtctcaaacaatcccttctcttctggcatctggggcacctagaagatgctctcatttctgatgtccttctgttctgctggtctggtgggtccatgggtaactctgttttccactatcacccagtttctttacgtaccgtatgcacttccttggggttggttcttcttggaactttagcagatttggtggcctttcttcattaggaaccctggtgccaatctggaattctgagaagtaaaatcctcccctgcccttgaaggtcacccagtgggtgcttattgccaaggaaaatgctcaagattgttcagctcttcagtctcactgacaagatgggtcttcatccataagaaagaagggaggtgaggatataggccaccagagagccatagctcctttccttaagtgcgattccgagaactgtgtttgagatccacgtcagcctatttaacttctcggtcttgatctgattctacgtaagatcagaggagtataattacattcagtataagaagagtataggatcttcctgtgagggtaggtgagcaaagatgggggaagatggtctttgggattcttctctttaggtgcgatgcgaagagctagtcatttggaaggagctattagtgctggatcactgggaacactgtgggatcttttcctctgcagctaaggccaagtgttgaggtttgcacatcagcttctggtcatggtggcatcaggactgatgagcaaagtctgactggcaggtctctctctggcccactgctggattttcactttggggttctgccatgctcggggaaaagaaattttacaggtcccaggataattttgaatgtgatggaaggccctgagctattgattcctgaggaaggatctttctgctgggagaagccttcctcagagcccagtgatttaag

SEQ ID NO: 26120 - DNA, 2185 bp, Mus musculus
agggagtttggctaggtggctcagcaagtaaaggtgccagcagccaagcttggcagtctgcgcttcagtcccaggagtcatgtgatacaggagagaactaattcctgtccaagtgtcctctgatctccacatggcacagtggcttatatgcataagcacacacatgcatgtatgtgtacacacacacacaactaaataaaaactaataaaacatttcatagaagaagagaggcccagatgtatctctcatgagttttgggaatttattttcctgattgacatgcctgaatggattaagtattttatgtcaagtttttttaagtcaatgattgctgacaaacaaacaaacaaaagaacagattaaaatacttaaaaacttcattcttggaatttttttgtcttttattattaaccctttcattttctttcagattgaagtggtgccatgcagcaagaagcagagagatgtagagttcgaaccaaaaggcctgacatggcactctatgtacctaaagctcgaaggggaacagctctcctcaagtcaagtgaccaggaggaaggccatgggcctcctgcctttgtgccaaaagatcaaaaagaaggttgtcttccccagaagatctctgcaagtaaacccgagtcccagagacgaggtgcaggccattctgataggaaggatgttgactgtagggaaggaaagagatctgcatcacaactaaggaaagacaggtgcccacaaaaacagaataaagagaaggcttgttctaagaaaggagctgaagaatccacagaagcctcatcccaagaacatcaacacagagctcccgacgctgggattgtatctagtatacctttacaaagactttttaaaccaaaggacatggactgttgggaagttcagactgcgggagcgacaggacactggcgggtgtctccatctcagtcttcctcagaagtcagtgctgctcaggttccaagcagaccattccagaatgtggaactctgtgatttcagtggggaaacttttgtaaatagaaatttggaaagcagcattgtaactgaggccaaagttccagagctagtctcccaatttcctcaagttgttaccactctgctgaaaccagatggtatggctatgccagtaacactaagttctgattctgaaactgcaccatccagtctggaaacaccagatgggatgtcaaagcacagtcctggggacatctctgtggtttctgttcctggaggtccagatgaagatgttgattcaacttttgtagactttgaagttgagagtgagggtacagtcaacagtacagagtctgtcttgggtcaaaaaggtgtagattccattcttgagactgtggataacgtttctcttaaaatggcggtagtcagcaaattagagagcacaaatggcactattgatccagcagtgactagagaatgtgagagtgacagctctgctgatgagttatgtgtaaagtctgaaccttctgatacagcggtcctcgtgcatgaaatagacacagatgatggatttaggaatgtatgtgacagtaccagcaaggcttgtatggtggacattgcaggtacagcttgtgaccctgtaactgaaggcagctcttgtacaggtgcagttggagaatctggtgagagtagtggcaacatgagaaatttctcagattatatagaaatgagtgcagatgtagctccacttgatagagctaagagtgagaacgactctgaaaacattagcagcctaagtgcttgctcagatatttatgctgagagtattgcatctggttttacagagtcaacaggaaagttgatagaaagtgtgtcagatggtgcttcctctttacccataaagaagactgctgatagtaatattgccacttgtctggactctgaactgagtatgtcagatgcatcagacgtacttttggagagtgccttgggcagtgatctggataccactgaggagatgacagaggccttgcacgacctaaaaactgctgaagagtttaaaacaaaagaggaagattactcagagagtgtagtgtgtggcatatcattttctgattcatctgtggaaacatctgtagatctaaaaacaacagacacttctcacatacaaggaagtagtgctgtggaggaaagctgggaatctatgtttaatgat

SEQ ID NO: 26121 - DNA, 1164 bp, Mus musculus
tagcgaaattatagttatgaagtagcacacatataattttatggttggggtcaccacaacatgatgaactgtatcaaagggtcgcaacgtaggaaggttgagaaccgctgctctagaacacttttggtttggtttgtgtttaacgtgtggagccctgagtttcatcctaagcatgacagaaaagaaaaggaggaaaggtagagagagaaaggggaaaaaaaaagaaagaaaacaaaaccaagagtagtatcaattctttaaagcacttggaaagctaaaaaaatgttaacctctgggatcaggtgaaaggtgatcagggaatccccctgtctcgtgaataatctttgtcttgtaatttgattaaaggagacttagtggctgtgtgaaatctataatcatatgattaacattggcctttatttacagagagaaaacggttggaagccaagcaacgggaagacatctgggaaggcagagaccagtctgtggtttgaatatcagttcctgaaaggaatgaatccatgattgggaagtggttgatattcttgagacaagaggatctttccagagctgtgcacatgcagatgagcatgttaaagaaaacatgaacaaaacagacgacttggagaacgagggtccagtcctcactcttgaattcagacctgtccactgtgacagagacgttaaaaggaactgtcatgtgggaaggaaaatggaagtggcttctaagcgtcctgggtggagcaggtcatcttcatgtgggtcaggcctccaggaagtctgaagcaaatgtaaagcaaaacaggattcaagcctgcagtgataggagtcggaggtccgtggcagggcagggcgctccttagtacttctcagagttgagaactgcaggatgaggggcagcagtaagacagggagaggaaacagctcacagacaggagtgcctggtgcactcagcccgtacagagactacactgctggcccagaactccagagcccctgaaccgcagcgcatcgtgggtgtttgttcctgagtgtgtactaagcttggggcctggtacttgggcctgcacagcagccgggtctgctaccttccttcctcacaaggaccagccctagggaactgagtgccgctccagtttaatcagtgatatcttgtgagaggga

SEQ ID NO: 26122 - DNA, 1267 bp, Mus musculus
aaaatagatgctcgcagacagaactgattttacagcattctcctccccacagtacaagagctaccctgatagtcaaaagacatgttttgggataccttctgtgaacaaaaagtacctttttctgtctcctccattccgtcatctccttcatctggcacaggaagcctgttttggtgtaacagtttaggtaaacaagggaaggactgatttcctgttggatccagcaaacagtgatatgatcctcacacatgaagctaatgttctgcacaagaatgtgcgcagctagctagggtggggtggcaagtgatgactggacttgggcagggaggttaccctcaccttcttgttggatctagtttccaagagaccagcaaaagcaggccaggcagacaaccaacagcacgctctcagctttccggcccacatcacacgagtggtaggtgcagccagttctaattcctggaaaaagctatacaagggctgtgctgttaaacttctgagttgaaagggaaagacacgggcagcttggtggctggcatgacttataactagatgaggaatgttaacagaatactaaccgccaaattccagacagaaccaaaaacctcagaagactttcaccctggcacaccttgacttcacgtgtgctccagagaagggctaggaagctctcctcagaagttacgctaatagacttttagactatgaagagaaaactagaatccacagggactgtagctttctactagaaattctacataaccctgagatttagacgtttaccatatacaaaacatatatgtagagtgtacatgagaggtcatcccccacagctaacttttctttcagagcagccacagcactcaaacagctctccttatcttggagagttctgttctctgagagcagcagccgcactgtgttctcccattagctcctcttataaaccaaggatttatcctgcatggacaagcttgagccgtggctgggacttcttactactaatacacagcatccccgactactggaataatgtaagcaaaaagcatattttcaatggaagtaaaaacagccctgtcccaaaactttcaaatgctgactttaaaaaactgttctccgagactgatgggagttatcctgagagttaaacgtagctgattatcagacataagatgggttgcttctttaaaaactgggtaataaacattagcaatgcctatagagaaggactctaagcagctaacaagaagtcctttcacagacatgt

SEQ ID NO: 26123 - DNA, 1150 bp, Mus musculus
ttcgtttcccaccccatccttgcacacctccagtcagtgcccagagatccagtgctgcctgctgaatctccaactattccctagctgcctcccccaacctccactcccaccccacccccattcagtcacggggaaatacttgcccacaggaacttttaactcaggggttgttgacctggggccattaccccatgggggtccatagtttgactccagtgggctaaagagcccttaaaattgtcggaagtgtttttgtgtgtttttcagaagcttgaagctttcttaatattctcaaagttcccagatccaggaaggctttttaactgttttgaataatggaactttcagcccgatgtttctgcaatgcagagtgaattctgggatgcttgagaagagtgtttgattataaagtggtgaagcattcttgtcaatgggggaaggttgggacccaccaagacagggtccttagaaatccctggcacaccacgcagtagggtcacaacctacatcccatataacttttgcccactgtctaccaaacccacagtaggtattgccaagagggccgtagcccatgggagggaagtttggagccagagatgcctcttctgtgtatgtcatggacttcacatgccccttgtttagcctggctgccctgaggctcagccatgcatgtgttctagctaagtccacagccacctctcccaacctgctcctgcctgctcagaatacagtgccagcccttagtgctggtgtcgcagacctaggccagtaagtgatgatgagtttggaacaagatctcacaagggagccctgctaggtaaagttccctctcattagtcctttggccaccaggctcaggccactactgttgtattaactccaccctctgcagaccctctaagggacctgtcaccattcctttccctagctcccaagccccaccccccccctccgattttcttcaggttaaaatacattttaaaaaaagattttaaaataaagtatttatgaaaactcaataaattgtaaataatttttaaataaaataaaaatgtgttttcctggactagctgctttgcttgcccatgggattctggagtttgaaaatggtttcatttgagatgcgtgtcagacaatgcacaggtgt

SEQ ID NO: 26124 - DNA, 1366 bp, Mus musculus
aggaagaaggaagatggtgatctctgagtgtccactgcttaagtcagtgtcttgccctcctgtcttctctacagccaagcaggtcgagtatttggtcaacgagaagcatatctatctcctgccgagtggtcggatcaacatgtgcggcttgaccaccaagaacctagattacgtcgctacctccatccatgaagccgtcaccaaaatccagtgaagaaacacctcgtagttcacgccaccaaagcagttcttgtcacacctttcctgcctgcgcaaacctagctgtacctagctgtacacgtcctttattagagatgaccgaggggaagcagctgctgtttagctgaccccccacatgagaagacgtttcttgaaatgagccccgggggctctggggttagagcctgttggaaaccagagtagattaaagttatttaagaataaaaagaactttggctatgagatgtaatcaccttgccttcctctctagcattctgcaggagtgatgcccacggagccttgggcttctgcgtgttgcctgactgtacaaaagtctagtctcaaagatcaagttggtctgaggagccggatgtgactgtgggtgttggctggggcattaaaactcatcatcgccacccatctctgtctctcgtcaccctgatctccccgcacggttgtgtccctggtctggaacattagtttttttaaggcaactgtggccaatatttatatcatgacatacaaatggatttacgtatttgactgaaatgaaagttccactaaacggtatttgctcttgtgatatgtggcacattgtgatattttcttagtctgttctgttttatttaaaaaataaaactgctgatcaagacaagtgaaatggagtttgtgatccattcatgagttgccacccacagtttagaatgaagtctttagaggggttcactgatggcaaaggtaaaggaaaaaacaaaatgtgttcatgaaactggaagttcaagtaggatccaggctgtaagtccatgttgcttttgtaggtttatcgttcagacaccagccattttcttaagaaactaggatgatatcatttagagggattctagaataccagctctttccgtcaccgctggagctgctatgtccctagtgtattgaaaacattacagctgcttaaacatcacaagttccagagtccctgaactctgggaaaagggtgggtctggaaaaattggtagggctatgccttactttaagcaacagagtaaccacttttcaaaatatttaagagtagcttttcagaatttcccaggactcccttgaggtataaaaatcccacgatttttaaagatggtcggctccagaagtc

SEQ ID NO: 26125 - DNA, 1195 bp, Mus musculus
acctgagtttgtggcatcccaattttatgtcagcattccagttctggagctcacattaaaagctatataatctgaatggggcagggggagcgaggctgtcctgtgtgcccagcaccaacccgggactcaattcagcaagtgaacgcactgtgtttctgtctctgtcctgctttggctagaaggtgggggatttttctctgtccgtatttacacacgctgccttggaggctgcctgacgttcatgtgatctctttctctgtactcagcgtaccgcacagatgaatctcagccctgggttttgccagtagtgaggaaggtcgaacagaagattgctaacgacaacagcctcaaccacgagtacctgcccatcctgggcctggcagagttccggagctgtgcttctcgcctagttcttggggacaacagcctggctatcagggagaatcgggtgagtttgggggggtgtggatagtttctcattaggaaccgtaaatgtctaaaaataagagattaaaagttcaatttccttgaaggcactgaaagttatatcttgaggattcttggaaaatacatttatgttatttttttccttgacggtaagctgacctcttttacatttttatttatgtgtctgagctttgtgcttgcatgtaatgcttgtacatcatgtgtgggcctggtgcccaaggaggccagaagagggcattgggtcccctgggactggagcttcagatggctgtgaactgctatgtgggtgctgggaattgaacctgggtcctctgggaagagcagccaggactcttaatgactgagccatctctccagcccaccaaatatattttcagtcagtgtaagaggataattatggctgtatccggagctcagcttcacttactcagttttgtccagtacgttatcagatttcagccgctggcgttgaaaccgttactagaaaagccaaacaaagagaagttaatggactgtgaagagtttggagatgtatagactcatctctgccactgctttgggccacaggcagatcatttacctacttgctatctgtgtcttgaatttagaaaggaaagaaactatagctcataatcccatcaggggttctttcctctaaatgtatgactttcgttcatttctggggaaaaatttctttaattttacccggctcctcagaaggttatca

SEQ ID NO: 26126 - DNA, 1174 bp, Mus musculus
tggagagaaattttcccaaaacattcggtgagaattgaggtgatcagccaacggttaggggccatgtttcttcagcttagtaggtctggcaagactgggatgtaaacagctaaagttagctagaggtgcacagaactcaagccatgttatgtgtctaagggaacagggaatgctaggaactgaagccagcgcttctcaaatcagaactgtggtttttcatggcagcgttttctttcttctttcacctccagtctcagttttgagttcagggttcccatcataccaaagggacggaacttgagggctctgctcactacggtgtgcactgccactgagccatctgtggttgagaaaggttaagataatactaagctcttcatttcacagagaccctccctccgggattactgaactatagatatgctgggtgttagctggttggttttaaagaattcctactaggagtgggctcattttagaatttttcttactaaccctttccttccttctcactacaataagagaaatacagactcttaggaaactcaccatcctttgttttcttcccaccacattgacggatctgctgacttgaaaccctgaattgggatgctctgtcgctggctggttgctgccccgtttccccttctccttcctggtggctctcagtcgtcaagcagaggatgcagatgtacaactcgccgtaccaccgcgtgacagactgtgttcgggcagtgtggcaaaatgaaggggccggggccttttaccgcagctacacgacccagctgaccatgaatgtccccttccaagccattcacttcatgacctatgagttcctgcaagagcactttaacccccagagacggtacaaccccagctcccatgtgctctgtggggcctgcgcaggagcagtagctgccgccgccacaaccccactggacgtttgtaaaacactgctcaacacccaggaatccctggctttgaactcaaacattactggacacatcacaggcatggctagtgccttcaggacggtctatcaagtaggcggggtgactgcttacttccgaggggtgcaggccagagtcatttaccagatcccctccacagccatcgcatggtctgtgtatgaatttttcaaatacctaatcacaaagcggcaagaggaatggag

SEQ ID NO: 26127 - DNA, 1191 bp, Mus musculus
ccggaacagccagcccgtggttaagaaaataaagccaggtactcgtcagaaggagtttcgttgttaatcgtttacctggtctggcgtcagaagggaagggagggaggaagctccccttgtctttgtgaggatctggtcagcgagaggaatccagaatttgctgtcatcctgcttctttcaaaagcataaatgtaggtccttccacaggatctttttttgtttgtttgtttttgtgtgagacagggtttctctgtgtagccctggctgtcctggaattcgctttgtagtccaggttgactgccaactcagagatccacctgcctctgcctccagagggctgggattaaaggattacaccccactcccccagcctgtatatgtgtgtctatatacatacatacatacatacatacatacatacatacatacatacatatttatacatacatacatacatacatatgtctctatatattttctgttattgttttgttttgtattgttttacttaagggatctccgcaatggcagacactccggaacatgctagcgattaccttcgacctctgctgagcttcgctgctgctcatgtgcccgtgaagaagcacagggagacgcccctttacatcctctgcactgcgggcatgaggctgctccctgagaggtgagattcaggactttcacaggacttagggaagcgagtcccctgcagccaggatggagttcacagcgggcaaaagcagcaggctcagaagcaggggagagccatctctgtagccagtgacgcacggtcagacagtcacatctttatgtcatttgctgctttgggatcagtgtcacctgagatgacaaaggggttccaggttggttgagggtgtggttgcagttgggagtggcggcagtggtgactgggtcatgatgcaggtagggagagaccatgtttgcacaagagccgtaggaggctcaccttggggagactggagcagcaatgcagccttctctctctctccctccctgcatcctgtggtgactgctgagcctctcctcttcccgctgcacatacgtcagtctctgttcctttagatagcttttccagccccaaccagtgagggctcatccacccgaaccaaaatcagcctgatatcttgacacccgatccttcttcttacagaagagtgcaagagggaagag

SEQ ID NO: 26128 - DNA, 1182 bp, Mus musculus
ttcactcctaagatcttatatatatatattgggaaggaatgtacttgttttgtttataaattatgttttgttttaagaaagaatagcatcaggagagtgggcaaaggcaataaaatccaaggttttgatttttgtttttgttttttgtttgtttgttttttgttttgttttgtttagtttttttgagacagggtctctgtagctctggctgtcctggaggaatttgctctatagaccaggctggccttgaactcaaactcacagagacctgcatcttcctcccgatcactgggattaaaggcatgagccagcatgcctggcttaaagtcaaagatcttacttttttttttttttttttttttttgagatgctcaaaagacagcaaattctaaactttggaataactagataaatctgccatggagcaacctggccactttctggatgtctgtcacaaatagctctcccactagcggggagaggaaagccatattcccgatgttctcacctactgcctctcagacggccttctctgcagccagcctttcatactgtagtcctccatcgtcagctcctccctgcccccacctgggattgttcccagggccgaagcaggagtttgatttcttcttttggggagtaaggcaggtctcctgagcccagttttctaggtcgccaaggccagccttgaagccctgatatccctgcctctgtgtctttgtagcgctggcttcaaggagagcatcaccaacctggctcattttctcttcattttgccaaagccttttatctctagtgttggagttcagaagaaaaaaaaaagagtctaaaggaataaaaatgaatttctttgataataaattcctcctgggaacagaaggaaatgaaatgatttatgaaatagagaaaaaagtcaagatggtcttagggaggaagccaacgtgaggatgagtgtgttgacttagcagttaggcaaggctgcaattaccatcatctcctccctcttcctccccctcctccctctctctcctcgccccctctctcttcttccttctcctttccctttcctccccttccctcttcttcctcctcctcctcccccttcctccttttcttccttttcttccccctccctcccctctccctcccctccccctcctcttttcttttcttttctttttt

SEQ ID NO: 26129 - DNA, 1154 bp, Mus musculus
ggagctgaggacattgctctcaactcatccctgagggtagacttcaaatgggatctcattagccaagttttcgctgcatctgttttagtatttaaaatacttttggttttatgtttaagccattagcttaactttgcacaatttttttcttacccacaacattccaataattacaatctgaatgaaggtacaaatgcataatagagatatctacctcattatggaataggtggcgattcttgggaagtttctagactgggatttgtatgtgacttcattttagctggactaggaattaagtaggaacagcattggctgtttcagagtctcttaaatcggtctcttagtttatgttttaccctccgtctttgctgtggggaaggtagacttctgccaaactcgtgaagattttgctggcattataaaaattagtatgttcaaaaatgaggactaagaaccaagttttggcacctttgactaacaatacagaataacaaatatttttgtaaaccatgattgcaaaacaatgattgaaatcaaatacttttaggtaatggtctgtatggtgggtggctctgtccttgaccttcaccctcctcctaacttggatgtgatcgaactggaaaagctgttgtaccctgcgtgggttcctgtccattccaggctttctgttttggtgggaggcttgttaaggttctattttaagccagctttgtcttgttttatatccccatcggctgtctttgaagggtttcatatttccccttggcctagtagttcattatttttgtttgttaatactatcattagaaggacagaggagaaccacacaccagcagaccattttcatttctggaaatcggagcaataaaaagactttttttatattgtaaaatggaattattgctcatgctataagggcttccagtttttcaaatatgaaccaggccattgcttccatggcatgaaaacttgagttgaaaatgttctgagtcataggctgtttaaccatgcctgcatgtcagacaagcttgaagatgtgtctattcctgagcctctccttaaagcaggacaattactaccagacccctgactcccacccccacccccaggctgctagtccgtttactgtaaccaaacacttgagatcgttt

SEQ ID NO: 26130 - DNA, 2146 bp, Mus musculus
ctatatagtgagttctaggccagccagggttacacagtgagactttgccttaaacaaacaacaaaaacagaaaactgtgtctctccatgaccacagacatgaaaagtgaggcatataggatggtagcagtgatgacctgtggggacaggaagcaggagctgggtgtggtagcccatgctcatgatcccagcactctggagactgaggcaataggattgcttgcaccatgactgactgcgtcctggatttctttattttatggatgcttgcttctgacatggggtacatgcatttgtaatgtctgagagacaccgtggcggtgtgtgcagtcactttcaagatgacttcttttcttctttcttctaccacaggtggccctgggcattagcactctgcttatgtacgtccccactccgctggctgccacacaccagtcaggctccttggctctgctcagtggtgccctttggctcatgaatgaactccgaagagtccctaaataattctcagaggatcatttcctaggactggaactgccttggaaactcatcaccaaacacaagaacttagccttttctaagacggtggtattgacatgccacatggtttccaaattggtcaagtcattcagaactgttctgagatgggcactggaccacgaacattactaaggtgtgcttataccagaggtttcctttaaaactctgctacataaacaaggatctgccatttgctgcttcataagaggcgggctgacttcttagatcttggtttctatgtcctgcccactagtcaggcttctggtgacagtgacagattcaggaacacgtgcccctgtggagctactcgaccagttggctggtgactgcatgttagtttgttaccaaggtctaaaattgtcatattttctggttttgataagcagctaactagctaggtttgtgaagtgaatattcttttatgcatatgtgtgtttgtgttaatatatgccatgtgtgtacgggtgcccatggaggccagggaaggtgctgggtccctggagctggacttaaaggtgattttaatatgcctgatacgggtgctagtaaccaaacacgggtcctctggaagagcagcaggcacttttaacagctaagccatctctccagccctggagtgtatattattaaaattaaatgttgacaatttcaagttttaaaaaatatatggaggcttaacatgtctgacctgaggttgcacatttgcagtttctgaacaagatgatcaggtttttttttttaactctaataattattctgtgagtctcggtgtatcctaaaggatactgttcttagctagtcttagcaaaaacaaacgcacatgtgtttcactcctcaagtcccaggccctgctgggcttgtgttattgcacaaaagaggttccctcaacctcagaacaagactcatcctagacctaagcgatcacaaggcctctgaacaggactgggctgggttgaagttctgccagcttgttcccattccctccgaatcgctaccgcacctaccgtgcctcatttaacctgttgggcctgtgtcagcagggtagaaactccgctagacaggagccttccaagaaggggaccagggcagcttgcacaccctctgcttcccaactccaaatccgcactcttcagttagaagcaatcagcacagggctggagggtccagccagagaccactcggaaccggtttatagtcaccccaagcacatggcaactggagtcagctcaagtctcagatattttgctgcaggtttttgtttgtttgtttgtttgtactacagttaagcatgttcggaacagatccaatatttagctgtttaactgctttatggtatatatatatatatatatatatatatacacatacatacacacacacacacacacacacacacaccctaaatacaccctaatacaattattgatttatgccccaaatgtctatttcagaaaaatccattgcacacttaaaggattaaataatttcttttaatgttttcaacagtctgtccacaattctgtcaattgtttttaatttataaataaaggtaattaaaacatgtattttcagtcagctaacccaggatttttgtttgggattgatta

SEQ ID NO: 26131 - DNA, 1171 bp, Mus musculus
ggggtgggaggggagcgaaaaggacgattaaaattagtaatccacaaaatgagtacccatagtcatataatccagcgttggttataaagcaattgattatagaaccttgggatgcgcttttaaaactggtaaatctaaacactaggacaaatgtaactgttgggttatgttttgagatattggttatttaaagagctggttactggttactggttactggctactggttactggttactggctactgactcggcgggtgaaggtacttgctgcccacccagcaatctgagctctatctccaggatccaggtggtggaaggagagattcatctcaaatatgcatgcaatcctagcaactgaggatgcctgccgagacaggagagctgtggtgacagcctgggccacagcgcacacagtccttcctgtcccaacaacagccaagagtgcccaattgctatgaagttggtccctggggctctggccaaggtcctgacttttgcttctctttctccaggagacctggtgattctcgacgacagcgctcccactgcaggatggctgcagggccgaagctgctggggcgcttggggcttcttcccatcctcctgtgtccaggagctctgcctctcctctcggagccgacgctggcacgcacagagtgcgttgcttcaggccccagagtactccctgggacaagcacgggccctcatgggcctttctgcccagttggacgaggagttggatttcagggaaggagacctgatcaccattatcggggttcctgagccgggctggtttgagggagagttagagggtcggaggggcattttcccagaaggttttgtagagctgctggggcccctaaggactgtggatgagtccgtaaactccagaagtggagatgactccgctgtcaacggtgaggtggatgtccctccagaagaagcagagagtggaggcgacgaggacgaccagcagtcggggacctatggaatcgccctctacagattccaagccctggagacgaatgagttggactttgaggtaggggacagaattcaaatactggggaccttggaggatggctggctggaaggatgtctgaagggcaagacaggggtctttccccatcgctttgtgaagttatgtcctagcaacaggacagaggaaa

SEQ ID NO: 26132 - DNA, 1144 bp, Mus musculus
tccctgggatgcagataccgaagttgcttttccaactttcgcctccgctaggagatcagaaagaattcttgtgacttcctgggcagccattgaattcattttccatgagaagatgacagagttagcctgtggctataggagatcatgtcatccagacctttttgcccatcacattaactttcctggaatattgtgctgcacaggtagacctgaatctgcccagcttgttgacagctcttgtgtatactgtgttgaagccagacagaaaagtaatggggccacttctgaaacctctcagctgttgatctcacagcagctaaagggttgtgccaaacattttattaagaaagtaaagcccagatttgaatgggggttttccctaggccttatagtatagaggcatttgtaatatggagaaaataatttttctcatttaattatagaaattaccttcaaacagattttgtgttctttggcccttcaaatactggtgttacattgttgctgcagataaatgatgattgtcgtgggatatctggatcactgagctctgtgctttcattcctagagatgtttctcattcccatttagtgaaatgctgttgccccaaagtgatggttgtgggatttcttaccggtcataggccccggtgaggagcagggaagcgccattgtgaaagattaaagaaagcacttccacttgagctccttatggagtgagcttccctgtgcccactcagtgaactaagtctgaccatccttcagggacgttccttttggtaaatatacactgtaatctttaagtctaaatttatatgtgaaagttaactttttttaaaaacctaaataaaattattttcctatcagtgattgtgtgtgttctattttctccatgtcttcatacatttctgttgctataacgtgttccaaggctgtctgtaacgtgctctaaggctgtcttgcccattttaactagagggccagggtgtttgctgattaaacttaactgtagaggtttgtacttttttcaaaataatgactactaggtataaattttttaaaataacatgtccactttttcctaactctgagattttgttattgtttgtgggataaatcaggtgcaatggattgaagaaagaaaa

SEQ ID NO: 26133 - DNA, 1266 bp, Mus musculus
tatacaggaatgaaaaattcacccagtgttcatttgaagtaaagttttatctatgggttttctgtggaagagactgctgacaagtaaaattgctcttcctgaagactaagcccagcctccttgtgttgctctcagcaagtgttcttcatggcatcacatggagtcagatgaatcccatctttaatcacacatttaatagagtccttttcctgtgtaaggggttggacttttgtgcctttgatatcagctgaccataatgaattgtgttgtgtgctatatgtatatgtatttaaggtgtacatttaataatatcaaagagaagatgcctgttaatttataatgtatttgaaggttgtattgtttttgcatttgtaaaaatgggttacttgtttaaacaatcttttatgtcttgtcatacaaattccaaagggtctgcattcctttatctgtaattacagtctcagaatccaagttctgaaaacaaggtatctattctgatctgacactggatctgcttatcccatttagtgtgaatattcattgatttatgtgtttgattattgggatgtgctgccacaggctctcttgaaggttgatgtagtgtggcgtatgcactgaattacctttctaaaatctgaacagttctcattctgaaacatctagacttaagggtttcagataaaagactgcggttctctgccttatgttaaataacttagaagatgttattttgtttgaaaaaatgtgaaatgcttttatattctagtttttcactttgcatattaaatgattttaaaattattttgaatctctactcattttaataccataggctaatatggtttgagaaaatgtaaagggtcatgtgataggttaggagcactagtgacaggatagatttttttatcctttgttatttgtgtgtgcgcacatgtgtggaagccagaggacaactgtggggatagtcttcaggaatattgccctactttttgagagtatatcagtggcctggagcttatcaattaaggtaggttgggtggactgtgagtcacagggtcttcttgtctttgccactacaggtggcttccaccatgcctggcattttacatgcattctgaggaaccagactcagatcctcctacctacaaatcatatactttactgatcaagtcatgtccccaaccgtgtacttccttctagaattaaatagacttactgggaagagttaaggaacttccttactgtaatgtttttacctaggacgta

SEQ ID NO: 26134 - DNA, 1118 bp, Mus musculus
ggaggtgtgaaggtggatttaaatcaccatagctccttcatgtagaagacctcccttcccgaggctagggctctacagagaggagaatgaaagccactattggttaagcctacgatctaactgcccctttgttacagtgttcagatctgtgcacacagcttatcctgtgaagctgagctgctgctttaggagatagtagctacttctcagaaccagaaaaaactgggggacgatggaggagatggaacttgctttaaagcttgaaagaagtatagagtttggattagtagagagagaaggcgtattctcgactggaaagaagcaaggttaaaataaagatgtacaggaataatctccagttccttgagagaagcagtcatgtcaggcatacagcccttacagctagtcaggtagtaaattctttttagcatctatggggttaatatttggaaaggaactcacaaagaatgaaatataatgtagcttacctcccttaacaccatcttacttacagtacaagacagcaaaatacaactgccaattatacagctgcggaaagtatgggctgaagcagtgcactacgtatctgggctaaaggaagactacagcaggctcttccagggacaaagagcagcaatgtaagtggattgttttgaagcgtaatgccatgtgtatcatgtactcaagaattattcttgccaggtttcactagcaggactgtgtacaaactaaaatattgagcattaaattttttttaaaaaaccatgtgtttatgtacatgtgaatgggtgtgcatgtggaagccagaggttgatgttgggtatctttccttagtgttttctcacctaagttttgaggcaggatctattactaaacctggagctcactgagttagactgactagccagtgagctcgtaggatctgtgtccctcccaagcctcttagtactgggggtacaagcacactctgtcatgtactaagctgagataatcatgcgtgcaaggcaagcactctacccactgagctgtcaccctgataataatcctaaccagacttagatttctttctttcttttttttttttttttttgtttgttttttttttgttttttcgagac

SEQ ID NO: 26135 - DNA, 1230 bp, Mus musculus
agggtctttctacatagctctaactgtcctggaactcactagactaagctgtctctgtctctggcaattgttgggaataaaggtgtgaaacaacactcctagacaattttcacattttaagtgtacagttcattgatactcaataaacttattgaattatgaaaccatcacctaccagcggtttagattcccgatgtgatgttgcatgcttttagtcccagtcctcaggaggcagaggtaggtgatgtcttgagctcaaggcaaatctgtctacatagcaacttccaggacagccagcatcacacagagagacctttgtctcaaaaaaagaaaatatgaaatgggggtttaaagtatttccatcagcccagtaaaatttcctagacacatttatattaatttcaatataaattctattctcagccttggccaccacttgcatactttgtatctttaggtttgtggggttttagacatttaactgaaatcatgtaatgcagtgtgtgtgtgtgtgtgtgtgtgtgtgcgtgtgtgtgtgtgtgtgtgctggtgccggagcctgaggatccctggggctagaactataggaagttgtgaacctcctgacacggttgttgggaactaaactcaggtcctctgagcacaacctgcgctcttgactgctcagctctctctctagcttggttttaactttttaggaatttgtcaaactgatttccaaaattactacattgttttatgctcccatcagcaacattatgagagattgacctttgcacattcacgtcaatattacttaaagtctttttttctcctcttgagcatgttggagactgaagccagggtcttgtgcatgatgaataagaactctgccattgagatacatccttagcctgttgtctgcctttttggttataggcactatagtgttgtggaatcagtttcctgagcactccttctctgtctccttccataggattaatcttctgtatatgtcttagattcatctatgtttcatgaggtattgattcttttaatttcgcactgttttaaatattcctcagttttccctgttttaaatagtgaaaagagaaggggatcatgtgtttatatacgaatactaggtttaaaatgttgatattgttagcttgcgtggtcttgtgacttatgcctgtaatttcagcactcaggaagctgaggcaggaggattgtcacaaattcaaggtcagc

SEQ ID NO: 26136 - DNA, 1403 bp, Mus musculus
tccttcaaatgagctattcctttttcttccaacagggggaaccagctgtttgggagaacctgtataatccgtcctaggtgtcactccagctccctgggagttcagggtggacaggaggatggaaaaggggtcctaaagcaacagacagcaaattcttctctctatgcctcccccacaagcctcatctccatctccatcctcatcctttctagggcagcatgtttcatgatggctgctatgaagttccccctgtatctggccttttcagccgatgtttttgtgtgtagctgggcagcatgcttagacttgtcccttggtgtttctttatggagttgcacagctctgtgaagtagcatttcctaccaggcccctctcttcctgggcacttacttctgccagagttgattgacatcaacaacaaacaagaaaaaggagcagatgggaatgactctccggaagacctcagacaaccacgattagttaacaggtagaagtccaaagagtgggcgatggatgtcttcctacgttccagtaactcttaccctttgtgtgcatcacgatatctgccactggcaggcatggttgtgtgtaggaggccttccctttctttcctcatggggtttccctgtaaaagagaaaaggaagctgtagtggaaagaagatttttgtgtggtgagattccaacagaggagttaagagtgaccccctccaaaggtgaagtcagtgaattctggaggagcctgccttctggttcttatgttccagcgactagctggaactgaggggacttcaaacctggaatcaaacaaaacctgaaggaatcaagccagaaaggctatcaggattcattgatcttttggactaatatgtggtggtctctggctctcttcgtcataggacaatgtgaggttccaaggtgattagcaataaaattctttagaaaaccacgtctttgcatttccttctggggctattgagagaagagagaaggataagagtgtaagacattgttgtacactctctggaatgtactgggggccatgtcaatctcagggaggttgcttctcccagcaatcttgaaataagaagccttggttcataggaatgtttgaaacggcgggtactttgattatcctatagaaaggagtggagagaaggagaatcagtctagggagaatcagtcttcagagaggagattagaggataaccaagactaagttaaacttagtcaaaaactctacacttaagattttggatgctcaggagcctgcatcctgaaaacccttacacacctctttccccctctccagtgactctcattccctcacactgagccttctattcatccctgtcacccccacctgttctcaccacccccctcccccaagcattccgtaaacccg

SEQ ID NO: 26137 - DNA, 1099 bp, Mus musculus
cctgagaccaaaccagacctcttgccttctggtctcaggggcttgccaactctctggcttgtgaccagacacctccattgcaggcctggctcactgaccatagccaagaatgctgaacaagaccaggtgtcctcagcaaatggctggcggaggctcagaggtactgtgtgaagttatctggagatgtcacttccccctgggttgtctgcgtgatgtctgatcttttactagctgtgggtttgtcctttgtccttggctgttaaaaacaaactcccttagactgtgaggcctttacaacagatactggctcctcacggttctgggggctgggtatctatagcaaagccccagcagtttgattctgccaagaatgggcctttgattcttaggtggccatctctgtgttcaatggggaaggggtgagctttgtctctggggtttctctttaaaaacaaacaaaaagatttagtattacttgtaattatacggacatgtgtgtgtgtgtgtgcatatgcacacatgtgtgaaggtacttgagaatgctagaggtggcaggttcccaggaactggagttgagcagtctgtgtgggaactgagaatccaactctggtgctctgaaagaacagcaaatgctcttaatggctgaaccgcctctccaaatcctggggtctcttttaaaaggaccactcccatcatccacagggtgtgtgtgtgtgtgtgtgtgtgtgtgtgtgtgtgtggtggagcatcaccctccatgctactattccagatactgatgaaggtccaccagatgagttgggatttccaagtatctattgcatgctgctttggggaagaagacacagtgtttcctttggaatgccttgattgctactaaaggcagctctccactggagacaaactgcccttacattccctcaacctgcagcctacagtgctgcctgcatcagagctggttggtgatgtttcttaagccagctgccattgcattcattgtctatcggagaaagcaagggaggcctgccaagacaatgacgtagaacaggagtcctacatttctctcccttggggagaaagttctggaaacctagaaaag

SEQ ID NO: 26138 - DNA, 1099 bp, Mus musculus
tctcttccagagaaagcgctgaagcgcccccgtggcagggtgggggctgggtggaggaccagcgggggatgggtgagaagccaggagcagaaaaagaagggaggaggggggggcggagctggaggcagagggaacagcagattgtgcagagccaatgagagcagcaggacgaggtggtaccaaattcccatcggccaatgactagccagagtttacgaaggcctcattagcatcgcccccctccgcttggctagggatgggacaatgcggtgttggtgtctgcagtattctgactcctggacaccggtggctgcaagctgcgattttggcgtcctctcattttctatccttatctccgcccgcggctgccctggccagccagtttttgattttttatctggtcattgatcaatataacgaacctaaggatatacaggacattaataccccactgccagctctggcccagagcttgtaccgcgcagcgggctgcagaaacttagtcatagcaccctttgtcgctgaggtctgaagctcgctgcacgttctcatccctgggaacgtgaccccagcatccgacgccaagatgccggcccacatactgcaagaggtgagcttacaccccaccccccaccccctcctcaggttggcggttgcagattggacttctaggtgggtggctgttgagggttggagagagttcagagcagctgggagcatttagccatcatttccgaattgctcaaccttgatagattgtttctggaccgggtgataaccggatttttactcagtacagttgattgtcccaacttgtgtttcttaaagtaaaacctgacctcttttcgatatgcgcagattttcctttgtgagttgctaagggtgctgctaataaagcgtcctttcctgccccttcatcataaggcttattcccgatggcctgcacatttccgtgttccattggtgcgctctacagtcatgcaaccttggcactggggtatggccgttattgcatctctcccgcagttatattagagggaaagtaacccctgctgcccccacgcgtctgcagtccctaattctccaccccctctcattg

SEQ ID NO: 26139 - DNA, 4470 bp, Mus musculus
atgaaactgggtttagccattcactcacctgcagccctgattcccctaagtctgaggagcccactgggtaagaggcgtgggcagaggaggaagcactgagccccctctctgttctccttgcttctatttgcaggcgagggcttccacaactaccaccacgccttcccctacgactactctgccagtgagtaccgctggcacatcaacttcaccacgttcttcatcgattgcatggctctcctgggcctggcttacgaccggaagagagtgtccagggctgctgtcttggccaggattaagagaactggagacggaagctgcaagagcggctgagtgtggggtcttgcagttcctgttccagaagccagcttggcagaggcttactgttctgttaattaactactgagtattgccacccagatgctaaaatgatgactgacgttaacccattctggtacagtattgtaaaacggacaaaaatcggaagtcgacagctcttccttctatgctaagctcatcttcccttctagtttcttttcccgttgtctttttctttgctttgtccctgatgacctcgtttctcattgcttctcccaagccagccgccgctcagctataggtcagtgttcaccttccagagtacaccaacttctcaagggtctacagtaaaggttcgtgccccacccccaactcttcttaagctgctctgagttagaaatacaagaaaaatcttgagagatttctcctgttatttttagcccaggctttgccagatggaatgaaaaagaaaatagtttttatttggcagggagcctataaaagaggtaaatcttaaggggccaagttcaacacgcaggctatgattcatcaaagccgtgggagagggggatctcttatgaacaggctcagctccgtctggcagagctaccgcagcctttcaacatagcgcgcctcctctcctaattcttagtaggtggcaactgaggaacttcgtgacactaaaatacagtaacacatcagtatctcagtgtagtttaggctgaagatttaaaaaatatatatatatatatatactagtaaagtgaaaaacaatttgtaggaaaagtggtctttaataaggattttcttttcctttaatgacaaggacccggggccaggtgtggtggcttgcatcttaaattgcaggactggagaggcagaggcaggtggatctctgagttcaaagccagccagggctagatagtgagaccttgtctcaaattaaaaaaaacaacagttagcaggacatgcagagcaagggaccctcgagtgaggcatgtttggaatccgtagggcagtcgctcatggtttcgagcgtcccgtgagctgcacccccagggtctttttaattcctgttcttccatctttaagatgatggtcgtgcccacaaattgaggatagctgtggcgtttccatacatctaacagtggaaggatttcaagagttgaacttgagtcacagttaaaactgaaaagtcgtaaagtctgtcctggatccttacaaacactccgtgagtgcttccctcagaagacgatgctgcgcgccttctccctcccactgtcgggcagtggacgggcacgttggaagtcgctgtgggcgcctcctaatgacttctcaaaggaaagcttctgagggccccttaccaggggacttcacggctttggggtgttctagtggagcaggttaggttttttttagcccctttcagtcccgctgctgtttgtggcaaggcagtactgactcatgcctcactagctctgtgaccaggtaggactctgcctgggatacatggttgaaatctctcagctctaccacacctgcctcttttcccctacccattttttgtgttttggggtgggtttttttgttgtatttcttttttcctctttgacatttagtcttggtctaggcagaaatgtcctggatatttccaggcagtaaagatgtgtggtcctggcaccttcctcactcagagatacaacctctatctgcagtaggtagagacggctatccttttctggtgggtttcagattctccacctcttatccctcccaggcttctgacactctcttcagctctaaagaaaaagtttggccaactttctagaaacatccctggctcagagagactctttgtcagtcattccaaaacaaatggtttggtggcacacatgccggcgagtcagggcggacagagcatgcaccgtgctcccggcacttggcaaagcttcggcaaagcttcgcgggctaatcagccctcctgggtgatgctgtggttaagtgggaagcacagcactcgaggttgtgttcttaagtgcctctgtttgaaagctttgggtagggtaggagagctgagatgccatgaatttcacagaaaggctctcgtgcagcagtgcagaagcctggccgcgtcggctgtacagcataccaggtgctgtgcttcgaggggacagtcttcctgggctagttgaatagagagaggctttagggccttcctgtgcccacttgaaagtagccttacccttcagctgtttgctaaaagagaattcttgggcgaatccaaggtatttgctgagctgtggccctattctattccttggatatgccttttgagtgatttcagttccgctggttatggtgcccacttaaacaaatgtgaaaaataaaagcagctctcttcttagcctgccccgtggatctgaaccatgctgtggctaaggaccccgtaaaataacatctgtcgttaagggtgtaccagctcactaagaaacactgctatcaagatttttaaagctcaaaccaagtgacacttttaataagagactaagatctgattgagggagttttctaacagtccttgcctcgtggacacgctaaagtttgacttgggtgccttacctcttttctaaccagtgttgctcgtgagcctgtggcgctcgcttgctcgctcgctcgctcgctccgtggattccttaaaaccagagagcctgtaagtgtggcaagatcaaaactggcctggctggagggttagctggacatggatctgcaggattgcctctggggacctcgttttgggaacttttcttggggctgttttgctcaagtgcccgtagctgatggatgggtgaagtaattttgaacgtacgcgatttgtaggttttgttatttgttttaagatttaaaagctggttataggattttaagtgaaagcttttcttcctggtttgctagtgttcttgagtgtcttctttagttgaaataggttagtaggaaatttaagaaagtggtggccgtgttacactggtggtgaaggccagggccgcctaccaactctcagttttttgtaacagtcccactctgacgataatgagttcactccttggataaggatgttaatgagggaagagccttcccgacctgacctaatcagctcttactggacccagctgtcaacactgttgcattggggatttaagtttccaacccatgacttatgggacagattcaaaccgtagcactgggcatttcgcctaacaatactgtgactcagtattctgtgaaactgggataatattcctgacctacctccacgggtaggtgtgagcatgagaaaatgctctttataaaacatttggggatcctctgcagaggagtatttaagtcctgcacatttttgtagtaactgtccatcgtggacttgacatgtgcctatgtcccagatgacgttgttaatctacatcattctcagaggttgaatggatgcgtcagataatgtatactcactgctatgaaaacatgcaggactccgtttccttccttgggtgggatttttcctttattatgtgcaactgtagttatttgtaatctaataattttcattaataccaactccgaaagtatttctactcatctgaggttgtgtttgttcataataaaatgaaatgatctgactgcaaaatgtctcgtggtgttttggctgcaatacagcctcccaggagctgggtggtggcaacggtggcgcgcaactttaatcccagcaatagggagtcaggggcaggcagatgtctgagtttgaggccagcctggtctacagagtgagactcaggacaactagggctacacagagaaaccctgtcttaaatttaaaaaaggaaaaagagaatttagaagtcatgaggtttgagtcataccccagtaacctgccctgccttcggtgttatttgagattcatttctgggaacaggaaaccagtagtaagtggatattaaatcagaaacatcagctggcaccttggcttgacaaatgccaggtctttgagtagctcatggccaaacacacccagtcaacgaagcgtcttagtgcagatctttccttgaagctctggttgggcagtccagctcattcttaggaatatcctgtctttagggaaca

SEQ ID NO: 26140 - DNA, 4470 bp, Mus musculus; identical to SEQ ID NO: 26139

SEQ ID NO: 26141 - DNA, 3094 bp, Mus musculus
gttgtgctagatgggatggagaaattatcttcatttgatacagagcaagtagattgtctcgagagaaaagttagcatgcgtggtatgatttgtaagtaaagatggaagagagagagagagagagagagagagagagagagagagaggtagccatatctaacagcctacttaccaaagaccccaggcctctctgcttggcatgcctcctttctgtccatcctctgaaccccagagattagtgagatttgaataattaaatcattttcagagtgaagggggttaatgcagggtctgtgctaggggagggttttagcttttggtaactgaagattttttcatggaaaaagtcttcgtgttcaatgtgcctagaactgataactaaacagctgacatttgtcggggacagatatggtgtgaaactatgaaaatataagcaaaatcttcacttggaacatgaaactatttcacttagaaaataatcgaaggacccgaggtgttgcctgggttgccagtttctttcgtggctgggcaggaactagtgaggttgaggggcagtgtctgtaagtagctgctaagaggtgcatttccagatgaagcccttggggaacatctgccagggatccgcatggtgttggctccatccattgctttagtttcctccttggattgtgtagaaacttggcttcccatggttttgaaccttccatgccttctttgctttgtggccacccagcctgcctagtgctgcctaggaagctcttacccacctgatttcttctgacatttctttctttggcctttttttctttctccggacatgcagctagttgcctgagtgtatcaagagcacccaggacttgctgctgtccaggcctgttcctcccccagtatccgtgggtgtggaagagctgtgtagcttcaggaagcagagccaggtgccacctttctgtggcttccagatcctccctacctccaactcatgtgcctctgtcacagtgatttcaggaaagcttggtagaccctctagcaacatctcggttcagaaagtctctctggtttgtgagttaacagctcagctaagtgctgttttgtctcagtgagttaaccactgaatgcgagggttggttgttgatctgtctcggtgtgtgtcggagtagacagcatatgcacttctccctgtgcgctttgcaaggtaatgtggctttggctgatccatgcaggcaggtagtggtacagtgctgctgaaaggaagaagttccccattttatctgttaaaacaccagagacatgggcaagtgctaatggacctcacttcaggaagagggtctgcttcctgaagccagtgtgtgatgaaaagtgactgagacctgatatctaaggtgagacctgatacctaacactctgtcacacagtccagggccaacagtgctataggaaagtctagaagaaaacatcacatcagtattttagaaccatcaaccatctcttgtccctatagcccaatccagaggcctggtttttagaactggctgtgtaaggtgccaaacactcagttcacttgtagaatcagagccttttttcccccctatgttaattgaacacgcgctctgagctgttttgttgaagtagaaaatctcatagaaaaatcactgtagatctactgacctatagccctctggaaatgcctttgagatggttttacttttctaggtcatagatgcctgatttataagatgaacaataaaatcagctttctttctttctcttctgatcttattccccagatctgattcaggccatgttccaaagcaaggctacattgaggtcctggtgtctttaagtaaaggacatctttcagatcctctcaaagaaggatttataacagtttccagatgaatgtactaatagctttgggtgccttatctctttcctaatctgtagtgcctgtgagctcagtctcactccttcccttagcccggagaccccttagatcgagtgggaatagtcaagaggctggctggagagtcatcagtacattggtttgcagaaatcttttacaggctacattttggaatttttttttttttagtaagtgatcaaatttggtgggaagtaattcgagtgtattcgattgtattgtcgtcctcgttatcattgtcaaacatgttatagacggcagttggcactggggctgctaatctctgggtgtagtctctgaaactgtagctccagtgaggtggtgtgaaaggttagcaaagccaccatctgctggtggctccagccaaggtgcctcttagccactgaattgctatgttatcctttctcttgtaacaaacccaccccagagataaagcctttaatcaacccaagaaactcctgggctaagtatctgacagtctcacatctcaacagtgtgaattaagtgtccatagcatcagctcaggaggacactctgggagagtgctgacaaaaaagggttattaatactgacctactacttcaagggcagttctgaggtgattagagctttttttaaaaaccaagtatttggggatcctcagcagaggtattcatacagactcccaaagaactatatatgttcctgagaccatcgtttagtctacattgctcttcccagagactgacagatatgaccagtcaaagtgcaagactacctacccactgccatgaaaaccattgcaggaaacctttcccttccctgaatgagattttttttttccctttttatgtggggtaattatttgtgacccaagtgtaatttggatgatttccattaatatcaactcttgaagcctacttgtactgattgagattgtatttgttcctaataaaagtggatctggttgtactgtctgggagcttttgtgtgtggtcactagcatacctatcacaaacacgcacacagctaaggatgggacctgacgattcccacatgctgggcaagcatctacagatgaggttcctccacagcctctttgtcttgaagctgtttatctgagacagacgctcacagcagagccttagctggcctggaagtctcagcaatgcacttacttttttgttgggattacag

SEQ ID NO: 26142 - DNA, 1149 bp, Mus musculus
cacccgactgctcttccaaaggtcctgagttcaaatcccagcaaccacatggtggttcacaaccatctgtaatgaggtctgatgccctcttctggtgtgtctgaagacagctacagtgtacttacatataaaaaaacaaacaaacaaacaaaacaaaaagggaacttctcatgtattagcatcactcggggtgggctgccaggtgctgagtggaagggtgaagtgccttctgtttagactctggaacgatagttcttaactcacgtcatgtgggtcgtgatccccttgggagtcaatgacccttccacaaggggtcacccaagatgactggaaaacacagatattcgtgatgatagcatgaagtagcaaagaaaataattttatggttggggtcaccacaacatgagctggtgtatattaaggggttgcagtactaggaatcactgccctagagaatgaccctcgacaccacctaggctggagcctgggccaaggccttaaactatctgtgattatttttaggaatcagagcctggcttctcaaaggcccagggctcctcttcccctcagcgacctcgtgtctctcagccgcttcctctggccatgcttccgtgctgacctcctatctgtgcaataaagtgcaatgacctgtttcccactccgtctcctctgcatcctaccttgctaatgcctctctttcaagaacagagaggtgtggcttcctgcactgtagaggaagacagaagaaaggtctggggagagataagaactccaaaactgaagagcttaaaagaaaatatgtgtttgggagtttagcctgcatgtatgtactatgtactatgtatgttacctggtgcctgcggaggccggacgaggacacctattagtgctaagaactgaacctgcgtcctttggaagacccagcctaaggaaataactttttaaagtgtcgtcccacgaatggatttgtgttataggcctttccttgcaacatctgtagccacactgcttggggtgtgtgtgtgtgtgtgtgtgtgtgtgtgtgtgtgtgtgtgtgtgtgtgtgtttgtgcgtgcccgcatgcttgtgcatgtctgtctgtgtctgtctgtctgtctccatctgtgcctgacagtgagctgcagggtt

SEQ ID NO: 26143 - DNA, 1057 bp, Mus musculus
ggaggcagctggtgggcagtgttagaatcagccacagcagtcatcaggggccaaaggaggtggaggtggatcaggtcctgaaaggagtctggttcatcatagactttgtagacaggcttccagggaacttgtgtgaaatacccatatgcgtggatcttgttcatgaaaccttgattcttaggtagtctgtattgtggtccagagggtgaagaatcgcgtctttgaagagcttgttgtggagcagagctcagacacggagaaagaattcagctctgtgactactgttcaacctcttgccatggagatgctagtaacagccttgagttcccgacgtgggcactaccagggactgctcacccatactgatgggagttttctcttggggaatgtaggttgtatctgcagcagacactcaatgacaccgtggggaggaagattgtcatggacttcttgggttttaactggaactggatcaataaacagcaggggaaacgcggctgggggcagctgacctctaacctgttgctcattggcatggaaggtaagaaatgcttccagaagcatggctttgtaccacgcaaacctgatttctaatcctgtctccactacttagtagccatatgactggaaactaggccctggactttttaatgcttcagcgtcctcatccgcaaaaggaacaagctagcatagtataagtagctacatagtataagtagctaccgcagttgaatgaggtaatgtataacgtaagtcatttggatagtggcgtgcagtcttgaggaagttctcttcctctctcagtggtgctgtgagcacgatgccaagatagggaggtctctctgaaacactgcctcgttccattgaagtacagggtgtagagggatctattcctgtacaaatggaaacttgttttaaaaagacaggttctcactaggtagctctggctggaactcagtatatagaatagaccagagtggccttgaattcacagagatccacctgagtgctgggataaaagaaaggcatgcaccattgtgcctggcagagactattc

SEQ ID NO: 26144 - DNA, 1513 bp, Mus musculus
tgtccctacaacatctgggctgtggtgccagaatgactctgcacatgagtctgccttctgccagtttttgcagcatagtcaggctacaaaccaggtggcaataactgctggggccctaatggggacattgagaaggaggcttatctttgggaggtagccttctagtggaagaggattagataagattccagttgagaactacatgcttaagccatacatagaaggaaaacttggggacctgaaaccaggattgtgcatatgtccaaatacaggcatttgcagccgttctcttcagtaccagctcctgtccctgtgctgcaatgagggattctagctctgacttttttgggctcgaggggtatgaacctctgcatgtgtgtgtacacatctgcacacttgtatgcatgtgtgatcacacttgccatccttcttgcttactaaggttctcaactgctaacattgtccagtgtggcagtacagcgtgaaccccagatactgcctgactcagcctagagcttttacactcggattttagccatcccgtcttggtcagatcttactgcagcctacctaaagctgactggctcaagcctcccagtcctgtgtctttccctgtctgaaccacatccctgctcctgctgagcttcctggctgagtagatgaaatggggtcagacttaggcagctaactcaatacctttcatccacctcagggcaaggggaaaaaaaatgtcctcttgcctcttagagccagcgcctctgccagacccaacaaagcgtcgcatgtgagctggagtagagctgggagagcttggagatagaatttacttttctgttggtagctgtttatgggagccctcctcggggctgcagcttatagctctgtgttacacaacacagagcgcaatcatttgtatctgttaagagggaatggggccccagcagcttggcagagtggtggccccgtgtccacttacctcaagtcccttccttctctgtcaaccttttttctctaaaattggagttggaagtctgattttattcttttctttgccaccttttagtccccttccctgtagatttgacctcccgtgttcaagctgtgggtcttagccctgaagctcagcttacagcgccccatggactgaacagatgcaggcgaatgcttgtgcacccgtgtgcgtttaggggcgggagctctagcccccactctgggctctgcagtgtggttgcgcagacttggtaccttcttgagtatggctctttaaatacagcccgtgctgggcagtgtgatcgcggcaaacgcatgcctccatctcttttgggaacgagggatgcagcagaagagggaggcagagtggtattagtttggccaccgtggcggattttcattctccgcagatctatggtcctggctctgccctcaaaggtgtctgggatgtgtggcagggagtctggatctgctcggttgacccttcagtataactctgctctcacaggtctgacctagggtg

SEQ ID NO: 26145 - DNA, 1899 bp, Mus musculus
aaaacttggtgcagaatttagcaagggctaccagcagtgaccctctgaccagtttttcctacatggccaggggtggggatggggatagctcagggttgtagaggccaggcctttccagttcctgtttctcttggtgtcctcttgacccatctttaagaggatccttgagctttctcctaactaggctctcagtggcctctttaccaaggctcttttcctcaaagacgctctctggctccaagtgctgggcagcctggctggaggatccctctccacagggtctgtccctgcccctgcttcacttctgacctcaggtagctctgttgctgtgtccctgctgagttgctatgtccgtctgctctgtccacttaccattcctcagtctttccatgctgggccgttgtcttaccatggccatccttcctaccttttcttcagccagctctgtttaattatagacccatagggtcctgactggagccccattgagcactttggggacgtttctggaggaacagaggctcagaaactggtgtcctcaaggcccatgggcctgtggttagcgaagcctcggagacaactggggaggaacttggagaggtgaaggacttggtgagagacttggagaaagaggccaggcttgggaaagcagggtggcaggagcgagctctgttttccatgagtgtgtccttgtgccttagggtccagcagttcaggtatgaggggcattttctgaatgcctcctaatttctctcaggtctttggctcagtgtcaccaagtttgacagaccccttcgttcctgagcttgctagaagggaagcagcacgttgagtggtgtggtgtggtgcgagagcggaggcctcccatgcagaaggctggggtggtggacaagagaaagggcccggtggtcagcttctcaccgatgactctccatgcctcaagagactgagtatagtagttggttcaagaagttactctaaaactgcctgccctcttcacctaaagtctgttctcatttcggggaggaatgcaagtccttaattttcaagggaagacagtctagtgtttaaaagcatgtgtctggggtctggtccctttggtacatttctagcttgctacttaccagctgggtttgaccttggttgattgattgaacccgagtctcggtttcctttcctataatgacttgtgggggtgggggtttgaaaatatctacctcagggttgctggatgaactgaaataatgtctgtaaagctttagcacagtgcctggcaagcacttaataaacggctgtggtggtggtggtttatagtatgtgacttatttaaaaaacttggcttcagtgatgtgtacgatttccagcgactcagcctctctaaacccatgcatgcctcttctgcccggtcagccaggctcctgctcactgccgcctggtgtcagagcccctcactgacacatggtgggagctcagtggcccctcatcccacccggggaagctactgcctcccacatacagagcacctacccctgctcatgcctgtctcccaactgtcactggcacctgtcgccactcccttctaaattcctctgaagagagtgacagctcaggccctgtggctcacttttatgacattcagcatgtttaaatgacaaatgtgttaagattgctcgagggcatagggaattccaattgaagaaaatgggtgggtgttgactaactgttaagtgcttctgtccaggcactgtgctagtcccttgcactgggtgctcttggctcagtagggaagttaaggatgccctggacaagcacttcactcagcttggatattcacagtagagtaggccttctatggaacgctacagcctgaactgataactggaagacatgtagctcctt

SEQ ID NO: 26146 - DNA, 1575 bp, Mus musculus
agttttattctgtgttgagtttactggtaagaatattgtcttgatgctacctctcaagggtattgttacaaatgccactatggttaaagagatagatacgaagagctatatttgactgaagcttgaaactctggcatctatctgcccaacggtggggctctcactctgtaatttaatccttgtagatacattgtttgtgtgtaattttataagtgttcatatttttctcattttgcattgtgtaaagtgtacaaaatctcaaagtataaaaatctgcttatattgcttgtaattacagtgtgtaaatattttctattgtgtacattgacggggacaagtgggttattcaggtttttaagtgatccttttatattgcagtttcaaccaataaccacccatcaaatttaaaaccactttgatacattcttatttagcaggtcctataagaataaaatctctattttcaattgtctttctccactagagaaaaatactttatctgtccctttaaaataaatggccagacatcagtttcggcctctgaatttatgactctggtagcagccttcagtctccgggtcagagtccagtcagtatttacatttgggttcttgtggaaatgttgtggttctattttagcacaagtagctcatggtttttaatcccaaatcaagtattttccatcttctgagtccctgtgcgttgtctccctctgtctgttgttgcccagaaagtgggatggtagcgagggaggaagtgctcgctgcacagagactgtcaggccatacttgggactgggcaaacgagcttgcactgagcggtggtgtgtttggcaatattactgtgccaaaaataatccttgtctcattttctggatgtgtgatgtcaaactttttacccttactgcaagctgaacattaaagtacttgtgtttatgcttttgtgtgtaactgtttgcctttcctgacctgcttttcttgttacctgaaagtacagttctgtaacacatgtcaagtgaaaaggttttccatgctcaagatcacctgtgtagctctgcagtcagtgttgtgcattgttttgtctctgtcctgatggcaacggtgcctttgtcacctttcagaaggttggcttttttttttttttaatgcaagtaatagcttgcttcgacttcacaaaaaaaaaaaaaaaaagaaaagtgaaatatatatatatatccccagtaatgatagataagttaccacccaggctctgttttttgtttgtttggctttttgttttgttttgttttcttcccctttccccccaatcagaacagacacagttggtggggacagtaatgtgtggagtcttgaaaccaggagtgtttttccatttacaaactgactcatcgccaagcggctgggttggagaactttcttggcttgtctctcaggaggcaagggtctgctacaggtggtgggggcgtgagtcagcacaatcccatctcgtggctatgcctactctatggtgcaggcgcacctcatctgtgcctcagtttccccggggcattcttgtcagccagttaatctactagct

SEQ ID NO: 26147 - DNA, 1160 bp, Mus musculus
cctccgcagccctggagtcagcctccctcctcctctcattcacatgtaaggctgccagggctccaggcatggcctttcccagatcaagtgcttacatttccacccacatgtacattctgaacttcccccttgctgcctccgtcagacctgtgtctactaggtttggtccatggatatttcaaaggaagatttcccttcccatttatcggtcctcactgaactaggacaagtggccaacactgcactcaatgagccagcttccctcttagggaccaagtgattgcttctcctaggccagagcaggaggaagtgatctgctatctcacctggcacatgaagcccactcctggaactatgcaaagggcagaggctgggcgtgtggatgcttggctcccatccctgtcctacctcaccagggcactttcaaggtccaagggcctcagatgtctccaggcccacatgggacaatcaaccctgactgagccccccattcctcttgggtgaggatgactgttatttttgtagctgagaacgtggaaccccacgagtttttactgtccttcacccatacctctcccacctccaccccacaatgaatgtatttattgtgagaatggctgtacttcttcaggaatgcccccactcatcacccaggtgggtggaacaggcatgtgatggaatggggagcctgggctctgctcctcctgacattggctaataaatgccctctttccccacagctttgagtgtctgcttggtctagactggctttaccagaaacagatttctggcttatggagaaggtgctccagagatttcttcatctaggggtagctttgggaatgagatctgcttctgcctttgctgagtcgggcaggtacagggaccatgagttaggggctcattttactccctgatgatgatgttaagggggacaaaatcagagcggctcaagaagtcacaaggattcccagcgtttgctcctggcccccctcctgtatctttgcagacagggaatctcactgttatttgagctgttgccagctcctagatctgtgcaactactgatgcacaataacagctccttgttgtgtgtgtgcacatatgcttgaccatgccagggtgcatatgtgcaggtcagaggacaaggccagagaacc

SEQ ID NO: 26148 - DNA, 1183 bp, Mus musculus
tttggatttcaagctcaggccgagtaggtgggtggagcctaccagccggggcgtggcctgagataaagaagaaccttttcctttgcccacttgtagctaggtgcagtgaccttgtgaataccctaattctgattcaattggcctccttgcaagctgagatgtgagaagtgtacaacacttgtacaaggaccgtgttttctgaaatacgaataataatgacttcaaaacacatgaaagagtctggaggctgtcttctgaaggacacgggatgccctgttgctcttgctggtatggcattgggcaaggcaccttatatccgtgtttgtgtgcagtttaggaagttgaagatgagcctggcgttggtagtgcataacctttaatcccagcatttggttggcagaggcagatgaatctctgcgtttaaggccagcttggtctacagagtgagttccaggacaacccagtctcaaaaactaaaaatgaaataaaaaagaaaaagaaaactgaagtcattaagactatatttgaaggggctggtgagatggctcagcaggtaagagcacccgactgctcttccaaaggtccttagttcaagtcccggcaaccacatggtggctcacaaccatctgtaagaagatctgattccctcttctggtgtgtctgaagacagctgcagtgtacttacatataataaataaatctttaaaaaaaaaagcagtgtttaaaaaaaaaagactatatttgaagattgattatctatcatgtgtataaatacatgcctgcatgtatttctgtgcacggtgcgcatgcagtgtccatggaggccagaagacagtgtagggtcccctggaactggagttacaggcagttgtgagccaccatgttggtgctgggaattgcacttgtgtcttttaaaagaacagtcagtcttttatccacctgagccatctctctagcctctcaaagtcacaattcaaaaatttgtactttttctcaagatgtagatctcactatgtagctctggttgtccaggatcactatgtagaccaggctggcttcaaactcacagagacctgtctgcctctgcttcccaagtgctgggactaacggtgtgcgccactgtgctcggctcacggtgtaggcgtagtttcagcataagccagtcttttaactccaaactaga

SEQ ID NO: 26149 - DNA, 1191 bp, Mus musculus
ggggccaaagagggtgtcctacttagggaaggcccagaagctgaggttagggaggaggtcttgaggatctggaaccgagccatacctctttgggagcttccagaccctgaggaagcccagctagctcgtgtgatgtttggccttaccaaggtgacagatgacacactcaggcgattcagtgtccgctatcttcgatctgctcgaagtctggtcttcccttggttcacccctgggagctcaggattacgtggcctgaagctactaggggctgagggtcaggaaaatggagtacagtatgtagagaccaccatcccccggcctggtgtctatcacaacctatttggattaccactgatcagccggagagatactgaggtggttgtgacaagtcgtgaactggacagcctggccttgagccagtcgacggggctgccaaccctttccctaccccgagggacagtctgcttacccccagccttactgccttaccttgaacagttccgtcggattgtgttctggttaggagatgaccttcgatcctgggaagctgccaaactgtttgctcgaaaactcaaccccaagcgatgctctctggtgaggcctgggaaccaacagcctcgtcccctggaggccttaaaccaaggcttaagtcttccccgtattcttcgtaccgccctacctgcctggcacaagtctattgtgtcttttcggcagctccgagaggaggttttaggagaactgtcaaatgtagagcaagcggctggtgtccgttggagccgcttcccagacctgaatcgtctgctgaagggacatcggaagggcgagttgacggtctttacaggtgactctataagatcactgcttcggagctggagagacggctcagtgattaagagtactggctgcttttgcagaggacttggagttatatttccatcacccatatagtggctcacaactgtctgcagctccagttctggggggatttgatgccttctaaggacaccaagcgtacctgtaatccatagacacacatgcagctaaaacacccatatccataaagtagtattataaaaatatcagtgacttaggtaaaggattagacaagatggtgacaaagtatgtggggtttggccattggcagtgtctatgtgcatgaatgcttcgcttatgtgtgtatatcacttggaa

SEQ ID NO: 26150 - DNA, 1483 bp, Mus musculus
gcaaagcccgactcaagaagatcaaggacgacaatggactagtggccaaaaaatcctcttctggcaaaaaaggggctgcgcaccagaaccctgagatttgcttaggccaggaccccagccccgcccagccagatacctccaagtcctcagggtgaaagcagtgcactgctgctcgctgaaatgagcctggtggagcaggccttctgctggggctcttccatatagtcctgagctacagaacccttcccagcccagggctggactccatggtgaaaatttttaattgagcagctactggggaatctcctgtatgctggtttgtgtttgttttttccccataggttttctgtatagcactggaaagacaaaggctgtttccaaagaaccagcgttttggtgaaaggaacgaagcaaagggaaggatgctagactcagctcgttttgggtttttgttttttgtttttccagatagggtttcttctctgtatagccctggctgtcttggaactcactttgtagaccaggctggcctcgaactcagaaatccgcctgcctcgtcagcttgttttgattagtcagtctgaaaaggtgtctgaacagagtgcatgggagaactagacatgggcctgtgaacctctgcagaaagggatccagatggaaacacgccagaccctcaggtgggaatgagcaaggcagatgaagaggccaggcccctgaagctgccgtgaaacaggaggtttgctgaagctccagagccgaaggctgatgcggtaggcaccgagcctctctgctctgctttgtagagccaggcagaagaattgatctgaggtgctgatcctgtactcttagggcttcaaagatggaagctgcttcccactggaccatggaaagaagctgtaagcctgcagtgcctgccccgtgggtgccgatttcactgctgcctctgacagctggagctaggactcttttgtagagccttttccagtttgaatgaaacatttctattgcctttgtttctgtgcgttttttcttacttgtccaccaggtgtctccccacactaattggatttcttctctgacttgggagtaaatgggtccttttccccacttcaacctctgagccggaagctcccaaatagcagggagcagtacagggccttcacatctcaccccctagagatacaccgtccttggaataggggaaacagggtgctgtgttgaggaccccataaaattcctgacaggtgtgggtcacatacccaggccttgcctgaccagctgtcgctcttcacctgtgaggtgaaccattcacatatctcagtgtagactcaagagtcagccctagctgggcgtggtggtgaatgcttttaattccaacacctgggaggtagagggcagaagatcaggagttccaagtatcctaagtctaggccagactgggctactcaaaactttacctcaaaaatagctcattatctctttc

SEQ ID NO: 26151 - DNA, 1149 bp, Mus musculus
aagattcttcaccggggagtggagggaagccagctcctgggtctgagacactgagcccggagtatatttacctagcctgtgttgttctattgcagctccatacatgtgaccaggctggagccggagctgagagctcagatccaagcacaaaaccccagcatcgatgtggtttactacaacaaggggctttgaggggagtcggcctctgtccctgtccttacctccttaggctgcttctctgatgccaccttgcaatgctaccacctgtttatcttctgggtactgggcaagggggcttgatgtggggagcagccactgagaccagcaaccttagactgggggaggcactcctataagcctctccgctcctctctggtttcaaagagcaagtcacaaaacccatccctcctgtgtttgtgtgtgtgcactgccacatatgcagcacatgtgtttatacatttcatcctggaagctaagagcagaaatgctgttctaggatgtcctgctatttgtcttctcttctcagtctcctgcccacctaacagcaagcctggttatgggtgagacttccttccctaaactgttcctctagctaagtcatttctgatagcatcttagccttctgtgcccaagataagccccaggatcccagaacagggactgaagaacatcgtaggccacccagagcttaacccttcaggtttcaaatacagctatttgaaccagctctaaaagctggttcaggacgtgggctggtagaggaagcagtgtggaatcagggaggcagggggctcatgcttgctggaccccacaccctagaatggctccactcctctcttctggtggaccatgggggtgtcagtagcctgcactgctctccacactgcattgtgggtgcttttagagaccatcttgagcattcttcgtctgttctgatgagtcatgtcatgattcagaaatcccacacttccaattcctcccccaatcagaaagccacacaacacaggcagagcaagcattcccttcaggaactgccaccacccgtacccacttgtaggggctggtgtgggaccggtgcttaaacacaggcctcaagcgtacagtatcaagacaggtaattctgtgtttcattgactcttcttagacaca

SEQ ID NO: 26152 - DNA, 1104 bp, Mus musculus
tcaagtccttggagatctacctgttttccctgcccattaagaagtctaagatcgccactcaggtggatttctgagtttgaggccagcctggtctaccaagtgagttccaggacagccagggctatagagagaaaccctgtctcaaaacaaacaaacaaacaaaaaaaagtctaagatcattgacttcttcctgggtgcgtcactaaaggatgaggttctgaaaatcatgccagtgcagaagcagactcgggctggccagcggaccaggttcaaggctttcgttgttattagggactacaatggtcacgtttgtcttggtgttaaggactccaaggaggttgccactgtcatccgagaggccatcatcttggccaagctttccatcgtccctgtgcagagaggctgctgggggaacaagtctggcaagccccacactgttccatgcaaggtgacaaggctgatgtggctctgtgctggtgcatctcatctctgactcccagaggcactggcgttgtctctgctcctgtgaccaagaagctcctgatgatggctggtatagatgactgctacacttcagccagaggctgcattgacaccctgggcaactttgccaaggccacctttgatgccatctccaagacttacagctacctgacccctgacctctggaaatagactgtcttcaccaagtctccttatcaggaattcacggatcatcttgtgaaaacccacaccagagtctctgttcagaggacccaggctccagctgtggctactacataagggttttgtacaaggaaaataaaagaattaagtctgctaaaaacaaaacaagtggctgatcttccagagcacccaggatttgattcccagcaaacacaaggcagataactaaccatctgcaactcttgtttcagggaatccaacacccactcctggcctctggagatactgtgtacacccatacacagaaaaaggtgggatttttaaaatctaatttaatgtttttaattaaaacgttcttaaattaaaagtaaacaagcagaatatcttttttttaaagatttatttatttttattatatgtaagtacactgtagctgtc

SEQ ID NO: 26153 - DNA, 1186 bp, Mus musculus
gagaaggaaggctcatcttgaccaacttgcccctgaaaagcacaaaactggagcctttaacttagagtctgtgtaggaagaaaagctaatgtttaggacagtgaaagtcaagtccgcattgctaagtctgtgtgaaacatcttggcccagagtgcagtgactgggacagatactactgctgttcttcatgagattcctagcttatatgtgtcttttttattgaatgtcagtgttaaaataataacccaaaaatttgggccaaattataaggtgacagtgactacctatgtcctcctctctgggcactatacaagaagcacccactaaacctgcctttcctgtctgtacacatgaaccatggtgtttcctcatggttcctgtgtaccctgcctggggcatgcagaacaagagcacttgccatgaaagcaggaggtgagccaagcatgatggtgcacacccttagtcccagcactggaaggcaggggcaggcggatctctgtgaattcaaggacatcctggtctacagagtgagttccaggacagccaggactacacagaaacccccgtctccaaaagaaaaagaaagcaggggtgacatgcattgattgattgattgattgattgattatcccattggtggtcaagaataggccgtgcgttgtactaagtaccatctgattcctgggtgtccttttcagagtgtgggatgtaaatgcaggtgagatgctaaacacattgattcaccactgtgaagccgttctgcacctgcgcttcaataatggcatgatggtgacctgttccaaagaccgttccatcgctgtgtgggatatggcttccccaactgacatcaccctcaggagggtgctggtgggacaccgagctgcggtcaatgttgtagactttgatgacaagtacatcgtttctgcctctggagatagaaccataaaggtaacaggtcacttttcagtaagttcacaagctgcagtaggagtttgtgtaaaagcgtgattgagggcaactgtatacacaagccttgttgtaggatactgtaataattaaattcaatttttatttctataaacaatggttatgggctggaggtgtagcttaatgacggcacttacctggtgtgcccaagagccagattggaaagataacagtgccactgatgatggcagtgatggca

SEQ ID NO: 26154 - DNA, 1181 bp, Mus musculus
taccttctactgcctacagacagacggcaaccacctgctggccacaggctcctcctactacggtctcgtgcggctgtgggaccgacgccagcgggcttgcctgcatgtaagtgttctgcccagtgtatgcctctgggatggcaagattcattgtgggttgcatctgagagcgggtgacgagcccaaggtgtacctaaagccggctgtcgtcattaagtttcactggtctaaactcctccctagcaagagcaccccatctcccacttgagaggttctcatcactcctgtgtctcccttgcaggccttctcattgacgtcgaccccactcagcagccctgtgtactgcctgcggttcaccactaggcatctctatgctgcgctgtcttacaacctccacgtcttagactttcagaacccatgacagagcagccctgcttagggggctgggcaagtcagctactcagggacctctcctgcctggcaggtgaggggatacctcactcttcttcccagccctgctgagtgagctcctaggtctctggccaccatgccctggcacctgaagcactgagtcctggacgctgggctgactctgacgtgggccctcctgtgctcttaggagaatgtacctgaacttaggtgtttacagtagggtcaggccttctcctgagcccttcccagcactactgcagcctacagagtgaaatgagggctctcaccatcccggacagaaagagatgcagttgctagaacttgtgctggtcccagccacctcctcagtcagatggtaactctggccaacatcttggagctgggctcgtgcctgaggtaccagtctgctttgctttgaaacgaaggaaggacaaagaaagcctgtcagcttggggttccggactagctgttcctcagtcctgctatgggaaacatgctaccattgtaatttttataaaaataaaatttaattgttgacaaatctggttctttggtggttaggtcattctaagtggctccaggaaggcagtgtacagggaaaggacaaaactatggctctgtgtccccaagaacctcctcagggggtagacaaggaactgtcggaggactctaggctgttgagctatggtgacctttcgcctctgtcctaccatacacacacctttgacagtactgtaaccatgttcttt

SEQ ID NO: 26155 - DNA, 1176 bp, Mus musculus
tatccagaggttttacaagatggttatctaggagcgccagtacttgaaaactaaaagaaatggtttgtgattatgtcactgtctcaggaggcagtgcgttggtctcatgccatattattactgtgtgtgctcacaatgtgcgtgtgggcaggtgcatgcgtgacacgtgggtagaggtcagaggacagcctttggcagtcagttctccctttctaccaaggcctttgtggccagtgtgtcttacccagggagctgtctcagtggctctagcactttcttgtcctgcttttcactagactgttttgacatcactatagacacttctaatggtttaaaggatagacgtctgcttggatttcttgattagccacgtatggaggtaggagtggttagttcctgatctcacaatccctttagtgtatatttgattccattctgcatgtttccgagtcctgacccagtaagcccctcgactcctcctttattgctaatgagctgcagtgacgagttcttccttctctttgcacatagcatggcaggcattccagtaaaggagcgcgtgaaactgtctcagaactggcggctggggcgctgccgagatcggattctgctgaagtggagatataggtaagcagcttcttgattgtttaaaaatgtttatttgtttttatttcatgtgtatctttgctgttgttttaagatggagtctcactatgtagctctggctatccccaatttactctgtagaccaggctgttcttcaactaacagatccacctacttctgcctcccaagttctgggattaaaagtgtgcaccactaagcctggcttgaaaatagtttgttcctgtatatgtctcttcacagtgtgtacttgaggaagttccagagggcatgagatcccctggaactggagttacagacaattgtgagccaccatgtgggtcctgggacttgaacccagatcctttgaaagaatagcacgtgctgctaacctctaagccgtcatttagccttattttgtgattcttttaaggcttcccaagaccaaagagcatagtagaaaacatgaaattagatcattggggctgtctctggcgtggtaactattagcgagcctttagacacccatagagagtccagcaggatggtgtgctcacacagttcaacaaagat

SEQ ID NO: 26156 - DNA, 1628 bp, Mus musculus
gaattatgtaaatcagtgaatggtagatttcctttacatctgtccttttcttcctaatagtttttatttttgaagtgcctcccacatagggttaggccatgactatttagggtatgagcacctaacttcttatgactcagatatgttgggaagtgcagtaactcctgggaattaaccttaatagcagatccgcatgtgaaatgttctgacattgttaagtaagggtaaggggactgaccagtggtctcctttgtccttgaacagttgtcatttaatcgcaaagacctgttaactactggtttaatcgaatcagtccttaattcttgcatgtttgtatctaatttttaaaagaaagaataagtatatgttaacaatatgtatactttttcttttaatcagagattctgaaaacttcatgttattttaatttagatttggtgaatttaagggttttgagcatgaagctggcacatagtgtctgcaggattattattctttaatcatggctagctatctagtaacgtcatagattttcaacagtcttttgttaccttgctttcctccagttctacatagcttttgaactttgagctgaggggggagagagaagagggagcttgaaacattttcctttctagaactccagtgtgagcttgtgaggtagtcttttagcactatatagagtggacccagggaggcccaagaaccagaggcccaagagtgtgctgaaatgtgccgcctccttagggtgcgaacctttgcgataggatgtgctgtgaaacctaagtcaaggttggttttgaaggctggggtgaggggcaaaattgttactagatattaagaccgtttaatgttccttagcgttctgaatccatctcatgcctcagtgagaattacaaggttttattcagagcgtttcagagtttcatacggaatcaggaattgaacaagttgctttttgtttaatgttggctttcaataatcacatgggatgatcttctggacataagtgaaaacatgtccaggtctctactgtcattgctgtaggataaagtgctctgccatcttccatggttatgaatatttattaatgttggaataacatttcattgtttagatcacagctcagttcctatagaaaacgaactgtaaacctatctgcagaccatgcaagaggcacaataaaacttgaagtgaatgtgtgctgtgctgctttttctctgggttctccctttttttccctcacatctcttgatcccttaggtatccgaagctatttcagtgtaggctggattgaagacagccctgccctcctgccttccacagcaaagatttttctcagaaaagtacatttgtttttgtttttaagtaagttgctctgtttactacaggtaaaatttgtgtgaagttggggggggtgtcacagagttcctcactggaacatggcttcatttccttagataaaggaattttggtggtggagggggggggtgggtcgcctaaagaggaggctgtactatgaacagtagttgatctccacatctgagtttaggtcttggctgtcaagcctccagcatgatcaggaagcggggggggggggggggggggggggggtgtgagtaaaaatg

SEQ ID NO: 26157 - DNA, 1223 bp, Mus musculus
ctgttctgtaccctcctcaaaatgtaaaatgtgacttcagacaggtttaagtcagttccttcatgggctgtgataataaaatgtctctttgcttcagtttacaattagaaaatttcatgatacgtaagcagttgttttgacttactgctgtgtgtaaggaatatagaaacttctgtggataacctaactattccttccaataatgaaagtgtagaactaattggtggtagtggtttccattaacagaaggaaggagtagaagtattgaaatgccattataaattttgaaataattattatcacagccttgccttgaaaccctggtttagaacttttagagagctatttccagtatgtgttagtttgttggacatttgagaccccaggaaatcccctttctcgtaacgttctccgcttggatctgatctcaacagggtgtcgtagtcactcttcagcacagttcttaattggagaccaggagccctgggcctttagaggtggtctagcaggagagttccaggtatcaatatgaattcacaactgaattgacatttttctttgttttatgagaaaccttatgttgcgcatctgatggctggaaggattggtctgccgaaggctttctagtcccaaattcaatttagttacatagctggattttaaatcaaattttcctcctctttcacagtaatttctgaaggagatgctgtcaatcccccgcgcctgcgaagcgcagcggctctaggtctacacttcacattgtttctttgcaggtcgcacagcatttaaatctgcgcccgcaatgcacaatgcgcgcatgcttgtccgccgtaggaaactccatgagcaaaaaataaaaaataaaaaaaattaaaaggctgattatgcaagtgattgacaaagggtctaaagggtagttccttggtaacttaataaaaagaatatgcttaaaacaacaacttgtcagctagtgacagcctgaacaaggtagatccgttcttgctgctggaatttgttcatggatttttcaggtgctctacttttctccccccaacaggtgctctgctgcgcacagcaaactgaagcgcattgctttggggataaagcgtctcctggacagataaccctcttcagaccaaacctctcctcctgacattctgttctgccatcttatagaaagatggttcatttaagattggtttttaaaacatatttatgtcata

SEQ ID NO: 26158 - DNA, 2060 bp, Mus musculus
gccttccacacactcagccaggaagccctcctgaaggagttctccaccatctcctgaggctgcactgcctgagagccactgactgccttacccatgaggctcctgggctggagggcgagcacaaggagtggggactgacttcaaggttggagagaagcgcagaccccgaggctcgtggtgaaggccgtacttcagtgagcttggacaagcaggggcaagcccaggatgctcttatttggggagaaatgggagggtaacgggagaggcaaccaagagtggcatttccaggctgcattccctgggtactgccccatgatgccaattgagattccacgtgctggcttctgactatacaggtgctggttggacaggcccaggctgctgccagcactctggaggccaatggctggtcatgactgatgatggctggtcatggcggatgccacatcctgtttccttttgaacctgagcaaggcccctgcccccactgcagtttgcccagtccttagcacctcagctctggcacagagtaggtcaaggatgggcgccttttttctgtctttaaattcaaagttgacacctctgagaaactggagattggatctgcctggtgctctgctgtccgaccgctcctttctggattttagttttggcaccaggagcacctgttcgctttcccttgccttcccacgttgactcgtcagcacaataggcccacaactttagccttgcctttttagtctgttttaaactgtcttaaaggagcgcgtgtgaaataaacattgacaggctttctggagccctcaaggtgcctactttgctggtcccctttccagcagctccccctccccacccacccctgcagtgggagcctagatgagctcctccacgtgttccaccccctcaccctgctgttgtttacattcagcctgcctaagaatttcctctggggaggaatctgttcctgctgtggtctggtgctggcagagaacctgctgggggtggggtgctgttcatagagacaggctaggtgagcaccacgcccccagcctccatcttgtctagccatattctagctgggccttgggcacatccaacctccgtgaagttggcctgtggattctatcattggatggtctccatggaaccactgtagggttttcccttccccacagctccccctgaaatagctgctgctctaagtccctccgatgtaaagcttcgtaaagtcccaggttggcaggggcaaaccgcacagtgaggacctgaggaggctgagagtaggcctggggcgtcctgggctcctgtgcattcagcatccgtctctctggaatccttgccctccctggaagccagccctgactgagcagaggtgtgatcgttctcgagaacctgttggcacactgacatgcatagatgtagaatcttaagccattgtagggtgggtcatctctaatcacgggtccccggatggataacttgacctgaggctttagtgtttcccatggtgataaaccccagagcagctggagctggagctggtggcaaatcaaagctattaaaagttgatttgtgtgtctttagtgtctcgttagtgtcttttcccctcgtcatctctttgatgcaggtattggtcctgtgtcataaaaggacctcttggccttgatagaggccagctgagttcagagaactgtggtttcccttgcctttgggtgaaagaagggagtaatgttatgagcaggtccctccggttccgtctaggacaagcagccctaagcaaagctctccttttttcctgactagaagcccacccttgccgggttccttcctgtacacctaagacgtttagcctggagtctacaaatcagcttggctggtgcctctgacagctctgtggaggtttctgggagcgttccttccagagacaggcctccttaaggcagctgcctgtcccagcctcatacaggaacacccgccacagttcactgactcaagtatttggaaagtaaatctgactgaaaagactcaatgtgttgaggtactttagctgagacctttgg

SEQ ID NO: 26159 - DNA, 1186 bp, Mus musculus
tttgatctattcacctgagaggtggaatgtagagaaaatagaatatggaagatgaagatcaggctagaggtgtgttaaaaagtattacaacatggcttagatttgaaacttagtttctccctgactcccccaactgctacagttgctgactgcatagctgccaccatgccttccttctctctctaaaaatagatttatttattttatgtatgtgagtacactgtagctgtatagatgattgtgagccttcatatggttgttggaaattaaattttaggacctctgctcgccccacttgaccctgcttgctctggtgggtcctgcttgttcagtccctgctccctccagcctaaagatttatttattattttacataagtacactgtagctgacttcagatgcaccagaagagggaatcagatctcattacaggtggttgtgagccaccatgtggttactgggatttgaactcaggaccttcggaagagcagtcagtgctcttacccactgaaccatctcaccagcccccttctctttttatttattttttactcaaaaatttttttttatcttatttgtgtgggtgttttgcttacatgtatgtctctgtaccacttaagtgcctgatgcctgaggaagccagaaaaagcctatcagacagatccccaggaactggaattatagacagttgtgagccgtcatgtgggtgctcgtaattaaacccaggtcctctggaagagcagccagttttcttaattgctgagtcatctttccaggacctgtcctcttacaaatgtctgagcaggtacatatggtagtcagaagatagccttaggtgttgctccgaacacactgtccatttctttttgaggcaggatctctggttggtctggagctggccagagaatcctaggaattccacatggatggctttatgtggcttctggggttggacttgggcttgcctttaccaactgaagcatctctccagcccctcctcttcttctttcttaattatttttattattatagaaaagtaccagtgcacatttttgctgttaacaatgccacgtgcacagcatggataaatgacagtagcaacattcgtctttttaaggtgttttgccacataccttcattgataactcagaagcacctccctgttctgcttgcgcttccctccccc

SEQ ID NO: 26160 - DNA, 1203 bp, Mus musculus
gacacacctttaatcctagctcttgggaggcagaggcaggtagaaatctgtgtgtttgaggccagcctggtctatatactgtgtgccaggacagccaggtgtttatagagagttcttgtcttaaatatcccaaacaatcaaacacaacccaagaaacagtataagcttggtttgtcctcgttgggtagtcttagaattctgaaagagctgaaagtgactaccccactggttaacacctgtcctgcaagctctcttgggttgctcgagacgctcaggggagagacattacttgattatatatatggtggcagctgtagctcaatggcagagtgcttggttgccagcaccttataaaagtcagcatggtggcacatggtgatggatgtggaggcaggaggatcatcttcagctatatagtgagtttgagaccaacctgggctttatgataccctgtctgaaacgattaaaaatatatacattactacttgatgttattcttcaaatgttgagctcattttgtgtaatagtataacaaatatccaactttggcataggcaggatggttcagtgaggaaagtgcttgctctacaagcctgagaacccgaactagatccctagctatcgacataaaggtagaaagagagacatgccctcaccttcatatgcatgttagaacacacgagctcagcaacaacactagtaatgttttatttgtgaagatttatttttattttatgtatgagtacactgtcgctgtcttcagacgcaccagagagggcatcagatcccattacagatggtcgtgagccaccatgtggttgctgggaattgaactcaggacctctggaagagcagtcagtcttcttaaccgctgagccatctctgcagccctggcccctacatttttatgtggtattcgtacatttgcattctaaggcagtacacacagcagagacgtacagcacggaggtgtcattgatatccagatctatgacagcaaattggatctgtttagaattgaaagccaaattccaaaatatcttaatgagaagaagcgtagtgaggattgcctacccatctgtttattcaggtcactgcataagccaatggaaacacagtacttcttctttaaggatgaagcttgcctagttaccatggatatccaaagccatatatgtgtggttgtgagtgtgagtgtgtgta

SEQ ID NO: 26161 - DNA, 1197 bp, Mus musculus
aatatgcactggagacctgtgggattttaagtctcagttgaaaaagaattgagagttccttgaagatgtaaagattctagaactgcttttctataggaccaaaaaataagtttaagtttgttctacaatagtattctaaatttatacagttaagtttgaaagtagcatattactattattttgaaatcatatttatttttggcttcttaacttctgttttctgcctatagtctctttcctaggacttgtgaagacagtcaagtgcagtgtgatttatgaggcagtgaagggcaagtgccctgcagtggtgaggacctgatcgatggagcacatgagtctgtagtggacttcctgccctaatggtcctcagcgcgatcaatatttgaaatttaatttcaccatcgttctgtgggcactgcgagctctgcagcctgccttctttcctcctctgatgtgtgtgtggccagacttctacaacgctttcctgtttgcttttagatcagccctaagcttcagccactggcactttctatggatttaaaatgtattgtgttatggggcaattaatattttaagtcttgatattacatgatctggggagggggctaatgaataagatctatagccattatttatcatttcttcttcataaaaaattcccattgaatgatatttcaatagattctgtagtatcctaaagtgtctggccctggccctgcctgtctgcctgttcaccctccctccctctctcccttctctccttccatttttttttttcttttaagatttattaagccaggtgtggtggcgcacgcctttaatcccagcactctggaggcagaaggcagaggcaggcagatttctgagttcgaggccagcctggtctacagagtgagttccaggacagccagggctacacagagaaaccctgtcttgaaaaacaaaaaacaaacaaacaaaaaagatttattaatttattttatgtatttgagtactttaggcagatgcacacctgcatgccagaagagggcatcagaccacattatagatggttgtgagccacttcgtggttgctgagaattgaactcacagccatctatctctccagctctttaagacagtgttcccatagctcagactggccttgaactctgtacagctaaggatgatcctgaacctttgatcatcttgtctttc

SEQ ID NO: 26162 - DNA, 2211 bp, Mus musculus
aggtgatcctcagagtagctccctcctctagtttaccactgtctggtaagcaggccagagactccagaagaccagctcttttctatacagtctagcaggcttccaggggacctcccaaggagctcaggggagctgtgccattctctctgctaggttgttcctcaaagtcattcaagctgtactcgccgaaggagcccccgaacggcaacgccttccctcccttccaccccggcaccatgctggatcgggatgtggggtgagttctttccttcttcctggtcctcattagacgggaaactgcctggaaagggccttctgcagtaatttctcttccactgtgactctcatcatctcttcccttacacagcccaactcccatgtacccacctacatacctggagcctgggatcgggtaagtggatcgcagccagccaggaagcttttcctctgcatgcgtctgagcagagaggggtggaacagcacggctcagccactgacctcagttccttccctccccaggaggcacacaccatatggtaaccaaaccgactatagaatatttgagcttaacaaacggctacagaactggacagaggtatggcagaggaagggagcggggtccagaggagcacccctgtgagatatcttatcacacccatactcatctctgggtttcttcaggagtgtgacaatctctggtgggatgctttcacaactgagttctttgaagatgacgccatgctgaccatcactttctgcttggaggatggaccaaagagatatagtaagtgccctctgtgggagacagtgttacgccttctttgtagttcgtgagtctggaagtgtgaagggtacgtcttggtcctttttctcttccactgtgagacttatctctgtcctgaaaaaatttctcccatctctatagccattggccggaccctgataccacgctacttccgaagcatttttgaggggggtgccacagagctgtactacgtgctcaagcaccccaaggaggcattccacagcaacttcgtgtccctcgactgtgaccagggcagcatggtgacccagcacggcaaacccatgtttacccaggtcagcaaaccagcaggatagggagccccaacatgggctccagcggtttccccaaggaggcgtggcatagtggaagcagccaaatgagaagggagggcctgtagagcaactagcagatacccgtttagtttattcatgtcagttttctgggccccgaggtatatggtgaaccagagcccgccctcatagagcgtgtagtagatggggttttctctgcctacttgggaacaggacgaggttctgttaagctttcctatggtgtgtaagtatatgtgagtgtgtaaaggccaggtgtgacaggtgtatgggatgggggcatgctgcgacagttatgcatccagatactcgcacaggtagcagaagtgtatgcagggggagagcctgttactcgtgtgtgtgtttgtgtgtgtgtgtgtgtgtgtgtgtgagtgagagaaagagggcagggatatgatacgacaaacctatccccaggtgtgtgtggaaggccggttgtacctggagttcatgtttgacgacatgatgcggataaagacgtggcacttcagcatccggcaacacagagagctcatccccagaagtatcctggccatgcacgtgagttgtgggcaggacctgagatgggggaggctggcttgagggactgtgctgtgcttagagagatgggtttgatgatagcctttttgctcagatgacctgataccactgcccttcctcctcctctaggcccaggacccccagatgctggatcagctgtccaaaaacattacccggtgtgggctgtccaattccactctcaactacctccgagtaagtctctgatgatcctggtgttgtcccagcctctcttatctgagctccaggtctcttccccttagagtctaatcctccttctggtctacccccagctctgtgtgatactagagcccatgcaggaacttatgtcccgccacaagacctacagcctcagcccccgagactgcctcaagacctgcctcttccagaagtggcagcgaatggtagcgcctcccggtgagtcccttgccccagccctccacagactcttgatggaacgcctgaggctgtagcttttatctcctgacatgaatttcc

SEQ ID NO: 26163 - DNA, 1204 bp, Mus musculus
taattgggcccttgggtctgctatctcagtcttcgtgggagggggagtgtagcagttccaggtaggccgtgaagttaagagtggtttgcagattcgagttgggggagcaatgcttgacaccccccccccagtgaaaacttgaggactcaaattcaaatcacaaccctctctaacaggtatcagagcttgccagggaacacctgtgtctgagagtgccttgagatttttcttgtacggtcggggtataaggccacaagtgctaggagggaacagttgagccatgtgatgggagaggttagtctaaagagaatcccagaatatagtcggtccccttccttataactctgtgtcctcaaactggccttccttccaggatggaggcagctttctctagaaagtcagtggtcagtgtcctgggtctagcctggctggatctcttgcccctctgtatgtcctgtattctgagaagcctaaacttcagaactaggagcccccccccccccgccgtatccccgcaccccaacattcatacaaatacacaatccccccagggaagctgctagtgcagaatcttctttggaaatcacgtgactctggccaagttggactgggttgggcccacacttcaagtggctgctgtggctgacattttaggggcatagggcccaggaggaggaaagcctgaggatcctggactatccgggtgtgggaatccctggctcctgctgcagagggtggagaagaggaggagagaagagcttgccaagctggaatcctgcctagcttcatagccttcccaccaatttgacttgtgtgtttgtgtatgtgttttcgcttttacaatttggccaatgctagacaaggtagttcatgctcttagcccaccggtgggtcatttccctacaacgtgatgtatgaagacccaaagtaaggcagggctttaaacaagctagtgggctgaaacttatttatttttttcccctcgaagacagggcttctctgtgtaacaatcctggttatcctggaacttgctctgtagaccaggaactgcagggctcgaactcagagatccacctgcctctgcctcctgagtgctgggactcaaggcatgcgccaaccaccacctggccgaaacttaaatttttattcgtagaggttttatatggagaagttgccaggctgggggaagatgggagattggtcc

SEQ ID NO: 26164 - DNA, 1144 bp, Mus musculus
ctggagaccctcgagaccaagacctcgatggggtcagtcccctcctcctcagcagcgcagtgatggggaagaggaggaggaggtcgccggtttcagtggtcagatgcttgctggcaaactcgacaactctgtgaacaatgtcctggacttccccatgcacctggcatgccctgaggaagaaggcacagccgagggagcagatgcgccagcgtcagcccctggtgacgagagcatctcctccttgagtgagctggttcgggccatgcatccctactgcttgcccaacctcacccacttggcatcccttgagggtgaacttgagggacaggctgatgctgacgctgacgagttgacgctgcctgagggctgtgttgtactggagattgttggccaggcagccacaactggtgatgacctcgagatcccagtcgtggtgcggcagattccttctggatcccagtctgtgctcctggatgagtctctaggaagcagtcctgccttgcagttactcatgcccaccatggagtccgagaccgaagctgctgtgcctgaagttgctccttgccccgatgaagaattaccactgagctccgcctgcttattggagcccagggaaatcatggagtcattgacacccaaggaacctcagagcctacctgccagtgcaagtcagggttctcagaaagttcccagaaagggtaggaagaagaagaacaaggaacagccaacagcctgtgtggaagcctgtaccaggcggctgaggtcatcttctcgaggacagtctactgtgtctgcagaggtgaactctcaggcaggcagttcacagaaacagccccaggaagagcttcagagagaggctgctgcccttcagagcagagggaagccacgggcttgggctcgggcctgggcagctgccttagagaagacagggtccgagaatttagagagaagtgcgggacaggatagtcctgctgaagaagacgcactggatctctgtcctaagctgcttgagaccagccaagccaaccccactctctcattaaatgactctgctcaagctgactccatgcctgttgactctgttgaaggtgattcccctgcagttggcaatgctgcacctggtgatcaggcttcatctggtaca

SEQ ID NO: 26165 - DNA, 1239 bp, Mus musculus
tggctcacaaccatccgtaacgatataataaataaataaattaaaaaaaaaaaagaatgaaaacgctaaggtaaattaggtagaacctggtcactaggtaggtttaggtagttgaatggctgacctcaggtagtgagagaagttgggctgttgtcgatgttagtaaggacccgctgagaagtggggacttgagcctagagtttggagtataaaactggatctcaccctatctccatcctcccttcccccacagggctcacccctccagctacccctccccaccagttatggaaacccctggctgctgtctcactcttggcgaaagccaaatctcctaaatccaccgcccaagagggaaccctgaagcctgaaggaattacagaggccaaacctccagctacagcctgcctccaagaaggggcccacagccctagtccagtccatgtgggctctggggaccatgactattgtgtccgaagcaggacacccccaaaaaggatgcctgccctagtcatctcagaggtgggctcccgatggaatgtcaagcgccatcaggacatcaccatcaagcctgtgttgtcattgggctcagctgcacccccactcccatgcacggctacttcccaggagcctcttgatcacaggactagcgttgagcaggcagatccttcagcgccttgttttgccccatccaccttgctgtctcctgaggcttcaccctgccggagtgaaatgaacgctaggactccccctgagccctcagacaagcagcagtcaatgcgctgttaccgaaaagcctgcagatcagtcagcccctcaagtaggggctggcaaggccgccgtggccgcagtagccgttctgtcagctctgggtccagccggaccagtgaagcgtcctcgtcctcatcggtgtcttcctcatcccgatcccggtcccggtccaggtccaggtccttctccccccccaacaagaggtggcgaaggtgagctttgatggcctgttagcttctgtcctttgggacgctcctacactctggttaactttgaaaaggccatgggttaactcatgtactttgagtcactgtggctctactcctttttctggattgttggagtctggggtactcctgaagtttctgtttacttgagatgcgccttgggtagatagcatttggtctaactggggttatttcatactattataattggtgcttatacatggtatttggtattttcttg

SEQ ID NO: 26166 - DNA, 1231 bp, Mus musculus
cttgaactcagaaatccacttgcctttgcctcccaagtgctgggactaaaggtgtgggccaccactgcctggtccccttcatttttataatcagaaggttggccattggggaaatgagaagaaacacctctgtgcccaaatggctcaccctctcctctagtgacaactatggtttcgtcacttaccgttatgctgaagaggcatttgcagccattgagagtggccacaagttgcggcaggcagacgagcagccctttgatctctgctttgggggccgaaggcagttctgcaagaggagttactctgaccttggtgagtgttggagacgggcttcttgacagcatttgagaggaaagcttgctctgggtttgacatacagagaaccccagagtgggtgagtgggaggggcctcccacgttcttcacaagcagggcagtttgcctccctctgcttcttggatggccatggctcccatttgagaagtgtggtaagagaccttaatttttgtccctttctgcttctgtagactccaatcgggaagactttgatcctgctcctgtaaagagcaaattcgattcacttgactttgatacattgttgaaacaggcccagaagaacctcaggaggtaaccctgggcattcctcccctacccattttctctggaggtgtccagcctcttccaaccccctccccaactctaggggagagctgctagtgtggaaaatgactgttttataaggaaatggagaaaaaagttcaataaaaatgtgttaaattgggatttttaagtggtatttggtttttaataacaggtgttgaacaaattaacttgaatttctatgtaaggtggtgggggggggaactctaataaacatgaactagagggaacttccagcgtgtcctttctgtgtgctaatgtctatctggtatttctctgaacacagtaagccgtcactcagttcctaggccctcttctataggtgtaaggtcacattgacttggcctctcacatctgtcacatgtaaaataaggcaggaaaaaacgtctcgaacttgaaaggcatgtgaagtttatattttgacaagactcctgtatcctcattctgtgtagctaaaggtgaccttgagcttctacctctccaccacccaagtgctaggattccaagcacccacgttaccacatctggtttatatgatgctgggcattgaacccagaacttagtgtatgtta

SEQ ID NO: 26167 - DNA, 1132 bp, Mus musculus
acaagtaggaaaagtcttaagatgtaacatccattttgagttaagtagggagatagcataacttttgagacaaggtctctttacataaccctggctgtctggaactctgtatgtagtccaggtgggccttgaactcactgatctgccagcctctttctttgaagtgctgggaccatgcctggctgacagattacatttgatcaaggagtaacagaatctgacccagaggagcatactgcttccttagccacgcctcctttcttacagacacagcaggacgccaatgcctcgtccctcttggacatctatagcttctggctcaagtaagctttcctggtgcacttgggctgtgttctcccctaggtgggttgggctgggctgtgttccttagtttgagaaggtcctgatccctcagaggtcagccttctctgcatcagcaggtccaccaaagccccaaaggtgaagttacagtcaaatggaccagtgaccaagaaggctaagaaagagacttcatccagtgacagcagtgaggacagcagtgaggacgaggacaaaaaagcccagggacttcccacacagaaggctggtaaggcttgtgaggggcggggggcgggggggggggagggctccaaagagactgcctggcacctgcctgagggcgacttctcatgggtacctgcactacttctactcagccgcacaggtcaagcgagccagtgtgcctcagcatgctggaaaggcagcagccaaagcttcagagagcagcagtagtgaagaatccagtgaggaagaggaagaggacaaaaagaaaaagcctgtccaggtttgtagcctcggttgtaaggatggcctcagaggagtagtggagaaatgaaacagggtcgggcgggcggtgggggctgctccgcattgcatgaattctgggatgtggaaggggaggctgaagttgaggtctcgaatgatgtgatccaagtgtagacaggattctcctctacccagggactttgtgttctttcaggatactgtgtagggccccaacaatacaagtgttttgctgggagctgttgacaagatgatgtcaggaactgttttatcaagcagttggactctgtctcaatattcatatgttgta

SEQ ID NO: 26168 - DNA, 2189 bp, Mus musculus
cgtttactgcattcttctctagggagaaagaagggcgtcttcccctttccgaagggtcagggaggaggagattgaggtggactctcgagtggcggacaattcctttgatgccaaggtgagaactgtttgccactcttgggaccctggagggaagatgagttttttggttcaggttgctggaacctcgtggattcagactgctttgaaggggcaatagagaaagaaggtgacagggcaccggattgtcttctgtgcaatgacctcttttttttttttaaaccagcgaggtgcagctggagactggggggagcgagccaatcaggttctgaagttcaccaaaggcaagtccttccggcatgaaaaaacgaagaagaagcgaggcagctaccggggaggctccatctctgtccaggtcaattccgtcaaattcgacagcgagtgacacgtggtcatcctttggcaaaggaagggtgattttgggagactggcactcaactccagtggacccagaaactccgtgttaggagacagttgtgacaaggacggtgtggagcaggtcctgaggtgtgtcagcctgcagtcctctcaggctcctttttctggacagctgaatatcaaggacaaaaaggatttttttttttaaagaaacccattcagttgtcaattgccttcctgttctgtgggtcttcatactgagagatttgtatattttatattaaatcatgtcatacagatttttgttgtgattttcagagatgacttccacagattaaagtcttagctgttgcctaaggcaaagcaaaacaacacatggtaataattttccctactggaggattctctttatgtgaaagccctggtgggcaatgacataagtcttgtgatgattgtctgctaagcatactctgtgctcatcttcatccattgggcccggcaccaaagcttctagaagccagcgtggatctaccaactttgggggataaaattgccattcttggtgcagtaacctactaattggcaggcaggattctcgagtgtgtgaatgccatgcagctgtctttgttttgttcttggtagctgttactgctacatgtttacagtacttttagttttaatttcgaagtaagcttttctgacagacattttgcaacaacttgactgttgtatattgacaagttcatggatgtatttgattcttattaacatcaaggacaggctggtaagtacctgcatggttgagtcactggtcaaggaaatggagatgacctatgaaccctggtgtgaagtagatacactggatctcctgggcacctggagcagcagcaggagacagcccaaggaggcaggagggctctaactaagcaggaccattttgtcttgaagtcggtacacaggagtaattatgccctgttcaagttggtcccctggactcactattagtaccttacctataatgttactgatacagactagccaggaggcagggaggcatagctgggtggtagtgtgcttgcttagcattcatagaccaagtgtgatctctatcaccgcaggaagtaaagagcagagagattcctgggccaagggagtggattataaagctgtaggatgtgaccattggcagtgagggcaggggtgggacgtggctggcctggtgagaaacggataccgggcattgcctcccctgtttggtgtccacgctcacctggtaacctgctaaaagctgtggcagctccttgtggaaggctgcatggtcaaagttctgtgtcttaccacaaaacaataaagtgaatggttcctaatgtgttcagagttatgtcgttgtgcacgtaaggccttgtagctttgtacgtaacggaacaagtagggggctggggctgagacctgcttgagttcactgtagaggctctcagcttgccagttctcaacccgaccctcacttccttttctggactcgaacctccccctaccccctgtattttagagatggtgtgtgccttgcatagctctttttcagggtttagttgagctaatgacctgtaagccaaaactagctctgctacttgtgtttgtatcatctggggactaaaaaatgatttttacattgaaatgccttattttatccaggtgtggtggcccacgcctctaatcccagcacttggggaaggcagaggcaggaggatctcttg

SEQ ID NO: 26169 - DNA, 1148 bp, Mus musculus
taatcctaatgcctgggaggtgaagggaggagggtcagaagttcaaagtcatcctttgctataatagcaaattcaaggccaacctcggctatgggagccttgcctcaaatcacaaaatgtatgagtagtgttgctaagaatgtatgcatatgtgggttttagtacctgttttcagttttttttgggtatgtactttggaatggaatggctaggtcatgtggcaattctatgtttgccaaatgattttccttcttttcctttacattctcagaagtacagaaggattccaatttctctatatttttgccaatacttgttgttttaagtatgctggatgtggtggtttgaataggtgtggcttccatagactcatgtgtttgagtgcttggtccatagggaacagcgctattagaaggcaaggtctcgttggagaaagtgtggttttggaggaagtttgtcactgtggggatgggctttgaggtctcctatgctcaggctacacctagtgtagcacacagtccccttctgtttggctcaagatgtagaattcttggctcctctagaaccatgtctacctggatgctgccatgcttcccaccatgatgataatggaccaaacttatgaaaccataagctagccaaaattaaatgttttcctttctaagagttaccttggttccagcaacaaaagcctgagacaatagacaagcactctacccctgagttatgtcccaaaccttttttaaaaaattactatcataacttcaaaagcttttgagacctaattagacttcgataataaagctcgttccagttttgttatcttggcaacatctttcctgaagtaactgggctggctgttctttggggcccaatgttttaaggttttagtttttgtgcttaagaattaagaatgtggagggctggagagatggctcagcagttaagagcactgtctgctcttccagaggtcctgagttcaaatcccagcaactacatgttggctcacgaccatctgtaatgtgattggaatccctcttctggtgtgtctgaagatagctacagtgtacttacatataataaataaatcttaaaaaaggagttagaatgtgttttgagttagggtgtggctcctttggtagactacc

SEQ ID NO: 26170 - DNA, 1138 bp, Mus musculus
catgcagacaaatatacatgtaaaatagaactaaataaatcttttaacaggaaattaaaagagaggcaagttaggggcttgccctcagacctacacgagagcatgtgtacacacacacactcgtgcatgcacatttgcttgggtgtaaatgctacctgtgtgcatttatactcatagaagccagaagaggacatcagaacccctggagctggagttacatctcttaagcctccaaggcaaatatttttataaagtgaaaataaaaatattttggaaagtattcacttattagtccgccaactgacccaacttgggttttgtttttaaacacttatgttattttaggaattctactttttagttaagataatgtgtttattggttggtactgggggttgaagccaggaccttgcaggtattaggtaagggctctaccactgagcttcatcagccttaactcagtgttgaaacggggtctcactaaattcctctggctgatcttgaactccatctgtagctcaaccaggctttgaatctataaacctcttacctccgtctcttaagcaactgagatgacaggcatgagctacacagctgcctctaatttggttgagtggctagactctgattaaacacgagtgattcatcagcttgcacatttaagggttaatgtccaaaagcctgaggattagaaatcataaacttacatttccttctaactgtcttgatagtttgcaggccatgttcacaagtacccagagatgatagagtcaaaaatgacataaaaactcatccttcgtagatatctgccacaaaaagtttcaagaccaccagtgaagaaaggggctcttgtatgtgctctctggctggaccaccttgtcaaacaaagtctccaccatctttctgtccttgcagcacagtttcccctatgggggagattagaggatgtgaaacacagcccaaccacacatgggccaataaccgactgctttccataaacctctgtgcctgaggggcttgaactgttttctgcagttaagtagggttaacctgtcttgcttgagatcacatttcacttcccctttaaaaaggtaaaacgtgctggagagatggctctatggttagaagtacttgtttc

SEQ ID NO: 26171 - DNA, 1151 bp, Mus musculus
gcccagggcagctgggcagagctggcagagcgactggggttgagaagcctggtggacacatacaggaagaccccgtctcccagcggcagtctccttcgtagttacaaggtgaggcagcctgtaccctgccctgaagcctgaaaccttggcctctcagagttccctcccccaccaagactctctaaccccacaccctaagcatcactcagacctcctgtcgccttttctcggcagctggctggtggggacttggtgggtctattggaggccttgtctgacatgggtctccatgagggagtcaggctgctgaaaggtcctgagacccgcgacaagctgcccagcacaggtaaggacaaccaccttggaaggtgtgtctgggctgaggggagaaggcatgaggcttgactctcccctgttccctagcagaggtgaaagaagacagtgcctatgggagccagtcagtggagcaggaggcagagaagctgtgtccaccccctgagcctccaggagggctctgccacgggcacccccagcctcaggtgcactgaatggccccggtcaacttccacccagatccctctgtacagcatccctgtctaatcgaaatcttatttaaacctcaagcccacatctcggtgggtcaaataaaggggaagacccctccccaacttacggtacagcaaccccaatgtgctgcccatcccagtccctgagcgagaatagaggaggaggcccagccagcaattcagagcagttttaatgagggtggaggctgtacaaagggtagggcccaccaaagaagggaagcaggccgtgccaccccagcctgtggatggggcctcaaagtggatgcccttcctctgtctctgcaaagagagaggtgagcccttggggaggaatagggggaccagctcagccccaactcctggcttctgtctgagccaggccccaggatggaggggtgttgctggtgtaagggtgaggtggtctcagcagaaagcagaaacttgatcaggcctcccccacgaaaaaaaaaaggaagaaaaaaaaaaaagaaagaaggaaaggaaaggaaacccccatcaaaaattaggggcatgggcccctcccacccttcctgtacgaaaaagtgcaaaacattatcacaaaaa

SEQ ID NO: 26172 - DNA, 1148 bp, Mus musculus
gtgggctgtgggtgtttgttttcctgtgactgccctttgtaaggcagaggacacccacattggccttgggggacaatggactcagcaggtgttgagcagaggcttgggggagggatctgcaggaggagtggcctagccttgttcttgggctcttgagctggagggaaatagagaaagcactcattcccaggatgcagggggactggaaaaggtagacaatacctgattgggcgaacctggggggtatgaggaccctggcgagggctttgagggagcaagatttcataagattgtggaagtggagccgggcagtggtggcgcacgcctttgatcccagcacttgggaggcagaggcaggcggatttctgagtttgaggccagcctggtctacagagtgagttccaggacagctaggactgcacagagagaccctgtctcaaagcaaaaagattgtggaagtgggtgcatggtgaaatgagaggtgccaaggtttgtagccagaacctgtttagaacgtcttggttaatggtcattaccaaggcttttagagtgcagtttctcatttgctgtggacatgaccataaagaaaaattcccatgaggtttttcataggctactacctgttgggaacatttgtttaaaaaaaaaagaacttcttggttccagcacctcatagcttgcgactgtgggccagttatttacctgatctccgggctttgcttgcgtctatagactgtagatgggaataggaaatgcactgtgaagggttcacagccgtggatgtggaagccaggcctgtcctgaaggtctcagagccagcacacagtcacagccagacttcgggttggaaggcagcgcgtgaatggaagtgtggaggtggcatttaaaacagaattgggagggtgacacataggaaggtctgagaggcatccatggtgaatattgcaatgtggtggcatacacctgtaattccagcaccggagaggcaggaggattgccgcaagtttgaagccagccagcccttgtctacaacaaagacttatagattagtcagaggagtccctaactgattttttttaaatgtatatttttggtgtatttatatcatgtgtgtgtacatacatgtttgcatttaaggatatccatgc

SEQ ID NO: 26173 - DNA, 1356 bp, Mus musculus
aacttttagtggtggcttaggacactcgtgatgtttcttttaccatcctatgggctttggagggttaactgggctgaccatgctcctcttgtgtgctctcaccccaggtcacgacctttttcagcaatccccaatgacccctgtggggagcgttcggccatggccagagctgccagccccagcccccgcccccgcgcaggctcccacactccgccagggctgcttctacctgctggtgtttgtccccatcacctgtgcgctgctgcagctcttcacctggtcccagttcacgctgcatgggagacgcctacgcacggtcaaggcccagcgtcagaacctggcccagatccatactctgaacattaagatggtgtgagaggcccatcaggaccactgtgctgagatccttggcctagtcccagcagtagcctctcgtgctgaccagcatcctgtttcctcacctctgggttcagcctagagaacggatggtgaagccgaaccaggagcatcaccaaggactgccccttctttagtcatgtgactcagcttgtgcaagggctgggccctgtgtgctcagggacctgcgactcctgtggggtagcaagaaaagaggaccagaaagggtagggctgagtacggtgcccaggaactgcctgggacctgtagctggggctggccatttggtgggctcgggagtttctgaagctgtgacgcccctcttgcccacgcagaagtcgactgaaagtgccactcgcctctcctcctagtcgtttctctcagagggttctctgcttctgctatgcttgaagtggcatgccctctgctgtagccccctcccgcccgcgcccccaaagccctgcaggcctctaaactctaaagaggttcatctcatctcaagtaaagccagtcattccaattctttgggtctgtgccgtgtgtgtatgtgtgtgtgtgtgtgtgtgtgtatgtgtgtgtgtgtggggggggggggcaggcagggttgttgggggctgggaaacagaaaagttccctgagataattttcctagagatactaggataaaattgtaaactgcaagctgaacctggtgatttttataattccagcatttggaaggctatggcaggattgcctcaaattcaaagttcgcctaaaaaaacagccaagggaccaaaggaaaaaaaaacctactgtcaccaacaaattaatccagcagagtgctgggtgattaggcctgcaaccggttccctcagcacatttcccacacagcattgcaaaacagtggtcaaggagcctctgccaggctaggggctctcagcccggaaatcacctgaacagcttccaaaacatcaatgc

SEQ ID NO: 26174 - DNA, 1393 bp, Mus musculus
actactaactgaccccttacaggaagagctctggcagaggcccactcctttctcagccaggcctttgtctggctgtgcggaactatggttactaccatagagagaccttgctgctgccgatctaggctgggctggccccaccccacccctccccacccgagtgccctgaggccggaggcagctgctgtctcccctgctcatccttctgtgctgtccatgcctctggggggcggggttaagttctgcccggttttgtttcagtttgggtttgggagactgaaaaagcagtctggccgtggttagagactgggttcaagagagagcagggtacactcgtgtccacctgggaaccaggtagggattaggaccacactgggcatttgaggacaggagatagcttcagggttaatgtacaagccccagccacatccaggggccctgagacactgtaaggactgtgggctgcaggtcctgctgttggcttctcctacgtcctggtttcgatgccatcatcacggttttatttattgacgtgtttgttcagtaaagggactacagagagggctcgctgtctcctacccaccggtcaccttgcttacactaatgtttacagcacctaagtttcccatagcatccaggcctctgtcattccctgctgatggagaactgacagtattcatgggcctcaggaccctgtgattggaggctgcacaggaaggcaccccagccagcctcttcctttctcctaaccccacttgcccactgccctggaaccaacaggctggttgtggttggattttctaagacagaaagtagcatctctctgtggcagaggccccttgcgagggaggtgtgttggagatctagaccctttaaaacaaagcaagctgcagttaaccatgttgccttttgccactctaattgaccagtggactaaatggcagggaggccccttctgggttggtcagattggagagaaggggctgaccaaagtgccaagacctaatgggtgccagccttgctctcagaagtggtccaagggcctttgcgcctggtacaagctagggtgagcctgtcttcaccggcaccctcacccgtgacaccaagtctcgcctcagttccagattccagacagtattctttctccgccatcctatgaccaaaggtccctgccagatgtaaagcgaagctggtgtgtgtggaatcagtgtggcaacccatggactgcagtgcgcataaccagctcacctcttagcccaagcctgtcccttgcacagcctcgcgaagccactttgcctggtggggcccagtgtacttaaataaagtcgttccaataggtacatcagtctgacctctttctgtgaccagtgcctggtaggaagagatatgcaga

SEQ ID NO: 26175 - DNA, 1446 bp, Mus musculus
tccaccctgtcaggaacctcaggaatgtctaaactcctgctgggaccagaccctgtcattcctgtgcaatggctctaggagagtggctaaactcagcctggtctgaccaggcctcctttccctggggctctggtttcttccagagaaatctcagggaaagaggttcaccacatcggatgaaacaagactgcccttactgtgacatgtgatgggtgctctgtagagggacccttccttcccctccctgcagcagctctgtggggttaacccatcacggggagggatccaggagtcttcctcactggctccacagacttcctcagcctttccccacccttcaaccttccaactccacaggaccagagattctgaaaggaagggacttcgactttctgtaactaaaacttcctggggcctgtgtgggctgccgagggtggcagtgccggctgccatgctggtgaaacatgttcctccttttctaagtgtgacactccagcagggcctgtagaagctctggggagtctaaagggctaggatacatacacgccagaccctggagccggggcttgggttttgagattgagagctgggagagaacctgaagattggtgcccctatggggcagatcagaaaactccctcagcggtatttttttaacctggtcttccctctctggcttccatgatcttggtgccaggcgaggtgtctgggtccctgttacaagtcaggagccctgtcaggagacccacttcttttgtacaaagatctgaatgctgcaatgaacagacttttgtacatttttatatcagtttttaatgtcagtggcgactcagttcctggggctacagctggctcaggatttttgtaagaaattttgagtgactcacttagattttgttcctacttgtccctcttcctctgtgtaatctaagtgcattaaacatatctgcagaagtgcctgagttgtgtgcttctttctgccatgctagggtgagtgtgtgtgtgtgtgtgtgtgtgtgtgtgtgtgtgtgtgtgtgtgtgtgtgtgtgtgtgtgtgtgtgttttcctaggatatgtatgacacggaatgatggaatttgtgaccttgccatactaagcaaatgccctacctctgagttatatccctaacccacatttgcttcttcctggatacctaaagtagaggaccaagatcagcaccctggcaacctcagagaagtggactgagtctgagaatgatcctggaagcccaggagtgccagacacaaacacacacaggcacacacacacagggggtcaaggggattggagctggaacacggtcttgggtactgggtgggtggtaccttctctgctattgtactgcttcattcctctttaggttttggttgctgctgtttgtttgagaaagggtctcatcacgtagcccaagctggccacagagtc

SEQ ID NO: 26176 - DNA, 1198 bp, Mus musculus
atgttggttataggtaaatactgatcattttatttagtcttgttcaattacaaccctcttctaaaatgaaaagatctgtcaggtggtagtgcacacacctttagttccagcacttggaaggcagagacaggtggatctctgtgaattcaaggccagcctagtatacggagtgagttctaggacagctagggctacacagagaaatcctgtctaggaaggaaagaaggaagaaaagaaaagtaaaggggaaagggaaaaagggaaaagggaagggaaagggaaaggaaaaggaaaggagaacggaccttaccctgtatgtgcccttccagctgtgcacagggtaatttggtagacacaagcaccagtaggggagaggtgacaggtggcctcctttttacccttgctgagtatggaagtcagtccttgtgcatagccggcgagcgctccacccacagaactacagccccagcccaggcgagcgctccacccacagaactacaaccccaactcagaagctttcctgtgtcataaagctcttcagcaaggacttttctgcctttttaaatggctcagagcacagatgttagaaagtcaagggtgggctggagctatggctcagcgggtaagagcactgactgctcttccgaaggtcctgagttcaaatcccagcaaccacatggtggctcacaaccatctgtaacgagatctgatgccctcttctggattatctgaagtcagctacagtgtacttatatacataaaataaacaaatctttgaaagaaagaaagaaagaaagaaagaaagaaagaaagaaagaaagaaagaaagaaagaaagagagagggctggtgagatggctcagtgggtaagaacacctgactgctcttccaaaggtccgaagttcaaatcccagcaaccacatggtggctcacaaccatctgtaacaagatctgacgccctcttctggagtgtctgaaaacagctacagtgtacttacataaaataaataaataaatctttttaaaaaaagaaaaaagaaagagagaaagaaagaaagaaagaaagaaagaaagaaagaaagaaagaaagaaagaaagaaagaaagaaagtaagtaagtcagggcatcccagtgttggtgttgggagctgtaaaaggggtgctgaggagaacaaatgggttgtatgtgtacactcatta

SEQ ID NO: 26177 - DNA, 1153 bp, Mus musculus
gctgggccgaccgataccagcttccctctgctccttgttctccttgttctcttctcttgcggtccccagcttggagcagcgtcccgcatcttcctgtccttcaagcttaattccgatactaccctctcaggcgttccccgcgcccacctaaaccttggtcctcttcttttctgttctgttgtcctgtagatacagatgattagtctttaaactctgattttatttgataatgaggccatatctagaatcttcttagttctgtttcataaagtatactagatatattcatttccaccccaagattccacattgtaaacgttctggattcctttcttcagctaccgctgaagaaattctggattgcctttcttccactctcctctctccttgagaactttccatttccgcatgtttttctcactgaggaaggcgcatttgttaggtaatttcctcaggtctgctctcagggttattacttgttttttttttttttttttactttgtcaaatctctgtataacctgtctactgaagtttttaaatttgacttattttatgtgggtaggcagtctgcatgtagaggtcagaggtcagcttgcaggcgttccgccctctgcgctgtgggtcctgggggtggaactgggattgccaagcttagtgacaagggtcttatctgttgagccattgcctctgcgtgcatttttatcatagatgacttttccaagtttgtctgcccgctcttgctctgactccccacccccacccgctccgccattcccgcagaagacctgggatgctttaggactgcatggcacggttgcctggggccactctgatctctgcagtttctactttctactgctgaatcaagcattggccactatctgtcctttgataatttctgtttctcacggcctgctctttcttttgggctttaattatttgaaacctcttccttttgtttatgtgtgtttatgttcaagagtatgcctgtgtgtgtgcgcgcatgcctgcctgcgtgtgtgcatgcttgtgtgtgtgtgtgtgtgtgtgtgtgtgtgtgtgtgtaggccagaggacaaccttagatagtcttcttcagagtccattgtcccttctgtttgagataaagtctctctagcctagaaccccca

SEQ ID NO: 26178 - DNA, 4010 bp, Mus musculus
acctttcatgagctttgttagagtgctgacccatgtggtaatttcttctcccacctgcctgttttagggtttttgccaaactctttgctacctccttatgaggaagtggtgaaccgacctccaactcctcccccaccgtacagtgccttccagctccaacagcagcagcagctgctgccacctcctcctcagggtggccctccaggtggcagccccccaggcgctgacccgccgccccagggctcccagggagcgcagagcagtcctttgtccggaccgagccgaagcagcacaagacctccaagtgtcgcagatcctcagtcccctgaagtgcccactgaccgggaagccaccaaagcctctgggacggagtctggtagccccatggccggccacggggagctggacccgggcgccttcctggaccaggattccgagtgcaaggaggagctactgaaagattcgcgttctgagcgtggcggcgtgtcccctgacagtgaagacaagacccccggcaggcatcgccgcttcacaggtgactcaggcattgaggtgtgtgtgtgcaaccggggccaccatgacgatgacctcaaagagtttaacacgctcatagatgatgctctggacgggcccctggacttctgtgacagctgtcatgtacggcctcctgttgatgaagaggaaggtctctgcctgtcctcggagggtcaggctcgggagcatgggcacccccacctgccacggccgcctgcgtgtctgctgctaaacaccatcaatgagcaggactctccaaattcccagcacagtggctccccgagctaggacacgccctgcctgcacctaggagctcaacgacaaccagggtcagggacacccacgagagaagcattaagtaacatggacatgtggcccggccactttgtcctcttatattttttccccctcctatcccaccttgcccacatctccaggtacaaattcagggtgtggatgcctcctctccccacaaaagcacagtgttctagaagacggagaagctgcttctgtgactcccgcacccccctttcagagctgtgtcccacctacctgcctggctgagaaacacaagtttgcaaagcccccccgaggactggggctggactgtgccctaaggtggtgctcagcggtgacagagtggattcacgagagaaccgtgtctcagtctaggagacaccacttctcagagagaagaagaaaaccctcagaggccagtggattgtcactgtggctgccagtggctgcagagcactggtctaaccctgtgggagggtgacagctagtcagggtggtgagggacttgctgagctgacaaggcccaggcagaaagtacacatctgtgcgttgtagaggggacccttcccagcctggttcaggtgtagatgatactacgttctctgggttttcctttaaaaacaagcaacaaaggctggcaggaaacagccagaccagtgggcaggcagggactctttgttacaagggaattctgctgcttctccccaggctgagttcccaagagtctgactaccattgggccaggaggagagagcctgaacaggcccggtggtgggagccttgggccttctgttgagtggagacccaagtctgaaggctgggagagctaagagcttccttcagttccgccctttgtccgtgcccacaggtggtcagtggtcctcgcccctcctgaacacagcctgcggtctctgtctccctgtcctctgtaagcagatggactgaggaagttgtgtgttcagggcaaggtggcctcatagcctggttctcacacagtatttcctgttgcgtttgacttaagtctgttgttttgtgtccttgtttgttttaaactgaccacttagaaggagcgccttggttacctgtggttctcgtggctgctctgccccagccttgtggagaaacatgactcactttcctgtacagcctgtgtaaaagagtcacctgggtaggaggtgaccactgcctccagcagacctcggggcctggttactgtcgtctggctccggagacccggtcatgctttgtcaggaaagaggagcagagacgccgctgagaggaacattccccacccagccctgctcatgcaaagagtttggttcctaccctgctcttgaacgatgatgcatagactagacttggcgccaccattatggtgagaaaggaataaaaaggcagaaaacccaagtccacatgtaaacacacagacccgaggctgtaaggtgaacgcgtgtctgcatttggataccacaaaccaaaatctttgtcgaacaaaagtgaagtctacacagtgatgttggatggcgtgtgtgtgtgtgtgtgtgtgtgtgtgtgtgtgtgtgtgtgtgtgtgtgtgtgtggtatgtgtggtatgtgtggtacgtgtggtatgtggccccgagccctgtgttttctgtgaagatactttgaatggccattctgctcacacattaaccacatgcctggagcacgtatggccctctcaaagtaatttattttacacatttactgtttaccgaacaatagtctgaccgtactcgggtgtatgcagcgatctccccgacggcatggcctgtgtttgccagcgacactgcccttcagagaggctgcttcctcagctcaccactgcgatttgcacactgctccatgggcactcagaggcctccattctgttccctgtgcgtggaaacatccggacccagcccccctcccgctggcttcagacaggagcttgattgggtcttgagttacaagcatgaagtggttgtggcccagacatcggcctgtcctggatcaacaggagtctctggccacatgcacagctcatcccccaagatccagagagagagagagagggctggtgtgtggtcagaggggcccgagctgcagccctcctgcacttcccagctgatagcttgttaaaatcccagacacctcactgcagtgtctcagaggagagttcagtttcccaaaatgaacccctcgttagttaactgttggtgagatgggaccctctcaagttttgttcccctggcagagtgaggggctggcctgagtgccgactagctttactgaagcacccaccatgatgcccgagccacagtctggccctgctgctgtaggccaccctgatgctcagagagaggacaggaaaagtgagttagaggccagggagacttgactgagttgggtttctaggtaggaagggttaggcagagggcttggtgctacggtcagatttgcagccgctaacacattcctgtgtgaggccaccaccgtctgccagttattgtgaatatgtgtattttaagcaataagattcagttgctcagactgccctgagcggtctgggtgacgatatcctgtgattgtccggaagacagagtggctccaaccactgtgagaaaccccaataaaatcagtctcaagtgttctacacaatctcctgccgctccttgttccctttccttccttctcagactttcaggtcacaaacctcaagcacctttgccttctccctaccaagacctaatggtgtcacacagcagttaagaacggggtcctgggccagcaggaggctgctgctgagtcagcacttggtcctgaggaatttccctcaaaatccatttctattaagtactttgtgatattccagaaatacattggaaaaggaaaaaaaaaaaaaggccccaggaagcagagacaagtttgtttgtttgtttgtttttttacccctcccagtttccccaaatcaggattggttttagagctttttaaattttttatttttttttttatttttttattattagtgtgggtgtttttgcctgcatgtgactgtgtaacatgtgcatgcagtactcatgagggccagcagagggcatcatctggaactgaagttacagagagctatcatgtgggtgctggggattgaacccaggtcctctgcaaaaacaagt

SEQ ID NO: 26179 - DNA, 1118 bp, Mus musculus
tagatggcacggagagatgtcttttcctgctcgtctcagacagtcctgttgtgttttgatttctagtgtggaacagtcgcctgacctgcaggaccagttgagtcacttactgaagtagcacatcagatgctaaggagggcctgtcctacacaaccatcaggccgtggccttggtctccatcttcatctccagagaatcatctagaaaagacttgtgaagccaggcgtggtggtgcacacctttaatcccagcttttctgagttcaaggccagcctggtctacagagtgagttccaggacagccagagctacaaaaaaaaaaaaaaaaaaaaaaaaaaaagactcgtgaaaagaagaagccaagtgactgagcatggaagcagttcttaaattgatgaactcatcttcaagttggtttatattgaaataaataggttgaatcattagcactaaaaaaagaaaggtacctcagcttgttaaaagctgtattgtctgtgattctatgtctctctctctctctctctctctctctctctctctctctctctctctctctctccctctcgcgctcgctcttgtatgtcttccccccctccccgcccccgtgtagcttgtgtggctttgaactcataatccccctgctgtagcctctcaactattgggattacaaatcacccccccctggtcactgagtaacacatagtctccgatacttgggaggctgaggcaggaggatcacttgtgcccagaaagttgagaccatccagggcaacacagaaagaacctatctccaagaagaagaggaaaggatagagggaggggcccttattgtaatcttgtgagaatgatttccattttaaaagatgtttattattcattcaagagtcttcacttagtggacacggagcaaggataatggctgttgtttcctttctcactacaaattcttatatgaaaatcaggccagtggtgtcccccctggccagctgcagctctgccttgacctttgtttctggcttctttctttctttctttctttctttctttctttctttctttctttctttctttctttctttctttctctctgtgactcttgattaagtgaccttggttcat

SEQ ID NO: 26180 - DNA, 1127 bp, Mus musculus
ccacgctcaccatcctgctggacgacattgcgggctcaggccttgtggcggtggtggtctccaccattggcatcgtcatcttcggagaaatcgtgccccaagccatctgctcccgacacggcctggcggtaggggccaacaccatcttcctcaccaagtttttcatgatgatgacattccccgcttcttatccggttagcaaactgctggactgcgtcctgggccaggagataggcacggtctataaccgggaaaaactgctggagatgctccgggttactgacccctataacgacctcgttaaggaagagctgaacatcatccaaggggcgctggagctccgcaccaagacggtggaggacgtgatgactcccctcagggactgcttcatgataaccggcgaggctatcctggacttcaacaccatgtcggagatcatggagagtggctacactcgaatcccggtgttcgagggagaacgttccaacatcgtggacctgctctttgtcaaagacttggccttcgtggatccggatgactgtactcccttgaaaaccatcaccaagttttacaatcaccctttgcacttcgttttcaacgacaccaagttggacgctatgctggaagaatttaagaaaggtgggcaattttgctttttttttttttttttttttaaattggcttgctctttctgtctccgtcctcctccctccttgaaccctctacccctgagaccaaccccccaaggagagttgaccggattttctccctttcttaattgcaaatttgaaaggatggcatggacttggggacggattgaactcgtgagcacttctaggtttaaaagcccaaaactgccattactttttcacaccatcaaaaaacaggctttgtaattccagtgtttgaaatttgaccctctaggggccatctacttcattcattcattgtaggtgaaagaaagtacagaccggctcgcttacatctgatcacagacatttggaaaatatttaagtagccttaaaaaaactcagtgcagtcctcctctttttttttttttgtttgtttgttttcttcttctttttccttaaacatccatgctgacatctcaaagactggaagtacat

SEQ ID NO: 26181 - DNA, 1148 bp, Mus musculus
gtgtattttcaaggttgtacaaacattactgtcgttctctcaaaacattttatacaccccacccccaccccagaattcccacacccggaagcagtcactccccacttcctgctcccacagtccccgctagcactatgtgtttgctgtctctgggtgaccctattctggacatgacatcagatgaagtgcagcctcagggctggtttctttgtctcagccataattattcgtggttcattcctgctgcagtgtgggtaagtgcctcactcttttccagggtcaagtatctcatcttgaggatttaacaagccttgtttttgcatttttctgtggatagacatttgtgttttgccctttttgccttatggataatgctgctgtgaacattggcgcacaggtttttgtatggccgtggatttcagttcttttgagtaacagtgtgggagtcaagtggttactcagttgttaacttctgttgttaacaactgttagcttagttgttaattaagctcttttccaaagtgactgccccatttttatatgtataagggttccagtctctacagatcttcatactatccctcctccgtccttattgacatcctagacaatgtgaagtgatatttcctgtggctttgatttgcatctttgtaattgtaaagatgttgaacatctcatcttgtgtttaaagtcatcaccatataggaccgtctgtatagttcctttgcccatttagttagttatagttttaaattgtatgatagtgtgtgtgtgtgtgtgtgtgtgtgtgtgtatgtgtgtgtgtatgaattcaggcactcacaagggtcagcatcagatcccctggggctggagttactggtattgtgagctgcctgacatgggtgccaggatctgaaccccagccaccctctgcaagagcggtgtgtgctcttaactgtgtgtgctcttaactgtgtgtgctcttaactgtgtgtgctcttaactgtgtgtgctcttaactgtgtgtgctcttaactgtggagccgtctccttttgacttttaagagctctttttatatggggaatctagtcagttatcagatatatggtgtgcaaatataatcccattctgtgagttacctttttactttgaaacaggaaagtct

SEQ ID NO: 26182 - DNA, 1152 bp, Mus musculus
ctcgggcccccttgtccggccctcctggacttggtctgaccatgacttccgctagttgagcttgtctgccatgctgcgtcctacagccttgagaccaaagactttgcccctttccctggaagccgcggaggacggctgggggagggatggaaactggacacgtgacatccacagctggggcatggctttcaagaattcggagacaaacttcttccacccaaatagaatcatgtttattttttcagaaccttttatcgtttctttcatccctcaatttgcatgaaatttaaaaattgtttcattatgtttttttccaagagatcatgtttttgtttctaagtgtcttttgcagagtttgaagttggtctttccaagctaactctgctgtagccccaccgtgtgaccccgacaggatggacttgcccctttaacggccttccctggccgtccccaggagggatacctttcctctgtgcccggtgggtgtcgctgtcgaacttgatggatgaatgaagaaaaatcatgtcactgcagaacgtgccaagtctgtcgtcactgtgggtgtcggcggaagctgcaggtgccctctctgcacgtagtgtccttttgaaaatatgatgtctaaccccatccctttccctcaggaaggattaatttaacgtttgcttggggatgtgatcttgttcccaccctaaggaatttttatcaccaaaatgaatgttaatgaattttaaacccatggtttatcattggcaggaggcaatgacttcatcccccattcctgtaacctctggtggtctgggacatcagctagcccccaccccaacccctcactcttgctaacccaagctgctgctacaggtgccaagtggaaaccttccatggggcttcttaatgaacatgtggtggtggcggctacaggatgcctctttcctgctgggacttgtgtattatctgagtggggtgggcagggtgggaggtggacaatatacttaggtatttctagaccctgtttctaatgaaatgcccttccttccatagagccaagtgcccctcccatgttgtccctgggctgtggagttcagcagtggccctgttcaaaggtggccctgcttcggatgtggccattgccagagagccacccatacagcc

SEQ ID NO: 26183 - DNA, 2599 bp, Mus musculus
cgcagaccttggctcgggcgtctggtgccatgcccactgacagtgggtagtggtcctgagtgttcgggttgagaaaggctggcccttagtggagggtcgttgagagtagcttttaaaggagctgagtgacctgctaccggtacctagcctgccactttgggatgaagttcctatcatggggaaccccacacagtgagtacccccttctcaaacacatccaggtgaaaatatcattttaataaggagcatattatgttcagatgtaagctctctgagtgtggccagggccagagtccttccaacaagcttctagctggccccttccctgaggcctggggagtcaggagcccagccaaggctctctagtgctaagtgttccactctgctgcccctcaggcatggtacacctctgcctcagacagccttgccccaggaaggagcctctggaagagaagcaccttgggcctctctgagttttactgttcctggatcctggagatgaaggacttgagggagctagctgggagagcatcagtcaccacccgctgcggcagctaactgtagagttctcttgcaaagaagctgaggagtggggttctcagagatcaagactgtggcctgccagcttcgtgttcattttccattaatgaactaattatctttgactagttacttctataataaccaggaattctgaatagttcctccatcggccgtagtttgagctgctctggggagaagtttcaatctttaaacagggcttgcgtccgagtgaacagtgtttccaagtctcccactcccaagttgactcctgaggcaactggctctttgcccctctgagtggatcttggctaggaatggcacataccatctctggcctcacctcatgggcttcccagccaagagagcctggcaagtagtagagtggccatggtcaggctccttccatgtagctctggcttggaagccctcctgcaatgctgcatgtgcaaacatggaggggaggggtcaggccagacagactcaggcctcgggagttctgggtgctatgggcctgcccctatgcctctgctgccaggcagaggacaggacagcatctagaactggatgcctgtgtgcagacactgtcactgctaatgggggtccttcatttactgttctttgtccataaggcaagtccaaactctagtaaagtcttaggagaagagaatcctgatatttccacatgagtattggggtgctagtcagctagcttaaatttgggttcccaatttgaaggtgccgcctgtttcatactctctgtgggcatagttgacctcacgtgaagggagctgagccacaaaccactttctcgtgttattccaagaaacgcgtacaggtgttcagtgcagaacttcacactgatacggaacactaactgtgaaaagtcccctcgccatccccagctctgtacagctaaaggaccagcttttccaaatctaggaaaacatggcaggtccagacgcattagaaaatggagcgacaggattttgagttacacagggaccatgatcttcagcccgcaagttatttgggttaagaagcaaaaccaagtaggtgctgggtgactcagcctgtgtcctggctagtgaaaacatacacaaacacctctgtccttctctgaaggctgccagggatctgccactgtcactgtgcctcaacccaggggatgcagtctcccagggacaaacccaagcaggctaaccctctggactggcgcagtgtacacaccttgtcccctggagcaagccgagagggttggctgcttcagacacaccatgtagtctaacctgctgtggcttggcatgagtcctccctctgcttttcttgtgcagggctgatggctgtttagctacttagctaccggtgtacccttttttgaggtaccaggatctttcttgggctatgtttgctttcattctgggccataggcttgtggtgcttctgtccaacaaggacaactgggtaagttgtaggctagcccagaattaggagttttgagctgaatatggaagtgattgtgggggtatttggaagtttttcccatacaaatttatcgatgaggcacctactcggtggacttgtatactcagggccatttacttgtgttttaggagctgacggaacggtgagcttgttgaggtgcatttgcttctagttgaaggatgagcagtgctccgacgccgagctgctgttacgagtcctgggcctgggatgggcaagccttcctctggcacctccgcaccctcctcccggaatcaatgctcatttactggttttccttctggagagtccccagtggtccagcacccccatggccacctcagtcaggcagagggagcaatccagacatagcagctaaagtgagcatctggggacctttgcttcttagttccctgtggctgacatagctcatgcaacctttttataccagagccatgggagacatctcaagtgcagttgttttaaatgctttttgatggagagtgccaggcagtacttgaagcaattatcaaaatagcaagagccaggttctaggtgtttttatgtccacagctgg

SEQ ID NO: 26184 - DNA, 1199 bp, Mus musculus
catttgaattgtagctctctgtttagcatgttgctagtgttatagtttgtttgtttgtttgtttgttgtttcctttctcttaagggtgtatgtgtagatttgtagtgctagagagtgagcccagggattagtgtctgtcgcataaacattccaccccttagctatgaccctagttcacctttgtttttaatgtttttaattaaaatagaattatataactttgccccctccagtacctctccccaaactgctcccatgtgtaacccttatttccaagtagattgcctcttttttctttattactgtattaggaagtatatacttatatatgcacaaatacataaatgtaacctgcacaatctgtgttgatgagttgtggtttcaggactgagtgctctgcattggacaactaaggctattctagcagtcactgtggttctttgcctaggatgggaccccaacaacttccccttgcaaattagatccccattgacattgccactgtttaggcttgttttgccacctttctagaaaaaactgactgcagactttgtcttattctagcacttaagagtttttctgccctctcatctttaatgttccctgtgatgtagatgtatccatctcctaggtgtcttgagacccattgatctctacattatatctggttgtagtttttctgttgatggtcttctttgttatagagagaggcttctttgatgatggagtaggtacacttatctctaggtataagggtaacgtttagaatatagtaagggattatgctagtctatcaaagtggtggtattagattcttttctaatgtcgtgacttcactagccctgggaagctggctaggttttccatatcaggtatgatttttcttcctgttgagtgggctttaagcccagttagtcagcagttggttaccactgatatgtgaatgacccttactgactttacagatacctagccatgctgctgtttgtttttctggtaccagtggaaaaaggttttcaggtcagatccaacgtgaatcattgagtcttgtgtccttggtggtgggtatcttcagcaatagagacctaccctcaatccctgagaagcagccaaggcatcagtaccttctgttgctttgaaaatcacttgggactacccagaccaacaattcaaaaggacagtttgtcctaactggtatt

SEQ ID NO: 26185 - DNA, 1102 bp, Mus musculus
cacgttccaggttgctggcaggtagtccttggagccttattttcatggcaagtaagtgtggcaccctgtgtgtagatgtctaacatctttgatgaacctcaaggctgtgaagattcacagcaaaacacttcttccaggtagaatccaggataaaagtgaaaagaacagaccatctttgaaatctctggaatccaataacaggccagaagaatccaaataaaagtcaaaagaattgcctttgtcaccatatctgaaaaactatgaaaagacataaagtaaaggatgttagaggtgaatctctcagcaaaaataccagtttcttatttcaaactaaagagaaggaaagagtgcacaaacattgggtcagttttctcctgcaccaagtgtagactctgcgtagcctgtagaagccttgccctagccattgtggaagctcctgtaaggcttcagttaccagatgccttatagggagactcttcacattgacgcattagatgccacgttgagtaagtaagtgttacacacacgcaggtacttttgagagatggggcgggaggatctgatgttagaatacaaaaggcaagaacaggatgactcagaaatccttttttaaaagttgcagatgtgagccagtcttacagtctgtttgaccttcaactgagcagtatcctgctataaattatctacccagagaccagtctatttgatgagataaaccatccagcatcaaagcaagcaggctaaacttagaattgagatgaacgacactgactatggcagagcccagtccaacttcagttgagggaaaagagatgttatgagtgttgcctacagaaatatgaagatcttgaaactgggaaattaaaatttgtgcttggcattgatatgttttaaaaaccttaatgcttctatgcgtacatcttaccttactattctgtttttgtttttgtttttgtttttgtttttgtttttgggttttttgagacagggtttctctgtgtagtcctggctgtcctggaactcactctgtagaccaggctggcctcgaactcagaaatccacctacctctgcctcccaagtgctgggatcaaaggtgtgtgt

SEQ ID NO: 26186 - DNA, 1161 bp, Mus musculus
accgttatagctactagtaaaaatcctgaagaaagtcttaatttgctagaaagttgcacctagttaattgggttaaaatttgtttttacctttcttcttgatagtttcacatagaccatgctagtatagccctcctgcttcagtttgtcaagtgctgtgattatagatatgcaccactacatctaggtttctttctttctttaaagatgaggtctgctgtgttgttcaggctggccttggatatgcaggccaaagtgttttttcagtctcagccttctaagtagccaggacaactggtaataccatgcctagctaagactgaaattactttttaaaagcttattgatgatgatgatgtgtttgtgtgcgtgcaggcctgcatgtggccatgccgcagtgcacgtgtagacattagaggacagttctgtgacttctgttctccccttctttctatcttctgtgtgtgctgtgatttaactcaggttaccagggctacccagcaactgcttttacctgcttttagaggatgaaatacttaactgctgcttgctataaactgattataacttgtaggtagaatttagaattctgtttactcaacccaggtgtgtagcacatacttgtaatctcagcacttgggaggtagggccagcttgggctatttgagtcattgtctcaaaaagatgataatacaaaatacagaataataattttgtcacaatattagtatttattttaaaagtgttacacatttctgaccttggctttctacacagcaaagagtggacatgtcagttggtttttattattagctgatgatacttcactagtcgtaggtcactatgtagcatttctgggcattaggctattgttcctgaagccctgcaaaagtgaaaacatttctggtttctgtcaagtctttaaattacatagtgggagttgatgattctcctttctgtgtggtgtgttggtatatgccatagaacagaattttaaaacttttaaatgcttattgtatcattgtgagtgtatgtgatccgcatgtgtgagagcatgggtgctcatgtatggaggtcacaagaccctggtgaggagatgattctctccagagattgaactcagggcaccaaggcttgtacccaatgagccatctgtctgtct

SEQ ID NO: 26187 - DNA, 1656 bp, Mus musculus
aaggaagtcagtaagaaaacatccaaggtaggggaaggtttcgaagagacactgggggaagcggtaatatctacgaagaaaactggaaagtcggctacagaagaaagtaccagttcaagccaaaaaatgtaatgccgctgcttgagaaaaagtcgatgcctgggagggaatgcacttggctcattcacggcacactcctgaaccacacccaccaccgctatagaatgtctgcaaggcttcagcgtcattgtaccgaccccttacgttctccagtaggaaggccactgtagacgggcgcaagctgcagtcctggagcagaggaggagttctccaagaacacagctttctcacccacagttcaggcttcctggtgacaggtgactcaggtgcagaggaagtgcaaatgaaggtgctaaatctgctcatccctcactgggagctgaaacggaaacctatgtttatccactggaccccgccaggccccagccatagaaccttactgtagatgcctaaaagcatacaatcactgcagaggacaagctagtgctccagacaccgctccccagccccctccgatagagccgagtcaccacacacgtctctcatgggcacatgccttccactcttcaatcccataattcctttctcgcacccaagaggaaggaacagagtttagtgtagcatccccttctagccacgcatagaacgtatgccctttagctagctcttcttcactctgtgggtaaaattagctgcatgctggccatccctgtgatttgtgtaactcacccctgcccatttcatgtcctttcacatctgtagctttaaaaaaaaaaaaaagaaaaagattaatgataacggcagtgattagttttaaggattttcctaaaaataaataaataaataaacataaaagggatctctaggctttaggctttcaggttgtccagatccacttaattagaggggaaaaaataccttaaatgatgtagcatttcactttaactgtagaagcacggtgataattaccctgcgctgtgctttagcgctgaccttagacctcgtagtgtaaatagaggaagagtactctctgaaggggaagaacaaggtctcctctgtgttgggttccatgtagtggcgtagaattcgctttctcgtacccttgccctagaatctacatagtccccttcccattaggataggtcctcaagaggccttgcttttttaagtatgctatgtataggacattttatcaccagacacaatgctaccacccaaaagtgaaaaaacacacaaaaaaaagccacatctggtcaatcaacaccaccagcagatattaaagaaagaaagaaaaaagaaacaaacttttcttcagagtctttccccaacagggttacattgcttcagttggtgggtgtccctcccccaaaggaaaggcagaaacattcaggatccaggaggggtatacacacttctcccacctcacggaggcaggctggaaagtcagctctttctgcacccaactgcggcatccacacgaccagtctgcctcatgtgccaaatcaggctttgccctgtctctgctcacttccaccagagctctggaactgtctgtcctgtccccgcccactccatcgcaagctctgtgctgccaag

SEQ ID NO: 26188 - DNA, 1155 bp, Mus musculus
ggaggaggcagcagtgctgctgtcaggacaaaaagaagggaaagggggaaaatgcatcaataaggagtttttggtgatgtcaataaaaagaagttatatgtatcttctaatttttacattaaagaatttctcattattgttagattatgaaaattaagccagttttggtttgattatatattatacataactaattttcaaagaactataaaatatccttctcccctcttcaggacggtctgcttgttcttcattatggtcttgtggtttctcctttgaaaataacttgaagatgcaaaggtatatgaggagagaaacccagtcggaggcatctgcatatctgcattgcaccaaagattctcacaaagcacgtaactacgactactttccgctgttaagagctggcttctgttgtcaccagaaccctagcattgtgtgtgtacaacttgaaacaatagaatgtatttgctacactaaagactatggaaacagcactcataactcaggggaaaaaactgaaaacactgaattttaaaattccttgtgattccaaatatgaggaagttgctggttgcttcccatctttgaggtgggtgggtcagtttcccagagctgggactctgccctccagctgcatgggctgggtggtttccttcagaacagctttgctttgagttcagagccagtctgttaaacctcgggtgcgctccgcaccgaaactactggccacttacaagttcctgtcctattctgaacttcaaacaaaattccactgataccactaaagccctgttcctcagctctgaggctgagactgtctcctgttagaaatggctcttcttaactaacatcccttaaacaaatatgaggtgcttctttctgatgggacactgggtcaggtgtcacaaaattccctcagtgtggctgtgaatgatggcactgcttctaacagtagcaacaaatttcaggtgaatgaccagaagtttacagaacccttattgttcctcagtcacttaaatgatctggttccatgttaatgtttctgttttcttgccatttggataaagaatgagagtctttgagaaccttgctttcacagagacttcattgtaaacattactttgcctaaaattagcatcctgatgctttctaaaa

SEQ ID NO: 26189 - DNA, 1232 bp, Mus musculus
gctgctggggcaggaggcagcaggaatgtacaatgatcaaattttgaccaaactgtgacctgatgggtcattatcttagttctggctcttgaaggtggttcagagcagttttaatgtctgcggagacagacagttcagttcctgagatgattgatactctctggctggagatgtcctcacagtggggtgatcttctgaggctctgctgtgtctagaaatctaaggcgactgcccttttactggagaccttccaatgcctctgaggatcctagaacagttattataagatggcagcaggagcaggggaggtgctcagcaggcagaacccagagcattcttgccagcaccacactctgtaactcaagccacctgtgactagatttattctcattttaaaatttaaaaagaaaaacttctctccctctccctccttctccctcctctcctcctctcttttcctttttactctttggagataggcttgtggcttaggctgtccttagctcatagcagttttcctctctcagcccctggaatactgggatcacaggtgtgagctaccatgccttgcttaaaaagcaagtgtccagactgtctcagctcttagacttaagtaaaaaccccctgcctcagtctctctagccgaaactgcagacatgtcttaccttgctgtggagttagtactcaagagatcctcctgtgttgccttcccaagtagttggaacgacaagcaggcactgcagtggcttggacaggatgccaaccgtcagcttaggctgatcgtgaatttacagtcttcctgcctccccctgtcaagggttaggatgtcaggcatgtcccattgtatcgggtgttttgttttacatgagctttaaagttaactaacacgcctttctattacaaagtttgttggtatgtatctaaaagatttccagaatttctactttttttagactacaaattgactcaaaatcataaaatcatctttgctttaaaatctgctctataaaatagcttgtacgttttatgtatgtatacatttacataatctgaaaagtcttctctgtttctgcagccattggaaaagaagtttgtgcgtgtttcaggagaagcaactatcgggcatgtagaaaaatttcttagaagaaaaatgggtcttgatccagcttgtcaggtacagtacatgtgtgtaaaaggaaggtgaggttgcaggatgacctttgacagatgga

SEQ ID NO: 26190 - DNA, 1197 bp, Mus musculus
gtcccgtttttttgtttgtttttgtttttgttttttttacattctgtaaaagtctttgcgtaacgtggagggagttagatgtctaaggctactggcaggtgtactcttttttttctgcaggatgttgagagggtttgggacccctcccccattaaaaataaataacaaatgtgtgaagaaaggcatcccggggatagggtgtaggccagttgatacagtgtatctctgccctgcaggacgctcggagttcgagtcacagcactgtctacactggatgtggtagtagacacttgttactaccaacattcgtgaggcagaggcagcaagttcaaagtcatccttggtaatgtggggagaccaggcaggtttaagggctttttgtaaaccaacaaaagaacaggtgcctttcactgttagtttcctatatgtcagagaactgggaccgcttagatacagtgttttctttagattggatattttgaagggttggagtgcaattaagttacactgcttataatgaaatcttgggatcatggcttaacttgttttgaaatgagaccttgtagtgttggctttggactgggtttgatgttgtgattttaaaaagataaaggggtattaatatatgttctatgggggtgtggcgaggtgtgggggaagggggtgccccagcgggcccatgccaaggcatcccttacccctgagggaccagccacacgacgatatagtatagaatagagtttattcagggcatggggagggaagttaagagggtagtagaggcagagagagagagacagagtagagaagtggaggagggccatgaccacgtgtagagagggcgggaagggaatggggagagagatggagcaagggagggaagaggcaagggagagaagcaggagtaagaggagggggcaagcagtcccttttatagtgggccaaacctacctagctgttgccaggtaactgtggggaggagcatacctggctgttgccaagtaactgtgggggtggagtccagaccctaccaacactcttgggctcagatgtcacagctgacttgtgtaagttggaatataggcattagacttcctacttgcagctagcttctgaatttgagaagggaaaggcttgtatcctaaaatggttactgttgcacttacagcgcctgataaaccttgtcgagctgacccc

SEQ ID NO: 26191 - DNA, 1201 bp, Mus musculus
aaggtttctctgtgtagccctggttgtcctgtaactcactttgtagaccagctggcttcaaactcagagatccaggctctggctctgcctcctgagtgttgggattaaagaaagacgtgcaccaccatgggtcaaagatggttttcaaaagaaatacatactggtagtgagtcttaggtctgctcagaagccccattcactgcataattccagaaggttctcctgaagtgcttatcatacgtttcagtagagaaatgggtggctttagaaactgagttataatcattttgaaatatattactattgatcctacagcctagtcagggttatttatatagttccattattacaaatatataattatatgctagctaccgatgattctgggatggtttataaatgtatgagggagaagctgattaccttaatgacacattgaaaaatgactctttaaaaatcactaaaacaggttccatggagatcaggaatgttactaccaggatgacctacgagtgttatctagtcttaccaaaaaggagcacatgaaagggaacgagaccatgctggactttcggacgagtaaattcgttctccgcatttcccgggactcgtaccagctcttgaagcggcatctccaggagaagcagaacaatcagatctggaacatcgtgcaggagcacctctacatcgacatcttcgacgggatgcctcgcagtaagcaacagatcgacgccatggtgggcagcctggcaggagaggcgaaacgagaggcgaacaaatcgaaggtacgggagctaacctagaatgatgtaatgtgcaggagcaaactgacaacaatgtcatgtgagtttccattatataatggaaattatgtatacattcttataactaccttgggaggaatccagtactgcatttaaaatgtgttgttctgaagatttgtggtatatgtgaggatttgggaatggtttcgagtaacagagccttaactgcagaggctaagacgagcaaggtttgtttgttttttttttttttttttttgcttttgcttttgcttctgagacccgcataataattccaaagtgcagtctatacctcttggcttgtggctcctggccaactgtctttagagtatggtgcatgtgtgtgcacgcacttacatggctctcacgggaatgcagctggatccagggaaaagtag

SEQ ID NO: 26192 - DNA, 1388 bp, Mus musculus
ctgatacagtgtgttcacttaggtttagtagagatggtgaaattttggcatcaggtaagttatttcatggctgtggggtaaagaaaccacagtaaacacaagtatccatggggagttgtgacagcggcacactgatggcttcctttggcttccttttaggttcaatggataatacagtccggttatgggacgccgtcaaagcgtttgaagacttagagactgatgactttactacagccaccgggcatataaacctacctgagaattcccaggagttgttattgggtacatatatgaccaaatcaacaccagttgtacacctacattttacaagaagaaacttggttctagctgcaggagcttacagtccgcaataagccaacggtattagagaccttttggaagctactgtttggaaaagggagactaaaagcaaatacctcagtgattagtatttaagctacaaagaatgtttttgtctacatggatctggaagtatgctgcttggaaaatctgaacaagacagttccacgtttctatagcaaccacatttaactaatttccgttagttgaataagaggtattatgttcgtggaggggacatttatggtgctttggattgtgtggaaactatgcattttttttttgttgttcaaatgctattttaatttattgtgtttagaaaaaaatcaatttgatttaaacaattcattctgcttcaagattcaagttaagaaatatagtaccaccttgagtagctgaagagttctatgaacgtgtgtgtgctgtaatgaggttattgtacggcactcaagcagcgtgttcagtgacccactaacatgcttcccttcacccaccattagtggactgtatggaactgagtagggaccacacttcctaagtctacatgtacagccatccaccaacatctcagttcctaccatgtaagtttggcgtgcaatcaaacacttacaaagcaggtgaggagatttagattccacactctacttcagctaacatggctacatatgacctagtacacttgaagtcagacagacatttcagttgcttacctccaatactgagccttgctttggaaaactaagagattcagaccaagtcactgccagtttttgcctttgttgcattttgtacagttttatatttttgatatcttgtaaataaagacaaccagcttttccaggttcataatttattgtacaaattgagtattacatgatgagttcacatcagcttcttcaggcatgggacttaacaggtgaggtcagacatttcaaaatcctataaacaaagcaaaaacagtttgatttaaatgtgttctactgacaatcagtaatcaccacaaattccccaaagtaaaatgtaca

SEQ ID NO: 26193 - DNA, 1147 bp, Mus musculus
gagcttagcacccagcacatcccggacccagagacggtcttttacactggccaggtaacccttcctgcacaggcctcccgcccttagtgactgtgaacgcaggtttaaaggagcagtacacatagagttgcttttaagaggaagaggagggagcacaaataaagtgggccctagccagtaaaaggagggtgagtgatagataacccagaagtactcactggaatccagtggatggaggcccacaccagagaagtagtgctggtctagtgaggttgtgtttgtttctcttaaaaagcttcttaaaactttaggcttataaccagaagttagttatgtcctcattgtagaaggttggcttgaggggcttttaatatagtctctgtatccatcatctcttctctgcctttggatctgacctaaggtcttgatggatctcccgggtccctgcagagctcatggagggttctgaaggcctgctgctgcaggaggtgacagacacgtgtgatttcccaccaggtggtaaaggtggcagtgctgagctgtgagccttccaaggagaggatgctcctgtccttcagactgttgagtgactcgcggccaaaggatccgggtgttgagagcagtcagaagaaaacaggagctgtgcgcatcgggcaggtacctgggcagtgaccttgtcttacagtgacagtgttcctggagaggaactggaacctgtgggaggaaagaggggtgcaccgctctgagattctgggcctctttcctgcctgccttagcaaacagaagctagcgtgagagagaagtgtcacggcatggccttgccagtctcttctcttactgctaaggccagcctgcacttgcttttttcctccagaaatcagcagaggaactggcaaggggaactccagaggagtcccggtgtggggtgtggatggagatgtggggtctagaggaaagtgcctttgctgttagcctcctgctggccaggatgctgggatgtggtacctctgagctctgcctaggaggggtgttagtttttacctttctgattccgagcagttggtggatgtgaaggtcctggagaagaccaaaaccgggctggaggtggccatcctgccccataacacccctgctttcctccccacgc

SEQ ID NO: 26194 - DNA, 1083 bp, Mus musculus
agagctttataacggatgcctccctgagggaaagctggtcactgccaaggtcctgcggtaggtgtcttctctccctgccctcttggtccctcttcctttgtgtgaatcagacccctttcgctgagagccctgccctgggaggagggtttgaggtaaactcagaacataaaggcatggggagatgatgcaagtagtgttcagatgggtgacaaaccttcgattgaagcctttgacctcagttccagccttagtccaggagtagacatggcttctgttattgttgatcaagcatgtccatcctagatgctccctggctttttccactgagcaggggacatgtgtaaactgtccctgagaatactgagcatctaaggcaggtgggccggggcccagccctgactgacaaggaaagatggcctaagtgctgacgaggcaaggtctgctcgcctgtggtgcccagacacctctgcccttactctctgcctcttctcctcctacctcagcgtgaaccccatgaagaacctgatagagctgtcgctccttcccagcgacactgggaggccagacgtgttctctcctgctccagaaccaaaacaagaggagaggagcggaggggctgaggagggccagaaaaggaaagagaagaaccagaagagacgggaggagaaggaagagccccagaagtcacagaggggtgggcgaggcaagcgggagcgccaggagtctgagagcgagcaggtgagtccccctccccgggcagcatcctgcctcatctcacccatcagtgtttgagaagtgagctgcagctgcccagccttctctgaggaggcactgtgagggcgaggagaaacttcccatcccacacccccaccatttcaggaactagtgaacaagaggccaaagaagtctggagccgcagaagaagacgacagtggtgtggaagtgtactaccgggaaggagaggatgaggtgggggagccgaagctgccacccagggtaaggcgcgccgccagccgagtgggggaaaggctttggggaagagctccttgtcttcccagggctgagctgttcagcccatcctgt

SEQ ID NO: 26195 - DNA, 1099 bp, Mus musculus
agaaggctgtctggatcaaatatggtgcctttgttttggggaggagtcaggctggggccagtcaccgagtgctgcagcgagccctggagtgcctgcccgccaaggaacgtgagtgcttttcctgactcctgatcacactcgggactgatagatacttaaaggggcagttggcagcttgtaacaggtggagtggcttctgtcttagcaaagccgatggctgtgctgtggtgaggtccttgggttgtcttggctctgacttgtcctttcccacagatgtggatgtgatcgtcaagtttgcccagctggagttccagctcggggacgtggagcgcgctaaagccatttttgaaaacacactgagcacctaccccaaacgcacagacgtctggtcagtctacatcgacatgaccatcaagcacggcagccagacagcagtcaggtgagggcgacagcagggctcattcctgttggagtgtgggctgggaaggggctttggccgtgttgatgatgatgggccgctcttggcagctcccagttgtctgacgtgacactgacaaacagctctgacatggttccctggtccacttgatttcacctttccaccagtggtctgtaccgggaaccaggagacttggtcccacatggctcacactatgccggcctcttgtggatggaaccttcataggcacgctctcacttttgtcccctacaatccctacaggccatgagtttaagtgtgcttctgtcctcgtgtgtccccatcccaggagtttgtcctctttttccttgtaacttaaggcaggctaagtctctgtctctgtcaggagttcatactgatgataaaaataagaaatggatgctggatatcagagggacctggtacctgagagtaagctggggagtgccagccaggagtcccatggtagggcccctaaggaaactgcttccctgttcttcctcatagggacatctttgagcgggtcattcacctgagcctggcgcctaagaggatgaagttctttttcaagcgctacctggactatgagaagcagcacggcacggagaaggacgtgcaggcggtcaaggccaaggccttgga

SEQ ID NO: 26196 - DNA, 1129 bp, Mus musculus
taaaggcatgcgccaccacgcccagcaagcagttcttaacaacctatgtttcagatgaggtaatgagggtctgagagttttagttcacaaggccaaagtcacataaccagtaacaggcaaggcaagctctgggtacccgccattggtctttctaactacatccttataaggaagatgctcattggatgcttggattcttactgggtatcctttctactatacggaagcatccatggctccacctccacccaggctcccaattccaccaccaccaccaccaacaacgcctgagccagcccgtgtccatcacagagcatttatgagcccattacaaacagagaagctcctggactccagggggccctagactcaggtgtgaaaaaaacagagggcctcagggaaacactatattcaacttgcttggatggggagcctgggtgtgactgaaaaagacaactgtaaatggtgggaatctcgtctacaagtgatgaggattttcatgtttgtggatctgggtgggtggggtggggaacctgcatctttggaaacagacaggaggagggttgggcaaacacaggctccagcatgagagaatgtcttctagtttcccccacggagggcctaacacttcccttttgtccctacacccagcttaatagctcacaaaatatagcatcattgcaagaaaatatacacaaggctgggtgtcttaggtttttactgctgtaaacagacaccatgaccaaggcaactgttataaaaacaacatttagttggggctggcttacaggttcagagattccgtctgttatcatggggggagcatggcagcatccaggcaggcatggtggaggaagagccgagagttctacatcttcatctgaaggctgctagtggaagactgacttctaggcagctaggatgagggtcttaaagccctacacccacagtgacacacctattcccacaaggccacacctcctaatagtgtcaccgcctgggccaagcatatacaaaccatcacaccggttaaagagatgaaatggttggtgtgtataggtgagtaggccataaacagactgaagaagagtatggatgctatggtgagtttagctaactgctttggctc

SEQ ID NO: 26197 - DNA, 1163 bp, Mus musculus
tcgtcggcgggctcggtccccgcccgcggggacggccgcggcgacgtgcgtggcgccctcccgcccgcgggtgagcttgcagcgcccggctcgtgtggaccgcccccgctcccgccaggtccctcccgaggccgccgcccccaacccccgccctagcgtcgccaggactccggggctccggttgttatggcgacagctgcgcaggttaatgagcgtcttagtgacacgcgcgcgcccgctctgccagatgtgggtctcggggcgcgccgcgttcccgctggctataagttctcgaaggcgcgcgggacccagggttgggggcggcactgctccggacctgacgtcaggaatagatgggagcttcggaggttgagcgtctccctgtcctgggacatagaacctgaaaacaagaggaagaggaccgccacaacgctgggagccccggagccagggcgtggcgaggtagccctaatggaggctccctagcacgggattcagggcctggcacgtgttaaaacgctcaggagtgagtggataatgaattaagacaattgagatcaggaatacagtcacctccccttcgctgtagttggaacttccaatcagaaccccagtcagaccatttcctgactgttcaaacatcctttgcatgttcaagaacggagaaccacaagaccagaagcaagccgatgggacccagctcaggtacaaaccatgagagagatatcggttccaagttgaattattctgtcagctggaaaactaagagattggggaagggatagagggggtgctatagcctatagtagaccaaggtggcttcctcgaggaagggggcagtctgtaaatgtcctgttcacgtgactcttccatctgtgtagctcagcactgctacctgcaggagggaccaggaagtcatcttggatctggggcggttatttctcccagtgtatcatgggggagaagacagtccgtctgtccatctcacaccttcatcagccttgctgcttctcggggccatcgctcactctaaccggactttcccaactcggatccagagtgagccctgggtcatgagtgggacacagacatctcctccatccttttctggaagtttctccataggacccatcctcaatgtgtaggcacagctctttcctgac

SEQ ID NO: 26198 - DNA, 1199 bp, Mus musculus
ttaaaatcaagtaatattctactgcatgcataagccacatcatgttcatcagctgatggacatttgagttgattcccacatttggttattatgagtaaggatactatgggcatttccatataggcttttaaaacgattaattttattgtccttatatgcatggctgtttgccatacttgtatgtatgtatgcatatgcaccatgtgcatgtcaagtgactgtggaggccagaggagagcatcaaccctcctggaacagatggttgggaatcaccaggtgggtgctgggaaccaaacctgggtcctctgcaagggcagcaggtgctcttaacaacagagccatcgctccagcccctgagtgtaggtattttgggtaagtgtcctttggggctgtgtggactagctatcttttacaatataatacttaatgaactcgtcccttcactaagtactggttaccaaggagattgctgcccctcccccaagctccagctagacacctgtgtttcctgaggctgtgactcctggtggctgagggagaagctcccgaggcccaggcccggctaaggaatcctgattgggaggcagagtggaaaactccctggaggatcctctgctgctgccctgtctctggatgtaggggagaggatgggactcccagtagctctccctggaccagtcctagccagttttgagccttgtatcccggctgctactgctgtgatgttggtccttacaccagaaaccgtgatagctgcttgtttgcttgtttgtttgttgtgagaaatgagtcccgtgtagctcaggctggctaccaccttgttatgtagctgaagatggccatgaacttctgatcctcctgctttgctgttttgtttgcttgtttttacataataattatgtgtgtgtgtgtgtgtgtgtgtgtgtgagagagagagagagagagagagagagagagagagggagggagggagggagggagagagagagagagagagagagagagagagagagagagagattctgtcagttttattctaacacatgggccctggggatccaactcacgttgtcaggcttgctggcaagcatctttacctgctaagccacctcacctgctcttgtatgtcttctagaaggtctcactctgtagcctagattggcattaaaattcactatgaagcctaggctgccctgtaa

SEQ ID NO: 26199 - DNA, 1129 bp, Mus musculus
ggcggggatgaaccacatagtgagttttctggctgtagagcccaccccttcccctcggtcatcttcccggcttggcatctgtgtacatatatattcaagtgtgtgcttgcaggcatgtgaacactacatacaggcaaacctgatcaaccctcaacttcctcatctggaaaatgggccactggaagagttataaagttataaaaagtttttttttgtttgtttttgtttttgttttttggttttacaagacagggtttctctgtgtaaccctggctgtcctggaactcactttgtagaccaggctggccttgaactcagaaatccgcctgcctctgctggcactgttctaggtatcaaagctatgtctagcggacacttgctgcttctgtccccatccccacatcctttcccttgcagagagaaatgccataaggggtggggggctcaaacctggtttccggttcccttcctgacttctaagcctagaagttgtgagtgcttttggaatgctttcccttggatgagacaggaccgtggaagtaaaagcactggcctgagtaactgcccgaagcccgtgtgttatgttccaaacatcgggaggctgtttttattaaccagcagtttgggaactttctgtttttcaagtcaataaaagtgtgcctgctttcacgctgacatattgagagcccaaacgagctattcctggtgacagctaccgaagaagggtatccgggctgactgggaggcctccccaacttcctctatgtactgggtactgacgcctctctgcttgccagaaattatgtgccttagccagaggctggacagatctgggctggatcctggtccagcacgagggtgcctgcaccaggttgcgggtccatctgtactgtggggcagtaataactgcattgaagactctttagaattctcaaaggatggaggtacgaggatcagctgatacacagtagtggctagtggctgccagtcatcccttcctatcctggggaagacgatgcttaatccagggtccacaggagtcctttcctgctgtcctggtgccccctgggtctcacattgtaaggcagtagaattccaaagtttaagtgtgggccccagcccactcaca

SEQ ID NO: 26200 - DNA, 1105 bp, Mus musculus
tgagcaggtggccttcaggaattagattgcagtgttctagacctttctttttaggaagacgcagtttgaaaggattagaggatgtgggcttgtattaagccacactccgtggcttgttctatatataggataggtatccctcactgtgaccaagcacctgaggagagggcagccgaagggaggatgggctttgattggcaaacctagtgagggggcggagatggccagagtgtgagggctagtcacattcagtcatgcgctgtggctgtccgagaggtgtgtctgcatgtgctccattctcagtattccctttggcagtccttagcgtgggaaatctgtcctcgtcatgatgtcagccacagctagggtgggtttaccttgctgggcatctctcactagcctcactgtaaacgaagctccggagatcctaattctgtagctgtaggataggttctggacctccgattctgttgttgtttgtgtttgcttgcctgatttatttgagacaagatctgtctacatagccctggctgtcctagaactcattctgtagaccaggccaattctgcacgcgcgcacgcgcgcgcgcgcgcacacacacacacacacacacacacacacacacacacacacacgcgcgcgcgcgcgcctgcaaatctgagctgaagttagttagagagaattggctgcactcattgcttcttagagaagggaaatcacagaggcaaagcccgctcctacatcagtaccacctaataatagctaagtagctttccagtaaggcttctgccatctaagggtgtttatgagactggagcaggaaggaattaaaacaaaacaaacacaagactttttctgtcccaagtactaagtgggtcaaggtggatgttaagaaataccacccagaacccagtgactattaatagctcctgagttgtttggagaattgggcatgtctgtcagccaacaaaatggtgttggggaatcctgaccctaaggggaaaagaagccaggggcagcatgtgcagggtcaccgttcctcttacagtaaaggcttggctttgtgaaagttccccatgagccaataagtaagggtcgtttcctg

SEQ ID NO: 26201 - DNA, 1476 bp, Mus musculus
ctgagtggctggttgccatccctcgagatctcggcagatctctaggttgtgcagcccggcagcccgtgcggcatcttggagagagttagcagacatgtagcttcccccccggcagctggggaggaggccagtggaccttctcccaccctgggcagctgcaaactgcatgccatgtttctttctccttacccaaggcagggaaacagacaggctgcagactacaggtccgaggtccttgaccttgggccaacctgccatgttcaggatctcccgtttgccatgactttcgccaatcatctcactggtgccgtttcccagggtgcccttcagtgtaggctgatgtgagcctttctgttgtcagggtctcaaaagagcaggtccacagccacacttaaggcctgtcctccctcatctcagtgccagtcttggcctgggctgatttgccattgtgtgcccaggagggacaggaaccctcagtggggtggggtctccctggcctatggacagcccttttccttaatttatttatttgctttatgggttatgttccaacctggggtctcctgaaatgctactgttgcagggttgccaggtgaagggaagcaaggagtagccacttggaatctatccccaatacaaggctcatggcagtcctgctaaccccgaggaagaattccaggctggaggcctcccaagaagtggataagcctctcttatgtgggaagtgcccacttccacctgtgtgcccttcctccctggatgggagccctgttactgtggctggttccaggacatccgtctctatagagacatcagaagttctggaaagttgtcaacatgtgggtcagggaccagaatggagacgcttgttagaggagggaagatagaccctgaaagccagcctctggtcctgctaagggggtgccccttacttatgggctgtggcccctgtattcctacctgccttttttagggttactgtggcgtcttagcctaggctttcccagcctttcagtccttggccctcatatggctggttttatatcctcagaggcggcttttgccttgaaaggcagggtcttggtctctgtcctggccactggccagtcatgtggctctagccacagccctctgcccctaaaactccagcttcccctgggtaaaagtttgggggtggaatactttccgtgtatttcctgggagttcttctcaggtgtctctgaggaggaatgtactggggaggtgttgagaatggatgccagggtgggcctttgcctgcactggggaatctgggccaccctcagtcttgcttctccagtcactggccctggtagatgccttcaggctggagctggtaagttgccccatctagctggggcttatcctagagatggagcaaggtcctagtacagagctgtgtggctggagttgggaaaagaagccattgtccattctgctagttcagaggtagcactg

SEQ ID NO: 26202 - DNA, 2242 bp, Mus musculus
ggcatggtgctcttgacctcctgggccggtccccagagcagaatgagaacatccactcccgttctcctgttttgcagtcagctgctcatagagaccggcagccccctcgccccagcctcctgatgtgtgtgggctatgaagctttggatgtgtgcttgagtctttctaaaactgtaaaacctcagttcagcttgtgggcaggaatcctggccataagcaaactcatctggagggtgcgtgctgtaagccccacttacccagtgagagccagttcctacaggcctgcagtaggcctggagctgagtcctggccacccattcatctcagtgacttgggcaaaaggcatgagcctgtctctaataacaggaactcctgaggcaggtgcacacgagcatcctttctcatgcagcaaggaaaagaggcaggaaaagatggcttcttgggggcgaggagcaagttccagaactcggctccccaaggatagcaagcacggccttgctggtatgtcccgtttatatagtactgtaggcctgctgctctgacccatcttgtgtgaatttctatacagataggaagagggaccgggcccctttttgggtctctcccttggaatagatatggctgcatagccgtaattggaatacccatgcagctctctggaaagacaacagtccacatcactaaccaattaagattccctcgcttttttgagggctgagaatgtgtgtgtgtgtgtgtgtgtgtgtgtgtgtgtgtgtgtgtggtcatttccacgagcatgggaagttcatgagtgcatatgtgtgtgtaagaagaaagagactggtggtaattctccacttgaatagcatggggttagagagaatgagtaccgggcaggcagtctccattgaactagtccttggcattgggcaggtcccaagggacgcgcagcttctgacaacatgtgtgtcattcacacgattctggctggagagtgcaatgtgtctttaaaaatttttttgtaattattttattatttagttggaaacttcacactggtattaacagagcgaacagaagcagcccaggcaggccattgtcccgggcaccaagatgaagacatggaaaagatactgttgagtatggaagtgctgaagtgattaaattagggcacccacctccatcctctccttggcatgagacccccggggattcatgagctactgggttacggtttgtttctgaaggacaggcaggctggcagatgaggagtgagacagtagggcctgcagctgtccacacagcagtgcctcccgtctccacagcgagccttccgtctccacagcgaaccttagatcgcttcctgtgagtgtggaaggctcctcatgaccggctgggatttttgataagtcccgtttggggcaatctgatagtctcatgtccccatgtttcctaagctcggtgctgagagtgacgttagcactgctagtcacttcgttctgtgcatctgggtccccagaccacaaagtaggtacattggtgcttgtagattgaaggaaagggtctttccaaagccttgatcccaacctggctgcaagggattggcaggtgccaccctctcccctctctaaatctcaagtgaccttgacagtccgtgcccctcccctattgcactccaatgccttagagtgcccccccgcaccccccccaccccccggtgctgaaggtccctgccttattcccaaatcatattctggacagttggctgtgtctttggaagtgtgagagagtcatgttagtgcaaacagacgtgtctggcatgtgggaaagctagtgggaggcatgttggcaagaggagtgcgcatgtttggagttactggcgcttaccgtccttgcacggggtggaagcttccagagatgtcttttaggtaggtgtgggaaggctgagagagagagagtttggaacaggaaaggagtcagttcttggaggttgaaaacgagaggtttccagggatttttgctctcaccagccaagagtccagccagagaaaacttgttcactgggccccatccgggcttccagtatcattgtcttaaggaagaggtgctgcaagtcatacgccaatctttgggtctgcgggcccagtcccatcccggattccccatagtttttgcccagtgcattttgtcccatgcagagctagcctgtcaaaccatacaaaatagacaccactgaccataataggccacaccgtaggga

SEQ ID NO: 26203 - DNA, 1641 bp, Mus musculus
cgagtctcctcctaatctagagattgctcgaggatttccgggtaggcaattccttctgcatgtttgggaaatggttatcggttggaggtttatatatcaagcgtttggtttggggtttattttagaagttgtttgggggcccgaggggctcagcctcacataggagacgggtagtggtgggtggggtttccgttgaattcatggagggatgttttatttgggttttggtttaatgtcttttgcctttccataaaccagattgtttgtttaggtttccactgtgtacacagtgcccaagcatggcaccttagcagggagtttggaactgggtaaagccaagtccccggctcggtgaaacaaagtgttcaggttcctgcccaagagggaaagagggcagcctgctgggtggctaatctgcctacttctgcccactttctccaacctgggcagaagggaccctggctgggtcagcccagagcagacactgtgcccttagcctgctggcaaggtacccaagaagatggaggactttgaagccaggagccaaccctatcttcctgaggggcagcaccccccggggaacagagaagcaaaagagagtggagtggaaacagtcctctgtctgctttgggtcgtgagtcagtggttgacatttcagaggggaccctccggaaagaagcccgcagtgtccttccaggactcccctcatgccaggagtggatgccatacgtgcctttgacttgggacagatcctgtctcacagcctgtggctgagctgccagcatctcctctgaccaagggctgctggttccaacagacatgggaggaagagcgcccctcaccccacctcccaggcaggtctgccttcagctcccaaccctaacctcctggatccccaagccatgtttctcccacaggtggatgcaacccactagcctcctctgtcaaaagcccgtggtggtgacattgttctattttccttttctgtgttcatgagtttgtttaaaattgaaattagttaattttcttctgctggacagtattaaatagagtggggttgttgagttaatctgctagattgcagtactaatgatagtggtatagtgtcttcatgatattatttgtacttatttgaacaataatgataaagaagtggttcattatttcttcattaatgcactttaaggtggaatggaaagcaacctggagagcgaagtgcattacttaaagatgcagcatatacacttctcattttaaaacagcacgtatttattaaaagaggaaaaaagtaatttatgactatttaaaataaaatttaaagtagagtggctgtcaggtgagaggaccttcgacgtagccgtctgccagggggaggggccacagcctcactcctcagatgtctgcattgagccagctccattagtgcgcccgcctggctgccaggcacagagcatctcagttggactggaccaccaggatccccagagccagccttccccacctcccctgtccttgccacatcccaaagattctctcacaatcccccgtgtcctgaaatcatagatccttaaaagtgggacagggagggtgggggaccttagaggtcactccatactatccattcctgttactttagcccaa

SEQ ID NO: 26204 - DNA, 1130 bp, Mus musculus
acgcttctggaagatccttagaaaatgaacacattccagtgggcagagggcagtgtggggtggtgggcagggacgaggcactcaaggcagaagctgtgtggaaagttgggcagccctatgtcaattagccacaggcttccctaagcaggagggctgcctgctgcggagagcttggcgcccaccttgcagagcagcaggagcaggtgtgggggacaaggagactctagaaatagtgcttccttcaagctacacgagccatggctgtgttaggaaggcatccaagagtttgtcagtacccagccaggaaccagctgccaggtgacagggcagggccacagcgccgagctttccctcggtcgcacttcctacctgctcaggttggacaggaagagcagccagtcaccttcacctgacgctgtctctgtagacagaggtgactcttcggattcagcccactctggcttatgagtgggcaatcctggagagcctgcccacgtcccaaaacacgcacgcacgtaagtacgcacgtacgtaagtacgcacgtacgtccggatcctttgtccccggtagaagtggcagcccccactccccagcagaagtatagggacaaactcttcccagtgtcctccctcggctcttacgtaatgggctttagctaagtgcagggtactttgtggggagtgtaatttgtcagaacctcagggaatttgggttgaaaacttgccccttccctgttctctccccagcttacccccgtggctactgatatcacacacttcagcacttaggttttcagtaaccattgtggtagctgagggtagaccacggcaaccaccctcattcctatcagcatcttttcagattccataacctcatcctctaggtgtccagcgctgaccgagactcctagccttaaggtggggatcgactcgggtgacccagttagctcacatgacctgaaaagccttgtgggagtcggtgttccatggggttccccagctgggagcccgttgaatcccccaaagcggagggaaccttctggttcctatagctcaagtttatctctttctgattgaaatgtgtgatatgaaactgtcgtttgagtctcactagctcagcctgtgatatc

SEQ ID NO: 26205 - DNA, 1232 bp, Mus musculus
ttcagagatccgcctgcctctccctcccaagtgctgggattaaaggcatgaatcaccactgtctggtgcatatgtctgtgtgtgtctgtgtgtgtgtgtgtgtgtgtgtgtgtgtgtgtgtaattttaaatatattttatatgaaatatatattatatatacacacacatatatataatgtatatataattttcttaagttaaaaagtatcataaactaaccaaacaatgcagaatcatagagagacttaagttcacctgggaaaggattgctaatcacaagaacaactgctaccccccttaaattgagcatactccccaattcttgatctcccataggcctgatgtgttgtacttccctagcacacctgtgaggtagcagagacaggatttgaacccagctcggtctagccagtcactgcaacaccgtttggaacctgtttcatgcaatcaattatgtgtattttagaaaaaaatgtctctggtaagccgtgacctgctgttactgggatgtctagagtctgagtagaggcctgtaatgtgattatagcacacttcctcatcattactgcagagagctgttcctactgagagctgtattatcgcttctcatgatgggggatgctgctaggatccagacaggttaattaagtacccttgaaaatggcagagctaggcatgaactcagggctctgccccaaaccacgaggggacactgccctctggttttctgggacctcaaggcagtagattctgctggttctcaggacagttcccttcacggaggtcttcctactagattaatgctgaccctggaccctcacaggccagccacctggatgagttgtcagttagacattagtggcccacggtcattcccttctgttgattgagagcaggtacctcacatggggagtggcctctaaaggccctctgaagggtgttcttacccgacccttacagtgggaaaagctacacatcttcagggcctcatactaggcttatagagaaggaaccggctctggggatccggagctaagagcctatatagtttgggcaagacaagaactgacctttgagagcaagtgtctcacccctgcttcctccatcggcctctgagtcacaagaccagacagcgactttgcactgagtccagggcatttagggtgtccaacatctgggtctgcaacatccttaaattcttgcaacagtttggatgctacacccacccag

SEQ ID NO: 26206 - DNA, 3297 bp, Mus musculus
gagctggagttacaggcagttgtgagccacccagtattaggtactaggaactgaactggtccatctctccagcccctgggcaatggtttagtcttggttgtcagaataaattctatgtacgatgtaaaacagtgcataattgtctctctttcccctcttaagacactggaagaagagtttgccaggaaactgcaggaacaggaagtgttctttaaaatgactggggagtccgaatgtcttaatccatcagcacagagccggatctctaaattctaccctattcccaccttacattccactgggtcatagcaacagcaagtgtcctcatctggatttggcttctaagtacatcattgtattctcttcatcttccacagtatgtatgactacaaagacaatcacctgcttcatcttcttggtggttttaaaaatttctttcttgaattttattgttaaacaaagatgaagggcagacgaactaagacagatgctcggccatgttggtgacgtagcatctcgtggtaattccctaaggtgattttgtatattgaccttaaatattgtattctttagacactgttattgaaaactgccagagacataatgtttaaagttatttggaaaatatatctgttacatcactaagtattaataaatattgttttacctgatttctcaatgatgctaaattctatagaaaggactctgctatagaattgggataattttcttttggtaaaccaactcttacttttaaaaagccatgagttagagaatacgttattgattcagtacatagatatatttttatcactaaacaggatcaaaatcttttaaaagagaaaagttatttcaataatttgtcgcaaacattagcctgtgtgggtaggagctaattattaaggtgctaattttattaagatagtgcctaaaacactaaattttaaacatatgtaaaatggggctttccttttggtcatgaggaacaaagtccccttctcactgacatcactgttttaaaaacttgcttatattaccattccgtagaaaattacatcctaaaacagatggtgtacaaagcctgggaagatgggagaactggctttaacatgtgagttggtgagcccctttactctctgagagatgcccacagctcagggagttctgccatcaccgagagctcagccctgagctgcagtcacggctacagttctgaagctagtctcagcagtgtttgtccacaatggattttctttcatatcagacacacacccaaggtgacactgggttgtttccaatgaggttattcaagtgcattttggttttattttattccatgtttaaattaattactttgggtaggaaaagcctgaagtctctatcatgtggttactggtacatgtgattttgatgaaatgttcactcttagttccttttgaagttcagaatctcagccacatgtcaggtcaacagtgttagaaacagcacatttgtaaatgatgctcactgcctgccattggcaacctgttctcttctaagagtgctgggtaccaaattgttaccagtatttagttatattttgaggttggtgaaaagtagtgtaatgtgggagcaggagttcatgtaagaaccgtagatgtctgtagagctttctggccgtttgtttgaaactttggatgctgagctctatctggttagatggtttaaaaatgcatgtgtaattttaattttataattattttggcaagcataatttttctggacaaccttgtaggtagccttaacttttagccaactttgttttttatataaatatatataaatatatacatatataatgtatggttgtaaattcatacacttatcacatgaatgtgttactatatacagaattcataatgctttattttcagatgctgggttgaaaactgtttgaaagcctttaaatatatatctttataaagtaatattcaggatgatgatgaaattgtttatattgttatgataaaagatggtattatgttacctagtgtatttaatgacttatttgaagagggagaggggaggaaggctctcataccactttctcctttgagtttttacaaattaattcttcagtcagtggattttcttttcagtttcattcaggtaatttagacatgatctgcccttccagttccttgacatttagagcattgtgtctgggagggaggaaaagggtgtctccctgaagcctgccctctagatttcctgctcctgcttggagttttcttccgagcatggctgccttcctgtgtgtgcagggactgttactggagcacacccatctcagcacttcaggttatgataggaagtgttttgtaacagaacgtgctgtttctaaacaaacctgcctactcctcaggccttaaaccaagtagataatagtgactgttctttcctgcatgaagtataggtggggaggggctgaggggcaaaggcatccattcatacagtcagtccattcctgattaggtcactcagttgctgtggcagaatgtgccatgcagcgcataaaggagtttgtcagcagtcacctccccattccctgcatgctgtggatgcgccacacctcctcctcgcctctgcaggtccagctcctagagccctagtaacagggcttcccccctaaccctgttgaggctcaggctgtgggtcgctgaattagctgttttaggtggagtcatagtaagctctttcttacctttcctgtgtgtgaggaggacatttggagtgtttttaggatgctgagaatcttggaagcatctcacctgacaggacatggcaagttgtacctaagcagggggcagaaccagagctacctctccagtgttttctcaggcacgtgaggcccatgggggctctctgatctctcgagcatcagcaagtctcagaagtgattgtcttttgtactcttccaggtccctcctaccctcatactttcccccattctacactgtgcttattaaatgacaaagactcttctaagaagccaaattcggccatattaatagctagaaacattgcagaatgaaacatctagaactgcagtggaagacgagagcatcagctctccgagagccttctggtcctctctgcgtggtgattgtgtaggatgcggggtggtgattttcatgtttctcttcagtcagaggcaacagttgatgtctctgccgaactgttcttcggctgacatggttttaataacgctttaaaatttctgctacagagcttggagtagagtcttaccagtttcaa

SEQ ID NO: 26207 - DNA, 1937 bp, Mus musculus
gtaaaatagaacatggatgtctagaaggagacatttattatctttgtagttcttacccaggtaacacctcattttatcccaaaactggagtaagtgacagaatagcatgtcttatatgtgattttgaatttttaggacttttctaaatgtaactgaataaaatgttgaaaatactttaaacttgaatatttttacctttaagaagtttgcggtacatggagacattagaaaggcacaacacaacgtcgtatcttaaaaagtatagttatataaaaggtgtactgagagcctcagcttgttcttacatctaacatgtgaatttaataacacttttctaaggttaaggtttgtccagagcttgtactgccctttatacctgttactggcctttaaagttagacaggaactagttaattaatttagctaccttgatgatgtgagttgagccccacatctgatgactgactgactttttctgtttcagaacgacgtgactgagttagagaatctaataaagaagtggaggaagtgtggtcagcggctgctgtgtgagctgcagtctatcatgtcggaggacgaggacgagaagctgacgctcaccgagctgatcgacttctacgggatagatgacaacttgctgcactacaatcgaagtgaagaagagtttacaggggtgtgatacattttccaggctattttctccctctcttctttgggtgatgtgatcatacctagggcctcaaaacatgtgctctgttcctgagctatacacttggcccatttacagattgtctttgagaatggcaatgcaaagagaaatgttttaaaggggaaaaaaaagatctaagctgttgtggcttagagggaggaatgttgaacagtttgggatattctgacaaaattataagacgaagcttagtattttggatatgtttgctaaagaaaatatttaagtataaaaaaattaaaattgtgtttaaaaggaagtttggatagttctagaaaccagggttaattcattgatttggggggcaaaaagtttatattcagtattagaaagtagtatgttgaatgtctaaatctcaagtggcataaatgtagcctgcccttcctaagtttatggacctatgctcatctgcttaacatatctgtttgctaatctagcaactaattaaacttaaatgtctacagttttctccaatttgttttcattttcctcatgtactaaaatgaacatctgtttcttgggatgcttcatatccttatttcctacatgaaggtgttcttggcatgaacggtcttcataattccctttgtagctttatctgtgatgtaaattggaacggtctgttgagttcagagccatatgtaaaaatgtggcttaagctggcccagtagctgagaatttagaatgagcccatggggaaagagtgttgctgttgctgtagctactgtatgaacttggaagacacagggctaacatttttaagaatagcagggagagccttgtggcctccttcttctatctgctaatcattcctgaagccttcatgatttctgccttgggatctagcaaaagtattcgtttctaaatggccagtattctagagcctctccccagaagttcgtttttatttgagcacactccttcccttctgatctgaaaacccttgctgtttgataaaacagggattcaaacccgtacacacccacctaccatatacatgtataaattccctcttgccatctgtatttgtgaatctgtccttcctctacataaggccatgttatgcttgacctaattgactatatcactagttagtaatgaactataaaaacttatgaacataactgctgttgagcagaagctaagaggtgttggtatcatgaacagtgtcgatgggtgggttagagcccttgcaaagcatctgtcagac

SEQ ID NO: 26208 - DNA, 1297 bp, Mus musculus
tctgcaaaaacagacaaaatggatttctcttcacttaaagtgcttttctactcattaatgtgcatgcatgcgaatacacatcaagtgtgcacccatgctcgtgcgcgcacgcacgcgcacacacacacacacacactcacacacacacacacacacacacacacacacgggtatgaaatttttctctctcaatttttacatggcaagacaatcattaaaagttgctttatggttttccaaggcggctgccgaagatggcagaggggcaggttcttgtattggatggccgagaccatcttcttggccgcctggcggccattgtggccaagccggtacttctgggccggaaggtggtcgtcgtctgctttgaaggcattaacatttctggaaacttctacagaaacaagttaaagtatctggcctttctccagaagcggatggataccaacccctcccgaggcccctaccacttccgagcccccagccgcattttctggcacactgtgcgaggcatgctgccccacaagaccaagagaggccaggctgccctggaacgcctcgaggttttggatgggatccctccactctatgacaagaaaaagcagatggtggtccctgctgccctcaaggttgtgcgactgaagcctaccagaaagtttgcttacctggggcgtctggctcatgaggtcgggtggaagtaccaggcagtgacagccactctggaggagaaacagaaggaaaaggccaaggtgcactatcagaagaagaagcagatcttgaggttatggaaacaggcagaaaagaatgtggagaagaaaatctgcaagttcacagaggtccttaacaccaatggactcctcgtgtgaacccaataaagactgtttgcctcaaaaaaaaaaaaaaaaaaaaaaagaaaagaaaagaaaaagaaagagaaaaagaattgctttatgaacatttgcaagggatgggtaactgctgcctaaattcaaggctagtctacagaagccagctgtgctctgaatgggattttgtcttagcttaataataagttagtttttataggtaagtgagtgttctatgatcagttaggatgagttgatttccttctttcttttttatttcttcgtttgtcttttacagagctagagagtggcaatttgagaagaaaggctactttttctttgggaaaattacaaataatcattgtgtcatctagataataataactgtactatatgaggtcatttgaaaatggaaattttattacttttaattttggagaatatgtgtatgt

SEQ ID NO: 26209 - DNA, 1195 bp, Mus musculus
agagagttaaaatgctaacgagacatgtgatgcgtgaaatagtacacaaaactgtatgtaacagagcatgctcagaaaggcccgtgctatgcaaatgaactaaaaaagcccatgttatgcaaataacccaaaaagcctgtgttatgtgacataaaacccccaactctttgtataggagactattgaacctataaacattctctctttgctcaacctgcttcaccatccctggaaatatactacctcctaataaattgtctctatgctattccttgtatggggcaggtgatggaggggcagggacgggggcagggggaggggcatggagatcccgggatcctcccacaagtacattctgaagactgatatccagctatatcaacaccacgtgacaagtagcccctgtgacgactgtcctccgttctaggcatagtattctgcgttcacactgacctcagtcttagggaggaaatcccaccattctctctacccgcagctcccagagggacttctaacaaagtggatctgtaggaacatgaagacagctgaccacacagacttggggggggggtgggtaggggtaggagagcattctgcacgttcacaaacacagcaggtaaaaatctggcagggtgtcacctgatagaagatcagatttacagaacttcctcgcagaggccatgggaataccctgtctaaggttccactgctctctgacagcaaaattggggggcggggcggcaaaggataattccacttccaccgtgattctccctggtgggaagcggtcaggctctcctgaacacaccgagctttcctgaatggaatgctgcctggccttccaaatggatgctcgcagcaaatcgtctctgttattcttgatttgtctctttgggcaaaccgtttctacacaatagcaaaattgcagcagttaccatcatcataataacatcagaaggataatcaaatgctattgaagcaaaaatgctccaatttaatccaagctttggctaccttgatgtgcatttgagtttatgcacatttatgatttatggtgaagtttgtgccccttcatggttccttggtagctatgagagactggcctctacattctggttttgtttggcaatttatctgccctgttctctatcctccattggaaggaagggaccaacatggtggttgcgatttgagc

SEQ ID NO: 26210 - DNA, 1529 bp, Mus musculus
ggtaaggcgctcttagcttagtgatgaccccttctcttgtaattaccagtgggtgtgccttccaggtgtccagtgaggagccctgcgcctggggaagcccagagccttgcttgcctcccggttatttttggttccctcccagtcactgctagttcatgttggcacgctgcacccttcagccacttctggtgaaacgcagccttctctctcctcccctcctcctccccgaggcccctttttccttttagacactaagaactgacactcttcttacccactgggacattttcttgcaaacagtcttttatgaagcttgaattgttaagaatgagccaagaatgaaatcgctaggggatttccccagggtagcagacatcggggatccaggagcaaaaggacgaggtggcgtgcgcatctttcctctcagctgtgacggtggcacctgggtcccctcactgttggcctcactgtgtagcttccataacagcgtggcgtccttctttcttcccctgcagtgtgactggctcaacagctaccaccagacctgcagggacgtggttgggaaggagctgcagagccagggccgccaggaagctctcgagtggctcatcagagagacagagcctgtctccaggcagcattgatgtcgcctggcgttggtttttcgtaggatgctctgggggaaggaggacacaaggcagacccctgacttctctctcctcacctcctcctcctccccgactcctctttttacttttagacactaagaagagctgaaactcttcttacctactttgatattttcttgcaaacagtcttttatgaatttttaattgttgagaatgagccaggaataaaactgctacaccagaaggaggggccccacgaagccgaagacttgacaagggggagacaccccaagccctctggccagggatggccaacactgactgctccgcgatggtctcgttccaggtgctaggacctcagtcacggtcaccttgatgttcatgagaccctcctatgatcagtgaataaaaccatcaaaactcggctctgctttgtctgcctctttctccgaggtgccgtgtcctagtaagttaggctgctggtcaagaaacacaaaacaccccctctctccccctacaaacaaacaaacaaaccacaaagatggcaagcaaacaaaagaacagtaagttaaaaaaaaaaaaagcccaaacaaagcaaaatgatgctgaaagtctacaggatatcattgagtttgttctgtgttggccagaggctcctgtgttattagacgcgttctcacgaccggccaggaagaacaccacagaccagaatcttctgcggcaaagctttattcttacatcttcagggaaagagagcaagaagcaagagagcgaaaaagcaagagagagaagcaagagagagaagcaagagagcgaagcaagagagagagaagcaagagagcgaaaaagcaagagagagagaaaacgaaaaccccgtccctcttaaggagcattctcctt

SEQ ID NO: 26211 - DNA, 1154 bp, Mus musculus
caagcattagagctggcagccaggaccagacctgtacaggctgcttgtccaccaggcttctcaagtgtttggtgacctcatcagactctgggcctggctcgggccaggccctccacccagctgagtaacagccctgtgtggctcaaccacagactcctgactcactactgaagctctgtgtccatggagcgcagcggggtctctaggtcaccacctccgtctttctgtcctaggtctttgttttggaatggaaagaatgctgtgtcctccttatatttgttggggcggggggtggtggtggtggtgccagaatttgtagtgcagcagcactgagcttggcaggtgcccacaactaggttagcagtttcagctcttagggggacactggttagggttttctgatcttgctccctcctcggcttgcatcatggccaactagggaacagttctggtgccctcaggtggcagaacccagcagctacagctccaagacaaccaagacaattttccagagatttggagccctgtgtaaggtccctccctcctttctgagagatgtggaatcctttgataggagctgaatttctatgcagaaactcttccctcccccaaaacctacctgttaagcttgatctgggagccaggcagctgacagaaactatttttaagaaaatgctttcctttttagggctgttcaatctccgcgggtcagatgtggaacacaatcctgtgtttttctcctatgcgatcgtaggcctagagacgatcatgtaagtgtcctctctcacccaggctccccttcctggtcctcgccccgccgttactatagctgctttctcaccacgcaactcccgctttgtccttttgtccttgtctgccctgacaggtgtttatttttatcctgccttcttccctccaaacctctaaatgtcttgaaatccacagaagtatttatagtaacacgagactgagaaataagtacacgagcctatcagaacataggttcttcatgaggttcctgctgtgtgatcttgcccaggccacacaggtttcaggtttcccagaaggcagtgcagagggagccgtctaggctcagctgtgtggttctggaccccaggcgtcctaaaggccagcagtgacgtgggggatcctgg

SEQ ID NO: 26212 - DNA, 1110 bp, Mus musculus
gaagatgggtgggtagaagatgggtgggtagaagcaggggccagcccccctggcagaacttacatggtctgggcagggctggtagaatgctttggggacccaggatcttagtgcttctcctgacatcttggatcctttgaaaagccaaggaaaaacaaaaaaccactatgctgttttgtacacaccaatgtatactcacttttagaagagccaaggttcaaaattcccagcttcagtttgcagagagaaaccgactttggggtctgcaggctgaagctgtcgggtctggtaacactagagtagggtgagagcagtaaagtgtgttccgtctcctatggaagtgggagtatgtcaggtctatggtgtggggtggctccctgtcccctctcagtgccgctcccgtgtcctgtctcccattcctcaggtgtgctacagtgtagagaggttctgcaggatttatcactgcccgtgagtgacacagccctagggttttgccaaagatctggctgctgggaagtcatgtgactccatcctacagatgttacaccaggacttccaaggaaaactttgttaatagagtggcttatttagtggtttgtttaaaaaaaaatgggaaagagtcaaatcgcaaaataaagttccgagccagcctgcagtttgtaaggactgggagtcctgagctttataaaccattgagcttcctgtctgtcagaagttagcagagaaagcccccagaaggcacgggctttaactctgaacaggcgtgctcggtgccaggatgttaactgtttagcagaaatctcattggttttaaaaaacgttgtccccaaaatactggctggattaaaggaaaactgacctctagaaactgttctagttctcttggaggttgcttattatttatcgtcgtcttgtagaaggaagaagctgtctgtccattgtggtagggagccccaaggttgcggtaggctcctgtgtgcaccacttggaatccccagaaagactttttgtagccaagacttaggctcagtcctccagtcagaggctggctgtgggcaggggctttgctctgtgctcttggccttgtatgtgaagggagagcacttagct

SEQ ID NO: 26213 - DNA, 1099 bp, Mus musculus
gcccaaatgtcagcggcgagggagggagagcgagcagtgtggctaagaccttttcgagggaagcggttctgagcggtttctctacagaagctttgttctccagagggggctgtgcagctaaattagagtctttcacactgtgtgccaactttttgttgttgtcttgccttttccgaggcagggtgttgctgtgtagcctaggctggcattaaactgaggcagggtgttgctgtgtagcctaggctggcattaaactgaggcagggtgttgctgtgtagcctaggctggcatcaaaccgaggcagggtgttgctatgtagcctaggctggcaccaaacctgagattgtttggcctcagtgctgggagtacaggtgtgtgccaccatacctggctatttaaaaaaaaaatgtttggtttgcttttctacctgtccctttggccccatgagtgaagataccaagaccctttcaactgttgtaatgcccataagctgtagctcggggcatgaacggctctcgtctctgttttccagagcgagtacattgcaccctgtgactgtcggagggcgtttgtctctggattcgatggctctgcaggtgagtcactaaactttctgctctttgtctttgttttggttctgctccggaggtaactgaattgtgttccagcctgtgccacagaatcaaaaatagaacgcaaactggacatcccccacctgagcctgtgcagtggtgtgggcagtaattttatccgctcatcagcgccaccttttagtgaccctccgttcttttctgtgtctttgctgttccagataaaacaaagcaaccttctattacaaagaacagccttgcgctttgtagtgcttatgatatgcacacagaaagtagtagtaattaaactgaacatggctgcctagctagtgccccggaacatgaaataaggaaccttaatggtcttataagttctcccacccactgtagcttcctggtccttctctgtgaccttttgatacatggttttaacagcgttagataacagtggctgatgttgaggtcctttggtgttatgccctaacttttccaaaactgttacacccttg

SEQ ID NO: 26214 - DNA, 2194 bp, Mus musculus
gaggtcctgtcgcctgatggctcaccttcaaagtcgccctccaagaaaaagaagaaattccgcacgccttcttttctcaaaaagaacaaaaaaaaggagaaagttgaggcctaagtagtccttttgtaatttgtatattacattgtggcattgcacacttaaataccatattttagttaatcgttaatatactgtggtagatcagattgggagtatgtagcaaactggactttaaaaaactggaaagaggttttactaaaagaaaaatattattgaaaactttcaaattcatctctttttatatgtccgaaaacggccgagcttttcagcagtggctggcttggccgactctgccgtccctggcagagcgttgttactgttgctccttagcagctgctgcctggtgcctaggcctctgcagcacatgtgctgggaaggagctgccagtgagcacgagacaatgcttacttgtcactaatcagaccttgagtttatcatcgtggttattgactgtatctttgggtccccactgtttccatgggcattaatgggatgttttaaaagcttctacaagactctagagcattagtatacattggcacatcattttttaaaaaatgttttaagaaaagatttgtctgggtttttactcatagtatgaaattcccctacctgaagtaactgtttgccaaaaagtcattttaataaactataatttttgaagaacttccttttttattagtttagaaaaccccttatttttcatagaggggattttgtacacataatatgagttatttagtttaactcttgcaaaaaaacaatttttgtatgttaaaacgtttgtataccttcagtataaggtgtcatgtgcatgttagccaatcagtcaggggtaaagcctgcccgagtgccatccaggagtccaggggcgtggcacccaagggcatatcaaggcctcgagtcgtatttgaaccatataatgtatttttctcttagtattgctgatggatgaagaggctgaggggaagggaagagtaagagacaggacaggactgagtcctgtgtccacagaagaaagaacatggagatcgacttgctgaaaataaggcccaagtttctaaaatcctgtttcctgccaaaatcaatgtcttggttgacatttgaattttaaaagagttaaagtgtacatccttttagaagacggcactagaataaatcagcaggtctaatcccaccagcgagaaaactaccacgtcttgatttttgcaaacttaatcttgatttttataaacttaaattttcttttaacttcctttctactgtaaatacaaatttaagcctagatttaatatagttttctccatttccccaagtaatgtcgcagatcaatgtaaatggatgaccccaatactccacgagtggaagtaaagcgccctgcgggtgacttggcacgcaaacgtgacgtgacgttggccgcagtgctctctgggctggctctgtctgaccctgtgattgatgctggtcctcttagacctcactaactactggagcctgttaatctcgtagtggaaactttgagttgctgaattgtgcatctgaggattgttttatgtcctacatcatctgtgttgtgctacaacgtgtggagacacagttacctgtgaactctccttttccataacttttaaagaatatatatatctaaatgaatgcaatgtgcataaatattttttaaacacaacagtaaactattgcacctttcgctaacgcttctctttacttgctttgacataatgaatgagccagtgaactcagtgtcctgtggaaaatgtataaaagttatctgatattgctcttagatgttatgctaattaatgttaaatcacaataaacggtattttaaatatatgcatttggtataatggggtttccattcaggagtggtttcctaggttagactttgtgatctgccaaactttaatgtggaacagtgaagtgataaaattgtcctctgagctaaggagtcttgataagcttgttttcaatttagttaaaagttcatatatatatgtgggcttagtggcacatgtctttaatcccagtaccctggaagcagaggcaggtggaactctgtgagttccagaacagccaaggctacaatagtaaactgtgtcttaaaatacttttatat

SEQ ID NO: 26215 - DNA, 1226 bp, Mus musculus
tactttctccgattttatttatttatttatttatttatttacttctgtggccctgccctttgtagttgttactttctcctcttttagagggtgagagaaccgaggcattgaagttccacaagaaagcaatagagagaggactttaggccctgagcgtcatttaagaaatgagtgtccttgggagcagacccaagtcttttcctcagaagcaaagtcatgtaaatttttagtctccccatccttggaaccaggaaaggaaagccaaggaaagactacatctcccggaggccatcgcggagtccaccatgcgcaggcgtactgaggcggcccatgtccctcggcacccgacgtgcactggcgggggggtgggggggcgggactacatttcccagggggcagcggaaggggcgggcggggcgggtcttgccgctgctccggtccctcccccgtgctcgcgcggagaagtaaacaaaccgcgcgcgggctgcaggcggcgcggcgggcgcggcgggcacggctagggcggcggagagcgcgccgagccggggccgagctggcccgcccgcccgccgcacatgtccggagtcgtcgtgggactgtagccgtctgtggcgcctcctgtcggccgggggcgggagcgcggagcccatggagcgggtgcggatgatcaacgtgcagcgcctgctggaggccgcggagtttttggagcgcagggagcgaggtaacggctggacgccgtcgcttcgaccgccgcctcgggctccgcgcgtggagagcggcgtgactggcgcggctggcgaggggaggtgcgcgcgtgtggtgttggaagtgcgtgcaccggtgagggtgaagcgcgtccccgcgcgcggcaagaggagcacgcgcgcgcgtggggagaaatgtgcgtgcgtgtggggtgcacgcgcgtggaagtccgcgcgcggttggagaggtgggtgcgtcgggacggtgggggttcttgctcaggagtgcaggtgagttccggagaggaggcgagcaagaagctcgcgagcgagggcaggcgtgtgtgtgagtgtgtgcgcgcgtgtgtgtgcgtgcgtgtgtgtgtgcatgcatgaggtgtgggcgagagcttaggcagaggagagggggccttaggggaggacccgtgcgtggctctgggctgcaagggaaggactctcgagtcgcgcaggggcggctgctaagcggaccggaggagaggg

SEQ ID NO: 26216 - DNA, 1461 bp, Mus musculus
ctcagcctctgtttatcatgaagcctgtggatgatcagttcttttaaacaaaatgaatttttaaaaagctcatatcgtgctctacaaaaggagagactccatgaagccttttgaaagaggccctgacgcagcccggctttctgttggattccatgctaagccagctaaccttacctgcattgttagctctagagcagccgaccacccgctcgccacccttcggccacgtaggggcagcccatgcatgacggcctgaatcacaggaggaaaagctctgtgtgcctcggtgtctgcgcggagctgaggaggtgcgcacgcagtatagcagccaaggtctgagccaccgcagcatttttatttgagattttgataactgtttgtatgtgttgaaaaccaaaatgacatctttttaaagcttgtccataagtaaaaacatagatgtcttttatagtggaataaaccacgtggggaaatcatctattttgatgcagcatttgataatgataaacacctcacgcctcactcttcacagtgcgcaggacagacagacggacgaggtctgggctgggtagacggaggtcaatgctgtttttgttttctttaggaccactcccttttaccagctttaaccatctgatatccatagtagacatactatcctagttaacatagttacgttcagcacttgtctcatttaatgtaaagattttctacaggcagtctcctcccccacaatcccactgtgcgggtgctattgttgctcttacaaatcccttcagaaatgttatcttctaagtggaacttctagcctgcactctgatgtcatgtgttccctctgtctttcaaactctcaggtttccctctgggccactgcttttccctgggaagccttgctggagaccttaccccaagctgtttggactttgtattctttaaataatttaactacccttaattacttaaaaaaaaaagctttatgattttcataacttattgctgattttaatgggttgttaatttcagtcctgtagttttattttatgtttagatagggctgggcaaggaaaaagaaaataaaaacaaccatatttagcagtgcagtcgagttgtgtgttaatgtcagagctatcttccgtggatagcacgtctccatacaagaaacataccgccttggtcatgcataaggtcccagcacacactacccagtgctctttttgtgcctgcaaaagcacttcgccgttgcttgggctgtgtctgaatgaaaaggttctttgaagtagctgtttgtgaaacactgcatgcctccagacactcggctgaaacctgttgcacttgaggtgctgaggacagaatgcagaaaccctctggtttcccttgcagtcactcccagacaggtaagatgtgtgtgtgtattggctgtctttgagctttctcttaaagtttgtccttaccatggaaagt

SEQ ID NO: 26217 - DNA, 1217 bp, Mus musculus
cacagcaggtctcaccataaactcccttacagccagagttctgtatgacaagtaagctttctattagtaacatgtagtgatattttctgcaaaatagttttgtaagcattgaaacgtgaattatgttaactttaaagtttgttagattatatactagagattgatttttggaaactcatcagaaatgtttttttgttcctaggtaaagaggagtatttttgcttctccagaaagtgtaacgggcaaagttggagtaggaacttgtggaattgctgacaagcccatgacacagtatcaagatacatccaagtacaatgtcaggcatttgatgcctcagtaacctgaaaaactgctgcatttcatctctgcagggctttactttacactctcctttttatccttgtatttttctaaaggtaactgattgcttagatgctgagtaaggaagatacattgttgtcattgtttggctttggtagaatgaaacttgaagacatttgataactgctctcatttaacttcattactacttaccacagcttcctcagtgtgttgaacaaggcaacttttctaggtaagtgctgcttaaatcagcacttagatgacttctgaacgtcaggcccattgaactgatgttgtgtagaccgtttctaagtcctaatttggaattttcagatgctttgcacttgacatattccaacagttcattggaacatggaggcaaaacgccagcctgctaaagagagcttcagttttacaacctggccattgtccagacaagcccaagtataggttaatttataaacggcaaagtttattttgagggtttttttttccttgaattacttatttcctgggcctattgactcactttgtattttttgtcattgagtttgaaatttatattaaaaaaccaaacaaaccatgtttaggatgtgcgccccttctctggtgtttatttggtgttttgtattgttttttcctttgttgacttcacttgtagtggtaccatttttgggatgtgtactgtttctatgggaagacaaaagctgatgtacagccctgtgtacagtgtagatactatttttgtaaaaatacaaggctaaattaatgaacaagagtactcagtgtttcatgattaaattttcctgtatttcttgtgcattaatctgaccataatttccctgtatattatgttcatgtagctgagtttgtaa

SEQ ID NO: 26218 - DNA, 1127 bp, Mus musculus
aaaccacatggtaacccacaaccatctatactgggatatgatgccctcttctggcacacaggtgtacatgcagatagagcacttaaatgcataaataaatcttaaaaagaaaaaaaacaaaaacagctcctgtttgagttcatttgagtgcagccaatgggacagcacattggtggcattccctcatccttcttccttaaatgttactttattattgcttgtgtgtgtgtgtgtgtgtgtgtgtgtgtgtgtgtgtgtgtgtgtgtgttttgggtgggctgcatgtgtgtgttgcagtgcctatgtgggggggagggtagccttgtatgaggggttgactctatgtctaccttcgtgtgttccaggattaagctcaagtcaccccacagtgtggcaggtgcctttaccgactgctgagccatctctggcccttaacagatttcttgacacattttaacgctttctaattttttcttctactattctaggaaaacagacagctgctaaatgaaagaattaaactagaaggcattattactcgagtagagacttacctgaatgagaatctgaggaaacgcttggaccaagtagaacaggtatattgttttccaagagctctgtgctaatcataagtgataggaagtgtggcagtgagcactcactggaatgtcaggccagaggacacgctgagtatgctccttaggttgtagtgggagcactgccgcctagtgtgtgacctgcgcaagtatttcatatttctgttgtgattccctgtagtgtaaaataagtgtaatggtagcatcgactttatatgattacaatcatgaaaagttctagatgttcacgcgattagtgttagtttatcttagtagtcaggcactcagatttcctagtaattagattattaagtttttctgctttaatggcttctgcgattacatccaaatacatacacatatacgtacatgaggacaggcgcacaacgtttgcttccttgaatgttcatttaaattaccagttataacaggtttaatatacgtatattttagtgtatatataactcataattcatactttgagatttaatctcattaaattttattcttttgtattgcaggaacttaatg

SEQ ID NO: 26219 - DNA, 1136 bp, Mus musculus
tatccttttctgtgttccatcatggtgcacgtgaatgtcccagctgatgctctcaggagcattgctactgatgaaaggctagtgctaggtccttatcaggccatgcaccagcggcactgtccagttcctaactgatgattagtaagcatgcatggtctgaaagaaagtgtatcatttactgtatataaatataaatataatgtatgtatgtatgtatacattatgcataatacagtatagatatgcaaatgattctacaagttttcctgtattagtgctcaggtgaaaactgtttggaattaggtgatttgtcaacttcacagtaaaatttaaacaccacgaaaacgtaataaaacttaatgaagaaaatctgaccattaaagtctactcagataagattctgattaagaaatgggtcttaatgcccttcattttgttgcccctcccccaccttagatttggacaattccattgacaaaacagaagctggaattaaagagctccagaaaagtatggagcgctggaaaaatatggagaaagaacacatggatgccataaatcatgatactaaagagctggagaagatgaccaaccggcaaggcatgctgttgaagaagaaggaggagtgtatgaagaagatccgggagctggggtccctcccccaggaagcgtttgagaagtaccagacactgagcctgaagcaggcaagtctacgtgcactttcagtttatagtaacctcgcaagactccctgtggcctgtgagtgtcttaatttacttatttctcttttagttgtttcgaaaactggagcaatgcaacacagagttaaagaagtacagccacgtgaacaaaaaggctctagatcagtttgtgaatttctctgagcagaaggaaaagctgataaagcggcaagaggaattggatagaggctacaaatcaatcatggaattgatgaatgtacttgaacttagaaaatatgaagctattcagttaactttcaaacaggtgtgttctgttgataatgagcctagtgtggaggtggatctaatgtgtgtggactaatccagctcacaggccaccaacatagtaaagtgagtcggggttgtgcagctctggaaagagttgtgtttggcaaa

SEQ ID NO: 26220 - DNA, 1261 bp, Mus musculus
atgttttataaaacatctgatatgtctagtgaaaacccctttgaaaagtgaaggttttagtgtttttcaatgagtcacatttttaagtgcttttgtgtttgttcttttcactacaggggaagaaagcgttttgtaagtgaaggagatggaggccgtcttaaacctgagagctactgagcacagcaactcttacagtcttaggtgttaccaagaacagatctcaactgtaagagttgtcagtacaggttttcttttccttttgtttttgttattgttttttttttttttttttttttttttaaagaatttgttttgggtacaaggcatttctaaaattttataaacttaagtttaatgggattttttgaaggattttctttctttttctttttctttcttttttttttttttgaggggaaattaatggagggacagaagaggaaccaccgaagtgtgggtgttctgataagctactttctaagtgccatgtttaggacctgatcattccaagtttcacgttcatgtatgactgccgctcctttctttcaaggacagtgttttttgtagtaaaatcactggtttattcaaagctttagttaggggtgagtgaagctactaaaccccatgttggctgctgctgtggaaatgctgtgctttgagagtaaacacacacacacacacacacacactttttgttttaaagaatttttaaaaaaacgagttagtcatgagactttttcatctttccagggaacatattgattggtcttaaatattagacagttaagtaaatggtggctggaacatctatttttctacaaaactggaaaaacgaacccggttctacaagaatgtacagcaaaataaaacatgtgaaacactgttgattctttagtgggagtgcatttattgtgtcttttgaaacttcttttaggtttcctgtttaaacctcactaggccttgtgttcaatcctaacagtgcaaaccaaacaaaaatgtttcattgcttcttgagacagaacctgctctatagctctggctggcctgataattgtttaggtagtccagtctttctgcctgggaggcttgagtgccaagaataaaggtgtaggggatcagctgtcttctcgtgcttccatgggcacctgcatacaggtgcatacacaccgacatgtattacacattttaaaaactgtaatagttaaaggccttttaaggttatcctagggaaatacacatgcactttaattttctgtttatt

SEQ ID NO: 26221 - DNA, 1109 bp, Mus musculus
aaataaactttaatgtgaatatattgttgggcttgtacactacccaaaatacacataagcaagtgtgggccacatcatgctgactgctacggagcctgaccagtgacagcaggaataaccaactggtctttaggaaaccttcaataggtctggagagatggctcagaggttaagagcactgactgctctctaccagaggtcctgagttcaaatcccagcaaccacatggtagctcacaaccatctgtaatgagatctgatgccctcttcaggtgtgtctgaagacagctacactgtacttagatacaatctttttttaaaaaaaaggacaccttcagctatagacagaacgctcaggaactaagctcctaattacaccaatgttaagaaacagagaattacacaactgctactcaagtcccaaatacaaaccctgagctgcttattatagcaaaaactcaggtgacatgagcctaaaagagccgtgaagtttgaacactagagggtttctttctaagagatggtacctaaccctgtaaccaaggaactgtttggaaaattatacatgtaatgattttgctgcagtcaccaaacaccttcagttaccacagatcttgaaaccttgctaataactaggctttataaagaggctagaggtaacttatttattggtagttaaatattggtaatttagataaatctaagctttaagtacttaagagaatgcttttttaaaacacgttacaatataagggtaagatctatttatatattagacaaatttcactcattaactctagttatataataaacagaaaattaaagtgcatgtgtatttccctaggataaccttaaaaggcctttaactattacagtttttaaaatgtgtaatacatgtcggtgtgtatgcacctgtatgcaggtgcccatggaagcacgagaagacagctgatcccctacacctttattcttggcactcaagcctcccaggcagaaagactggactacctaaacaattatcaggccagccagagctatagagcaggttctgtctcaagaagcaatgaaacatttttgtttggtttgcactgttaggattgaacacaaggc

SEQ ID NO: 26222 - DNA, 1149 bp, Mus musculus
cttcccaaaggagagtcacaggtcctcccttgagctctccttataacgtagcttctttggaaacaacttatttttaaaaggattatttacatatattaaataagtaaatattttaaagtcattagaatggtgtttgtacatagaatgcaattattagctattgtgattttgcttacttttgacttctcaaaactgtgtatatagttaacttggattctattttaaaccttttcctgtgagatccaagttctacgaaagaaggctgatgtgctctccagcttctgtagtttgcagtggatgtttcatgataggggggactagactactgtataagatacaggaaaagtgacaagttctataatgattgttttgagacacttcacatatgttcgtcataacttaaggtaatttaccacttatttgttgtatttcagggactctaatgagctgaccaggaccattttaccagttgaaatgagttctcagaaatgagcatagtgctgttagagtcaccatgtaacggacggatgtgactccaagcgcaccacttcttcatgccaaccctctttgactgggaaggatctttgtcttttcatcgttgatctggattgctggcgaggaggaggagttcatgtagtgtttgagtgaagcttgagtcaccatgagtagtagtttaggaaaagaaaaagactctaaagagaaagaccccaaagtaccgtctgccaaggaaagagaaaaggagtcaaaagcctcaggaggctttgggaaagagagcaaagaaaaggaacctaaagccaaagggaaagacgccaaagatggaaagaaggagtccagcgctgcccagccaggtgtggctttttcagtcgacaataccatcaaacggccaaatccagcacccggcactagaaaaaagtccagcaatgctgaggtcattaaggagcttaacaaatgccgggaggagaactcaatgcggttggacttgtccaagaggtctatacatatactgccaccatcagtcaaagagttgactcaactcacagaactttatttatacagtaacaaattgcagtccctcccagcagaggtgggctgtctagtcaatctcatgacgctggctctcagtgagaattcactcaccagtttgcctga

SEQ ID NO: 26223 - DNA, 1199 bp, Mus musculus
cctttcctagaataagtatgtttcactgtgtgggagcagaaatctgtggtgaaaggtttttcttttcttttctttttattcccattcctgaaagttgcagatccacaaaaatttaacagaaatttggcaaggaaataaaaaacacataaacacacattctatatatgtatatacaatgctatatagatatgtatttattatatcataaactacaataggtaactttaaagacttctccctccacttgtacattgagatgaatgtctctctaaagactgcagtatatgtgtgtttcgaggttaggtgacagtgtactatggttttatatcttgactcgccatgtccatctgtctgttcgggggtatctgtgtctaagcacaatatcttcacactgtgctgtattgctgctgaactaaatgcactttccccatccccggggcactggcttcaaacaattcagttcagtactgttactttcagtctcgtcacgccatggttagtggtggtagtacagatacggagaacggcacatggcattgatgccattgggagttctgtgggacttatgtagtatgtgcatggactctttgataatgttttcttttgcttttctgcctttatgaatatcaactgtaaatgtgtgccccttatgtagtattcttatttttggtagtgtttgtcttaagtcagtttaattattgagaactcccccacccccagagcaggcgcatcctagatataatcttgaaacacaacttccatacaatgaatgactattacacataaggaaatattgctgcttgttcttttgtgcaaacccccccccccccatttttaagtattttgtcctaaacaactgtttttaaaaattaaaactgtaatatcaagataaacatttggatttttgcttttcctggcactcaaactcaagactgggtttgaggtcaaatctgtgttcataattggcaaatttgtaaggaacaactaagaaatggaaggcaggtaaagatataaaaccctagaatacctaaatgtgctgtaaaactattgtagatgttcactggattttacaaagtaatagcctttctccttttccatctactgtggcttttcagttaagattttgtttataaaaggaatttattacagttctacctagagcttgtgtgtgtggtgttttaaaaataatctcgtactct

SEQ ID NO: 26224 - DNA, 1243 bp, Mus musculus
agcgtgtggttgatgtcagtgtgccgtgaaagacagcgggcaaggcaggactattttctctgccttggctggaaaataccggggtctggtgtggccagggaagggaagtaaattcctgcaggatgggaaggaacagggccccccctggtttttctgggttggaaattgagtaaattaacaatcatcatctcaaatgatcgttccttcgggggcttctgtgtctctgttttctgatcagaagaacaagaacagattctgaactgccctctaggagacctgttggtgtcccttaaaaatacgtgataatagagcccagctatttttcctggccctacttgagccaggggtggaggaggaacgcaggattggaaaacctctgactttatcacggaagggtggcagcatctctgtgtacttggctcctgtagaaagttgtccagagaattcccagctctagcctagagtcaggagatggcaagagtaggggctgagggcgtggagcccagagtcacagtgtggatgactttggaccctggccctgacctgctttcccaacagctttggcctccccactccctgggcactccactgttgtcactgcagacactccactctccaccttgtattctgcagtctccaggcctgttgctatagtgcccacctgaatgtcaataaacagcggccgaagcacctgaaaaaaaaaatacatgataaataaataacaccaggaagagggtctgaaagaatggctcggttggtaaaatgtttgcagcacaaaaatgtagaccttaggtcagtccccagaagtcatatttaaaaatcagggcatcgtgcatcacccctttcccagatacctcctaactaactccagctagtatccagaccactatcacaaagagccccacttctctccctaagattctctgcctccacaatccttaagactggcagtgatatggggtgcacaccccaagttagcaggtatcacaggtttctcatttatagttatactctgatcccttatcttacttctaacagtaaactgagtgtgggtgtctttctctggcaaagtgccccctaggagtccccacagtccacagatggttttcccacggctgctgatctagatagaaaccatgcaagtctacttgatccaccatgatcatggcctcttgtagccacagagtggcactgttggaagcagaccccatgcagtcctgtgcttggccactgtgctcctgac

SEQ ID NO: 26225 - DNA, 2846 bp, Mus musculus
caaacttcctgccatgtaaaggcgagtgattgtgaaagcacctctgttgtagtgggtaggtgcctttctcatgagcggggagcataactgttagttatttgtggtgattatggcagatttcaagatcacgtgacaatgcagtctctaattgttcactgtccatatatatgattttacggaattatgaatttttctgatgagtgttgtatagatgatttgaattgataaaagtattagggatgaggtttgtactttcctgaacttgaatttcaaacactaactgtatcctatgagtgacgtgtgtgttgggggagggtgggcctgcctggtgttacacagagcatggcgtggctggtctggagcgcatagcaataatactgtgctgtggtgacctccgcccttgccttgtgcatgtcacacctccttttcctttgcttcacttctgtcaactgtagcgactttggtgtgcagtgagatgctcacctttagcctctgctcccctaactaggctggcacttcccttggctgtacttgggggacacccagagaggctggtgtactcccttgggtttatctgtggggactcaagcattttattggtctctgtttttttttttttccctctaaatggaaactgtaggtggcttcctctgatctgtctgccagtgggtgttgctgccctgcttgtcagctctgcaaatgagcgctgctccccagcttgcgcagagacgtgtgcgtcccacgtcccttgccgtgctctcccttttggtaggtgttactttaagaactgcagtcagacttgctgttgcctgacaattaactcactgtgaggataggcacgcacgcttttcataattaactggtgctttgaaacctttcttatggaagaaaaatctcaaccaaagttatgctcttcctgacaagctgacccttgagttaattttagcacaactcattcttcagtgcctcattatgaaagacaaaaagcatcacaataaggcttccaggtagccctgttccctaatagaaacattccccttgttttccagcagtgggtggcttcctcgaacgattaaacaaactaggtgcttgtatataatttattacagtttactctactgcatttctgtcaagttgaaatgcatgcccttcaggggaagactgtgagtcaagtttaataaataaaaacctaatactaagcaatatgaagctgcactctgcttttaagtgaggccaagccaagtaagccagagggggaggggcatttgctttccaaatcctaaggaaaaatgaaggcaaaacaagtgttatgtccattcagccaggaacacactctagccttcctgactctcttaaactgtggacgtcaggaggccgaatgcagaaaagtatatctgggatggatggcagggaatagaagctaggactggagttcctgtcctgccgccttggttcctgcagtatcgtgatgccctgagatggggatccgtgggaacatgcagtgccctgcagtgccctgcggtgcggacaggactgcatctgatagtacacagactgatgcacgtagcatttcccaaactgtttggacctcaggaccttttcccctctgggacactgcatgccgtggaaaaccttttcagaaactacattcattgttctttaagcagaccaaaagtcacaacagtggcaggcaggctgcatgctttttgtatcgctcacgatgcactgtggtgtgctcgggtatctttcctcactggagagagcaagcacaggaagctggctgcagtgccttcctcatgaaggatctaccacaaccctggcctttttaaaactgagagtagcagaattaatagagaaattaaaaaattaaaattggggtaaataataaaggttttaattcagatctagaagaaaactgcacagttgaatgcagatttttatccatagataactgtagtgttttgaaatgataggccctacctttgaagtttctaagacttattatgggatgtaaatctgttttttaaaaacactttttaggggcttgagagctgccacctggcatttagtttagtgcggccagtgactgcttcaagagacttctgaccttgcttcccaacagctaaagggctaactgtctttatggaaggcacttgttacagtatttgcccattgtacagagcaatgctacattgttgtaaaaagaattgctattgtaaaaaagcactgtgtgactttgtgaaggacactgccttggaaatgttgactgacgtttatgcctggtgatagcatgtcccgagaagcatggacatggagttttgttttaataaaccagaaaaaaaaaacccgactgatttttaatgtcttggatttggtaagacttttacctcactcattttgccctgtttgtttaacttcacaggactttgttaggatgtaacctgaggtcaacttgtgggttgctagcccagccctgactttatgggctcacgttccttcaaccttgatgaaacatttggcaatggggatgcctgctcacatcacagagacactctgggttcccgcagacccctttagtgtgcgttctgccatctgtttgcatagatatttaactttacaaaaaggacagtgaagtcctagatttccactggtttataatagttgctcaaaaacattagcgcatttttttaagaataaaggattgaccttttgaaagcacagatattttgtagctcctctgagtgtacccagatctagcctgctgtaggactgaatcaggggatggtggcagacataggcatgatgagcatgcacctagcctttgagtcccagacagcccccagctg

SEQ ID NO: 26226 - DNA, 1144 bp, Mus musculus
cactcaaaggtgccatatctcgattgagacacacacactctctcaatttttctttaagcattgaagcaggcaacaaagaaagagatgtgtggtctgcatcctacggttgtcgccatgcagggtgcaagggtcctgtgatgatgcgatgactgtattaaagagtacatcaatttgttttaaagtgttttgattttttatggtggcattaagagagagaacattgtggttgcagctttactagaaagcaaagagttctagaaggagggaaaaaaaaagtgtttctttgaagcctaccagggctttgaatcttgctgtgccaatgggcgcctaagtactcctgtaactggcaacctcagatgcaccatcagcttagggacttccgtcctccaaatattcatttaaaggaattgggggtggggtgtaaattgacctaagccatattaatgattatggagcacaatttaaaaatttttactaagtgacttaatgttttggttattgcttatattgatgtacagattagacgataaagaacagaagcttctaagtcttcccccagtacagactgttagtaccgtttcatttaattgtcttagacacagtaatgaacaccttatacctgggagacaacctaactaataagtataggctgttgaaggtaattctgcggggttgtagcctgagacctcaccatcttctctgcagaggaaaaggtagagcaatggcccgggaaacctgcccttttgttcctcacatctgaagtttgttcaccgcaggcctccttcccacttcaatgcagccacagaaggggcttgcctcttcctccctcaccctctgtgctcccccggtgctgcagtcctgctctgccaccttttcacagtgacgatctcttcagcagctattcccccttcaccccagccactcgccactaaccaatcagggagccttttgacttgagtgaaagatttgttctgtgcacacagatgtgcatggccattcttggtgatgctggtgacagaacaggaagcacctgttgacacagataccttttcttacatgtatcctccaaaagacgtcacctttgtctggggatccgggagaaaacaatggaaacagtatcatttcctgacctggcaaagatact

SEQ ID NO: 26227 - DNA, 1113 bp, Mus musculus
atacataattttgagcctgttttaaattctgtatcagacacattaaaaaaaaatagtgaagcatcaggctagtcaggaaataaagacagataggaaatcctctccagtctcagcccacactccactttctatagcttaatctaaagaaaaacgtggaatttcctgcagagtgattaattggctggctgtggtgacatacagggtctctgagcttgacctcgcaggtaaaggctaactggtatgttaagttgattacacaatttcctctaaatatgttgacaagtggtttgcacagttgccttgacctttgcccttataaatgcacatttataaatggcttgctttttaagccaaagcaatccctattttagatgtgacatgtgttgagtaaacagcctgatatgcaaccctggatgtctaaccctgtcagccaggtcagattatgggagtcactgggaggggttgagatggctggattcactcgggatagccagccccaaagtgtctcctcatcctacatggtgtgttggaaatgtgttctgaaaatggcttgagctgttccaggagtgcggctgctaaacggtttgcagcaaatgacaagtaggtttagctccagtgcttcttacggctctccagtccatttaaacacccgtgcacatgcgcatatgcacacacgcacacgagcacacaaaccaacttttcgtttttcttccaaagtaaggtggagaaactttccagggagcatttctgtgctgcgagtgttttccaagatgttatatccgtaggtactctagagaatgtcattggaggtactttttgttttagagtcatgctgcttgcttgtacataaggaggagttaccacacttattataaatgaacaggaaatgtacccttgggtagtaaaacaaactgtttatctgctatttcaaaaaacagctgtttatttgtaaatgtatacactgagcacctttcccaagcctgatatatcctgatttgataagcaaaaagagatttgccaacactgttgatttagctgggatctatctgcacatgtcttcctgagtgagttaagcaattggaaaatgaattgggataccgtttatgctctcca

SEQ ID NO: 26228 - DNA, 1196 bp, Mus musculus
cctatatgtgctcagatgaatcatttattattgtgtaaataaaggtgtagtctcagttttggaaggatggcgtggggtttgggctgaacaaagtaggacagcagaggagacaggctggaagctgcgccacctttcctgtcagcgaaagggacagcttagtgagaaccttttatcctgataactgaattctggccatcctaaatgtatcaaagaaaccattaaaaagcaaagaggcaacctcagtctgccgtgctgatgctggggaaggaaatcgaggccccggtggcctctttgggaatactggttcatagttcagagcagacctgagtcctgagccgtctctcccacctccctccgtcctcccaagtcacatcttcccaagaccacctaacaggtgaagcactggctcttgctggcccctaaggagttcaccagaacccacgttgactctgaagccgatgaaatgagaagaaggaagggaggcacctgccactcacctttcatgactctctctgcttggtgctttccttgctatcgccagtgatgttggcccagctcaactgtgggagtggaaatctgtgactctatagcccttggcctaagggctccctcacatcccctggatagtggacaccccattcaccaagggtggggactggtctgaatgtccctggtcggccctctggcctcctgatgtcatgggaagaacaaggaagagccctaggccagggcgatacctttcccacctccctacccaccacggaagggagaaagcacacagctctgaagcaggtgtctctgtgtggaaggttctaggttcttattatgcagacctcggttgttgagcatttgtgaagctgggagcctttgtttaaaagtgtgtgggaggtggggggcgaaatgacggcatgggggaggaggaagaggaggaagccctcaccatataaaattcatgcagactaaacagtttctctgacggcataaataaagcggaaacaaccctgctccagaatcaaaagcaatttaattaaagtctcttaagttgtaaagagttttaaatgttccgtgttgaaggcggatgcctgcagatgcagcgcgcctgacgtcagcgggcaggcctgggctgcggggccatttgcgattctctttcaggctggctggattgtcttattttggaaccagcttggtggggggtt

SEQ ID NO: 26229 - DNA, 1202 bp, Mus musculus
acctggtgcccgacacatgaggaatgtgggaggctgtcacagggtctaacctggtgcctgacacatgaggaatgtgggaggctgtcacagggtctaatgtggtgcctgacacatgaggaatgtgggaggctgtcacagggtctaacctggtgcccgacacatgaggaacgtgggagtctgtcacagggtctaacctggtgcctgacacatgaggaatgtgggaggctgtcacagggtctaacctggtgcccgacacatgaggaatgtgggaggctgtcacagggtctaacctggtgcctgacacatgaggaatgtgggaggctgtcacagggtctaacctggtgcccgacacatgaggaatgtgggaggctgtcacagggtctaacctggtgcctgacacatgaggaatgtggaagggtgtaccacacgctgttcctgaggtatggaaacgaggtgtgcctctgctttagccatttccaggttccctcccctatcatataagggatctggtatggagtcagtcttcctcaagtgagtgtgctagagttgctatctgaacagaaggaaagagccacagtacaagagattgtccaccataattgacttcccggtgtagcggtactggacacagtcattcagtgtctgatgggcgtgaagttggtgactgcaggacgggaatctgtggccttccggccgtggtgtcccttccctggctacatttctcttgctcaggtcttcgttaaaaatataaatttaaaagccacacatttctgattcttgaaaacagacttgtagctcctggcttgtgaacttaacagcaaatttgtttctttgggagggattttcctactcaggctcttgtttgtctgagtcttaatgagtgtgtaacaactcctccttccccctcctcctccccctccttcctcactcctcccctcctctccctccccctccttcctcactccgtcccctcctctacctccccccctcctcccctccccctcccctcctcctctgatttgatttgcagataccctgtgcattggttgccagggataagagatctgggaaacttggcacagatgttcacctttgggcccctgggcaccatctctatgggatgaagtgctgacacctttgtggctgggcttgagtgcttagcacaggccagcttgctggaactttcttgcggttttctctga

SEQ ID NO: 26230 - DNA, 1612 bp, Mus musculus
tgaacatgtgtaaccatggtttctccacatacgcggaactgactgtctttctccatccagggaaaagtcttcagcttctgcctttgcctctggcttggcaaagatcagagttgttaactcatttggaagatggttctttgccgtgcgcagaggccctgggttcagtcctcaggaggaaaatgaaatcacgaaaagctatgttttgtagtgaacagtaacataaagccacgtgcaggggccgtgtcacctaagctctaaatgagcaagcccgtgctgtctcactgaaattctacctctgagaatactcaatggccagtactttagagagtaatctaatcttctcaaagatactaaaataatctgaattgtaagcactaataatttttctaaagccacttctgttaccaaagatgggggtctatttagagtcctttcatttaccagtttcctttaaaattgtagttggtgaggacagggataattacggtgttttattgtttagcatggtatagtggcaggagtatagactctagcagtgtcttgccctgcagagctgggctgctggaccaagcctgggcttgccgccaggcttcagtaaaatgctcccacggcatttagcagggagtaatttatgaactgctacttatcagtttagttctaataatgacaataatttatggccacagacatgggcttgacttttttttttttttacaactccagtttctaaagcaaaatctttctccaccatttgacatgttagcagtcccagtagaatctgggctcgagaagaaaaagaacactttatggtagaatgtattaccatttcataaacaatattgtttataaagaagcacctctctactgtattgaagtatttaaaaaggccttctggagctttaatgaatacggcttttccatagaggatccagacatagctggagacacaccacactcttaacagcttgtacaagaatcttcagattataacctgcgtgccctggtgggtgctctcaccctggggcggtgccctctgcagtcttcaaagtacttgagaataacgttacagactaggtgtgaatgttccagagaaggaagctgcttcggcatgttgggtacgaagctcctggggtagcgtccagtgcctagaacaggacctagtatgtgggtgctggctgacagcagcagagcttaaccgaggctccctacagtgtggaaagtggggacctaccccccggccttcagacgagggcagaaggaggcttaccttcattgagttctcgctccctgctgggagtttcccttctgtgtgctgaccacacgcaatcctcacaacagccttaggatagagtccctcctccttgaacagtcacatcagcactaagagtgtacacagaggaagtggacagctgtctgccccactgcctactctgtcgtctcccaaacttgcaaggtcacatatttcattccttcatgtagtaacttatcagtccagaggattccaggagccctgggaatgcgtgtttgtaaaattcatttaaattcattaaagtcattcaacttacatgacttctcatagattcttatcatctgggccttggaatggtctata

SEQ ID NO: 26231 - DNA, 1955 bp, Mus musculus
tttaggggcatcccagtgcagcgtctgtccattgtgaagtagtgtggtcgtgaagcagtactatggttcagtgagcagcgcactacatgggtcagaaatgacagtgtgacagagtcacataccttgaggcagacctgcgtgataatcaccaagattgctttttccacccgtgtttcaaagccgacatgaagaatgagccctcgcctgagtcactgttttaacctggcttaatagaatttcctttttccagtttctttgcgttagggtaatagacagaatggtcgttaaagttagaggcttggtaatcaagcgaggtggcattctgtggctaatcagccttgtctcctgcctgtgccggcttgtgtaggctggcgccttggctctcgggtggccgctatgagcacacaggctggcccagaataggacacagccctgcctgcaggctctgctaggatagctttcgccatggcgtggtgctttggtttaatcattgtcagaggtcagagttgaaaactaaaaccctagacgcttgtggaatgtgcgtctaggtgtagttactcattgtgtggtgtgtcctttgctccccttgcacgtcactcctgtgtgcctgtggacactgctctcgacagcctcccgacccaaggaaagaaccgcaaggactttccagtacacttccacctgtggccgccctcagctgtgggttagaaataaacactggacctacatactagagtgcctggcctggctcagacgtgggcgtgagcagtgttgctgtttgaaagtgaaatctgaagctctagtaactcttgggttgcttagtttcagctttccacatggaataaataaaacaaaataaaacaaaagggaggtgaggttccgccctctgagatacagactctttaaagaggatttttattattctgaacctagtttcatgagaaaatatgttgagataaataagatcaaacaatcaaatgatgccagtggggatgaaagcacatacgttcctagtgtagccattggggtatcttctattttaaagactgcttgtctctatttttagttccaccagaaacataattgttggcacagggttggaatgtattgtcggtgcatgcctgtgatgtcatcattgcaagttaccctcaaaaactaagccagagccccaactcagcccgtgacctccgccctcagctacagaaacagctgtattcctgtcgagcctttgctgaggagctgggcttccacagggactcaagtggggaacgtgttgcagtgatcatttttctaaaattcctagtaatttctcagtgttctacagcagagaacaggaccccgtgtgactgacttcagattggcttctctttgaagtagggcttcctcactgtccatgggctgatggtatagctttaggtctctctgtaagagacgccgttactgtcattacttcacgccttaaggaatcaagacctccaccagtctgttactccttcaaggtatgcttcatggatgatcacgttagagactgttgccatcttgtgtgggtaaatgatgtcatttgtgagcatagaggtgctctgctgtgaggatgtcatgcctaaacaatgcagtggaaatccagtatacaagttcagatactggtatttctagacatggcttagtcctgaaagaatttccttgctatgcattttaaagtgtttgtagatggattaatatatttttatgcaatgtattttacacttatttctagaccaaactcttcagtggcttcttcaagtgcattattgggtggataagagcttgacggcttcactaactcgaggagcgtggagccaagcgtctgggaagcgtgtgtgttcctactgtacttgcaaacctaaagctcttccaaagctttgtactttttttccatgaaacagattaaatatttttctctccaaagttgtgtttctgtc

SEQ ID NO: 26232 - DNA, 1257 bp, Mus musculus
aaaaagttttattttctttttcattaggcatctcctatgtcctttcatatatggtcaagactgagcaaaagcatgtgtaagaaatgcatttatgtccaagagaacctccactgacttagggcgcgctcctggggtagatttgtttctgaggttcttctcctcatagaatacgtggaggagagaccctgagacgacagtgtgtattgatcattgttagttacaaatgtaaatgactatttatttagtaatattttggtatccttgggcaagaagttggtgtgcgtgcatgtgtgggtccacacacttccctggctttcatctgaaagtgagtgcttgggactcctttttttccatcccacttgagatttttgagtctgttcattttcaaggcttgaacatggtgcgtttggacacaatgaacagttggtggtggtttggtttggtttctccataaccatttaaagtgactcactcaatcaggctacacaggtcatttattcattaagaaatacatttgcctaataaacactaataaaccggcacgctacgggtgtcatggttatcactctccagtcccttggcatctgtgctctcatgacagcagcaggacgggtcttcaggccttactctcaggctgccctttgtcactgggctaagaagagtgctgttctgcttgcacaggtagatgagccaagcgcctcagcctgagctcgggcctggggaaagtgctgttcccatggtgctctgcccaaagactgtaagaagacactagacttttagcatttcgtaaccgcttgactggtgcctgttccgtgctcctgaaatgagtccaatccagtcgggcagccttctgaagtcccttgtacaggctgttggttattttctaaatatttttacaagaaaatttagtcttaaatttggaagaagaaaccccccccttgaaactatcaatactgtaaatgtgacacatgttgccctggtaaggatatatataaaatgacattcatgctttgggactattgactctactgatctctttttcaagaatttttttcagttcattttcatactgatattgttaacacttaacaccaattggtggcactagtgactgaaaattgttaaaggtgaacaagagaaataattgaaaaaaaagcaaactaaacaagaacttagttgcatattgaaatgtatgcatatggctatcattcatgcctgctgctctcttcccttcccgagtgcagggctgtctgcgtt

SEQ ID NO: 26233 - DNA, 1129 bp, Mus musculus
atagtcattagtacaagggtttaaaaacaaacaaacaaacaaacaaggtaaccaccgtcctttccttagtgacatcagcctgtgaaaagtcttcctaaagagaggcgttcatcatgcaaccgctcaccattttcgcaacacaaagagaaatctagaggaattataaaggttttcggttctgatctgggcagtgatcacccctgtgggcctagctacttcgaaggctaaagaggatctcttgagctcatgagttcaaagccagcctggaaacatcttaaaaccccatcacaatcagccgccgtcacggaatagccttgggttgtggtgtaaggatgtgtgtgcgtacttaaatcagttctgagtttactgacaaatagacaggaaagctggctgtagggaattagccctggctgggcactgtttgtcaggtctccttatatgacataggtatatttttcacatttgagttactaattaaaattttaaaatctttagtgatgtaaactatgattttaaactctgaacttaaaactttcctgtggatttgttatattttaatatgtgaaatggatccagtcattggaacagatgtgtgaagctctggggctgaggtgctttctgccatgccttggttttactgacattgtgtacaggggaatgtaaagggcttgggcggaggctcctgtgtgcccatcacatcaggagatgctcagtttcctcaagtgctgtttctgtatgatctttaacacagttatgtcttcagccgaagggactttggagctgaattgtgtatcttgttggatgtttacagtgtttaagatgtacgtttaaatgttgccaattgtagtatcagcacttctgtcattgaaggttttctcagttggtagcatcttacctcccagaacctaacacaccgcatcctgggaggctgctacgtttgggtttgggtttttggggttggtttttattttttgttttttggggggttttttggtttgtcttttcctcttaaagaacttgggctttaggatacatagctttaaagaatggtatgagctctagcctggcatggccgctcatgcccatcatcccagccctcaggaggtgacggcaggagagtattacagac

SEQ ID NO: 26234 - DNA, 1121 bp, Mus musculus
agtgtagagtttgttatgaaatatttttactatgactccttcaacaactaaatacgaactgcctgttctctaaacctcaaggagaaaaactggagttaatgggtaataaggtgcaaaataaaggggtaaggggggagttttctatctgtcctgttctctgttatctccaagtcctgattctgttgcctccagcccgagcctcctctcctcttctctcccgagacacagcctcacccgtcatttcattctctatccactgtctgtcacctccagcatggaaaggttcagctggagacatttctgaaacagactactttactttgaagcaaacgtcttttttttaaagattgcttcaccaatgatgctgtcagatatatctgctttctcaagtttaaaagaattcaaattaacttcctttgagtctttgttaaaagagaaaataaaaaaatctcaagcaaacttggagtggcagtccagggcatgtcgcaggagcaggagtggctccaagctgtgctctccatgaactctggctctggggagatttctagtaactcttcaatctgtactttctgtgcccgcctcggttttgagttgcattttttttttctgttgttagacaaaccagggctttgtatgcttgaagttcactgttttgtgcccccctttgaagaactttctatgcagaaatagatggtcagggtttcggatttgcagtgatgtgtcttccggtggcaatggacagggaaggagcacccatgtccactggaacgggagaacaagccttcggcatctacagggttactgtttgcattttctacccacaagcagaaggagacagtgacaatgggcagtggatagccctcactcgtgagtgtttaatgttgcagcaaactcaccaagaaggagacaaatggctgtttcgaatggaagctttctcagcagacaatgtgtgcacagtaaacttcagcagagtccacttgttctcccggaagcttaatgtaattgaatggcagttatcactaaataaaattcttttctgagtctctcccgagagtggcagtcctttgaatcgcttcccagggtgaaagatggaaagagatgagcctaaggataccaggttc

SEQ ID NO: 26235 - DNA, 2273 bp, Mus musculus
ggagacagtcggggggggggggcagtcaccagctgagctgtacagccacagccacggccgcggcatggctcggagcttgtttgacactgtgctcagtctgtttttctagggtttcagattcattgtatagcttggttttgctactaaggaacaaactaccagaagatgaagagtggcctcatttccagaatgttcatcattgtttaaaaaaaaaaacaaaaaacgaaactactctatatttctaacacaatgggaatctttctcggttccttcaagaaatccgttaagtcagaaagagaaccagagtgggaggcagcggtcccctgtgtggccttccttccgtggctctgagcagcgagcagtggttccctctgttgtatttattgacaagtttctgcaagaatcccccacagctcttcctccttcagatgttgctaccgtcgactttgatggtggtgattttgagataaggcattgagaggtacaggtgtttgttaatgttctcatagtgctctgtgggctaccagtgaggtgagctctagaccaaaatactcacacttcgcttctcggctggacctatggcgcccacgccatgagctcggcaaagcttctcccctgcgtgtttgctgctcccgacgatacgcttttcccaagttgtcctaatgacctgccctgcagccagctcaggttagcctgtttctcatctaagtttaattcctttctcatatctaatccagacccagagtcagcacaagtcacggagctgggtttgagttgatttaaagaaaccacgagccacacctaagatttttctcacagtctccgagactgcaggatttcttccatagactgtgttgagtggaaagtaccaccttagcaagtggttgtcagactgagttccagcctgctttgtgtttgtagaaacaggaaataagcatgcacattgtttccccactttctaacaatgtagtctggtttcttttcagtaatgagccatttttcacttgaccgaatcagatttgtcttcgccagtctctactgttgtgctcacataagtatgtaatgttctcataacttacctgtgcaatatgaagctgtagattcacagcttttggcctaactgtatattattgtgtgtacatgtgtgtatatagacatgtgtgtatatgtatatatatatatctgtatatctataaaaggaccaaagtcctcatagcttgcttacactgttgctagtgtaaagattgttacattcaattttacagggcacaaattatagaattatttcatacttttcatggtaaagtctccataagttattacattactatctagttaccatttaattatgaagtttaccgtgtaacagaagaagttacggtgaaatgccaaacccacaaactatggtaattttacatttttggttgatcaataaagtaagatatgcatgtcatcgtaacacttagataatcctcttctgggccctgtaaaatactgtcactgatactctgtcggcctcctgccttgtttacattaaacagaatatttggcatatttttccacgcgccatgtgggtcactagcagtgctgtgaaggtctggattcccaggccaccgatgaggaagctcttcgggtgactgtgtgcccaccgtcccctccgggcaggtggacgtcagcttcagctcttgcgctaacagtgcatgcaggacaaagagggaaatcaagaaaaataaatcaatgtaacttaaacagaacattgtcgtatatttttgtagaattctaactgaaaacgttttacccactgctaagtgtgagattggtaggattcttcctagctttgacatcttcccatggatatggtgtactctggtcacttttcaccccgctgccttgtctcatcccctgcccactggctggacactttattcccgacacagatctcctgggacttgtgtcctcttgatccactaaagttagacttgctggcacgagcacacgagggtgtgaattttcctgccccttagcagaggctaccccactgaaggacgagacccaccagccattcaccaggctccttgaggagagtgaggagtgttgacaggttcccaggtgaaaatgtaccatcacgccgaaggacacggcaacagctattctcttcaccctagcgatcaaagggacactacagccattgagtcccatggttacccttcatagggagaacgccacatatcatctgtgggagagctcagcacccatcgttgccctgggtcaat

SEQ ID NO: 26236 - DNA, 1426 bp, Mus musculus
caccaaacaggggcccttcacacttgcacagcacgccctccccgaagacaggtggaccatcgatgacatcgaacagtccctcgagcgctgcacgtctcttctgccggaggagctgacatttaaaaaactaaaatctgacaactccagtgaccaggttataagctgtggatatataactctcagggacacaaagagagaagatgacgcagttaagacactgtgaggccggcctgggaggatcatttcctggttggtgtctgtcccgaccaggaatgcccatacacctcttgagttctttgcaagatgtcttaatgtctctgaatgatggatctgattggattcagataaataagttttctgaatttgatcttcccttagtctttttcctatgaaaaagttaaacaatattctaatgacagaatcctgaagtctgagctgcaggttccactggtctcacagaagtgtcaaacttgctttgcttagactcggggagggggcgttcgttgttttgaaattctctgaatacatttgaagtgttcagtgtcgagctgtcctgtgtgtttgcagagcctatggctgctggaaggtgctggtgggctgtactcagctgtgactgtgtttcttaaatcccgggaatcaatacgttgtcctaatacatatctgtaaatgcacaaactcctgctttggccactgacagaatgtaaatagcgtgagacgtgattcatttcagatcctgtattcagcagagctcagctcctgtagccgtggactgtggcagctatttctgtggtcaaccacatggtatcaaagtaccaaaaatgtgattttctagaatataaactaaagaatgtatcttgaattaaaatgctctcctgcctgttcgttagcgcctctctgtgactgcggaaccctggtccagtgacatggtttctgtagttatgaagaatatgatcacattttcaaacagcagattttatgagtgcttcattgttttgttatagtaatatctattcttttattgtgtgttttgagttcttgaagacaaggaaactgaggacactggagaggcgaagacacactgcctgtccagcaggcacggagtgtagattctgcacccacccacagcaggcggctctcgctacttcagctccaagggacccagcacccacttgtggcctgtgggcccctgtgaacgaacacccatgcctccacacacatacataaaataattactttaagatatcgagatttaacgcaggatggccccactcattatgtagccaagactcctcctgtatctacctcccaagtgtagaggttagaggcataggccactgactcctgcaggaatgtggaaaggtattgtacagctgtggcaatagtcaaggcttccctcatttactaacgtatattttcaaaaagaaga

SEQ ID NO: 26237 - DNA, 1332 bp, Mus musculus
caagtgtaaattctcaagtgtttattagtagtggggctgtgtattttaagttagttaatcacttgccaattttgtgtcctcagaaagtgctttgaggctttttccaacttaaaattttaaactaaaatcttttcattttccatagtgatagttgtagataaatggcatttaaagttcagctagagaagtcaaatatggcttatatacagtgctttccacacgagactcatctagttctgtgactcagcataacagagctgagcaaaagatacagaaagccttcccccacattagcatagctctccctaacaacatttgccagaatgaatggtgtgcctgttaaaactggcgaacctacatcaatagatcactgctacctaaagtcatggtttatattagagttgtattggttaaaggtaccatggcatccacccaccttacagtatagcgcagaagcgtttctcacaccctgtactccgcctcgtcataggtccttccctcagctgtcagcagccagtgaccttcttctgtctccgtagttttggctcttctgaatgtgatatggagtctctatggcactcttggtgtattctgagaagtttatgcggtttagtagtgcacaagtgaagatgggtgtgctctccttaagtgatacaatcattgataccatgttgtacatatgtggtctgttgttgatggcaacattgttctgtgatgggtgactgtagcagaaactatgtagcatgtagggttaaggggtaccttcttttacttggcattctgtgttaaagtttctctcctgtgctccagtgacttgcagcccatttatttgtagaatgagcaatgttcattgtgtggatgtactgcagtttctctgttgattcattaggacctctcggttccttcaggtatttttaatgtaatatcatttcttttaattttatgtatcttttggaacaggattcacaatgtagctcaggctggcctcaaacttttggtgatctatcatagacccttgaatgtatagaatttttcaaatattaaatcacattaggaaaaaggtgttttggaaaacgtttatctcttaagtttatctgtaataattggataaagaagatattttaaaactaaataaaaatcaaaacataaaaaatttactttatgttcacgtgtaaagaataatcagtttctcaggggcctccaagatgtggcaatatgctatagcaactgcctcaatccaagtggctttcagttttttcctttatgtgactttctgaatccttgggcttttgttagagcaacataagtatttaaaacttgattgagcagaag

SEQ ID NO: 26238 - DNA, 1191 bp, Mus musculus
gagggatgctcagatgcccatgtttttggtgctggaaaacattgaattgtcgagagtggcaagaacggttaacataggtgatacaatgaaagtgtaaccattggggacccaggacattcagatgttgagcagactgtccatgagtgatggcagtcagtgtacggtgttgcttttctgacatgtgggagccatatgttgttaatacttaacacagagtttctgatgtgttttaaaacaaaaatatacttaatagagtatataatgtggacatttaaattaagacacattaatggaacttatggaaccatggctaagctttccctttcgttaccattgatggagtgtgcggtgagcagtttccaaaatgtagtgtgtgagtaagttaaagaactgatgcaggctgccgagaaattcctattctgtgcactaatgtgtgcgtttaactcacaggaaaacatctttatgtacggaggcagaatggagaccagtgatggcaacgtcaccgatgaattatgggtgtttaacgtacgcagtcaatcatggagcacgaaaacccccactgtccttggccacagtcagcagtacgctgtggagggacactcggcacacatcatggagctggacagtagagacgtggtcatgattgtcatatttggatattctgcaatatatggctataccagcagcatacaggaataccatatctgtgagtttctttaaaaatgtaatttctttaatggttgggagcatccttattttaatctcctaattactttgtcaaaacgttaagttattttagattggaattataaggcaattatgttcataatggttttttgaatataatctttttaattattctaaaatgttgtccttgaatacttgggtatcatctctcagccagatgaggggggtgttatgtgctcattttccaatattttaagctatgatgcattccagcagagggtgctgttgccttggattctgcctatgaacccaaagctgaaattacctcatgtctttgtagcttatgaattttagagttttcatttttggtgtcacgtcttattgctaggactttagctactttaaggtagattttcaaggataaactgttgctttctgagagaggttgttgtttagtgtgtggaggtgacttgattttctctattgctgttttttttttgtgat

SEQ ID NO: 26239 - DNA, 1106 bp, Mus musculus
gcagtgtgtgcatgtgtgtacaggctgcagtgtgtgtgcatgtgtacaggctgcagcgtgtgtgtatgtgtatagcctgcagtgtgtgcatgtgtgtacaggctgcagtgtgtgtgcatatgtacaggctgcagtgtgtgcgtgtgtgtacagcctgcagcttgcttatggaagggagaagatagcttggggtagctggttctctcttgaaccacatgagttctgggactggacttagcctgacagacatgacagcaggtgtcctgactcatggagctgtccctctggacacttgtattgttttcccaaggctgcagttacatgtcaccacgagcctcatgcctttaagaaacaggaatgcagtttcttacagctgacactgagaatgcgcagcgttctggagaacatgcagcagaactgagatcctggcagagaccctggaagtggtccctgcctttgcagtgtttcgtacatctggggctttctttgctgtaactatatccttctaatctaaatttcgtctatgtgcgacttgctttgtagagactccagtcagtgaatttagggtccgtgtgaatctaatattaatatggcctcatttatataacttaaattgtgacttcattttatcttagccacaaaccatttgcagagactccatttccaaatgaggtcacattctggatttgaagatacatattaactttggggagggtactgtacattcaatgaataccgtaattcttttttctgtttttaccttgatggaaataagactcatatttatgttttatgtcagggttgctgattttagtaattatctgtgttagtattttttgttcctttacagaggttggtttagattctacatgggtagtgtgaataagatccttctgggttctacggctttcagtgtcgtctttttgtggccactgcgtcctcacctcggtgaagagcagagcacagtgactcttctttatcagtcctcagacttaaagaaacatttcactgtgtctccagtaagagctgtgtgtgtgtgtgtgtgggggggggaggggtagaaatctttattagggaggtttagtaaattatcccaataatgccca

SEQ ID NO: 26240 - DNA, 1237 bp, Mus musculus
attctgtggtgcacaaaagagggttacaactcatgaagtaagtcaacctcagacctccacattgcagccataaacacacgcacgtatacatacacacgtgtgcacccacacacacatgaacacgcatgcaggcacgtatgcataccacataaatattcgttacactgatgaaaaaaattaatgtagaataaatagtaaacatgttgggggttggttctaatgctgtttgtgttcattcggctcccaaaatcacacgagaatctgcgggttcagatgctgggggtccctgcccccagttggctctcattggtgaatcaagttactggcagccaatggctgggtagggagtcggaggcgggattttaggattcctgggaaaggatagagaaggaggaagaggagattccgccacgaggatgacataggagatggaccacacaggaaaaggtgcaggagggagcgcccaccgacaggtaggtgaaggggaaaacagccccaggagggctccccagcaaggtccggggcagcaaagataaaatatagattttagaaagtgataactcaggaatatcggaagggagtgtgtgttagtcacatggagataggaagtgtcccagccattgcgctgcttagggtatattaaaaataagccggtgtgtgtgtgtgtgtgtgtgtgtgtgtgtgtgtgtgtgtgtgtgtttcattcggggactccagagcattgggcagcagcgagaagcgcagctgcaggcgggagtccagagcagattaacaatttactgctacataaacacacaggcagaatatgataaacacctagaggataacatgggagaaaatccaggaggtgaggttgatgatgaattctttagaagtaccaaaaagcacaaaccgtgaaaactaactgctgaggccttaatttctatttttgttttatgaaagataattctaatgatgaggtcttggttaatttagataatgctcaaagaataaaagtgcaagccaagaactgtcataagaaattttgtaacaaaataccatcacataaaaacagtgcaacaaaaaaaaaaaaccccaaaagaatggtttccaaatcatacaaagaaatggaacccaaaagaagtgtactgccccatatgtaaataaagacagaggtgtcaaatacatgtctaaaagttccgcgatcactgtgtgttctcagaagtgcacgtgaaaataacagggagggcttcagtac

SEQ ID NO: 26241 - DNA, 1222 bp, Mus musculus
gtatttagtgatacatttaataccacgcgccgtgtaatttcaccccactcttgctttctgtaaagatctttccccagtctatgtcaggattctcctttctccccacagacagtcttctgattgactaccagtttaccttcagcttgctgcaggaagatgaccggcaccacactgccatcaacttcatcgccaacccagagcaggtaaggagtcgccggctcctacacagaatgcccctcctaccgaggcatccacgttttacataatttttcttgtgatttcactccttagggctattacatagggggaattctgtagaaattactaaaacacttaaattttccttttgtaaaacttagatgattgtcaagctagtatttttgatctctactctcctggtttaaattatattatccacagttttacacttaacattcaggaacttcttattttcaagtaaaaaacacaagaattcaaggcgtgctttccagactgctgttcgcatgcactaaagcgtatcattggttccacggacttgtttctcagtctcaggtctgactgagcgacacacacaccagcttcaccttggtccagttctgcaggcttctgaatagcaaacacattcacaccaacagtaaagctaaaaaaaaaaagcatatgtttaagaaaagtcttgtccatttttttaacatcaaacaacctaagcatattccctggcgctcatctcgcatgagaagcatctccagggatactgtgtccagggtggattttcttgcctaatcctttttaactgagaaagaatcagggacaatctgtaaagttaaaacgactgatgacttaacctggaaaaatgagcaaggagatgactcagcatttatagactcccagcgtgtttacagcagacatcggcttaactcaccggttattacctcagtttggcacgtccgtatgaaccgtgtctagagtgcgccgtgactgtggagagctcccctgtaggttaaccagctatcacagctttccttgctgcgcggcactgagtgcacctgtggcttcagttttgcgactttgcatttcctcagtggttaagttttgaatttgcagagggcgaactaaaacatcaagacggtcttctccgccgagattgtccattttgttgtgaacttttaatacttggtctcctaatcaccctacccagaataaagttaagcacaggatatgaaga

SEQ ID NO: 26242 - DNA, 1109 bp, Mus musculus
ttctattatttattgctgtagtaaaggataatatatatatatatatatatatatatacacacacacacacacacacacatatagttattttttttgagatcataatgtaattacctcattttatttccccattccctttcttctctcaaacctttccaaacacccttccttgctctttcacattcaaatttttcatggttacacgcatatatattcctgaagacataaaagcactctgctcagtctgtataatgatgtttgtatgtatgcttccagagcacagctggtgtggttgaccagttgctcttcccaggggaggccatctgctgccccagctctccttccgtgtctgtggttcctggtgtaggtttaccacctactggcccttccctgtccactttagtgggttcatattgcccttgttcagcttatgtgtagggtttgtgttggtgagattttataggcaccctttcttaagaattcccaagattctaagaaggagttgtaaactcatacttattttggtgtagctcttcaaaactttatgaccctttctaaagtttattacggtaatatagaaaaatcagcacttcagtaagacatttggcatacaagagccaagcttaaatcatagacctttaagtgagcatactgttaaactgtttcatgcaatatatgtgtgtctgcacacttcatatgttggcatagaaaggttatatagtgggaaggttgttatattacttatttataaatttttatcttttttgttgttaaagaatggtgttaatgtctgtctctcaggcggtggttgtccactgtgtctgtctctcaggcagtggaatccactgtaggtctttagaatttactacattgccctaactggttttaatgactttgtagcattgactctttagctaccaatagctgaaatgaccagaatattaaaattaagtttacagtggtcaagatttgaaaattatgtgcaccttaaatcctgagcagtcattatattatctggaaaccttctttgactttcttcgtgactaattactgttctctatcaacattttctattcgtgcaaatatttttttttcttcaaaaatgccca

SEQ ID NO: 26243 - DNA, 1202 bp, Mus musculus
tctgttgatttagctcgctctctaattatggatatcttgagttcatcatttgatatcttatcctgagacatttagctaaatggtttggaagggaaacttaatttactgactaaatcaaaagttgtgtggacgcacagagattacgatgtgttttctcttccagtccttccactcaggaagggcagctctgagctcatctcctcatgtccttgtccgttcttttcagcaacaacaactggcccaactggcagttgtttcctgacttctcatttacagcacgtcccttgtgcatatgcataaattatagacctgccgactctctcctattggataacagggttccaatgatcccccgccccccactccttagatgtggagctgacaggtaccttaagtgtcagctcactctcacctgtagcatcgactctgaaatctaatagaagccacgagtggtatgtggctgtacggtagccaacagattggttgttatctgttgtaaaggtcctccctctggcaagcttctgttgcatgagcaaccaccggagaagacatgctgttctgaagtttaggactagtcagagtcaaaccacgcagctgcagaggctcctgtcagctcagggcatagagcattatctccggatatttaatgggccaaacaaaggagggctcaaccctgagatcatttcagagaagagcacttcctggaccctttgctgcaagagtctttgtgatgaagactcattccagagaacaagacttttaaaaagcagtggacaacttagtttttaggaaaacaagtgagatgatgtaatgactacctagatatttaagtgtttcagagcaattctgtgtggcttatgatcatatttgttagccttgtaaaacaaataattccctttttgggagggaagtagaggcattttagatgtgagttggtatatagaaagtgaaactcaaaatggctgattactgggagtatgaggaaacaatatttttaaaatttatctggcttctgaattaaatagtatgatttcactttctaaagctgtttgagacccattaagagacattagcgcattagcccttttagaatattataaatctttgaacgggtgccaatggataaatttcattgagctgagtttgttttaagaatatataattccattttatcccaaagagcttaccaaatcaagtgactc

SEQ ID NO: 26244 - DNA, 1201 bp, Mus musculus
ggttcacccaggctgtctcttcctaacaccagggaagccttatgtagctgagccagactcttcttccaatctctctagccagactaaccttgtcagccatcatgggtcctggtgtggcctgtctccaaccctgtttttctagagttcaagtcctccaggagactccagttggcagacaccagctttgtgagattacccaggctgtttaaacacagtacccagctgggtggcatcaccacacaggaagtccagatctgtaggtttcgtttgctgggaccaaataactaagatagaactcaagggagggagggtttactgaggctcagggtttgaaggttaaggatgcatcatggtggagaaagcatggcaggcaggagcatgaggtggccagacacattacattttcagtcagaaaacctagggccctccctgaagtgacatgcttcctccagggaggctccactgcctccgtgggcctcaccatttcacaataacaccacttggaaggacaatgttcaagcactggtgtcgccacaaaccatgtggccttcctcctgtcactcggcattcttcctgtgtgttgacacactgcctcaacagggacactggccacgttggcactgggagctcactgtgcttcaacctgatgtcatcctaaactaatcaagtccgcagagaccccgtttccaagtcaattgtattctgaggtcgttgtttctaagcaacacagttctgtccctaggattggcttcctgcctctttcctctgactggtggctctctgatttcatgtggcagctgtcagaaccaaaaggaatcagagagagactggagggggaagagtctgtccatgggcagcaaaacattcagagactcgcagagcctaaagagacagccttttctgggagttcctcacgaagcaaggtcatccgtgctgcacagtgcatagctgagttctctgcaggggaaaaaaaaaagcacacaggggttacgggatgaatatgaattggttcaaaggtatttttagggccagaaagatggctcagtagtaaagactcctgccattaagcccgatgacttaaattcaatccctgggacccacatgatggaaggagagaaccaactcccgtaagttgtgttgagtgcctaaatacataaaaaaataaataaataaaaatacctccaaaaacatattggagttt

SEQ ID NO: 26245 - DNA, 1283 bp, Mus musculus
attaaaagcaagactataacataaaaaggtaaattcattatctgtaagacccacccccgggacaatttttcaccatttccctcaaaataacatgtaatcattacaattagtaagggtaaaacacaactatttatttaaactggatgctgaatccctaagtgttatagcatcgccacaataaaaccatttaacaacaataacaaaaacaaaaggactgaggggactggtgaagaacttagtgttaagctgcaaagtaaataaatgtctctccatcctgaagcacactgttttcacctttgttgcttaagaaagaaaacctacttaacaccaggaccaatgtgaccattgtagtccccaatagcaaagaataccttgaacctggtctgctggccagcccgagtctgcttctgcacgggcatgattttcagaacctcatcctttagggatgcacccaggactctgtgtggagaggctactgggggaattggcaagccccacactgttccatgcaaggtgacaggccgctgtggctctgtgctggtgcgtctcatccctgcccccagaggcactggcattgtctctgttcctgtgcccaagaagctcctgatgatggccggtatagatgactgctacacttcagccagaggctgcactggcaccctggacaactttgctaaggccaccgttgatgccatttccaagacttacagctacctgacccccgacctctggaaatagactgtcctcaccaagtctccttatcaggaattcactgatcatcttgtgaaaacccacaccagagtctctgttcacaggacccaggctccagctgtggctaccacataaggattttgtacaagaaaaataaaagaattaagcctgctagagagagagagagagagagagagagagagagagagagaggaaggaaggaaggaaggaaggaaggaagaaagaaagaaagaaagaaagaaagaaagaaagaaagaaagaaagaaagaaaacctacaaccaaagaaaacacatggttggccttgaggttccagctgcatatgtagcagaggatggtctagtcggtcatcaatgggaggagaggcccttggtactgtgaaggttctatgccccagtgtaggggaatgccagggccaagaagcaggagtgggtaggttggtgagcagaggaaagggggaggggatagggggtttttggaggggaaaccaggaaaggagataacatttgaaatgtaaataaagaaaatatctaatataactaatataataaat

SEQ ID NO: 26246 - DNA, 1201 bp, Mus musculus
ccctttccttgcctctccgttcctagctgctctttctgtctgttctcacatgggacggtgagaattggggcctggaaaatagaccatccatgcctggtgtttggttacagaggttaaacaggatgccgcacattagcacatctgtgccaccttgccacataccaggtgcccagtaccagtggctgaactctgccttcccaagtggtccatggctgcagaatatgtgtaattctcagcctctagtcagtgaacctactaagtggagatggagactggccactctgagctgtgcttcttcagagcctgtcatagaaggtccttggggcatcctggaacaagaaaactgacaggattggctctgctcaggaaggaaacatggagaaacctgggcttattcaagcagtttcctttgtttaccctgcccagggttgccagtgaaggggctcctccatcactaactaaaggtcttatcctatgctggttcctctccaccccaccatgccacagtgtatttctttctcttcctcgtaggtgatcttttccccgggcttctcattgttctggggactgttgtttattttctagtgccttttccaggtgtgtgtgacttgaactcctaagaacaattctaagccctttctgggctctgcctcctacacccacctccatcttagaatcttggctcttgaagccactactgcagtcagcctcctctgagggagagagattgttgtgtggctcttgtaagtgtgaaaaaaacagccacttaagagccttcttgtggatatgaagacaggtatttaaaaatcatggggaaaggattagtggtagagaaaaccttctatagcatccaagtaaaaatggaaaaaataagctatttagttacaaaaactaaaacaaacaagacacttgtaaagatcacagagcaaggatcacgtggctgacagcagtggagtttgcagtaactggccaccacagcggggactctgggaaggtgaaatcatgctcagttaattttattctctgaaaggcagacctgacttgtgttattacattgctcagcccttgagcatttctttgagcaacattcagtgttatattatgtaagcttgacaccaagaagaaggtactattgtagatattcaatttaataacagggctctaccactcaagttgcatgctggatatcacatggcttaca

SEQ ID NO: 26247 - DNA, 1199 bp, Mus musculus
aaaactggagggtcttcaaggccctcatcgctgctcagtacagcagggctcaggtccgcgtgctctccgcaccaccccacttccactttagccaaaccaaccgcacccctgaatttctccgaaaatttcctgccggcaaggttccagcatttgagggtgatgatggattctgtgtgtttgagagcaatgccattgcctattatgtaagcaaagaggagctgcgaggaagtacgccagaggcagcagctcaggtggtgcagtgggtcagctttgctgacagtgacatcgttcctccagctagtacctgtgtgttccccaccttgggcattatgcataacaacaaacaggccactgaaaatgcaaaagaggaggtgaagcaaatcctggggctgctggacactcacttgaagtctccaacttttccggtgggcaagcgagtgacactggctgatatcacagttgtctgtaccctgttgtggctctataaacaggtcttagagccttcttttcgccaggccttccccaataccaaccggtggttccttacctgcattaaccagcctcagttcagggctatcttgggggaggtgaagctgtgtgagaagatggctcagtttgatgctaagaagtttgcagagagccagcctaaaaaagatactccaaggaaagaaaagggttcatgagaggagaagcagaaaccccaggctgagcggaaggagggaaaaaaggcagctgccccagctcctgaggaagagatggatgagtgtgagcaggcactggctgctgagcccaaggccaaggaccctttcgctcacctgcccaagagtacctttgtgttggatgagtttaagcgtaagtactccaatgaggacactctctctgtggccctgccatatttttgggagcattttgataaagatggctggtccctgtggtatgctgagtaccgcttccctgacgctgccatatttttgggagcactttgataaagatggctggtccctgtggtatgctgagtacggcttccctgaagagctcacccagaccttcatgagttgcaacctcatcactgggatgtttcagcgattggataaactgaggaagaatgcctttgctagtgttatccttctttggaaccaataacagcagctccatttctggtgtttgggtcttccgaggccaagagcttgcctttcctc

SEQ ID NO: 26248 - DNA, 2626 bp, Mus musculus
tttcctcctggttttttaattagtgttaaataagatcctgtctagattcctgaaatattttctttcattttcatcacggttataacagcaaatttcttgcatgcctaaattgacaataatcattgagggaacaggtttgagtcttcttccttctacgttttgtggtttgtcagctgtacttccttgatgtttttgttatacggggcttgggggatttttgtttaattttattttgcttttattgttgttgccaaatgtaaatgaaagcagaccctacagctttaatctgttatgcttatataattttttttacatatattgcttgcttcttacgcttctgcgatatttttaaagcttttatgcagttgaaatgtagtaaaattacagtgattaactaggagaggttgcattgaatagagaataagtgcaaagtccagttggtcaagaattttgtaggcaggataataagatttcattacagtaggattttgaaatatctttcaaatgttgatgctttccttttaagtggaaattacggacactcatgatgacttcatctgtggttctctcataggacataaagcatatgcaaggacatttacaatcgcacaggacttattctgaaaatgactgtattgataactggctttgtttgtatgatgtggagagcaattatacagactatgtttactacatcatctggtgtcttgtggccttaaaggactgtcggtcattctgaatactttagtagttcagaccatctttattcattgtaaagaaaactaaaaatagacagtatgcatagttcactaaatgaaggcctgctatgacaaaaatgaaggcctgctatgctattgggcccatctagtggatgctggtaatgaacaactgagagaaatatatgaacttaacccctattgatatatcttaaaagtctaagcttgttatacctatagaatagaaaagtgttttccccctttacaggtaacttctatgataacacataaaccaactaaattaaaaaatatatggaatagctctttggctgcagaaaaatgaatagtataatagtaaaaaggcttgcccaggctgtagcccaaactcccaacaggagtttcaggtcaagctccttagtgagctgtatagccacaggcaggttacaaagggttctgcagcttccccagctccaaaggtccttacacttctcacaggactgttgtgaggaggacaggaacatcactgcaaaggcgctttgaagagtaaatgctgtaaaaataagaggtattccttacacaagaaaacatttctgagtatagaaaagttactccagtcataaactcaatagctaactctcacattattaagtgaaatattggggcacagacctacctttgtcaagtttatagcaaggctacatctgtgtaacctcacccccactcttttactgtttatttaagcatgctcacagtttaaaagaacaccacaatagaaggacttcccacaataaatcccagaagctaaagtgttcctccattttacacttgaaacaatctgcccaatgtatagccgtgtttcatcttgtaaacaataacttgccattgctaccctgaaggtggtatggctgtaactggctggtgtgttgatggatcaaactatggaagttttagtggtgcccaagcatgctcctgcactgatgcatttggaagagctgtagaaataatgcaaagctttagttctaagaatctactcatgctttaaagtatttatctctgtagaaccacaatcatggaaagctcaacagtgctgctaatcatgtttgtaaaatatacctttaatgtagtgcaatatttttctattgggagagacagtacaggcatcacagttgggagctccaataccctcaagcatagtaagggataaggcttcaatttaagagattgtgttatattacattactcatgtaatcttgctgccatgctatgttatcaatagctaaaataataataaagactaccacggaaaataagaatatcttcatttgatgacatctaaaaacaggtgattggttctctggcattattacctggtataatctggccatgcagacaagctaacgatccacttttactaaacaaatatgtagacctgtctcagaaaagaagaaaaattaaactatttgaagtgtacgctcttcattgtttttaagttgaatggctgagttagacaaaatgaataacattttagtattattttgcaatcatttatttgtttttttttttttttttttttttatttatcgtgttgcttttttgagacagagtctctttggcttcaaactcagtagagatctgtctgcctctcctctggagtgctggggttaaaggcatgcaccaccatgccaagttttactatatttcttagcaccagacttcgttcagtaacactagaacttactgtgtagatactttctcattctaagaacaggctaaaactttgagagtaaaatctaccttaaaaaaacaaacaaacaaaaaaacaaaaaaaaaccctataaagacattttaaacatatttggttctaataagtaagatagtggagtttaatttttaagtcccctaaagttttt

SEQ ID NO: 26249 - DNA, 1150 bp, Mus musculus
cttgtgccaggtcttagcttgtctgcccttgttcagatatattcatggacttctttcctgttccattcctggagagttccctgttgtttcaagttctcagtgtcagtagctttccgctgtacttgatggatgtgaaacactcatgggaaataagagtgaactagagaaaccagggtattcttcctcctggcagctggtttatccttcttggcccactcttctcacaggacaaaccaccattccagtttccaccacatatgtctatccttcagtctgaggttgatagtgtcctcttacttttgctggtatctgggttttatcctggaattcagtttttctcttacccacaagttactcccttttgctcttggtttcacatatttaagaattttcacttgccacagcaatgtcacctacctaccataatcacttctggggaccttccctaactgacacagactcgcgtgttaagtacttgtcacagctggagtattagttatatttgtataattgtacaacttgatccctagtgtctgcagcagaaccttctgttacagtaagtacctggataggtttggctctgcatattctgggaagactaagtctaactatctagacatcaatctccaagtaccttaccgatttttctcccagactgccgtggtttcagcatgacttttagtcaggccttgatttcctttttccttcccttgaatatatcccatctcttttaaggaaataaaaatacttaggatgaggaagtctaccaaattagatttattaatcaacattgcttatataaagagctgtttcttcagtgtgagaatcttagtttacaattgtagttcccagtcatgtactttctttctggcaggactaaaaacaaaagaatgcctcatgagtgtaattcagcataactgaaataaatgacttgatgtgatttaaaattgaactatcttcattttgtttttagttttggacaattttagaagccttgttggataataatgaataaaaaaatctacatttccagatttctctacatattactgacagtccccacaaatgatttaaaagggctttctgaaaaactgtaattttaagtaaaaacatttgacttttaaatacattaggccaggtgccttaggac

SEQ ID NO: 26250 - DNA, 1168 bp, Mus musculus
gagcgatgcacacccagtggtaactgcgggatggtgggtggagtgcagagttccaatccttcatctttttataatcagaaaacaagcagatgtcccatgtctttctacagagtcaaaatgaaatagcacagtcatggaaaaagtgtcagactctccataaactagaatttgagcaaaatatacctctctatgtcacctagcctctggtatcttgttaaagcaaatacaaaataagctaacaattcagcattgattgagtaccttctgtatacaagcactttgctccgaggtaacaaactgagaccagatcttgccttgcaggagtagagctgaagagacaggagatgacctcctgagagttcagtgcagggtcaaagagtcgtgagaatgacaaggagggagtctgctcaatttggatagcttcatatccacccctcacccattctagaaacaagggaattactggtgtaaggtgtgaaatgctggtgaacaacaggcttgaaccctgttctctacctcctctttctacaatgcctcgccactgccaggagcactccatgtgatttccctacagttagcacaaatgccaagggaatattgagcaggtgcgtgttgtattcacacctggggattagcgaaggctgcaggtgcattgtgaagcaattttaaaggcttatgttttcagcatgaggctcctgagtcacacaagaagaaggggagtatgagcactgagccaacaagacagggagcacatggccagagctagagctgcctgacagaattgcattggccctggatattttcaatcacattagatgtgactgtgcccctctgtcctagagctgcatgggcttctccaggaataaagatgcctctgtgtgtgtgtgtgtgtgtgtgtgtgtgtgtgtgtgtatgcatatatgatctgtctgtctgtctctgtgtatacatatgtagtctgtctctgtgtatgcatatgtgtgtctgtgtgtatgtatgtctgtatgcatgtgtcaatgtgtatgcatatgtgtctgtgtgtatgtgtctgcctgtctgtgtgtatatgcatatgtgtgtctgtgtgtatgtgtctgtctgtctgtgtgtatatgcatatgtgtgcctgtttgtgtgtatatgcatatgtgtgcctgtctgtatgtct

SEQ ID NO: 26251 - DNA, 1178 bp, Mus musculus
gaaatgagcatcataccactgtgacatggtagctctgtcttgcacttaatcttaatgaccacctttgcactaaagtaagtgtcactaatagacatttagtgtcttcattcttcaaggatattctgtgcatgtcagggtcactttgagatcctatggctcctgggggattgaccattcattctcatgtgtaaaccctggttgttgactcttgtggtctctggctatttactttcaaccaagaaatgaagatttgttaatgtcttatttcattttgtattgataatacacatccagcaatacttgttaacatgcattgacaacctgcatgattgggttaagtgcgatatttctacttctgtatataatatgcacagatcaaaccaagcctcacttatctgccctccccaggaccacttttctcaaaccctaccagtaactgttatactatattcctgtagaattgctaaaaagcattttgagagtcagacatggtagaactcgggaggatcttggctttcaggcccacccctgctacataacaaggccctgtctcaaataacaagacaattattctgtgacaatgtcaagtggggagtttgggtttctggctgaatgcctgttgccttggatggtttggggccatggcaagtcagctgtattctgccacaggctctcacagtgccgtggccttgagtgttaattcctatgtctaaactggtgacatcacggtgctgactccgcctgtgctttgagatcgaggtgtacgcacggtggggccggtgtataagcaggtagtgaggaggtatttttgttgttcccggttatcatcatcactatactcccaacatccttgaggacagacaccctttgctgtctgtgttttggggactcgtgttcatacacacgctggcacacatatgcatcctgcttttctggcttctcagacatattgagatgcatagctcacatttccctttcttgcttcccatgtgcctgctcccagctggcacatcattaccattgatcctttggctgatcctggccaagttcttgcctctcctttctgcctcttccctccttgccaccccgtgctagctctcagcagcccataatcttctgctcacacttcatccatccaccacctccccacacgcgacgcattccccacctgccttcca

SEQ ID NO: 26252 - DNA, 1207 bp, Mus musculus
tttaaaatgagaaataaaaaagaaagacctgctatctctaagtagctgtaataacttttacacaaagcttttgttcccccccccccccaaaaaaaagcagcttaccctggattggagaagcaggccgagactccttgctgtctgtgccatcgtctgtctctaggtgcagtaggtgtcactggtgcgtgtgggtgaagtgtgagcatgcccagtcatgtgatctcttctcagagggaaggactgcactgcaagctcgtggtgctattggagagggtctgtcagcacatactgaaagcccccattttcacagatttataactttaataatccagatgctgtccttggaggtatttaatatgcaataggtagcacctttactaattaatctgcatatgaagggtttcctgatgtatttaataagatgtgtagaagctcttcaagcattaaactaaagttgacgttttatttcattgacttttcactgtcaaagaatatcaaccacttacaatggaattgaagtctgttacctaatggtatttgggccttttaatttctgaagcttctagattgtttgtattgtgaggtacaaaaaaaatgctgcagatctaggaatgtatgttcttagcaagtgtttgaatgatgtaagcattatttaccattgaagagtacgacccctatgttcttaagtaaatgcttagtaacccatatacatttttgcaggtacaaaagtatataaacattgtataatgtgacagttgtataatttatgtactctgatgcatgagtcagaatttttatatatgataattgatttgttatagttgattaaagtgtttaaacttaattcagtcatcagaatctcttattgtaggtaaatctgttcccatcatgcatttctatagacctctttattgtctcttgatagtgagaccaattgtgttggagcatgtgttcaaaaaggcctctaaacctgccttgtagagaatatggttctgaagagtcatgcagaagtgaaatatcttttctgttaatgtgtgtgtgcataagggggagagagtgagagcacatgcacatgtgcacagggcatgctaaggttaaagacccttacactaccatgtccagcttttacatggaatctgggcatcagactcagacttgtatagcaatcctttttatccctgagccatctacctagccccagcaaaat

SEQ ID NO: 26253 - DNA, 1184 bp, Mus musculus
agcatagccagtgacttggcttccttatctgttcttagcatgactgtactttttctaggattgtatttttaagattggctttgtttatagtggattgatcataaatagaattttcaattgttactaattttacaaataattttaattactgtaatgctttaaaaataattactgattcttttttagaggtaaaattaatattacttagtaacagtaaaagcagttgatttattttttttgtgtgtgtgtgtaatgtcagtggaaataattagagtaaaagatggacatagtatctggagaatgatttaaattcagatttgcttagaaaatgcctttctccatatctcaaccatgtcattctctatgattatttatgaaaaggaaatggtctgattgtgctagacagacagttgtaactcaagataacataactttggattgtcttgttttggattggcttgtttgttttacaccccccacccccaccccacccctgtcactccttggaggatggaatgaattaatgagacaaaagagagaactgatacctgggaagtcattgtccttaggtgtgtgtttgtagtcctaagggaaagaggctttggaagtcttttgataactggcaaggccgtgtgtggatatgtggaaagtgagtcatgaacatggttaaatcctttagacttaaagcattgtattaactgatggtgatatgtacattttcgctctatgaagagtaagtgagtaattaagagccagcgtatcgggggctggatagacagctcagtggttaagagtgctgaatgttcatccagcgatcctgaattcagttcccagcaaccacatggtggctcacaaccatttgtaatgggatctgatcccctcttctgctgtgtctaaagatagctacagtgtactcatataaattaaaacaaacaaaaaacccaggaagccaatgagtatttaaaaaaaaaaaaaaaagtagtccaaatatcaaatcttagcttcctttagttgagaagaaccagtggacaacaagcaaggcctagggaagtggatatccactgacccatcttaatgaaaagatatcttcatagatgttcctgagtactgttcacctatagcgacctactttggactcctagtaggtgaatatgtgtttaatgatataggatttttttttccac

SEQ ID NO: 26254 - DNA, 1146 bp, Mus musculus
cattatgcaatgaatatgcactaatctgagataagaaacaactaaaaaagaaaaaaacaaaccgtgcattagctattcatctgttagagtttgttttttaatggtatattcttgagcttttagcttggaatattgtttgcttttatccaagtataggtttcttagggggatgttaaaattcaaggttggaatgtgacacccttaactgacatctgaagtatcaactttttctgttgatgactgcttttagtataatactgtgcaaaatgttcatttttaccagaatttcaagcagaaatcatagggaaatcttagagaaatggctctgttgtgcttttattaccacatggaaattttccttggcttctgaccccaagaatatttggaaggaggtgtttgttctttcccaaaggaaatgctccctctctggtcccctgctgcttagctgcagtcactgcctcatccctcctgcactattgaagaccttaaacctccttccagagtcagtgatgggtctgcccccttcgtgcaggaccaatctctctgccttgaagatcttttaggcttggtctgctggattacacctcttggaaggttgtcagcatggctcttgggttaagagttgagtgacttgtaaaacaaaacaaaacaaaaccctttgtattgattgtgactactaaactcagtaagactgggtgttctcctcaaggtggtgatgctgttggttctttttagtcttatatgttaatgttacagccatggatattcagagaaattatttgaacatcaagtcctgggaaattggctcaaataaatgcttatacaaaatttggagatcatgtgcaggctaaaggagtttgccacccaccagcatagcagagcaaatgaagcattgctgtcttttttcctgacatttgtcatctggcactgtcctttactacttatttgctgaacgtgactaaagcgcttcctgagctggggtacaaagctgctggcctgggctctctccttataaacatatggtagattttgaatcgctcctctgtattagttgtatattctcactctaaagtattgtggttaatgaaaaataaatcttgtacagatgtcattaaacttgctttttaagttttgtgcaggtgttcc

SEQ ID NO: 26255 - DNA, 1185 bp, Mus musculus
gttcttggcccatctcattttaatgggtgcgtttaatacatataaaaggtcagctccactctgtatcttgtaaacatcatgtttgatatttgaatgcaccagggagagtgtgctgtttgaaggctccggtaaagctatattacctgttttgctacaccaacagtgcaacaaaacaacagttcttcgcaaaagtctgaagcttatttagttgtgtctcaataataaacaaaactagacatggcaagggaaaagtattttccttctcagttttgcttgaatgtgaagtgagcgttggctttgtgctaccaggctccatctgacagtgatgctgaccattcagagaatgcctccccccaagctactgctaccatctcagtgggcagcagagttagaaatggaataccagggacaagaacattacccagtagcagtcctgtgtttgtaaacaatgttccaggggaagaacagttaaaagctgatagcttgaatctttcaggtacttgtctgcagttggtagaatttatgggggggggggggttaattggcttcattccatttgggttatattgaagaatctgagtagggacaagtggactcatactatggtctgtacagccttttctgctctaatgtcgaggggaaagttttcattttatcaaaaagcccagtttacttttctgatggaatgctcaccacagagttgtaaatatcattttgaactggtttcttctacacagctttaatatttttgacaatagtaaagttggaacacttcttgaaacataataggttagtggttccgtgtcttaattataccctcccccccccccaggagagagtgctcttctttttctctaaaagaattttgcctatataaaagcattatattaaataaattggcattaacgtgggtgctgttgtgttagtaaattaatggagaaacagtcatactaattctgtgttagcacaaaataggcagggaaaacctgtgaagttcttgttctctgagtcagagctgggtgggtaccactgtgctggtactgaaaggcgtggggcaggaaagtgagtgtgctgctgatggattcgtcctggtaaccagtaagttaagcaaggctttacagtttgtaaaacttcagctgaaatggacacttcttgttaactgaaatctctacaggagtcttagtc

SEQ ID NO: 26256 - DNA, 1158 bp, Mus musculus
ttcctgttttgatgggttcatgacatgggccagcttctagggatgagtatggagaccatgtgggtaggagtatagtctagatggcacagcttagcatgtggagttgggttcattcaggccttgggcttaagcaggtgccaagagaccacccagattctttatcatactcagctcaggggtgaggtgatgccccaagatcagtccctggtgatattggttcattgtcacttttctcagaactgtgttgcttttcaaagtttttaaaataaacacaccagggcatacagatcaggaggaaaatgggcttgcatgtgcagagtgtctgtccctcatggtttttcttcttctgactttttttcagacagtccatctgcttgtgcaagttccagggggtatagatagtgacggttgaactatgtttctcccaagagaagacacactggagctacagaaactgttccaggcacagtgaggcctgcaccactcaggagctctgtcaaaggctgttctcagagaggataccggacttctttctttgatttttcagtttttaaaaacaagaactaacaaaaacaattgctgctagactggggggtgattatgaaatgggacaatcttttatctacagagcaagtgtcttggagagtggccgttgataaagtgaagctcaatgtttgaatcagcttcctccagaaatacaagaacgaaagaatctttttgttttgttttgttttgttttgttttttttaaaagcactcatcttgttcatttgtggacttggaacatggtgtctcatgtcaagatatctttgcttaaaaccaagcagatgttataatacagtgttttcacccatgccccaaacaatctgttttaaattcagattggtctgtgtttagcagttagccttgtggaggaaaatgctaataactgcttttactatttctttccctattaattcccgttttcaactgtgtgccttgagctttgtgcactttgcagctatgtgaccatgtcatcaatctcacgatgcttcctgaagaagttgatgtctcagaccggctcaccaaagcctctggtatggctttgtgtttgtagcagaacctgattgagaaaatggaagcacttgaggctggtcagaatttaccctgctgtcccagc

SEQ ID NO: 26257 - DNA, 1652 bp, Mus musculus
gactgaagagagggatccacctcgtcgtgttcctcccccagctctttcaagagatcgagaaagagagcgagaacgagaaggtgagaaagagaaagcatcctggagagctgagaaagatagggagtcccttcgtcgtactaagaatgaaactgatgaagatggatggaccacagtacgacgttaagtcccaagatgatggagtcaaacttgtggcttacataggtttgatcacattcaaggattattatacttgtgcttcaaccagtctaaattgaattctttaatgttgtctcaccataacacaaaaagcatgaacttgtattaatcatatataatagattgatcatgcactgtattcacaggaggttggaaaaccatgccattttctggaacttaaggtgttgcattatttcatcaatcatttgttaaaaaaaaaaaactaaaaaataaaaatgtgaacccttcaggtgtaaacaccttatcttggtatacaattgatctttttgttttgttttgaagtatcagatattaatttggaataaggtaaggttctcttgaaacatttgaaaaccctttaagccaactgatctgacagctttcccatcagtagaagtgggaacataccttcttaggtatttactattaactacatgtaggcagtttatagcttctgatcagtgtagtagacattacaaacactggttgtaatggggttttctgtagactttacttgagaggtgagtataaagcattttttagtcatcatcatgacgatgctgctcaagtgcagatccagaacagtacagcgttgggttcctagagcatttggtaaactgttgtgggttttttctttctgttgccaaaactgcttttccactaattcatgcctttcaagcattttaaatatgacaatatttataaatgtgtggtttggaggaattgtttaaattctttttcctaattttcttttttcaggatagattatttcaacaagtaatttgtagtgatgactgtgttgacttcaattttggagtgtagtagctgtgtttaaaaaaaagagtaataaccatttggtcttattgaagccaacacggaatttgctgctgtgtttttttctttggtgataaataaaatacttacataattggtgttagtgttttgtcaatggtgctatattccatatattaattttctgtgaatttttatcactgctcttaaaatatgtcattgttagtatcaaaagaataacaacacaaaaagcaaatagtagcagctagcaagtttgcgaagtgcccttgttcatggaaacattaccttgaatccttctctgaggtggtgtgcatgaggtatcaccttgggtttcatcaggaattaggaaagaatccaataacatagttgtagaggatttttgccacaaacttagaatctgtgtaagcctataaattttactaagtagtggtttaaaatactacattgttaaaactgtcagcccagaagagatgataatgatttttttccctttgttactgaggactgaaatttcaaatatggaagtttcttgtggctagagggcttactcagtcaaaacgagtaaaagtacttagagactactggtgttttgttattggttttttgttttaaagaccactggc

SEQ ID NO: 26258 - DNA, 1387 bp, Mus musculus
ctattttttatggtaactgctagtgatagacgggaacagtggctttaaaaatatgcagaaattaaagtttagaggaagctcattgtaaaatatataggtaattttttcaagactattatctggttgttagtctatattgatttaagatactgaattttgcatagtttttatttagaaaacatttttaaaggaccagagttaatgaatttagacttggcgatttgtaagaaatagtgaaatcaagggtccatattgtttttaaagctgttccttgtttctccttagggagtggagacgagaaactcgggatgatgagaggcctcacaggagagatgaggatcggctgaggcgcttggggggtgacgatgaagagagagagtcttctcttagaccggatgatgatcgtatccccaggcgtggcctggatgatgacagagggcctagacgtggtcccgatgaagatagattttctcgtagaggaacagatgatgaccgtccttcctggcgtaatgcagatgatgataggcctcccaggcgaattggtgatgatgacaggggaagctggcgtcacacagatgacgacagaccacccagacggggactggatgatgagagaggaagctggcgtacagcagatgaggacagaggacctagacgagggatggatgatgaccgggggccaagacgaggaggtgctgatgatgaacggtcatcctggcggaatgctgatgatgataggggtcccaggagaggcatggatgatgataggggtcccaggcgagggctggatgatgaccgaggaccttggaggaatgctgctgaagataggatttccaggagaggtgcagatgatgaccgagggccttggagaaatatggatgatgatagggttcctagaaggggtgatgatgcaagacctggtccttggagaccatttgtcaagccaggtaagattctagttttaaaattacgatgttttgtgacttgtttgatagatttgtttacatgtaaaaagtgaaattattgggctaaatgatagttgtactatattctttttagatagatagatagatagatagatagatagatagatagatagatagatagataagagataggcctttttctttgtgcccatgcagtggcttttacataaaaattactctttttaaatgtccacacaactgctgtccatggggtcatacttaggagctcatttttgttcttctgggagtgctcactgacactcttccaagtacacacctcctcttatgacctgctgtctcaaatgtgtaaattaggagttctctcctttcttctgttttagcctgtatgttaagtctgccatttatctcggctccttttttaaaaaattcattatattttt

SEQ ID NO: 26259 - DNA, 1100 bp, Mus musculus
gtagagagaagttctgacacaacgaagtaagtacaattttgcctttgtgttgccatcaggaccttgaagaactggatccagattttattatggccaaacaggttgaacaactggagaaagaaaagaaggaacttcaggaacgcctgaagaatcaagaaaagaaggtaatgagagggttgattgatgggttttaaataaggtctccaaactggacttaaactgctttgcagctgagattgcccttgaattcttgatcctcctgcctagtggcattgttaatcttttcatataacttaaaaagaatctattttggccaggtggtatttgtgcattcctttaatcctccacttgggaatcagtggcaggctgatctctgagtttaagttcattttggtctttagaggaagttccagggcagacagtatatagtcctgtgtcaaaaaacaaaacaaaaaagggggttgttttgtaacactgcatttgtttctatcccattcagattgactattttgagagagctaagcgtttggaagaaattcctttaataaagagtgcttatgaggaacaaagggttaaagacatggacctgtgggaacagcaagaagaagaaagagtaagcttttcatttcattgtggtatcatagatcataagctaagttataagtcagccaggaaaagtttttaaattcttttgctagatgtaatgttttaatgactgcttaatggaaaaagaaaggttcaaagtagaggtttaataagaaactattaattacagccttatgtgtacacaaatgagagaaaggtcatatttgtggggccctgggcatctgaagtttcagggtctaccatctggagacttaggattatattgttaattcttactgttttttaaaggataagttaggattttgtgataattctccttaggcatacgtatttaagcagaaatagaaaacacttgggacagtatggacttgtataggacttccattagggatctgttgggatgttctgttttcactgcaaaatacaggggaaggagaagcttctcagtgtaaggaaggtgagcatcttcctggagtgatgctttggagattacc

SEQ ID NO: 26260 - DNA, 1173 bp, Mus musculus
tcctttagcagttaaactttttactttcttactacaggtcaggttcagtgtgctacagtatgttgtcccagaagtgaaagacctttacaactggttggaggtggaattcaacccactaaaactctgtgagagagttacaaaggtaggctttgggataggcattttttgctctttactagatggctgtcataattgcagttgagcattgtacttgtgtaaagaacattgtcattgttcccctatgtgttgaggatggcacattttattttttcatatcaagagaaaagatatttctgatgctaaacaaagtttgggaggtaaattagcagcatgactactttagccacttctgtcagttactttcagacaagaattgatagtgttgttggatgaattttatatgtttatatatgttttgtataaagaaattaaaaaaatgtgaactgtccttgtgtctgctgcatatgaacttttttttttccaacttaattgattttataggtattaaattgggttagggaacaacctgaaaaagaaccagaattgcaacaatatgtaccacaactccagaacaataccatactccgccttctgcaacaggtaaaagcaaatgatttatggagaagctgagatttgtgcccttgactttgtatgtatcatgtagtatatatacatactcgttttgtatatgtgcacgcaagtatatggagactagatgtggatattggttgtctttactatcttctattttgaggtctctgtcactgaatctgctgctcacaaattagctaaactggttggttctgggaatcctctgtcatccatagccacgtgactctttattttgatgacatgactgaaaaaaaatttagatttaacaagtgaaagcttcccaagttccactcctgcccaattctctgtatttgtaattttaaagcagagtcattgacttaaccacttcttccctcctaattttcttcccttgccagttttcatttggaatgggttactgctcccctgagtcctgagattaaaggtgtgcatcactatgcctagacctgagttttctttgttaatatagggcgacctacaggatttttttatagtctgaaagatccatagtgtacttgctcagataatagtaatgaaaacacctctttccagtgccactgg

SEQ ID NO: 26261 - DNA, 1211 bp, Mus musculus
aacaggaggttggtcttaaaactcacagagatctgcctgcctctgcctcctgagtgctgggatgaaaggtgtgcaccaccactacctgccctcccaccccccaatttttttataacatgaatcataaaatggggactatttgggagctaggcatgaaacagctttccacaaatgctttaatactgttcagacatttacttctgggcactgaaacttgtgctgcttagcattctatagtgctgactttttgtgtttcagggaaatgaaaatttagcttttctctccctttctattctctgtcataattgtgtttacttaaagtctattttcttagtttctaaagatacctttagttagttattttagtaaggaagtgtttctttactgctgttggaccacattcaatgttgatgagattgagtctgtaaggattcatttcctccaagttcagttttcatgatatgctatatataatctggtatacataagtaaagaaaagcacatttatggtctcaacaaacaaaattttgttcaccacagaatgtctactagagtccttttggcgactctttccattcctattactcctgagcgaactgatattgctcgacttttggatatggatggtattatagttgagaagcagcgacgccttgccacattgctaggtcttcaagccccacccacacgaatcggcctaattaatgatatggttagtataagttctaagtatctttttgtagagtaaactttttgtggaaagttttaattcattgtcaggcttctgctgtgtgaacagggttagggttagggttgaaatgggtacattgctcatttgaggcaattggttaaagcagtggttcattgggtatatggtgaatcaagtacttagtattttcatgatactgattcagattctagtgaacatcaatgtgctagtagtctggaataagtcagtggttgtatttgcatgtaatctacataaaatcatataaaattgaaattatctccagatcacttagaatactcataaatcatttgccatgattaggtgacagtgacaagaaaaagacatttaagacagctgcagttattttcttgagtattatttaaatatgattgattgactgaatgtatgtagagcctgatgataagaccagagctgttagatgaacatgttcctgtcctgttaattgacattgagcttttta

SEQ ID NO: 26262 - DNA, 1127 bp, Mus musculus
agatatggtagcacacaccttttatctagatgaagaggcagtgaatcatttttgagtctagcctggtctacaaagtaagtttcaggacagccagggctattacacaaaaaaaaccctgtcttaaaaaaaaacaaaaaacaaacaaacaaaaaactagaatctttgagctcatctttgagactactattatgaagttcctcctaaaagatttaatttttttttttttaattttcagatcaagccaagtccaacagcttccaaagagtactttgagaaggtccatcagtaggccatcctatgtctgcaattacctgaagcttttcaggccaaaaaagagccccagctggaatccttccaatgccttgaagattatttatagaatggcaaaacctcattatgtttgtgtttataagtactgctccacaggctttgtaattttaagacaggttcaggctctctaaaggtggctagctgcttccatagctgctcttactagggacttcttgatggctaaccaattctccccgagtgcttggcccccatttcttggatcatgtccttagagggtaagcattctttcccttagcctgccctgaaccttggtctacagtgaagtagcacatagtgccagtacttggtgaaatgaagtagcacatagcaccagcacttaatggaagcttctgatcaaggtcctaaaatttcctcttgaatttttgtgaattatgctgaatttcccttttttttttttttaaattgtagtcattaactcacagtgtccttgtgtgttctgaggtattgaagaggtataatcatgaaggactatgtctaatccataagtcattttcttcaagagctggatatatagaataaaaataaacattaaaatatttgcgtttttgacttattctggggcaccgtttctcctttgataagttagctcaacaaatatttattgggcatttgacacagggctggctccactctcaggaaactgaaacttagtaggcaagactgatacctactttcattcattattttggtagccatgaaaaacatatgccaggttggactttggaggcattggagtgaagaaaaataaacctttgtgtttatgcacttgattctag

SEQ ID NO: 26263 - DNA, 1698 bp, Mus musculus
caaagtcaaagcaatgtccattgtagcagagaatccccaagggggggaaatgcaagtctgtctaccaagagttcccatcatgaggtcctgaaaggcctgtacatggaaatgtgcctgagtgcctgtgggaggtaaggaaagtcatgtgattcagtctttcactcatggcttcataacagaacagtgtgtgaaaactggctctcctccctaagtcttcctcctgcttgtgtttctgtagctgcatttttagaaggttttttttgtttaatgaaaacaagccttctgccctttcacctgtccaggagaaagtgtgtgtggctaatgaacagactgtgttgtgtatctgagctctttgcaaaagagcctttcttcgagggtggcatttttctcaccaaatttccactgacttggaatgagaagcttctctgcttttgctgtttgggagataggcctctgctatgatcattctgacttacaattgtccattaaacccttcaggaggggactcagaatatcaagaaggcctgatccctaccttccaggaggacggtgtctatcctctacttgagccaggctccatgctcacccagctctctaggggctgagtctggcagcagccacagggctagtctctgagatgtgttgttctcttggaggggcagccagcaagaggcttgccacacagatacaggcaggtagctccagtaacaagcatgcctcatagttactgacccttgatgtttctgatgagtccatgtgcgtggggacatgaacatggcacatctttacattagaggagcaagtaagatgggaatctgcctcataactgaggccagccccaaagaaagctgagatcagaaagtttccatggaacttagccccactgttgaaatccatttttttttgaaccctgtactttcttgaaagtctggctctactttccatcaaattcactgagctactaccctcaacatagagcaagcaatgcaacttcctgtagcttagcattctaagccttgataaaggaaatggtggcagcttctttggacaattagagttcacaagagaagaataggaaaaaatgattcaaacaacactggactcttctcatgagctattgtgtgcttgcttttctggctgtatccttatccctttccgagggtctcccatcttcataacctaataccctgagataagaccttattgcttcttaggttttactatggaaaggcagtataaagcctcttcctccaaactacaattgatatgcctacccttggatcaccttctgtacctatttatacaaccagccacccagttattgaagctgacaggcatgtaggccagattctgcataggcacatatgatgcctcctctgaaaagtcttgactcaggacaatggtttaacatatgacaaactagctcaccctagggaagaagtaccctttaccctaaaagaagatgctgggcatttttccagttcaatgacacaccatcctataatagatcacaagtaaatgttgtccattagaaaggcattgtggctactggcattgttataataataactctattttccaaaagtttctatttttttcccagggagattttagcattaatgaatgaatgtgggtccatcttggaggttattgtcaatgataacagcttctgttgtgctgctctgaacctcacatgtt

SEQ ID NO: 26264 - DNA, 1206 bp, Mus musculus
aggtcactttggagtcagttttctgttgctcattaaagagaggaattctctctctttaatagaattagcctcaggcagggatgagttcccctttgaatattcaatgcaaagtgttcatccccaaaaccatatacacacaaccaatagaagtggactcagcatgttttattcatatattagtgcatacttaaaaggaagaaattggaagggatgaattttgggaagggatggagaaaagacagagaagggggaaagtgatgtgatttattttatatagaatgtataaaaataaaatttaaataaaagaagcggctagagacataggacagcatttaagaacactgggagttgttacagaggatacaggttccattcccagaaaccacctggtagctaaatctcctgttactccagttactcctaaggaatctgatgccccttctggcctcggcaggtactgcatacagacatatgcaggcaaaacacccaaatacatagcataaaaatgaagcttaaatggatttctctaaagtgatgtcttagtcctgagacagacagaaatcagggctagtaaatgaactcctttgggtcctgcatgaaggcagctgtggctttcctttgagccagcttacccagaggcaaaaccaactttattctgaggttagactagctcagtacagccattgacctaagaactgcaaccacagtgctgttagatcaaaggtgagaatgagtaaaagtgatctacacttttccttgatgttttctgtatttgagttctctgtcctttatatgtgtgagaattgtgtcattgatacatcttttaaaactacctttttgatcgtacattattatttagacgatagatttcctctgtaaagcaatatctacctcagtgggtagacttgcagtgtcctgtccctattaaagtccaaagtataccctgagacctgaacctaaaagagacttaaggatgacagtatatgtggaatgcaaaaatctgttttcagctagctcctcttttagcattagacagagctgaatgtatgctatctgccaaggaccagccccagctaggtcctggtttctaaaggggtatcttggagcttcgaaaacaaataattcataagtcagatcatggctccaagctgatggcctatgttctgttcaagatggctccctagacagctctctatagatagctct

SEQ ID NO: 26265 - DNA, 1140 bp, Mus musculus
tttcatcatagccttgaaggaaggatattatagaagggactactgggacaattgatgttggttagctggagctaagaaattagcagtgattaagaagagaccggaatcattgaggtgaaatctgggaagtattttctaagaatacaaagaaactgtgtttcagaaatagctaaggtcatactttgtgttgcagttggacttggtaatgtgtaagaatcacccaggtggtattggttttgaaggcatgaaggggacaagtagagcagctgatgcttggcactctgagaggctgcaaggtctggcatggtcgcagagggaaggtatgacatagtttccatccctggagcagagccagcaggatgtgggtcatcttgagtgctgatggtggccatagtcataaaacttgtttgtataataatgtacatattttatttcatgttcctttttcaggagaatgttctctctgccaaggtcagtgactccatgataattagaaatggcatgattccaggaagcaaaaatgtctctggtgatcctcaccaatatggtgatactgtgaccttcaggaccccttaagactgtgggaaagaactctgaaaacatgagttcaacagatgttcaagaatatataagtcagtgtaagagctgtcctttacaggatttctcaactatgcaaaatataaagatgcaatataaattgtatgaggggcttcacaaacctgaaagaacagagatagccgcactaatgaatgagctctgtcagaaagatactaaagaagaagacaatgatttggtcaatagacaaacaaaaacaaaaacaaaaacaaagcaaaacaaagcaaaaaaccctggatcacaaaagagaaaggaatagttaaaaataaggatcagataatagtggaaaatggttatctcctccacagaagatatcaacaactaaatttgatcccgatattttacttcctaagggaggtagttatatgtgcaatccaaatagaggttggggacaggcaaaagtctggtgtcaagaaaaaagatgatggcttgataatatttctactgttgagcatcacttaataataagccttggagttcctgagataaagaagaaaaaaaatccaaagattaaaaagaatatat

SEQ ID NO: 26266 - DNA, 1203 bp, Mus musculus
gtggaggactgggacttggttacgaggcagaagcagttgttccagctccctgctaaaaagaatgtcgatgccattcttgaggagtatgccaattgcaagaagtcgcagggaaatgttgataataaggagtacgcagttaatgaagttgtaggagggataaaagagtatttcaatgtgatgctgggcactcagctgctgtacaagtttgaaaggcctcagtatgctgagattctgctggctcaccctgatgcgccaatgtcgcagatctatggggcgccacacctactgagattattcgtgagaattggggcaatgttggcctatacaccccttgatgagaaaagcctggcattattgctgggctatctgcatgatttccttaagtatctggcaaagaattctgcctctgtttactgccagtgattacaaagtggcttctgctaactatcatcgcaaagccctgtgaaggtctactgaccactcactattgtctggtatctgtaaacacttctgtttagtcctttcatggtataattgatgttctttaaaactgtcagtgtaaaacagggcttatgtttcagtttgttttcctgttctgttgtagacagaaaataaaaggagtgcccagctcctttcctcatttcaaaattgctaccagtgtatgcagtaattaaacaaagaagaaattcagtagaccattttattgcctagttgacaacattgcttgaatgctggtggttctatctctttgacactacacagttttctaatatgttaatgctacgtgatgagatgccctggttcctagtgccaaaggttcaacttaatgtatatacctggaaacccatgcatttgtgctttttttttttaaatggtggttgacatcggtaaacagcccattctctgcaagtccatctttgttgttccttaggtattcattctatctttgctcaaattgttgaaggatggtgatttgtttcctggtttttgtatttgagtctaatgcacgttctaacatgatagaggcaatgcattattgtgtagccacagttttctgaaaagttgatattttaggaattgtatttcagatcttaaataaaacttgtttctaaatttcaaagcaaaaaagaaaaatgtgtgtattagtcagggttctctagagtcacagaacttacggatagtctctagatagtaaaggaattt

SEQ ID NO: 26267 - DNA, 1177 bp, Mus musculus
ggaacaagcaccatgttgctcagggaggctgagactgcttctgtcttagaagaaggctctatgaagttcttggggtagccagttggccagctgccagggaaaagttgggtgtcatggctccttttccaagcggctgtgcctgtatttggtcatgctgtagggtcaacctgtttctggagcagatcaatgcttgggagggctgtgccagctgggttctgaaggggctctggctagcaatcagactgctgtggcttacttagctcagggactgtctggttcaggagtggagatttctcccctgccggcccggtggccgaggcgaagcgcagttaccttctggacctctgatcatgtcgctacaagtgtcgaggagcttgcaggttgtggcctacagcctgcgcaccaccgccgtggccttctgctcatggtggccctgggcgcggagcgccgcctctgtctgctcactgcgcaccggatctgctttgctgttggtgcgtaaattcacagagaaacatgaatggataacacagaggaaggtattggaatggtgggaatcagcaattttgcacaggaagcgttgggagatgttgtttactgtagtctgtctgaagttgggacaaaattgaaaaaacaagaggagtgtacttgccaaaaacccagggcttgtcaacaaatcctgttatgaagatggttggctgatcaagatgacactgagtgacccttcagagctggatgaattgatgagtgaagaagcatatgaaaaatatgtgaagtccattgaggaatgaccatggcacccctccactccagatcaaactggatgtgacctgctccagcatgcttgtcttaaactagtggagaatagaggacttgaaataacttttagcaatactgatggaaagaaactgttcttgacagtgctacttaagagccacccccaacttcctaaaggatgcagataaacacagtgtacaggtttttgataatcgccatactaagtatttagtttaggggttaagccctggtgtttagaattcttaggatcatctgcagtgaaacatggttatgaggctggttttggtgacggaccactttctaatcccagtactcaacaggcagatgttagttcaaggtcggtctacacaacaagttctagaccagccacagctacatggtg

SEQ ID NO: 26268 - DNA, 2088 bp, Mus musculus
cccggaagggaaggggagaccctttgtctctccagcagagccacacacctctgcaggagcaccagcaaaaagatcccagagctcccgacagcactgcctgcacgcagctcctgtaccttgaggacatggacccgagcggcagtgagtgtgcagccacggtctgcacccccgaggacagtgcactgcgatgcttgttggaagggtcaggtcggaggagtggcgggcagctgcccagcctgcaggaagagacaaccaaacgaacttcagacgttcccctggagccattagccagtcccaaccagagaagatccgccaatgatgaagatgaagatgacgatgacgatgacgatgaccaaggagaagataagaaaagcccctggcagaaacgagaggaaaggcccttgatggccttcaacatcaaatgagccatcgataagcccctaaaatgcggattataaaattgccaaatatcctttctcatggaagtgcatacctgcgtgtggagaagctgaggagtgaaaaccatgcaagtagatgcttactgccttgacatgggaattacggttatgacagaacgaaaggtgactgacaggtgctgcccctccgagaaggtggctgcgagacatgtcattctacggacctgacttgtcacagtagagatgctgacaaaccacatgtgggattgctatgctccaaggatcacctcagttctctctcagattctggaaacagatgaaatgctctttgcattgtctgaaccctctctaattctatcatgataacgctactgtgacgctctcactgggaagctgggtggcgagaactttctggacgtcgatgttatctcaaaggaaagctatgcattgctgcttctttgttaccttgcttatgctttgctttaattaggcctctctctctccctctctctctctctctttctctctctctctctctctctctctctttctctctccacacacacacatagggtgttgggttttttctctttctttaaagtatgattcagtttcagttgtaaacgttttgcttccttcagttctacttctctgtggttggtttcggtgtcgcccttcaggaactcagaacccgggtgtcagctcttaacatctctaagccttttaataaaactgtactgaagtttttatcagctaagagtcagttcttcaattctggtcccattatctccaagtgccttttttacagtgacaacagacagtccctcggtttcatgtcttttcgtaaccctttcaattgaactgcctggattttatataaagttactaaacgataccttgttcttggaactgcatgctgccaagtgccattcgtactgagcatcctcatttcaacgcagtatacgctctagttatcatgtgtaacgtgggtctgtttagctgagatagactagaggaggacactagagatgcccattcctactccctccctttggtcactagccaccattatggttccactggctgtttgtatatagggttatgtattaactctagaatcccgtgtgcccttcttgctcaccgaacgtgagagtatgggctgagcagggggattgaatgtgactgttaaaaacactcatgtactgtccaaaagtgccagaatgactcttctgcgcattctcctttaagagctgcttggttgtccaaaaatgaaaactcaaaataaacttggaagaaggaaaaaaatatgtgtttattctgattcattctttgttgggaaattgtcaataagacgttgctgttctttgactttggcattgaagggagacttcaatgttggggggttatggatgcataaataccaggaattaatagtaggattaaaaaacccacctttgtctttagtctcactcaagaatgaatggtaacatcctcgtgatgttttaggtaaggagagatagctgaattttatgagaaaccactgggggttttttggtttggtttttgtttcttatgctggaaatcagtttgtcttgcaacagtttcaagaagagtttgttaaatagacagaactatcccagatatataaccttgtttatcagatttattaatg

SEQ ID NO: 26269 - DNA, 1105 bp, Mus musculus
aaaatagttttattacttttactggttatatgagtgaatcatgcagaataaaattgaaagataaaatagagagcaaaattccttggctattctatttctttatatcctagcttaattaaccgtgtaactgattcacattttagtatgtgcccaatcaacataaagatgatcagacttcagattaggttcattggcaactgtgtgtttttccaccatggccattggctagcaagtagacattactcacatagagctagctgctggactcccgaatgtggatagagtgtgattgaggaactaaaatttcaatttaattgtatttaaattctttaaaaaaccctttcacagatggtgactatcatattagacaactcagatatatgtgcctttgaattttctgtttttatgtacttaggtagccagacttttgctactttgtgggttctttcttccacccttctccacctgtttagcagcctaacactaggtaggagagaaagagatcactgaatcttaagtttttttctttttgtttctttttaaccaggactactattaaacagcaaccaaccttcccaaatgaccaacccatctcttgggaccctagcatttatataccctatgaaaagttcccagaatttcaaatgttacagattcacagaagctatctggcaaaatcttgcctctgctagaacacgaggcaaatcatagttgctggacacagtctgaagcagcctcctgtggttaaaatgaatacctttttttaaagaaaccaaaattctcacaacataatatattataaattaaacatttatttttcctttcttttgcagagtatagtgttcccatttttttttccttctaggaattgtctttaaattttgaacatgcatgttttaaacaagtttctctgtcaatgccacatttttcactactatctgctaggcatagcaacccatgcctgcaagctcagcacttgggagatggaggcagaaggatcaggaatgaaagttcatcctcaccatagaaggttggaggccagcctgagctccatgaaaccttgtcttagaaaaacaaaaacaaaattgtaaccactttcccaaac

SEQ ID NO: 26270 - DNA, 2655 bp, Mus musculus
cagtgtgctcactagagagtacacagctgactgatgagaccttgcggctgctgtgcaatctcattcctcagcaatgtgaaggatgtgtgagggaaaggaagtcacagctctaaggtcagattaaatgcccagaggagtggagtcagcacacagatggtctgaatgtttttattatgcaaaattgcacatgttcctttatgctgactttaatttatcatgaaaattgtcatgctaatggaaaatgtcttacttgtaaataataagtattcataattttgttactgatgttgtttttacctagaatttgaaaaccaagtttcacagtgtacatatatgtgtatatgctgccactaatccaagggaaaataaaatactaaacaaggccattgtatagactgggcctttaagtcagatgccacaaagtagatacttcctgcctttactacagtgcctccgctccagtccagacaacatggcatttccttccctactagaaaggagtcaccaaatgtgactgtaggctgtctcacctgttggctgttctatacagctcacaaactgagaatggtcttttttttttttttttttttttttttaaatcgttgggggaaatagtccaaagaattgacgttttgtagcatgcaaatcttaggaaatccaaacattttatcagaatacagacatatcttcattatgtcctaactatggttgtctcatgctacaaagggaaatcaagtagttgtgacagactggactgtatgtattgcctgcaaagttaaaatgtttgctctctggcctcttgtggacaggtcctaaataggccacaaattgtgccattcctgatattaccacgagagggggcacctgggccccacaagtggtgcagaagtgggaccagtgctggacacaggacagatttctcattatacatgtccaactgtcacatttctaacagaacaccttcaggaaatgaaactacctattcattacagcactgtgtggaaagtcaagcagtaggtgagtgagtcagtcaatctggatctacagctctttggcaattattgcactcatttttatgtcttatacaaattgaattttcaggttagaattttgtcatgggcttatttattatttacctcatgaggaaactgttaaaaccattcctttagagatttgtttattgcacattgcagttgttatagaactttaaatacactaatagttaacggtgatgtcttcataagttaagcacatgagcagttggtattttagagaattagtagccagagcaactgcttggatataaaataactgttaaaaccaaatgtaaaagcaacaatctcaagttacactgccctatgctctctgtatccatattgtgctgtaaggtttcttcccttcagaaacaggaaatttgtcagcaagtggaacaaagtggtacagtccataagttcatccaaaacttgggatgaaaaagttttgctatcccactcacctcctaaattccacaatgacttccagacagagtggattagtaaagtcctgacagctccactcccagccagaaagacccatcactgtcttgtctgtcctcgtgccacatgtcagctaagtactgctgtaataagttctggcttaggttttgtttttagagttgttagctttgatttttgtttgtttttggtgctggggatcaagccagggatagtatgtgctggtaagcacatattctgccatagagctctgcccctaatgtactcttgatagatgttatatattacaaggaaactgatgatgcgcagggagagaattcttatgaaacaaccttatcaggcttttgttctgtatcaattaagcctttctcccaagcctgccttgatgcttacctacaaagaaagccaaattaccacaaagtaaaaatgacatgccgctctgaaggcagtgtactgcttaacatttagtgtctctctctctctccgttgcaactgaggactttcttcagttgcttcacccaccttgctagaccatgtctgtggcccattttccaagttcggtagagaaatgttaagtgctgtaggaaactgatgttcttgcaagcaagcattgtaccagcctttaaagcagtgaatttatatgcgcatggacattagtcttaataaactttggttttgttaatcattgttttgagtgttttctgtacttcatctgccccacccaaagagaaaagcacctccatgcaggatcctaagaatatatgtaagttttgattttatttctttcagtgctcatttagacattagacatagtgacaagtcatacaaaactacttggaaatggactttttacttttgggtggttttcttatcttactagggttgggaatgagcttttttattttaaggggttgtaatgttgcagctgaagcttgtccaccttcagcaagcttcctcttactaagttttgtaaggtcatcaaatgacgtgtccaaaatctcgttgtcctggctttccgagggttcagtctctaaactgtctgtgggaccttgggttctgtctggaagccatggcacgtttaagctgggcaccctgggaatgatggcttctacttcatcagcaaagtccctggtgttctttctgaaacccaaggctagcacac

SEQ ID NO: 26271 - DNA, 1111 bp, Mus musculus
ttcaggagctcagcatttcctttatcttcctaactcttggcctggtttgagagaagctacagtattactcaaaatcaccttcatggggctgctgttcacaacagtacatgcagaatatcgccttcatggggctgctgttcacagtacatagtattcagtgtgcatatttgaggccttgtagtatgtctgctacccaaagatttccgaatttgtcaagaaaaaagtataattttaaatggcatttcttttgttttgagaatcttaaaagcaacacgggtatcccgtcccatccccccgtcccaccccctaacaaccccttggccaagctcaccttgaattattctcaggtttaaagattaaaaaaagacagacaaaaccaaaacccagtgtttgactgtctagatatttggtcttatttactgttaaggttaaaaggaaacttaggagggcaagaaggaaaatactgtttaataaatatgtggctttgttttgtccttactaatagaaatttaatgtgcccttaagattttgtggggagtgggtaggcctttggacagagtatctgtagccaggttagccttgaatttactgtgtagctgagtattatcgtgaactcctcagctctgcccccctacggcccagcgctgggattgcagacacgtgccaccatgccagcctggagatttttacctttaaacacaaacagacttcactctgagtgccacacatgtaatggtcattgcttcccttcactattccattactctttcctgcctctcaacattcccccattacatccctctcagactgtcacctcatgttagctatttatacagggtatgtgtatgtgtgtgcacattgttgtgataaaagtgatcaattcagctggagcctgattcctcacgtcacacgtcccaagtatgtagtgtcttcagcaacatgtccttggaaataatcatgacaggaacttgagcagaggctggaaccatgtaggaaagctaacgctgcttcttggcttactctcagccagactcatgctcagctaggtttcttagatagcccaggcccctctgcctaggaatggtactgcccacagtgagctagaccccgc

SEQ ID NO: 26272 - DNA, 1099 bp, Mus musculus
aactaaagtaaagttttggttttttttttaaaggtaaagatttgtgtgtgcgcatgtgaatgcaggtgccatggaggccagaagctggagtttgaggctagggaggtggctagcttgaatgttgggagtgaactctggccctccaaaagaccacagctaccctttacctgcccagccatcttccagcccctgttctcaaatatatgtttctcttcctgtatttccaggttctggagaagcatcttcagactccattgaccacagccctgccaaaaaaagggtcagaacccaatgtaaatgtggagccgagacttgcagaggttacctcaactgaagtgtcaggaaacggagctcatgaagaaaaagctcattagaagaaaaacaaaacaaaaactaacaattgaaaaagtatttgggactcctttctattacctacatattgtattatatgatgttaatatacagttcatggctcaagtcattgccaagtatattactgtttattctgaaaaggactgcggggcacataaacggtagatatttggtggttaaatggaaagtgaactatgtataaatcactgtttgcttacttgagaagtcggaatagacaattattccctttagtgtttgaaaagtgaggctaccacagttactatgaaaccttttatcttgactcaaacagataatccaatttaggcaaatgtataaattttatttttttactatattatttctgtttaatactcactgatcagagacaaataagtgctgaattttttactatattttctacttttacataaaaacattggcatcttaatgatatatttcaggtgtaaaaatgtgaaagacttacttctagcttgatcttattttgaagcaatagataccattacaaaggttgtatatctgaacctgaaattcttaaaagattttttttagttgcacagaagaaaagcccctaatcaccttctctagaagtctatagtggctggccattgtgcttctttgaacacacagaacagtgactaggagggcccattggagtgccaggcagagtgagccactcagcgagtgggaggtccgcactgagtatctc

SEQ ID NO: 26273 - DNA, 1106 bp, Mus musculus
tattggctaaccgttctgatgaaaggcggcatccttatgttgattggctgcgacttgggaggccggcgcagcagaccggacgcagtaggcgggcgggaacgtgaagtctccgcagtgcctgatgggcttgttccgaggaagctagctgaagctgctgaagggtccttcgttgagctgccgtggtctccgccgccttatggcggcgatcggcgtgcacctgggctgcacatcagcctgtgtggctgtctacaaggtgagcctgggaagctgtctccgggttccgtggcggccaccctgttttctgggctccgggtcatcggcccgggaaccgtgcgtgcaagcaagtggcaatgttgcgggttctcggctctccctccaaggccaagcacgctgtgtggagggtggatacagagagccggatcttggatactccagggtatcctggacgtcttggctgtttgaggagttttagggacgaaaaggcctcaagcatgcagggtgcacttaggagaccgggccataggatgcccagaagagttcaaaagacgtcagggctccaggatgcctggagtcctcggggcgggggacatcgttcttgtaaagacgcctagaacaaacctggatgtcaggaccccctggatgctagagaagtcctagtgacaactgaccgcagagtccctaagaggtcacggtgacgtcactggttcggggttcccggaggtgggaggtatttgaatttctgagcaaccagagcactgtgtaactgccctcgagagaagggttcctagttaagaactgactcttgctgtacacacttgattctagaactgagaacttaacaaggaactatagctttttcctcctcaatatcgatggagaaggaacaatgttaaggaatttaaccgatgctatcttcggttttaagtctcattcgatttatcaggaaagtcccaggggagtagctacttcgtttgtagggaagcaggtggaaaagctgtatttgtgggagagtcgtgtaatcatgcttgctaggtatagaatgttgtatacatttgatccagcttactgcacagatctaaacgggaaaatgcatgggctagaagaag

SEQ ID NO: 26274 - DNA, 1281 bp, Mus musculus
aagtttagtgggacacagagccttccttgttaagagaattgtttggaatccctccttgggttatctgttagattgttttgattgcatcaaaatgtatttcatctgttacatccagtatttgtatttcattctgagaacccagatttccccccaccaccaccacattataaattaagaaaggaggctattactgtttatgtttaattatacctattactttggttgacattgaagttcagaaacaggataagacatttgaacatgtcagcacccatcatgaactaactgtaattcccttaggttcttggcatgacagtatgccagatattgccttttcacttctaagaaggtatatacagcttgtcgattcctttctcgccttgataaccatagcctttctgttccattttagtttgtcatttcttgctcaactattcctttcagttgaagcaatttctcagttctttttcggatgaaaccagagtgtgtaactcaacttctgtgtcccatatagagagaccagctcttttgagttctcctgagagcagtgtagaggagtgtatattaggactggtgatgaggcctttagagattgtatggaatgcaaatagagatctgtttctaagagactttaggggaaggcttgatactttttacattttgaatattttagacttgagctttgaacatctccggcggatggtcacaagtttctttcccttttgtttcctgtgaagatgaccatcttggcgctcttggcatgatgctgttggtaggatgatcctgactactgtgttgcatctctcaggaaaagctgaggtgctgggcaaggctgctcagttccctcttgctagctagcatgctgttcaaagagacatctaagttacaaataatatgaaagttctcatgcaaaatatattttgtactacaggcatgagattttttttggctttttttttcttttttgtatttagtacttctccatagagatgatttaaccagtaatttctacactgaagacttctgtttcctttcatgatgcatagaatagcagatgtagcgctttggaatccttgcttagcacactagatgctagttttctctgggaccacttcagtctggtagtttacaggcccacattcccttccagtctgcataagaagtaagtgggtgataattcactgctagataagaagcctgagagctgagtacagcagagcggattcttggtcctatcagcaagtgctatctaaataaaatatgagacgctgaagataaggt

SEQ ID NO: 26275 - DNA, 1159 bp, Mus musculus
taagatgttattgctaagcaagttctctaccactgagctttgtttttagccctttgtgtcatttaggagtcaattctttagccttacagacaggtgaggaccaagcccctccgtttggacatcagatgactattttctagctccgtgacctgggtaggtgtcttaggacacggttttgctttctctaattagagaacagaaaaggaacttcctgacccagattagtagtcagtgaagtgacatgatgtttatgaaatttctttaggaaatagttttactttaagaaaattgtgttttattaacatcacgattaagctaacccattcccttgtctaatgctgcatggagtttaaactttctgagaagccccacattaaatcagagatggcgaaacactcggtaggaattacattgtgacatggttcatttctgagatgtcatgtggcccatctttggtgggcaccatggactgtgcgagtgagtgtcagcaggtctgggatgggaagcttcagatatttctggacagccagtgtgggctggcatcctggcaaggcttggcattctactgtatggggccatgccaaccattcctttctctgaagagctcccagcatagttcaggcctcccaagtgatgtttatcaaacccagagaaacaagtactgtctagtggtttgagtcagcgtgagcagtagccaagacagctcacgggtctcctccctgacatcagcttactcttcttcagagtcagtatgcaaatcactttgaaagcctcccctctctccctctgctctctctgcatttcttcctttcccttcccttcttcttcctcttcttcctttggctccccagacatgtacaagaagggaacattctactgtcaaaggcagagtggagggaagctggctctgtagacactaattataattgatcacgtatatctgctgatgttaaagatcagagatgctgtcaaaaggatcccgtgacctttgcatcctggaaccaaagagtgtcttatagactttaggggaaagtctttgaaagctcacattgttcagaggaactgatggatgcttttcctctgacctcagagcggtgcgctctgcggttaatgtgcagacatctttcctccttaatcttttatttttttaatcattctt

SEQ ID NO: 26276 - DNA, 1194 bp, Mus musculus
ggacagacctcgcctgtgtgtcgcttagtcagagaactcacgtacgcccttaggtaggaagactttttacacacgtctaccagttggcaggcagagcagagttgcaacaactcagctcccaaagggcccagacccctccagcagtatctgtgacctcgatacaccacctccgtccacagataccaagaggataaaaggcaaaaaacataaaagcacgcgtgcaagctgcttgtttacatgtgttttgagctatgcttaacacacaaccaaaaagccatcaatctccaaaggcctcagaaccacttctatactaactaaccagtgcacagtcttagtggggcatggcactaacgatggcacaagagtctctgtggaggtagtgtggcttgcaggggttaccttgtcatgacttcctgtggggaagacatctaggaccaggagccagggtgggaagaaagcaaatctaaaagttggctgtggcatcaaaagaaaaaaacttcctcatgtatttaaatccaagaataacaatagacattaccagactgggaaggtaagaaatgaacagcagaaaggactgaccctcactttgcagtggcttggaaacctctggaagtcaagtgggagcattcatcccatgtggcctgaggccttttctctcccattcaaggctgggtaccccagagctgggcatggttggcgtgatgagcccagcttccagaagcagtactcttcccagacacttgagggataaccctgtagggtgagtggggacgggatatgatggtacaaaatgaccctggggctccgtggagacggggctacctttcttgctcctagtatgatagtcggagctacataaagcaggtttatttggggactatttcttccttccttagctaatggaaatgtgacacattgtgccccattttctttcttccaaaaggagatgcctgaataatttgcctgaacagaaaacgtccaaaaggaaacaaagaacaagacaaggttacatggttacaggttataacagagacagcagtttgaaaattgattctgaagtccttcggatctatgagagatgcagaaagaatctaaatgtaatagatttggggagcagagggaaacggaatgggagctgtgaacaccatcacgatagtctggcagtaaggacagagatttaagtaaaacaggttt

SEQ ID NO: 26277 - DNA, 1149 bp, Mus musculus
gttgaatcagtgttcccttgcactccagctgaagccttttcctaagatgaaagcaggtgtaccttgggacttacttgacaaagaagaaactctcataagatgtgcagcaaatccctactgtgacatgtggtttggtcataaaagtcttctttataaatactatcagaaatgcccaaatcactcattcttcatccactgttaggccacacagcatggtaagtcattttatgttgtcttctcttgttaatattccacataaaggggctggagaaatggctcagcgggtaagagcactgactcttcttcctgaggtcctgagttcaatacccagcaatcacatggtggctcataaccatctgtaatggaatctgatgccctcttctggtgtgtctgaagacagctacaatgtactcatatacataaaaaaataaataaaatctttttttaaaaattccacataaagaagaaactatatcatatgacatcagtacttcctaaaattgatctgtgtgggctggggttttgttttgttatttgtttgtttgtctgtttgttttttgagcttgctttgtctgcaggggaattcgtattctccaggactgggactgtggccattctgaagctgggtggagagaagcatgttcacgaatgtggctctcagtcaagtttttcataaccgaaattaaaaagctatgtacaaattaaagaagctacatagaaactcctgggatatgtaggaagatgacctttctttcattaaatggaaattttacttttgcctatactatatatttttgtttcaagattgtttttaaaacaacaaagatttcttttaaacaagttacaactctattgactgtgtccgtttctctcctccccatccttccatcacaagaactgggattctctgtattcacatttagtaaaaaaccctttccttagaaatcaatacaggtgctgcttgattcattgcgggattcatcctgacatagagtacatctgaatatgtatgtatgcatgtatgcatgtatgtatgtatgtatgtatgtatgtatgtatggtgaacatagagtacatcagaaatgcatcaaatgcccctaatgattggcttgacttaggctgctttaagtgctaggaacccatccatta

SEQ ID NO: 26278 - DNA, 1508 bp, Mus musculus
cctagggactgaagaggttaatgacaatttgccagaagcactttcctacagatccgtcaaaatgtgtggagtataatgcactatgagatctgcacacagtgtgtgtgtcaggaagcctccgctcgctcgatccctcgcagcatgaggactccggccttaccacagctacgagggaagagctccaccgtggggtcttcctggtgcagttcttgttgactttaagaactgtgttggctttcacatggaactggactgcaaactaatttttgtgtcttgatttcattttaatgagttgaaaaattaagttgtaaagatattatccgtagtttaagtgtgtagacaaccaccactcaggaaagggggttggaaatgaccattgtcaagatcccagtgtgtcgttgatacttaggaacatttgaaggtggctttgaactttctgtaaattattgtgatttgcacatttttctatgtggtatttatagaaaatattttttatatttcagcaaaagtatgggtcattgaatgctcctttagagttttctgtggtcttggaccttctgccatcttgtaatagagtgtgtggaatgttgctgttaagtgttatttgtcttgtgtttcagacttgcttttctttctaagcagagtatggttgtcatctttctggacagatgaattgataggagatagaaggtcgaaagatggctgttataccagcctaagttcagaacaccagcatatcaaggacagggtgaggaagtggccgtggatccagctgagagtggcagcctcgggactggatgccggagagttgtggcgttcctggcttccctgtgcctcacttggtcctcactcgcctcacaacatgacttgctctagggcttacagaatggagctttggtcaccgtgaccactctgtgctgcaatgctgagaggtctggactagttcactgatgtgtgcagatgggttgggtgtggtgtcagagaaggaagagggagtgggccaaaccaggactgacagcttctcaaggacatgctcgatctaactacagctttgggcatgtgggtccatctcgctgagctttggcttctttgtctgacattgatgctaagagtccatacctcacatcgatattgtgtaagatgctgagtctgctgcctggcagatgataagagatcattattattgcttattacagtgtagacccagggcctttacggggccctgtggctaccctgggatagtatgtactcatgtaacaacaacaacaacaactgagttagcagcaatagtaagtgaaggagtcattattaggtttctctaccccccgccccccatctttactttcagtcaggtccaagtttaggagtgcagagaacaggacctgggggctgctgtaggtggctcagattcacagttgcttatgctggcccctcctgagaaagccactttgggctccttaaggtccaaggcatgcatagataggatagcttctgccagttgtttgcag

SEQ ID NO: 26279 - DNA, 2386 bp, Mus musculus
ttgctggaggcccaggaagccgccccctctcccggccatacagagtaactcttctctttctttgccaggaggcctgctaatctgtctaccccgtgagcaagcagctcggttctgtgcagagatcaagtcccccaaatacggcgaagggcaccaagcatggattattgggatagtggagaagggcaaccgcacagccaggatcatcgacaagcctcggattattgaagtcgcacctcaagtagccacacaaaacgtgaaccccacacctggtgccacctcctaatccagacagagctatttgattttgtttttaaatagatctatttcctttatcatcacttcaattaaagactctaagaacaacaaaatctcattgtgtctacacatctggtgaccctaggtcggtttatgagtggatgcaattaataaaatgaaatccatggccgccttttcctgttacattaactgaagatgcacccgacctccaggcagcttctgagttgagagtgatcctgttatccaatcctgttgattcattttgaatctttagctgtgtgtctcttgccgcataggcgctctctaaaggtgcttttctgccactcgggcattgctgagaggagtgccactagccttctgtgtcttctcatttctgcctctcatctcagtctgatctgttgtcaagtgtctcagttgacattctagaaagacagaatggtaagtgacatgatggtctccccgtagtcagagggttgcatggctccttcgagtgtttgatttgtaaagttgagtcgaataactcgagggacttcttatccagtagctctctcagttcagtatggcaggtgctttgcttggcatggaatgcacttggaatacaaaaaaggaatgttcttttagaacaaacaaagctttcctgagacttgcagtaataccattaatggtttttactaatagggaaaaggatactttttgcagtgttctttagatgttctatagtgcgacgaggaactgccttccgatgcgggggttcatgtataatactcatttataattcaatatataatttacttcgcaaataatttttaaatataatcaatactaaggactgttgtgtggatggtagtgttgaatacattttatattttgtattgtgattccaggcctcttgtttaaaatcagcagctctttagcccaagtcttagcacatcttgtcttggcacatcttgtctttgtgcacgaattctgtgatttgtgttaaaaacctgcattgtcaacattgcagctccaacataaaagttgttattcaaataaatatttaatttttttaattgctcttgtataatcagatgccctttttagtattattttagaagcatttgggaggattttgcctaaaatacaatttattgggggagactagattttagttttataaacttttaagtctttcatgggacctatattttcttgaattaaattttgtagttctagaacaaataggcaatctacaaaggtgttatctgtgtttcttaaaaccaggcttccttatcttccttatctgttaagcagctgggggattcccgtctttaagcacaagggcactgggtcctcaaacgcctgacttcaaaagagaaaaagcaccaagtcttcaggtttcacagggcttcctactaacaggacaggccccaaagctgagctctgcaaactcacccaacctcactcctcaacacggaacaccagaaaaccgccactggaccagcggaactgcggaaggaagaggctgccacgtgcttgtgtccccagaatctcctgtaaatgcacctcttactggaactgaagccaccagagtctggccccagcagaggaagctgtcacagaaggacactaattggacactatataggaatctataagatgttggtccttgaaagtatgcaccagtggtctgcaaaataaaacatgttggaaccctctgagtgcagaaactatactgttggacttgcttctattttgttttgttttgttttttaaatagtaggtgaaattggagctaactctgtatgttctgttccccaaagccactacttttcttggaggcaagcctgttgggaggaagttagatggttaatgttctgagcaaattaaagattcatataaggagaaaatgccaggggcttaagagatccatggattcgtgatctaggaaaagccttgtcttgactagtgttttcagggtgctcggtaaccgatgcattagaatcccctgggtgtttgtggaggaggcctttctgcactttcctgagacccagagtcagttctggctgtggaaccaggtagtccatctctccaatgtaccctgtagggctctgcataacaacccttgaga

SEQ ID NO: 26280 - DNA, 1180 bp, Mus musculus
gatctgcagtccactttctctgggggacggattccgaagaagttccgcaaaggcaccagcctgaaggagcggctgtgccaagatggtttctactatggtggtgtttcttccgaatccttcgcagcgtccaggtgaggcatctctcctgactgctcttgggaaaggattttgcttccctcttaagagcaagcgggtggtggactgttccgcaactgtcctagggtgcttaagtgagcttctgtcttcttagatgaagcctgagtgatcaaggacatcttttatttctagggagagaggagcacattgggaatgagtagacagtgagtcatgtgagcccctgctttacatttagccagatgtgaagtcttgtacccgcaatcccagctctggggagaccgagacagaacacgagtccatgaccaacctaagctgtctagggagagcgtgccccaaatggagaaggcagtctggagaggtagctcggcagttcagagtgcacactgttcgtcagaggacctgagcttgtgtccgtacccatggcaggcggctcaaccgctgtaacgctagcttcaggaggtcgatgctctctgttgtcctctctgggtcagtgtacacaaacgtactctcatatacacataaagagtaaatgaataaaacctttttaagtgaaagaacaaccaagaggtgaaggcagcagaatcaggagtccatgccagccgtggcaacattccagaccagcatggcgcgtatgagttcctgtatcaaagcaaaaaagggttgattttcttgagtggctgttattattctctgttgttttggtggtgttatcgttattattatagaaggagtttgcagacctcttagaaaccacttctagcatcatgaacacgtgtgatgtggctcacgtggggcatggtgatgcaggacagatgatcatgaccctctactgggattctagactgtctaaggaaccccaggtggtgtgtgaccatgtcatcttgttcctcaagcaaatttgtaggatctccatcagtgatttaatgtataaaccagaactcctgggctaccaagctgtggccggcaaagcctgcatgcatggggcttgaggatcttggcccgttggtaacaggttcattgggaatcctcatattgtttgggaagacaatgaggctcaagcact

SEQ ID NO: 26281 - DNA, 1165 bp, Mus musculus
ttgttttcctgacccagggtcttactatgcagctaggctgagtcatctctccctctgtctccctctgcctcctgagcgctggagttacaggcttacgccaccatgccccactgagctcatggctggctcaggtgtcaaaaggttgattgctagggataaaaaggtttcttaaggaacctctctgaagtatataacagttactatgggattgttttgtgaatctcaaggtctgggtgggggataacagaagtatctccagtgtttgtgtccagtacagcatgttattctatctgattcttaatatacttttcttttgtagatgaattaaagaagttgcaagagcaaatgaaatccttacaggagcagctaaaagctgcatcaattaaacagcctccagggacagcacccttgcaggaaccacctggtaatgtgactgtaattgtagcagtaatttgcatttttgttaccaagaaacaatagcgttagtattttcacccagctcctgccaaaactgtagcattcctaatttctttcattttcaatcgggaagattcatctctgcagccactgcttaaggagaagagaattcggagaattcaggagtcagcgtgcttttctgcagagcttgatgtccccactttacccaaagccaagcgggttgctcggaagccaaagactcctgcaggtgtgctacagggcctgcctgggtctcactgctcagctctgttgaaaataatacatcattctactggggcgcgcgcgcgtgtgtgtgtgtgtgtgtgtgtgtgtgtggtttgtgacagagttgcaggcaaatgagcttgtgtgtatacagacacttatatacttacaaaaggttggggtccctgggggctggagtcacaagcatttgggaactacccagcaattgccacacacaggtctactagacagcactgcagagacctggatgagtcacaaagtggccttgttctctggcgaagtttgattacatgaggccttagacatccagcatttagaggaacctacattctaggccagcctgagctacagagtgagacccagtctcaaaataacaacaaaaaagtatcctatatgttgattatgaaaagaatgtggtaagtaggttttatggctctcagtcattctccacctcttatgctaa

SEQ ID NO: 26282 - DNA, 1237 bp, Mus musculus
tctaggtaaatcttcccttagtgggcatcttgttgtgtgtgtaattctgtggaagttccatgtggctctttctgactgaacactgtggtatctgttgacaccaggacaggtgagagatagggacaagctcaggattggagtccttccctcagctgttcggtgtgacattaccctcaggctccgtactggagctgtacaggatagtacagtacatagtttaatttttaaaagaacagctattttctttgcagatgaagtagcagcttacagatgtctgagacactgagagcctaacagtgggtagcaggacaggagggaaggtgtgggaagagtgagagtgctggccgatggcacagcgtctcaggagggataatctgtacagaatagtgactgtaatcatttgtatattaaggccatatcaccagtttagtaaacaccttgcaaaccctctgtgtgttatctgatttatttaatctgccatctgctctaaggccttgttgcatgttacaagtcataggagttttgtacgtattattttctttctttctatacagggttgcgctgtatagccctggctgtcctggaactcattttgtggaccaggctggcttcaaactcacagatacctgcctctcttctaggtgctggaactaaaggcatgtgccagcaaacctggtttatttgtgttacattcctgcctttacagtcgtcactccctttttttttttttttttttttttttttttttggtttttcgagacagggtttctctgtgtagccctggctgtcctggaactcactttgtagaccaggatggcctcgaactcagaaatccgcctacctctgcctcccgagtgctaggatcaaaggcgtgcgccaccacgcccagcgtcactcacattttaatagcatggttagctgcatgtgttaatcagacttttgctgctgtgacaaaatatctgaccaaaaatggaaaaggaagaaaagtttcttctggcttggggtgtcaaaggttttggtccttcccgttgggaaggctgtggttgaactgggcagcttacaccatgggaggccagtgttcagtcagaaagagccacatggaacttccacagaattacacacacaacaagatgcccactaagggaagatttacctagaaaaacactgcagccatctggctgactgctcacagtgactcatgagcagaacataaaaacactggctggcttatgtggaa

SEQ ID NO: 26283 - DNA, 1176 bp, Mus musculus
acaaaaataaaaagacagtttgggagctgagtcaactacttgactaagactaaaaagccgaaagtttgttccatgctggtcaggtgagagaggtgccctgggagcagaagcagttttcagcattagtggagaaagttattgatcaaagatctatgtagagttgggatgcatttcaaatctgttttgtaaagaacgtcatgacagtttgaacatttgtaaggaggaggctggtcacatcgtggtgggcaggaggaagagacaaggccagggccagggctctgagccccagcacacttgccatgccctacttccaccttccaaaggtcccacagccttcccctgccgcacccgaggatcagcacaggagcctctggaaaggtgtccttcctgacagacagggcctagctgcagagccagggactctcaatcctgcgggacccctggggcccgacgctgtacctgctgcatctccacctggcttccctacctcgtccatagcccagcacagcagtactttagagtcctggagggctctccatcaactgaatcaggaaattgctgtctgcgtctgcgagagacggcttgtccttccaagaatactccccagctcctctcatcactccctctttggtttatagcctcaccggtgtcttactctcctgcatatttaagtcttagtagaccatgccttgtcctgtccctagaagtgtaactgtgtttcccagaactgttgcggccgccagatgggatttaaggaacaaacactagttctagtttctctgtgttcatagtgatgatttccactagtgacccaaaagtacgtatttgtaccccactcaaggctgatttctaagtctgacagatgctcacatccgtggctaagtccaaagtgctcttgggatggagctggctgacggcacttgtcacttctcatcctcccaggagccgaggacaggagctggcagcacgggcagcagcctcgcagtattccgattcactcctgccccaagtgcggggaggtcctgccggacatcgacacgcttcagatccatgtgatggactgcatcatttgagtgttctctccagtccccaaagctcttggtaaatgccagatttctcctccaacacttgtacttctgtcttctttattgtcacatatatcacaaatatttttga

SEQ ID NO: 26284 - DNA, 1215 bp, Mus musculus
cagtgtgtagtgtagagcaacatttgttgctgccatagaaagaagcactagctggcgtgactggctaagggaagttgatatttcagaaggccacaagagttggaaaatgtctttctgacactgtcatggagaagactgcaaatgaatgcccaaggccatcatctaaatggcttcctgtaactagattcacattctatctactgtgatgctgaatttttggagtgaactcctggaaaaccaataaaaacataaaacaacccctcctttccattcaggtggaagccttctctccactgcagagctgagcatccttcttttccaagaatctgtgatttcagcgtttccttcccctagcagagttgcttgctcttgacataagatggagtttcactattctatcaaagaagtaggcatgagtttcatcatttctggactatatttgaccatgcagccacccaatgaggtgagtcttctgtggaacccattttgggaaacactttgcagtaggtttatagtaacaaagacacagctctattgtccatgtaactaccatagataggaagaaccagcctactctgacgagaactcactcccagcagcccagcctcccctgctcttagcattcaaaccctagccatctaaatttgttcccatcctccttatcctaaggcactcggcactccaccccaagactctatcttccacatgatgatcctgaatggtctgatttctgttgttgtgataaacaccgtgcccaaaagcaacataatggaggaaagggtttatttcagcccacacttccagactgtagtctatcattgaggcaaatcaaggcaggattccagcagaaaccatggaggaatactgctaattggctcacttatgctcagctagctttcttacacagaccaagccctagtgaagcctagggatgctgcctcccacagtgggctggaccctcacacgtcaattgtcaatctagacaacaattcacacacatggccagaagccatgttcctcaatggaaggtttcttcagaagagcatatgttaagtcaagttgcttactgaagctaactacacaacgaagtcttatgaaatccagcatttcttccctcaaatgctcttttctcatttccaacacgctctgcttctacaggatttgacatgaggatgtacaaaataacttaaccaagtaagaccaaggcaggatcag

SEQ ID NO: 26285 - DNA, 1156 bp, Mus musculus
cgtgtaccccatagaagtatttgcataacaaacactttcttttaataagagtgctttcactatccttcccatggccatgtttgatcatgtcccatttgtgttactaagaagtcaatggagtggctgctggttcatcgcctctaatggtggccctccagatctaatgccgtgccacactgttccaccaatagaaagaatccttcagctctacaccattgaccacctagaacccattccagacacatgatactgataaaagtggtcattactgtcacactgccgcctttctgcttgcaggaagtccaggcctctgtgagaagtccctcctgtcacatgagtattggtaggggtggggataagtttgtgcccttggctggtcagggcatgatgggaaggaacttctattctgggaccaatcttcatccactctcccccactcagcctctttaagcagtgctattcataatatgctacagaggtgtgccttctcattaattctccctgggagcattaagttaaagcgcttttgttacctcccaagggaatgaatggcaagcttaggggtgatggagtcaggactcggagaactgtggaagccgaagatgtcttatgttctgcttttccaataaacatgagcagtgcttccaatggctgtggaaaaaaagaaaaaagtgagtgtgtctttggatcggggcggcttgagggtttccagcttgagcctggaaaagtcatttggagcctttggggagatggctggagtgacccgggaacactgaggagactcttcaaggctggtctcctgcccttccctgatggatgtggcccgagtctccctccccgtgagttcacatctctcaggacacctgtgctcctgctctgctgcccccaagggacaagcggtatcattaatcaatgtcttctgacgtgcaccgaagtcttgctaaaggagacttccctgggtcccatgatcttctgccttgtcatctcgccacagctcttgccacctgtcaaccataccagtgaaatgtttaatgtgccataaaaggcggactccaagcatcactcggaacatgacacactctcgccagtctgtcctagcaccttctgtggagtgcaggctattgctttatttcccttcaaggcaccagagacaaaa

SEQ ID NO: 26286 - DNA, 1995 bp, Mus musculus
ctcagagtctggagacgtaagcggagaagtgcaggaccagtgtaatgaatgaacataccagtgtgcttggcagcaccgtgtggccatacaggcccccctctcagactgggttgctaacaccagtctctccccacacctccattatattgccttttcacatttgctaggcaagtgggcatgcatatccttacttggttatgaaatattgaaatacttccaggagagtctctccctctgcttcctgcctgtcctccccccaaggtcctgccctttacctatacttgaggcagaaagagcagctaatactcatccaagaccaaccgtgagtggacgctctcactacgtctccacagagccaacagcttctcattctaaagcaagggatccctagagtttggagcttcatgttggggttaggaagtgacagaggcagtgggaggctagaggggcagggaatgccacagaatccctgagggcatggagactagagtgactgagataacaatcccagtgttgtaggtagcctttgtaacaagccccagcaaggttttaccccttcccactgcctctaacccaaaagaggctctgacgccaaaagatcagctgacattcatatttctgtgtgaaagaaaaggactatggagaaggtatttcgacaaaccagaaggtatggattcctgccctccaccttgattctgggtcacttctcaacactaccttgagtctccagccgtaccactttgattgtgacagatatcaatgaagattcctccttttaaaaaaaaaaaatagccacctccacttgcacaccaactggtagtctagagacactacctctctttaggtatccctaagtgtggtatctggaaacacaggagttggctcagtgaatcccagactctatttacctatttatgctttttgtttctatacttcagtactggatagcttgtcgatggcagagagaattggcctttacaccacaggccaagtacaacatggacacaggagatgaaaccaattggtcctctcaagagttttgacccccctcctataggatgcaaaacttgatatggtcagagttcctgggtttgatgatttttagcatgtttaaacatgtctaaagaacaggaccctgcctcaaaaaacaaaaaaacaaaacaaaataaaaaagagcaggaaaagcccacccagtggaaatgactatggattttagagctttaggctactcagaactgtgaccaaagctgacttttcacactgaggagaccaaacaggtgccaacactccaggctgcaggcaggaagcttaggggcagaacctctctgccttgaagggtttgtgaaaatgctgtgctgggtttttctgggccatgaggaatgaaagtgaagataggtgaaggacagccccttccatgtcttataaccagaaatcactttccccagggttgcataaccacttacttccagcaagtgagatgtggggccccccttgcatgtcctccaaaaccagtgcccatcccttctcacactctgacaacttccctttcccttaaccacattccagaccaaacactgttcagtttgtttccaaaattaaaaaccaatgtatatatctgtatgtactccactgctctgtagggggtttcctggtcctagggtggggctgcaggcagaaaaggtattccaatcctttggttttcagaattgaacgttttgaagtgatttgcttggttggttggggtttttttaattttgtttttcaagctaagctgggaaagtagattttgaaaggcaaacttccttcctggaaactccacaaacatttctgtgcggaagagttagtttgaaatcttcaactctgggaggtaggcaagtctaaaagacaaggaagaagaggaaaagccacatcccatctaccaggtcccttcttggtggtctcaatgcatgaacgtctgtctgcagctctggtgtgtgcacaggaacctagccccac

SEQ ID NO: 26287 - DNA, 1217 bp, Mus musculus
tcagctagcatgagttgtgtttggctggtctagagtggtctccaggcctctttgataattttctcgacttcctcaagatggtgtccatggaagattcaaaaagttgaccacagatgggttaagatgctcagagtggttgtcctccctacttctccaagtcctggtcttcagtctagctgtgcagaaccttcaggactgtgtttccctttgccctctccgccccgaatctttccctgatccctgcttacccattctcaactctcaagtcattgaggacatttaccagtgtgttctagccaggagcacatgccttcagtctctgcacatggctttactgtgtgagccttccctacgttctcccacctgctcttttctcagggtagaggagtagtgtggggggaatgcatgtgctcaaacagatgcttacagaattgagatgcatattcatgagcctcattgaccctctaatctaaaccaggattatatatgtgcaaccctgttttgttcactaatgggcactggtaataagtacaaaaggtttgtttgctttcgaaagagctttgttttatttaattattgtgaaagtcaatcatatctatgataggatgactagaactcatattccttaacaccccccactgcccccttcattcaataaagcttgctaaatttctgccaaaggtcagtcaagacagaaagacttgtagtggttcctggtaccagcaggacttagagtccaaaggatgctcatccttggttgaagccgctgctgctttttagagacacactgagcctggggtagccttatgtggcctagctgctttgcagataaatgggggggggggggggtgttgtagtttcagtcatttctgtacaatactttttattctttctttgatatttgcctacatgtatgcaatctattctgattatatttacatctggatgcactctcagcccatccccctcccaccttcacatcctcttccatttctgaaggaaataaaccaccgattccaactagtgctacccatatgtgcatcgctctggggccaaccaggggagcctgggcaacctgcctatggccatgctgctatagaaagagtatgccccttctcccagtagccattaacccctgacaggacagctcttcagctgtcattgccgctttgggagccccccccccacttctgtgctggaatttgactgacttggtt

SEQ ID NO: 26288 - DNA, 1199 bp, Mus musculus
ttcttttaatatgcagaggttcaatagacacaaagaatgtgatccagcagttggctgagcaatagacaggcaacctttgggttgtctttgctcttttccaagctatgttaaggctttctttgtttatgtaaatgcatatgcactggaagatgttctgtagagatccacactagctgagaagcttcagagcaaatgcaagcacgtacagtccagcctaattaagataatggggaatggggctgaagtgcatcctttaggtgtaacataaaatcgaggttatcacttttttctttagattctgagtctctaagcacatgtgaattgtgttattgttctccatcagttttggaacaccctaacccaggatgggccaccatatgctcccggccagctggcagtcctccacatgggagctgctgcttttacagactctgaaccaggtcctgtcccaagactcattccagagcctattcctgttcagtttttagctactgaaagaatgcaaattttctatcatactataggaagtatgataaaacaataatcatgtgtctatgatagcctgtctttattgtcaacctgacctgattgagagtcacgtaagagatgacatagatcatgtcagggcatacctgtgaggatggttccagacattagctgagggggaaaggtcctctcaggacacaggtggtcctgttaggctgggggttagagctaaatgaagtaaaaagagaaaaggaagaaaacccgatgagatgtaaacattcccatttctgcttccttgtctgctgaggtgtgagcaagttactccacagccatcctggcaccatggaactacctgctaccataccttcctctccattatgggctgtttcctttcaaactgagagccaaaataaatctttcctcccttaaataacttcgtgtcaggcatttggtcacaccaatgagaaatgtagttaatacttctgccaaataaaatcctcctaattggaactaattgcagaagggctgatgtgtaattgtcaaagagctaattatgaaaattttccagtctcatatttaatacgttcaacaccatctgttgtcacaaagctcatgctgaatgagtttatccaggtcagttgtcatctggggctaataagaacttcattaacctagcatcctaggcaacatgccatgctggcttgatagccttc

SEQ ID NO: 26289 - DNA, 1176 bp, Mus musculus
atagcttatgaatacatatccattttatatgaccgtttatggttccaggctagaagcttggccatctctgcatgcttagcctggaactttttgaagtgggtgaggatgtttgtgactaagcagttcatttactattgcatttgtgtcggtttttactgaacttagagggtaaaacatgatgctaaattcattataacatttattcacttatcagtcagatgatcagcatacaaagtagtagcttttcttttttctttctttttttgtttttttttttttgtttgttttttttttttttttgttttttttttgtttttttcgagacagggtttctctgtgtagccctggctgtcctggaactcactctatagacctcgaactcagaaatccgcctgtctctgcctcccaagtgctgggattaaaggcttgtgccaccacgcccagcaagtagtagcttttcttatagcggtttcaaatgtacttagttttgattggtcactcacatttgctctgcccagccttctccttgtccctcccatcttccttccatcttcctgtcatgtgtgtctgattatgctatcctttaaagcccatttttgtcctctccgtgggccggccttttgctagccttttggcctttatccacacgtattcccacataaatgcacttcatatataccattattttttttaatcctggcttaaaggtaaaatatatatatatatatatatatatatatatcaaaggaaggcatattcattatataaaatgaaaatctagactgtagaagaaagtttataataaaatttgagacaaatagaaactgagtacaccttattcaaatacttggtactgggagtatctcagatttagaattattcttgattgggaaacattttcatatgcatgtaaaataccgtagggatctaagttctgagtgtctaggttctgagacaaaaattattttatgtttcatttacttatacagtttagcccgaaagtaattttatagtactggtgttgcgttttgagacaggtctcatgtagcccaggctggcctcaagctcactgcatagtcaaggatgacctgggactgatcttctgcccctgcctccggaaggatgggacttcaggcatgtgccaccatgcccagcgtctctgttttgatggcagct

SEQ ID NO: 26290 - DNA, 1147 bp, Mus musculus
ctccagccctgcaatagaaacaaggcctcctgaccttgtttctattgcctatcttctccccccaccacactctgtgtgtgtgtgtgtgtgtgtgtgtgtgtgtatgtgtatgtgtgtgcaagagctatttctatactagacatgcttggtaatgtccttgagtgtcagctggctggaataggtggacatacccacagagtaggaaagagagaacacctgggattgctctttttaatcatcagacatagatgagggaatgaatattatgtaggcatgttctagccagtagtgcacagatgtagtacagacagaaatccaggcccatttttaaattataatccggcccatatgtgtgttttcatgtgtgttgggatgggatgcacaggtgtatgtggccatgtatgcatgcatgtgctccctccctcctccctctctctagagagagagaaagagagagactgggtctcactggagaaggctggccagtgaactttgggaaccttctgtctccacctccttaatgctgggactacaagcatgtaccaacatgcatttagaatatagatcctgggagttaaatgttcggtccttactctttcgaagaaagttctttattggctgagccatctcccagtgtctgtgttctggatgcagaaggtcaagtgaaggtcaagtgaaggtcaagtgaaggtcaggtcaagtgaagcacacactcgctctgcctggcactgttggagattcagcttctgaaaccccgattcctagagtaaggttgttttataccagggattgcaggtggttttagaaactcattagaagatcttctccctctatctatctactgctttttgttgttctctcttttgtcttcttttacctccaaagttcttgaaatcatttctacatctacagctcatcttcctcagtataaactcacccacaaatccccctacatcctggcttcttctcaaatatagtactgaaactgtatcctaaaaatgcaattacaaaattgaattagttttgagtcaccaaacattgtggtcttttcatagtgtagggtctccttagctcttctaaaacatcagagcctgttgatcaacacttaaccaacttacttcttaaaactcccaggccccttattgtg

SEQ ID NO: 26291 - DNA, 1134 bp, Mus musculus
catgtatgtatacacgtatgcacatatatatacatgtatctaatgtctatacatgtatgtatgtgtgtatgagtgaatgtgctattggggtggaaccccagactttgtatatgctagaatgctttaccaatgagccataatccttgcctggccctttatctttctatcttgtgaccaaccagaggacttcctaaagcttctctctatttggatggccaggtgtgatggcacacatctgtaacctagaaatttgggaggcaagagccagaggaccactgaaagtttgagggtcattattgtctacatagcaagttctagcttaggcagggctacccagtaagactctgccccagccttcagcaccacacagaaatgtgtcagagcatttggtagaatcctgagacattggtgaggccacagctaccctagctcagggagtcctggggaaggcatcgttttgggcttttgagctgggagtgtattagtcatgtgggtgtttgcagaatggacaatgttatgcacacgcgtgggctttcctgctttcaggattacagctctagctgatcatgccatgtggtgttggcaggcgcccacagtgagcttattgtgaaaaattagtttcctggatttcttcagaaaaaacttcctaattgacctggagttctgagtactcgaaaagctgaggcaggaggatcacaagttcaaaagatgcctgtgctgtcttaagtggaaagagggaggggttagagctcagtggaagacaccattgcccagcaatgtggaacaccttgggttccatccctggtcaccattaacaacaaagcttgcattatcctaatatagaatgagaatgggaaatgctcccacgatgggagtggttcagcttcacaccttgtcttctggattcacaccaaacatcaaatgaaatggtggactgtgctggcacagatgagattggaaacaacactttctgcagacacacttgtcaccgtatattcctcaagggactgggatttccccaacttattatgctggagcaatggtatggatttcaaagtgcttcctgactggtcaacctcttggcagtgtgcaggtttcattactgttagtcctctcactaattagttatgcttg

SEQ ID NO: 26292 - DNA, 1174 bp, Mus musculus
ccaaaaataaaagaggaacgagttatacctggatagtccagcagataccagagactgctagcccagaggtcattggcttgattggatcccaagcatcccacaggatctccattgagcatgaggttcttaccctcctcagcaggtgtgggccaccgtgatgcgagaggtgtgttgctggggtaccagacccgaggacctggatagaaccattctctctctcacttgagctctgagccagttgggaagtagggctgaggagccaggcagatggagaacagaacagcagctttattcctggtctgtgatgtgtggtgatgaagagcttcctcgtcttgaatcaggatcagactgtgacttctgttgccacaccctcaatcctgtgtagaggagagacatggtctgtgggtctgtggcacggtccctcaagctggagttccagaaggaataaataaagaagagtcagcattagttcattccctccctccctccttccatacccccttcctttctctccctttcatttcatgcttctcattagtccttacatgagatgctctgttctgacatctcctccctaccactgatggattgaaaccttggaaaccatgagccgagatcgatcttttataagctgtttatattttcacagtgatgaaaagctcacttacttaggaagcaagggttatgacatctaaaagctttatttagaagtattctggacttctttgagaggtacatgttctgaactttctctggctcaatggccatcatccactgaatcctaggggccaggacaatgtacatgctggggtcttgagggagcaatcgtctgggatgcttctcctcaacaaagtggccaggtataaggtcgaggaaaaccagtccaggatagttgagaagctggtgtgagagaggatgtgaccagggtgcatagagccagtgatgtttgctgatccatactttctttcagttattttacgagaacaaagatggagttgcacagtgacctttcttcagcttaatggagcaaatgatcgatttcatgtatttgatcatgaaaatgattataataaagtatatgtagcagacaatggaccactctaacaatttcaaatgtacagttcagtgacattaagggcattcacattgtgtgtagctaccacctcctaagccc

SEQ ID NO: 26293 - DNA, 1209 bp, Mus musculus
tgagatggggctatgcatctcctccagggtgtgtcctgtacaccccactcctcattggcttggttttgtagtgtccttggagggaccttccagggactctgtggaggacccttggttctgctactgttgcatgctcagaactttatctttgacctgggcttgccctggagccagagctggaaggtgtgttcatctcactctgtaggggagtgagctgggtctggacactgactggggatgtgcttgccaaatcccctctgttgaggaaacaaatgtgcgtagtagccattttatggctcaggaagacattttgttactgttgtgttatttctatcctggcaaatgaagcagatcatttccttgtgtatctctgtgcacatgtgtgcacatgtctgtacatgtgtgtgcatgcacacaggtagctgtgctcatgaacataggctgtggaagcacagccttggctgctggccattgctgcttcccatatttgtatttcgagacagaattctgaatttattttttaattttaattttttaaaattttattttgtattttgagttcattggcttggaaactcatctactagaacggactggctggctagcgccatctacccagcagtgtgcacctccagggctggtggttttgtgtgggttctgggaattgaattcaggtcttgttgtgtctaagacaagaactgtactgacagagtcttcttccaggcaaagaaagtaatttgtagcattggagatgtaagtgaagaaaataataataaaaaaactaaaataaataaaaaaaagaaagtaatttgtaacacatctagagaacagaaatttccagctaccgtgcacaccaactatggcaacagcagcagagacaaaaccctaagtacagtcttccctgaggattccggcaagcaaaatgttgcaggcattggaactgggcacatgcaccattgactatagcttaggtgtccgtcaacaaaggattctgggaaattcaatcatatatccagaaaggcagaggagtctggacagtttccttaattggctaaacatgtacaggactaccatggctgtccctgtcttttgcgtggcctggtgttgagctggccacttaccacaaatgagtataacagatcagttttgagaattaatttgactgggcggtggtggcatatggctttaatctcagcactcaggaggcag

SEQ ID NO: 26294 - DNA, 1134 bp, Mus musculus
ctgaaacaatcagactacacaagaaatgcagaaatggtttctagtatatgctaggcctaaagttcacccaggagttgttccagtgttctggctctgctctggtctgatgagctctgctactgtgattacctcagctgattacatcagctcaagaaaggtcagttcagccaccagcagcagtcggcatgatgcttgttggccagctcaacacgtttgcaacctaggtccagggtagatcctgggaaccttataaaagcgcttttcccaggtacagtaggtatagacgctaagtgttattgccgacacacatttttatgcacaaaaatgtaagctctttatacaaatctttatactggacttcttaaggatggaaataattctggaactttgtagtccaagtctgcattcctaatgagtgtgaaaattaacacccagtatagcacagtagccttccctgtgactctgacccttccaatgttttcttttgtgtttataatcatggccctgtctccccaaatataccaacttttgcctgtaagttccctaggacatctatttcactgtgtcgtttccttccctcttttgaaatgaagacacaggctccacacattcgtcctttccatagagcaggtataggaccaggtgcaataaaaaaaaatggccttgagtatcggccgagatacaaggtgtaccccatcttccctggcccctgggtctctttcctgtgggagtgtaactgagaagtgacagctacatcttagacgtgtcagtagcacatttcattaccagggtctgtacctcagaggtagagccagatctggagctggccatctggtgtcttcactcctcacaactttttttcgttcatttggaaaactcagaaagtgggttctaaaatacagggtgttctccagtgtctgaccttagctcaagctaagttagccctacctcctgttcctactgaaaactgtacttttgaaaataagtaaaataaagtatgtacaaagaactgggtggtgtcaaatgaagagtaaaatgtttcccaaggaccctagctcctgccattgagtaatttagaactaaaatatgaccatacttgaccctctcaagcatatgcagatctgctctgtagaa

SEQ ID NO: 26295 - DNA, 1228 bp, Mus musculus
accagctgccttaaaactgaagtttacattatttgttgacactgtccatctagtgttagccatgacgctgggaagcagtgtatctgcctcgctgttggtcagacagcaagacagtgatgtggattagcttcgcacacaacattcagaacactgaatattcccttgtttaaaaataagtgcagtgcagattgccactttccagtattttgagcttccctaatgagttatggagcatttatatctaatgtatattttagataatttttatacttttttaactcatcagccccacccctacttgattcatcctatccccaaactgccactcagcctggatgggcaaaaatcaagcattgaagttatttctgtcactggacacaattgcttccaattcccttttctgcttttcatttgtcctcttttcctggtgacagctacgagtgctgtccagctgtattggccatgccttctactccaatgcccccaagtatttcctctctcccctcgtccccaaagcaagacccagttctcaagcagtgtctgtagttgagtggaagtgagcaatgagtattcatgcaaggacttcatgtctgtgatatgcatagcaggacccaagtgtaaacagtagacaataaactttatttaagaaaactgttgcagttgtgatgaaaaataaagagattcctattaagtgttctctaagagtatttctgtaggttcactgtatttctacagagcagatctgcatatgcttgagagggtcaagtatggtcatattttagttctaaattactcaatggcaggagctagggtccttgggaaacattttactcttcatttgacaccacccagttctttgtacatactttattttacttattttcaaaagtacagttttcagtaggaacaggaggtagggctaacttagcttgagctaaggtcagacactggagaacaccctgtattttagaacccactttctgagttttccaaatgaacgaaaaaaagttgtgaggagtgaagacaccagatggccagctccagatctggctctacctctgaggtacagaccctggtaatgaaatgtgctactgacacgtctaagatgtagctgtcacttctcagttacactcccacaggaaagagacccaggggccagggaagatggggtacaccttgtatctcggccgatactcaaggccatttttttttattgcacctggtccta

SEQ ID NO: 26296 - DNA, 1515 bp, Mus musculus
aattcaggtggtagattattcctcctaatctgttctgttattatttcttcttcacttgaacaaggtaatagggaatatgtgatgtgtaccttcttaatggaacagagcagagctctgatgtactcaaatgtcacttgatttcttctttgctccaatgacagctccgtcttgtaagccgaccccctttgccagcacctgcggtaggaattggcacagtgcaccagcagcagcacgaagacattctctccaagaccttcactcagtaaagtgctaagcaacagaagaaagtgcgctcctccattccctcccctccccctagcttagcgtggaagtctgcgttcccctgaagttctggactgatttgaacaactgaatctggagtacatggactacacaggggaactgattttataagtacatgaaacagacagtaggtttcacgctttgcaggacaatagtgtttgttatgctttcgttcgatgtgagtgaactggaagagggggtcattaggcagtcgggttcagattccactgtaactgcctgtaaatgagcagagaacggtctttgaccagaacgtggggctgtgtataggcagccccaacactacctcttaattggttcaatacacataactttccatatctttcctcccttttaaggtcagcaatattttcgttttaaatgtcatcttagaaccgctctacaaaaggttccaacagataccactaaaactagaccattctggattcatgttctttcaggtttgatccattatccttaaaagtaaatgctgttaaatactaactgctgattgtatggtcgtctaacgctgtacccatgcagtctcctgtagtccaggctggcctcacaatcactgtataactaaggatcaccttgaacttctcatcttcttacctctacctcccgagggctggaactgcagacttgtgcgaccatgcccagttaacgctggtaatgagcatccatcaagaatggtcgaccagccgggcggtggcacagcctttaatcccagcactcgggaggcagaggcaggcggatttctgagttcgaggccagcctggtctacagagtaagttccaggatagccagggctatatagaggaaccctgtcttgaaaaaccaaaaacaacaacaacaaaaaaagaatggtagacaagctctctaccaaatgagctccagccttggcccctaataaatgttaagttatgaggtattaactgtattaaggtggacttcggttttttttttctattaatttcccctttccccattatattgctatgacatttccttttttgtttgtttgtttttgatttttttcgagacagggtttctctatgtagtcctggctggctgtcctggaactcactctgtagaccaggctggccttgaactcagagatccccctgcctctgcctcccgagtgctgggattaaagacgtgcgctaccactgcccagctgctatgatattttctgatttttaaattaacttt

SEQ ID NO: 26297 - DNA, 1235 bp, Mus musculus
tatttgtaaaagatttcagtttagttcccagtacccatgatggggggctctagggcacttactgggatgtctggaggaaacccctaccagcagccacatttcaggggaaagtttctttggctgaagggtctatctagtctcttatggattctgtgggtgcctgcactcatgtgcgcatacccacacacaggtgcatacacatatatataggtaattaacaataaaaatatgtaaaaaatgttgactgtcatttgattctgaggaactccaatgctgagtgacccagcagttagaggtctgtgtttgtctttaaataatgcgtgtttgcaataactataaaagaatttacatcatgcttatatttctttaagctcactttagacccctgaaataagacttgtttcatatcttgtatttttgccctaatagctgatgttccgtaaaatgcgaggcttaagcgagtttccagagaatgttgccaccattggtgatgtcctgtcccacctgacctcctcagtggacctagacttcggtgcccatcaacccctccatgtgacaatgctgcccaacccctcacatctggaagctgttaaccccgtggctgtagggaaaactcgtggcaggcagcagtctcgggaagatggggactactccccgaatggttctgctcagcctggggacaaagtcatatgcctgcaggtacgtggagtttttttggggggagggggggacctgaaagaacaatggattggtagatatgacaggctactgtagctgtttaagaggaaagtggaatgacattttgagaaaagagaattctgggctttaaaaaaatatgtttgggggctggtgagatggctcagtgggtaagagcacccgactgctcttccgaaggtccagagttcaaatcccagcaaccacatggtggctcacaaccatctgtaacgagatctgattccctcttctggagtgtctgaagacagctacaatgtacttacatataataaataaataaatctttaaaaaaaaatatgtttggtaaaaattttcatgatacatttattatttgcattaggtttttggttttggttttggttttggttttttttttttttttttttttttttggtttttcaagacagggtttcgctgggcgtggtggtgcacacctttaatcctagcgctcgagaggcagagggaggcggatttctgagttcgagttgaaaaaaaaaaaa

SEQ ID NO: 26298 - DNA, 1194 bp, Mus musculus
tcctgcaaagatcgctcgccactaaagagaggaaagaaggcagtagaccgtgtccctgccgctccccattgcttcagcacagcagacttagcaacacttcactccaggcagaagcaaagtggatggcatcaaagtgcgttgaagcatttgtctgcttgttttgtgaaagctgacaaagtccttgagatgatgcatctcgttttgtttcctgaagagattgctaaactcctgggcagaggttctcactgtaaactggtgaaaccaaaccatcagggctgtggtaaggactcaggcaggacaaaccaataaagcctatttccaccactgtatctggatagcattagaccttggtgagaaaatactgtggagcctctacaaaaactgctgtttgactaagcagcagatagccaagtccgcccttaagcctagaaaagcaaatagagaaggtagctgttcccagatatgtgatactctttacagctccttctgggtcaagggtccttagcagagctgtactatcccgtgatgcctctctccatggatatgtagtgaagggacacagctgggaccactggaatgaataatctggggccttcttacaccacatgggccatatctgcctttcgcctgagcacttgactgtcttccggcagctcatatgtctgttccataggagtttgaccactttttggccaccaagtttgccacggtgaagagatacggcggtgaaggggcagagagcatgatgggcttttttcatgagttgctgaaattgtcagcctatggcggtataaccgacatcattatcgggatgccccatagagggaggttgaatttgttgacaggccttctgcagttacctccggaggtaaggttcctctctatgtgtgctttgtttgtttgttttaatgtccatggctactatttttacctttaattgttgttacacagtcccctccacgtaaccccaaactcctatattcctagatgcataaatgcagcccactcagtgacatctaatgttaccactcggtcctggagaaacaaccggaggctcttccctggggaagatctttctcccactctgggcactccccagctgcccacgactcttagtctgcggctgaggcctctggagcctctggagccttcccctttccataatggcatgttagttgatgtaggcgttcaggt

SEQ ID NO: 26299 - DNA, 1192 bp, Mus musculus
gaaaactgggcatggtgctataagcttgtaatcccagcacttgagagagaaaaagcctggaggagcagaagttaggatcatccgcagatgcttagactgtccaggcctgagatactaaactcccgtctcaaaacctttttttaaaacattgtgtcacatcttaaactctgagaactggacttcattgtctaatattaccttaaatgtttaatataatagtttaagttggttacttaaacattgaaagatgaaagtatattctaaaatctaatcattaaataattaattagtggtcagctatatgttgtaactattacaaaagatacaatataatagttaacacattgatttcatttttgtatgtgtatagagcttaaaatgtacagggaagatggatggataattcttagcttcatcaccaagaagaaaagaaagccgggcgtgggggcgcacgcctttaatcccagcactcggaaggcaggggcaggcagatttctgagttcgaggccagcctggtctacaaagtgagttccaggacagccagggctatatagaggaaccctgtctcaaaaacccaaaccaaaccaaaaaaaaaaaaaaaaaaaaaaaaaaaacaggaagaagagaaaagcctttgaagtagagaacaagtggaatttgaagatttagtctggggcaactaactagagaaggctctatgaaacaagagttgtgtagttggaatgccaaggattctatacaaggatgagcaggaagcaagtctagggagacagcagtctgtgtacagagactggaaagaacgtggcctcaagccgtagcacagcacaatccctatcttgaaatcctgcctatatatgaaggatactgtgttgttgtatattgtaagctgcaggaggaggccgtatttgctactttatctctagcacttaccacaatgcctgacatcagaagttgataaaattatatgacatgtttaatgcccttttttatgcagtttgtgtttgttttcagattcaatcttaattcctcttgtaaagtcctggtgtgtatagagtgattctatagagtgacctgctaaatactctgtcttcttcacccctgggattggagttttttctaccatatgagatatatatatatatatatatattgggaatggtgacttaccttgtaagccttagtacagtagctg

SEQ ID NO: 26300 - DNA, 1123 bp, Mus musculus
gtctgaccatatcaaaagtgtgggggtgaagattagctgaagaaaaggtgtaggagccatacctctactggagagcatatagaatcttcaagaagcactaactctgcatggtggctgctgatgactgacactttcctgccagtgcggtaaagttcctaatgccatcccgtttgtccctttaggagacgttgatccagcagcacgtgtcatttcattaggtcctgtatctgatgttgtggatagtggagtcctccagcaattgaatgagagcagcggacacatctcagcatgtcggtctagagagttgcgaatctaaacctgggacaggctggggccatgaggcagaaacaccagcctctgccaacaccggaacaagccgacgcttccagacaaggcagaaaggccttttgtaatggaaatcacgtgagggttaatcttctcttgagaatggcagtcaagaaatgagaaggtgcacttgactactgagcagttacaccaagaagagcgtccacgaggtgactgagccggagaagaaacagttgagatgggaatggtatgggggaaatgaacttgagttttaaacttgatttaagttacagtgtctctgaatcgaacatcccatgttggaagaagatacacttgggggctccaggactacagtagaaaagtatagagcaagcagtaaaatcttctagtaaaaacatacatgcaggacaacaaaatgatgaaagagatccaaatgccagataagccaccaggaaaggtgttgttaaggagtttgtttcaagaggagcaagggatgagggagaaaaacctgtgttaaccatcagagtcagtgatgtaaagttgcctattagagtgaaagaaactgtgaagactgttaatatgcaaagcattaatgcagatggtttagaaggtctgataccagcctaagaacggggatatagttgagcccattgtaagtatcattgaaaacaaacggtgccagtgagcatgtcacagaagaacgaaggacagcaagaagcggatcagagtattttgttgaccttcatgggtttacagcctctgtgtctaaacaagatatggaaacaagtagagcttttactttgcttttgttttcgtt

SEQ ID NO: 26301 - DNA, 1152 bp, Mus musculus
ctgtatcaacaagtgaattgaaaaaaaaaaaaaaaaagaaatgttgaagtgctgtggtagactgtcatttaaaaacggctcagtatattaattttacactagctatgttactagggatggcaaatctgcgtttcagcacagtgggagtgcagggttcttgcacccatgctccctgggaactactgggctgttcactttgttggctttctggcaggttaatttatcagtgtatatggagtaagataagacaaggtgaagtgaaaatcacaaaagaaaaaaattgaataggtgaggaggatagtttcgaaatctgtcttacctaggccgtttattcctaaaattcattcttggtttgccttgagtttttaaaaatgacatctcatttttctttccttccttccttcctttttttttttttgtttcagtttgggattatagattttactactctcaagtgtttacctaaattttggtgtatcattttattattacagttttgtgtgtgtgtgtgcacttatgcagacggtgtgggcacctgattcaatgtgggcccatgagcatgctggagttgcacctcatgaatcgttccttaggaaccacctgccctgtgtttccatagagtgactctgacctgccttgctgttaggctaggccggctgcctatgagcctcaggtaccctcctgtccccctccctaggttatgcttgggtttagtttacttccaagttgtcctttctttgggggtttgttttcttgaggtcttaattgaaatcaagggatggttcacctagtctttctgacactgtgacactttgcctttagtgttgagggctgcctgcctaagtacagtgcaccctctcaggagcctgcctaagtacagtgcaccctctcaggagcctgcctaagtacagtgcaccctctcaggagcctgtctaagtacagtgcaccctctcaggagcctgcctaagtacagtgcaccctctcaggagcctgtctaagtacagtgcaccctctcaggagcctgccgaagtacagtgcaccctctcaggagcctgccgaagtacagtgcaccctctcaggagcctgccgaagtacagtgcaccctctaggtgcctgtctaagtacagtgcaccctctcaggagcctgcctaa

SEQ ID NO: 26302 - DNA, 1231 bp, Mus musculus
gccctctagtcgaattgaagtccttcccattgacatgggtgccaggggctacggcagttcggggtcaccaaagaatggacagttcatccttcctccggtggactatttgccagagaacagaaaatggtcagaagttagttacacatacagaccggagatgcatggccaatcatggactcgggatgctcaccgtagccacttaagcaatttaccaaactatgcagcctttcagcacataccgtttcaggcccatggccttccagaagtgtctgtagacagtccagtgaggtataagatgtctgcagctgtggaagatgccagtcctcctgggtatccatatgcagggccctcaccttccgcacatcactacagaaatggagagggactttctgtgcaggaatcagtgttgctgtgagcgtgtggctgtattcactgacaagagaatagaaacaatatgcccacattgctatgtttataattgccagagcagtattttttatattgtaaacagcgtgcgcagctcagtgtgtgtcagtgataagagtgtgggaaggcttcatcctctgcagaggctgctgaagaagagtgggtcagctgcatcctggctgaacctttaataggggaccctggggacccagcagtagcacgagggctgcacacacagggcggctctctgtgctggtcccttcgtagctccccagacccgctctgttccgttgctgttagaacagtagactactgaccgctatagagcagatactctgagggccgaccctcgccttttcatagacagacgaggcaactgcatataggttttgtctttaaaaccacctttaatctagatacatagactaacagtggattttttttaaccctttatctttctgcccaccctgcccaaacatattttaacccaggttctaaactgaaactgactagagatgaatccagcgcctgacagaatgtcattctccttcagttgctgccattttatctcctcctgaaagctaaaggctcaccacttgatggtgcctaaagtgggtcggttacccgagtgagcggctgcacagtgctcactgagtcccctcatctccagcagtcttggtgctgctgtgccccgggctctggtctggccgggtgtgagggaagtcagaccttgcagggccccaggccgcagaagattgcatttcacagtcgtggggaagcagctctaaccataaggaaggctgct

SEQ ID NO: 26303 - DNA, 1100 bp, Mus musculus
ttattttgccactataaaattttattttaaatttatttttaaataaaagaaatgataagagaaataatattgacaaagtgattcaaaatctatttatagaaaggcttgctggggacattccaggcagatgagcagccatgccccataacggcgtgcccacagtggccgggccatggcttaggcttccctcatggtcactttgcccattacgtcagaagtaagtgtctgggtgtggtagtataagtttcttaaggaattgtcctgctgacctgtatctaactaatgaacttaagggtctgggtttttttttcttttgtttgtttgttcattttgttcatttgtttgtttattttgtttttaattatcaagtctcaccccagaccacttaaatcctatctttggtaaaacgcaggtatcagagaagcatatttcccttgtgtctcttaatactgtcatcttgaaactctctctaggaaaaatgcccaagttgtcttctgtttctattgtgggatgtttaaaaatggtttgttgttgttgttttggtttctgaagacagtattgctatatatcccagtctgaccttactgtgtgtttgaggctaacctagaaattgaggtggaaaaaaaaaaaggccgggcggtggtggctcacgcctttaatcccagcactcgggaggcagaggcaggtggatttctaagttcgaggccagcctggtctacagagtgagttccaggacagccagggctacacagagaaaccctgtctcaaaaaaaaaaaagaaagaaagaaagaaagagagaaattgaggtgaccctccctcagcctccagaggactgagatatgtgtgtgcacctcccatctcgctcagcacagggtttctgtgggatgagtttgattctcttgttctcactgctgaactggtgtttaaaattcttcgcaggtcagaagtttgggaactcaaaagtgacatcaggaaagttaggaaaaagtccactgtcaacattatcagctctcctcatttcgagctatctgctagtcacagctgaatagctttgaggaaggaggtgtggccccctcacacccagacacccagacactta

SEQ ID NO: 26304 - DNA, 1101 bp, Mus musculus
catttgagaggtacaggcagaagagaagacaatcatggtctgattagttgagtgacaggagttaacagtgatagtggtttgagctttgtgtctgtgactcttgtcttcatggagattccattctgacccacttcctcatgtctaaactgaaggtggggtgtttttttgttgttgttggtttggtttggttttggtgttagctttgttgttgttcggttggtttttgattgttgcatttttcctgtttcttaggattgagttgattggtttgacgtgtttggttcagtgtcacgcactgatacatgttctctgtaattacatgtcaccacaccaggctttagtggccaggagggatttgaccttgttcccaagggattgagagtctagtgagcagcccaggggcaaaggcagtcaacttgcatgtgatacaagacaggccaggcagagctggtgtgacttgaggtggcgccagcctctcaggcatggtggctgggttggtgatatacagtgcagcagagctgccctcagacgtgggactgcagagtctgtttggatttgacacggggagtccttgctgacctcctgtctccctagagcacaaacaggagggggcaagccccttgaaggtttggatgggatgagatggacagttactgtaatgaaggacaaagggaaccagggacggggaggaggcatagtctgtggtgacagacaatgctaaggagggatcgctttgcctgccgggttctcaaggctctctacaggttgcctcttgtactcagaagtattaaacactgattattaaaccttctgcgatgcagccttgacttatttgtgggaaatcgcaatcagagtacaaagcagggagatggagcagattgcacacgagcatcaacttggtagagcagctgttcaaacactgccatcatgagccatacaggaggagcccagaacaaggaaagggtccatgtgcacgagtgggggtggagaggactctgccacatgataaatgtcacgtggcagcaagcaacgacttgagggagttaaggacctctggtactgatgagtggctgcagtcttggcaggtggcagagtccttct

SEQ ID NO: 26305 - DNA, 2498 bp, Mus musculus
gctactgtaagctgcgtcatgttggtgcttctgtggattaagttgtgctctcatcacaagtcttaaggtcttaatgttatttgttgataagacaagcttagaattggtttacttaaaacaaaaaaaaaaaagaatttcaaaaaaaaaagttgtttgcttaaaaaaaaaaagttcatgtgagagaaaaaagaaaaaaaaagaaaaaaaaaaaactattccagactaagttttgtgttggcctgagaagcattggcgtcacttttttttattgtggactattagatgtgtttgtgttcagcaaaatgtgatgttttgttttttcttttaaagaaaaaagtgaaaactatctagtgccaaattccaaaggtacttcctccctagagcttcgcgtgtttcctgtgagaagtgatttgataacatggtattttattatgtgttttgtataaatccctaatatttaaaacaaacaaaaaaaaaaaaaaggttacaaagtttgttaacttgctattccgtggtcttgttgcctgaaattgttattgtttgttatttctctatgctgttttttgtaagacattgtataagtgccgtgtgtcacttttctaacctctccacgtcaatgctgtgacggcagccctcacaatgtattctcttcataatatctggaaacctctaaggtgagaaagtcctgaacttttaaccctttctacccagagctatctggaatgttggtgactttttatactgtcatccttgggtttgttttggggtgtttagatatttttttccatttgtatcttctgagttattttttgttttttgagtcacacaccttcccaaaaaacccttaagtctttttcctaaaccgttttttattttcttttttatcccctccttcctatcaccctgtgctccttcagtttaaatataagagactgagtagaccctgggaagggaaaaacaggtagagcttagccctacacaaaccctaaagaccgtgtctgctttttgataagggtttcatggtatgccctcgtgtacaatatttttatacaccctggagttaaatggctttttggtggtccaatctttcaagaagttttacttttgtttcttaaacacccctatgtaatgctgagtcagcctttggctcgggattctcagacgcatgtggacacctgaatatgcaaggtgtcttcctgaaaagcccacacatttcaagtggttggccatgtaagaggagatcagctgctcttcaccacaattactaccaaatactaggactagttcctgctgttgctctcgaaagtgccatattcctgagtctggcttcatatgagcagatgtcttgttctgacagaccccaatgtcatgcctacagtccaaacacacacccagcctctgggaaaacacaccctgcaagcttctggtctcagctcccttttccttcacaccctccctccatttgatttaatgtgtgtgtgaatgtgatagccctgagatggaaaggattagcctctcacaatgcaaaaaaaaaaaaaaaaaaaaaaagttccctccttccagcacgcgcacttccagtgacatgattggtgttagcccactgtttaccactgccggggccttccttcatccttgagggctattttgtactttctgcagcactcagctcactaacagtgatcacacacattctcagtctctctatggtggtgtgtaggtacacgtgtagaaacacaagagaataccagttgtatttcatagaccatctcgttcacaatctatttagttattaatgatataaatctcaaaaaaaaatcttgacttttttttttccccccatggaagccaactgccctccttcctcttaacccacctgcggcccccgcagaggctcgggtcaggcaggtactttctgttgagctcggtttctgattttgcaggcgaccaagaccgtccattgaggcgagggcttggttttgcatgtttcattgttagaaagttagccttcctcagagacagactgtccttcctctctcagtatcaaaaggaaacgctgcaagggtgcgcagggcctgtttccggaagacaaaacacagggaaactgcatttttaaaaatcaagtgtaaagcatatagacttttaaaactcactcagagaactctgatcagatggcacctccacggtgtgacaagttcatctttccttcaccgcaggggttctagttccttggcttgtgctactctggaatcatttactgtttctgtctttattatcttaagtgctaattaaaagaaaataaaacttaaaaaaatgtagtttcattaccttttgaataatgtcatacaaaaatgtatttgtgtttttgtgctgtgggaattgttgtttgtagattaataataccattttgtttagaactacaaaatagtttttaaatattgtctgagaaaagccaaagttaatgcaacctagtggaaactgtaagaccatttgagtattgt

SEQ ID NO: 26306 - DNA, 1102 bp, Mus musculus
gtatctgtgtgcatacatgcatgcgtgtgcatgttcataatgctggggtttggagccaggcccgaggtatctgtgtgcatacatgcatgcgtgtgcatgttcataatgctggggtttggagccaggcccctcgtgtatactgagcttcctaccatgaactgtgcctataactacctgtaatgttaaacaggagagaaagcagacactgaggactacatattcttgtatttcagtatattcttacctgagtacactcttaatggcagtgtcactccaaaaggatggcattaccatctgcagataaatagacacaacctaggcccacagcaatttttggaagctgggctttggcagtgatctggtaggtatcccaaccctaccactgcctggccatcatgatcctctcgtatcttttggggtctttgcttccttccttacctctgtctccacctcacattcattttgggaagagacagcatcactccgcccatttacttctgtttaaaaccagctttggaggcaggactgtagctcagttgttagagcacttgcctagtgttccaagctctggctctgttccacagcactgcatcaattaggcattgcagcccctgcccttaggcttaacaatcagtaggtagaggcttcaggtcatccttgcttccatagtctatttgaagccagactgggacatgagaccttgtctcaaaacaagcaaacagccagggctgcacagagaaaccttgtctcggaaaaaaaaaccaagcaaacaaagaaaacaatgtttgtttcataccttctgtaagaatactcaccgtgaaagccacccccatagaaaatgctgagcaaacactggtttatgttatttaaaatgtgtagatgactgacagtttggaatgttcttacaaataactagcaatgttgatcacccatggataattaaaagaaaaattttttatgctgaaaaacttatggactttaaaaagaatactcaaactttgacctgactaataaattgtctgatttgagctacaatggctatttatgaatgggctaacctagataggagtgatgctgtcacctgagagtatatttgtgtggc

SEQ ID NO: 26307 - DNA, 1192 bp, Mus musculus
gactccctagatgttgtgttgttagaagcacgagaacccctcagctctataaacccacagaagaccccaccagtgctctctcctgtgcgtgtccaggacagggctgatctggcccctccatcaccacagcctcccatgctggctccatttgcaaagtcacaactaccaattgcaaagccgttagaaacaaagtcgtttacaccaaaaacaaagactaaagctagctctccaggtcagaaaactaagtcacccaaggctgccctatcaccagcaaggcttggaagtcctattcggtcaccaaaaaccatcccaaaagaaaagaagtcacctggacgctccaagagccccaagagtcctaagagccccaagattgtagctcatgttccccaaacccctgtcagacctgaaacaccaaataggaccccttcagccatggtggttgaaaaaactgttaaagagaccatcccagtgatgaaaccaacacagactcccccagaagttgtgaaactgaacattgaaatgcagccgaaaaagcctgtggtgacagacaaaaccatcgatgactccatcgatgctgtgatcgcacgtgcctgtgcagagcgggagccagaccctttcgagttttcttccggatcggaatcggaaggagacacttttacaagtcctaagaggatttcaggctcagagtgcgccactccaaaagcctccacttcctccaataacttcaccaagtccctggccactcctctgcctctctccagcggaacctcaagttcagataactcgtggacaatggatgcctctattgatgaggtggtacggaaggcaaagctgggagccccttccaacatgcctcccaccttcccatatatctcttctccctcaatttctcctcccactcctgagcctctacacaaggggtatgaggagaaagccaagctgccttcgtctgtggatgtaaagaaaaagttgaaaaaagaactgaagactaagttgaaaaagaaagaaaagcagcgagacagagagagggagagagagagaaacaaagaaagaagcaaagagaaagataaaatgagagagagggagaaggagaaggaggctggaaaggaacttaagtacccgtggagggagctgatgaaagacgaagattctgatccctataagtttaaaatcaaagaatttgaagacattg

SEQ ID NO: 26308 - DNA, 1108 bp, Mus musculus
aagagggccttgtctcccttggagctgaagttacaggccttcctaagctgctttataagggggatgagaactgagctgagtcctggaagagcagcaatcactgaaaatctctacagatttctagtaaaatctctaataaaattgttttcattatccttcatatatacttctgtaagttatacacaaaatgagtttacaaatataaagattgcatcgaatccatttgctaaatggtagcaagggctgtgtttcttaacacagtgaagggttaaagtgagaaaacgcatacttgtcagatctaatggcattattccattttaacacctctcttcagagcacagccctaattatggctgacagatacaattgggaatagttagaaaaaatggtagttctggaccagtcatcagcggggcgaacactcaggaagtcccagcaccgtggtgaaggagaaacgctcatctctcatttcctttcatgcacagtgtgttcggattaactttaaaggagcatgagaggtgggtcagaagattgtgtctacaattgagtactacctgtgtgtggagcccagctcagcaggcagccagtcatcagctaacaagccttgccaggccccgtgacaattcccagatatcctgttgcaaattaaatatgaaacagggatagacttagcttcgcaattgaaggatttcttcacattcagcttcaaatgcagttgttggtgcatgcatttttattaaagctggctttgtggagaagggagtgatagcttgactgtctatgtggtgttatagaaaatgctgtgggaaaacgaatgccgtgcagttctgtgcctttccgcgtctacatggtgcatacagtaactctccttgtaaataaacatcacagggtcggcaagcccacgcactaaccatgcagcctgttcgtgaacttgtttgcagtgtagaaatgctaaggttttcaacaaatgtttcatggcaggtgtcttctgaagctttgctttttcaagtttattttcaatgcttttgtagtaacagaaatagaacgtggtgaattagattagacattgagggacagaaggccaggttgtggatctgaagagatgtga

SEQ ID NO: 26309 - DNA, 1230 bp, Mus musculus
ttcttccttcatttattgagacggtagctcacactgtaagctactctagaatgtatcccaagttgacctggaactcacagatgtcctcctgcttcagcctcctgagtgttagggttatagcatgaaccgtcattgctcagcgatatagtccttgtttaggaaattcttcgcattctctcacgaggttagagttcaagtttgctcttctctcatttctaatctttatatgatgagaaattaggaaggcaggaacttggtgtcaatattttgcttatttagtgtgttacttcattctaagttaacagatcatttaatagtcatcagacagcaacgtcgctgtaactaggtgacgcatcagctgttcctaaagtacttcctgtgcgtctcataactgttaactcggtgtagctgtgtaagcactgtccatctcaggtctgtgtggaccaagatcctgttgggagtcactgcatgcatagtgtgcagagctggaatgcttcgcctgtgcactttactctgcatctggacggtcacgctgttgtctggtttttttgtttttaaggcttgtgtaaagtggatgagacaccgaaaggctggtacattcagtacatagacagagacccagaaaccatccgtcggcaactggaattagaaaaaaagaagaagcaagatctggacgatgaagaaaaaactgccaagttcattgaggagcaggtgagaagaggcctggaagggaaagagcaggagacacctgtttttacagaacttagccgagaaaatgaggaagaaaaagttacgttcaatctgaataaaggagcgggtggctcagcgggagctacaacatccaagtcaagctctttgggaccaagtgcactgaagctgctggggagcgcagcatccgggaaacggaaagagtcttcacagagctccgcccagcctgcgaagaagaagaagtcggccctggatgagatcatggagctcgaagaggaaaagaaaaggaccgcacggacagacgcctggttacagccggggatcgttgtgaaaattataacgaagaagcttggggagaaatatcacaagaagaaaggggtcgttaaggaagtgattgacaggtacacagctgtggtaaagatgactgactctggagacaggctgaaactggaccagactcatttagagacagtcattccggccccggggaaaagggttctagttttaaatggaggctacaga

SEQ ID NO: 26310 - DNA, 1134 bp, Mus musculus
tttagtaaaagatggggtgtgaggtcaccaaataaacaattggctgggctgaagacaaatgtggaagttaaatgggataaatcaagttgttattgcagtacttaattatgaagagtcggtgaactgagttgttgagcagaattgtggctttggcttccagtaccaccccctcccccaatgaagaaaggaatagaaatgggtcattttaaagagacttctcactaaagtttcatatacagtgatctcactacctcctatccatccatccatgtgttgctgtatcttctcccattccacctttccatgatctaccacttctagctggaggctggggatgtttggcaagatgaagtatagagataccacttctgggccccaaagtcaccctgaggatgtggaaatctggaaaccagagactgcagccaatggttttttttttaatcaggaatcacagtcaatatttacctgaccttcaggaggcagagacaggcagatctctgattctgaggccaacctggtctacatagtgagttccaggacagccagggatatgtagggagaactatgctgagaacctgtttctgaaaatccaaagtgtgtgtgtgtgtgtgtgtgtgtgtgtgtgtgtgtgtgtttctgtctgtctgtctgttcttctgtctgtctttgtgtgtgttataacctgaactgcatgttctcacagacaaattaagaacagggttctttgaataaataaatgctgtggactaaaagcatcctttcaaaacacacatccttaagcctaaatctgctctgtaacggtccctccaagtggagtctttcagaaggggtcaagtcctgagaacagagctcttacacactggtttagagtgttcatgagaagaaatttacatgggagaatctgatgggagggagtatggaaatgctttagatagagaattcatatgtgaaattttcaaaaaatgtttagttaataataatcagggaggctggttggtaaagcattctcttgcaagcacaagaaactgagttgagccaccagaactcaaaaaagtcaggtgtgggtgatgcgctttccattcccagtactgaggaggctgaggcaggctgatccctggcgctcgctggccagtc

SEQ ID NO: 26311 - DNA, 1152 bp, Mus musculus
tggagtcctcatcaatgatgtaaaccagaagacaatgaaatggtaactttgaagggggaaaagaaaaatcactatcaacccagaattgtaccacagtaaaaccacctctcagagacacagatggacagggcagatacaaaagaacagttacaagtgcggccatcataaggaaagcatggcagatgtccgactctgaaggcacaaaaagactgtggtccccagagttcctgttgggtcatgaatattagtactgtgtcctccctgataagaaaccattgttctttggttttctctagcactggctctccagtcgctgatatattttccaaaatcctctactttttttcatttttcactttgtaataacaaatctccacaataaattagggggaaacctctaggctttgcaaccagaaagtcatgggtataattcctctaagagagagatttctcacttacaatttttttcagctttatatttgtgactactagatgcttagataaattttccaaatattaatttgtgttttaattgctcacatatgtactgaagcccagagaagttgacacaaagaagaacaccctgtctcctcctgggattgtgaatgtctaggtaaaccatttccttcatgcgcacaaactagctttcagttagacttttgcacgcgctcttctgaaagaatgcagtactacccactggtttgtaaacgattagagaaggctgatgttgcctttgatgagatcataccaatttgtaatatagacagacataattgaggaaaacaggcatgtaacaaagaaaggaacaataaagaaccgctcaccgacgtgagcactcgaagccaaaaggagatcttttctaaatggctacaattctaattaactatcccctgggcagttagctttcatctgtagattctttcaacaaatagtagattggctgttacaagaaacgcactgtaggaggtgtcccctgccggccaccttgcagcaatggcatgcccctctcttactttggaagcagtgtttttgcttttggccccaccctaaaaacattaagatcagcataaaaatagacttcctttcattcacaccccatagctcaatacacaattaagatccctcttctctgtttattttgactctttctct

SEQ ID NO: 26312 - DNA, 1184 bp, Mus musculus
cctgcacatacatctgcatgcattcagttaatctgtatatgacagggttctggctgctgttagatgtacggtgacctcttaagaagtcgtggtataaatttacagccctatattagatacatctgtcaatttgaagagaaaagtagacattttgttatcagttgttcttgctctggtgcatctgagaataattttgctaaaaacatgtgctaatttctaataaatgcaattttatttgggaaggttaatttgtttgattaaaacaatggcataaactgttgctttccatccacttgtgatttttgctgttggaaatggtgttggtttatggatgtgtagaggaggaagggggttgggggtggcggctgtgcaggggatatcaggatgtttgggaaccgcttggatgatggcgtgggaaaaaatgattatcttctgctgtcatctgtttccatgggaaccttaaaaaatcaagtttaaaatacggagttttgcttctgtttgaacagcctctgcgagggaaaggccctatagacctcattacagttgattccttaatagagctgcaggactcccagaatccctttcagtactggatagttagtgtgactgagaatgtcggtggaagattacgccttcgctatgtgggactggagcacaccgaatcctatgaccggtggttattttacttggattacagacttcgaccaattggttggtgtcaagaaaataaatacagaatggatccaccttcaggtgagaggcggcattttctttcctctgtgacgtgcttgtgatagagatgtcaaactcctgtgggtgtgtctcgggacacacctgctcatgtgtcttttacatgccagtatgtggaacctaagtgtgtcagtgtcagagtctttagggtagaaaataagatccaagatacggatcagaagcattctcaaaggagaactccatgttgatgacaacatcagtcaactcaaccagcaggtcagattccaatggtgtcaatggctcagaaaagaaaggaaggggtgatcagctgggatttcgcatagtctccccatcccttagggaccgtggtcttggaagcatattccacaatctgtttgcatgcccatctttctgactgcctgttttctgttcacccttccaccccttcttctgtccatattcatctgtccacc

SEQ ID NO: 26313 - DNA, 1124 bp, Mus musculus
ctttgtgtctgtctgtccacatttccctgtgctgatactgacactggccatttgattagcactaatgctaactccgaatgagtgcagcttaattacacctgtgaagattctgtttgcacctgagtgtcctcttcctgggttccagtagatgggaacctgctgggaggaccgcttctacccaatcccacctcttgtcacacacagtgattgtataaaaataagctctcctgtgtccctctactgaacacacacagaggtgagtatgatcagaggaattgcagggacatgtgtgatgagggtcagagtgtctttcctcttccttcatatttctctctctctcaaatatatttttaagagtccctcagtattcatttgcacatctctgtaagactgacagcccggctcccgtacttccttcttttttttttttttttttttgtagtgtgtgtggtatatgtatgtatacatgtgcacatgggtacatgtgtgcatatgtgttctagtatgttttgaggacaaaagtcaacactggctaccttcctcggcttcttgaccccttattttttgaggcagtatttatcactaaacctcaaactcactaatttggccagattggttgaccaacaagctggggaagcacctctgctccatagaaacagaaaccacattctaggaaatcttacccatcatgctcttgaaatcttacccatcatgctttagaaatgccaagggcttaattcccgaggagagagctcaggcttgccttcagtgactcacgtctagtctagtgtgtcattttttttttaagttctaaaacctctcctggattccctctgcatactaatttgcacgcgcccacacaacaataacaaacctaattaatagtaagccctaaataagcagcttcgtgtgcaagtgtgtgtgtgcttgttcgtgtgtgtgtgtgtgtgtgtgtgtgtgtgtgtaggtcagaggtcagtgctttgtttcttagttgctcttcccattcgttttagaggcatggtcttgcattgaacctggacctcaccaattcagctagctgaggtggctagcgagcccctggcctccatatgtccctgccttgccagggcaaggatttcaat

SEQ ID NO: 26314 - DNA, 1194 bp, Mus musculus
tcagtgtccactctccccgctggccagctctgtgtccactctccccgctggccagctcagtgtccactctccccgctggccagctctgtgtgtactctccccgctggccagctcagtgtccactctccccgctggccagctcagtgtccactctccccgctggccagctctgtgtcctctctccccgctggccagctcagtgtccactctccccgctggccagctctgtgtcctctctccccgctggccagctctgtgtctactctccccgctggccagctcagtgtccactctccccgctggccagctcagtgtccactctacccactggccagctctgtgtcctctctcccctctggccagctctgtgtcctctctccccgctggccagttctgtgtccactctccccgctggccagctctgtgttcactctccctgatggcagctttgtagccacctactattctctgctgggaactactgtctcacagtcacctctctttctctttcaggcattttctcggggcttctcaaagaacatgaagcttgaagctgtgaaccctgtgaatccaggagaggtgtgcgtggccactgtggtcagtgtgaaagggcggttgttatggctccatttagaaggtatgtgcaatcagctgctgtttagaagaacttgggggtactctctagagggtggggtagaaaagaattcagcactctcataaataccccctggttacccttctatttaaacataccttaaattattcagtgttcttaaataagtgaaactaatcaaatacaaattcattccaaggcgctcatcttaactaataatttcatgaaatgagatgctggtgagataattatgtttggaacacactggtctttttacatctatgattataaaagctaatgttgcaattaaattaatatgagtcactaaaaatggtatttgaggtcttggtcattatgagaacaaaatgatatatttgcattttaatgtgggcatacccttcactttggtttcttctattggatgttttatttttcctcaaaataacaatggaagaatggtttctctctccgaataaaattagccttttttccttttctttcaatgatgttgagacagttctttacagatactatttatgttagaatattcagaacactcagagaaatgtattttgtgacta

SEQ ID NO: 26315 - DNA, 1475 bp, Mus musculus
taccttctccctgctcctgttatagaggaggctacgtagaccaaaatgagaaaaggaatgtggccacagaatgtaaccgtccagtttctgcctttcactttcttgggggttgcttgtgaaattaggctaagtcatttgtagactaatcagtgattgtaagtttgcctgatactcagcacacatctatgttttcctatgagcagttcaacctgtgcctgcaaagccaaaggggctgaggtacattagagcatggaggacacctccacatcttttgaaatccaggcaaggagaccaaaactttcgctctgttcacttgtgcctcactttggaagcttaacttcccacctatctgggccttactggtttacttgtggttttccatagttttccataattacattcatcttctttctttgactagaatcacaaccatcccagagcatgtatgacaagcttgtgttttggcagcattttaaggcatggtggtccctcaggctttgaaaacgcctcttgcctatgttagttacccattctcaacactgggccatggctgcagatggaattggaaagtaaaatatttgtggctgagcctctttagtcttccctgaagctggctttctatggtcaagctataattctttggtgaataggtatgcctaggaacaactggtggttagtctgtgtcctgtgtggaactgtaaggatggagctgcccctgataggctctgtggagttggcttgcatttggatttctctcttctaaggtacatgttaaaccttcctctgccttctcagccacatgcttttggccataaatactcaatctaccagttggaaagggtatctatttcaagatggggtggcgtttttcccatactcactccttcttgattcttcactgtggtcttttccagataagttacttcttttgcatctgaaatgggatgtggccatggcattgctagaatatggtgtgcttttagaacaaatgtggccttctcatgccatttccagtaatgacgcagaggaggacgtgttgcctcagaacatggggacttcctagaggtctgctgagcccacagaaagagccaggaaagcattaacagaaaagcctgtcaggacatgtccaccactggtcagaaactcttcttcccgtggaaccaaatgtcccagactctcttcatgcctcagccttgcagtgtagcataggtctctctctgcacagtgttggttcctccagcctaacctttggctttgggaaggaagagatgaccgtaatcttgcaacaagagtgcccaaccagggaccactgtcatcatagtggctctcaatgtgcatgtcacaccccccctcagtagacttgagtattttgatgaccaaagaggatgattttcctcagagagaagtgccagcgccctccagagctgtgatccaggatggcatgctcacgtgcggaatgcaattttgccaccggt

SEQ ID NO: 26316 - DNA, 1156 bp, Mus musculus
ggtaaatgtttgttgtcttgcttgcaaagtggcatttgtgtgtgtaagtacagcatacaaactttttctgaaactctttagtgtgttcctcagtcccgtttggagagaaggtccttctttcttcctttttcttcagctcatgagggcacaactcagtggacgtgcccaacctgctggagggggtcaggttttttcagttttttgttttgtttccttaaagatctcattgctgttcttgatattgttgttgctgttgttgttgttgttcttgctgttgttgctgctgctgttgtagttgctgttgttgttattgttgctgctgctgttgttggggggcctgttacatttgtttgggaaccagggactcagctagacaaaccctgagctctatccccagcagccctactactgttttctttcccatgtggttctaaaagtgctgatccttctgcctcaacctccccagtgatggatgctaaggaactctgagttctgggattagaagctcagttccttctttgtttgtttgtttgtttgtttgtttgttaaaatctggtttcaaagctgtagtcttcgtgacctgaaaacttattgtattgttcatgctggcttcaaactcacagaaaaccttctacctccaccccctcagtgctgggattacaggtttgagctatgatgattttgttgttcatttgtttttgctttttgagataggaggtggaataccacactttagccttgaatctactaaggttgaggatgacctcgaactcctcatcttcctgcctctatctcccaactgctaagcttacaggaatgtatcatcatacgcagctaattcttcttaacatgaagaccggggacctaatgaagtagtcagaggttaaagcgcttactgcagacacaagaggatgagagttcagatacatatgcagcacccacataaatacctggtgtgcatggtagcatgtctataattcctgtctcaaaaggctgataccctttcccaaagcaaactggctatttagactagctttaacagagagctctgggtttgactgagagaccctgcttcaatgagtaaggtggagtgatcaacgaagattcctgataatacccataggtccccacactcatgcttgcatacatgcctgca

SEQ ID NO: 26317 - DNA, 1192 bp, Mus musculus
aacacctgacaaacaataaaccagtttctgccgacagggcccatgtatctgatgtcttgacagcttcctgttgatgctaatgcacaagtgggtaatacggtccttatggtcctgactttaaagatgggttttaattgtcattgcggctagctaaaatagtgtctagagcaacgcttatgctatggggctcttgagagttgttacactgcatctccttggagcacacagagatcttacagtctagaaagagatgtcctttaagtaagggcttgaacaggtgagcagcatttcagaaagatgtgaaaaaggacacttgggagcatatgcccagtagaacggagaatccccttccacttctggttttgaaaacgctacacagatcctgtaaaccaaaactatgagatagggacgctgttctctaggaaagaaagaacataacagaaaggtaggttatgtcattcacggttgagagtggaagccagtgaaccttctggggttttcgcagagctgagtgagcctgctttgcttttcttcaacagtaccccgcgattttccttatgaagaggactcaagaccgagatcacagtcttccaaagctgctattcctccccccgtgtatgaggagccggacagaccaagatctccaacaggccccagcaactccttccttgctaacatggggtgagtgctaagtgtcctgtctagccgagagaatgttgaagtgccttaagactctgaggttgggggtgtggctcagtcctgcagtcacagcaccctgaagatgggggcagaaggagtcttgagttttaggctagcctgtgaagtgtttgctgatttttttcaataggtggaactcttttgaaaatgaatccacttggatttctagagcaatacttgtttggtcatatgttgctctataaaggattagtgtttcataccatgctgagtgttttccaaaacagtgagggtttgtacaaagcagccttctatataagtcagggataatctaaacacattgtgctccgcaggagaagtttctgttgatgatatcatttctcataatatgcagataaagttgctctaggaattggagatgcttcatgttctctccaaaggatgaggggcactgggttttcctgaggaaatgggttgtttgccttagactgtgcttttacacctttgcttctaagaa

SEQ ID NO: 26318 - DNA, 1152 bp, Mus musculus
gaaactgctcataaagatgaaatatcagatgtgtaaagtggaaacatcattctttaccatgtatttagttgacttttcccttgctgggacagtaatttttacctactctaggtgtttgaccagggcagatgtggctgaagagatggctcaacagttaaaagcacttaccactcttgcagaggacctgagttcagttccccacactcaatggtagctggcaaccgcctctaactctagatcccaagtttcaagggacccatcactctcttctgaccttagtgggtataacctctacccacacatacaaacgtggtccacatgcaaacgtgtaggcagaatagttacatacagaaaataggattaaaaaaaccttttaaaataatgagcagagtaagtaagaggagtaagagttgtgcttgttttaaactatttatttgtttatagtacaggataaaacccaaggttttgcaagcactcatgtttagacaatgagctgcttcctctgccaaagtttcaattatgcactaaaatgttgcgactgtctccattctctccccccagcaatgcacggctgtttggaagcagtccaggtgcttcttgaaaggtaagcacaaaacggtaagttggtggaaagtatttcttagttataacaaggagctagtcttccttttatgtagagagctcagagcccgcaagcaacaaggcctgcgtaccaatgagcgttacaaggaattcagtgtcccccataggagtgtgtggtaggaggacccagtatatattaataaagactctaaaagagtaaatgtctctgcaccagccaagccaaggctgttcacctgaggataacggctgcagatgaggggcaagggagctttgtgcatgaagactggaggtagttcacagtatgcggaagtctaagcattaaagagaatacagtagctgtagactgttgtgaagttcgcgttttattctgagcatgtgaagtaccattgaggagttgagttggttgtttggttttgagaaggatcttgctatgtagtcctggctgcaggaactacagaactcaaaatgtagaccaggctggcctcagacatacagaacgcttatctgcttctgccttcccaattctgatattaaaggtatgcaccacca

SEQ ID NO: 26319 - DNA, 1198 bp, Mus musculus
tgggctacacacctcatgtgcacacagtcctacattcagtccctagccctgaaaataatgtctcttccttttcatttgtaaaagctgttggcgcaattggtactgacatcatgacttttggttttgcttttttgatgaagattttacagatagatagatagatagatagatagatggatggatggatggatggatgaagattttacagatagatagatagatagatagatggatggatggatggatggatggatggatagatggatggatggatggatggatggatggatggatagatagatagatagatagatagatagatagatggatggatggatagatagatggatagacagacagatagatagatagatagatagatagatagatggatagatgatagatagatagatagatagatagatagacagatagatagatagacagatagataccttgtattggtgttttgcctgcatgtatagaagtgcatcctgtgcctgtccctgtggaggccagaagagggtgctgagtcactttgaactaattgtagaatgttgtaaattaccatgtggagccaagcaatgatggcacatgcctttagtcccagcacttaggaaacaggggcagttggatctctctgagtttgaggtcagcctggtcaacagagtgagttccaggacagccagggctacgcagagaaaccctgtcttgaaaaaataaaaaacaaacaaacaaaaacaacaaaagtaaattaccatgtggctgccggaaattggatccctgggtcctctagaagagcagccagtgctcttaactgttgaaccctctctcccttattctttgtttttgagacaagatctcagaaaaattatgtagatctggctagcctcaatgccaggattaaaggtgtaggctaccacaactgtctgacatcatgactatggtgatgaacactaaccaccaacctgtgactgtggttgtttggtttctgtggatttttttccccagattcatttatttattcttatgtgtatgtgtttttgtgaatgagtgccacatatgtgcagatgccccagtggccagaagaaggcatcagatctgttagaactggaggtgctaggaactgaactctggtcctccgtaagggtaagaagtgctcttcactgctgagacatctctccgacgactgctattt

SEQ ID NO: 26320 - DNA, 1126 bp, Mus musculus
atagtttttttttctttttctttcttcctttttggtttttgtttgtttgtttgtttggttttttttgagatagattttctgtatgtagctctggctgtcctggaactcactacataaaacaggtagacacctcgagctcacagaaatctgcctctcatttgctggaattaaaggtgcgtcccaccgatcctggcaggtttgttttctttagaaacaattgtaacccagtcagtttaaaattgccctccaacataggccaccatgggtgggtacgaaagtgtaaaatgtgtgcaactggggagagagcacatgcagccaagcctggtggcctgcaccaggaagagaggcggctcctgtatgttgtcccctgactcctcacgccacaggcactgcggcaagtgcacatacacatgtattcacgtccagagtgcagaaacgtaagctcagtagaaccgaataatccactatttgttcctgagtgcagtccatgttctcagcagattcccccatgtctccctttagtcctgcatctggcctgcgcaggtcagcatgtggcttgcaccaggctcctcctacagtcgggactgaaggattccgaagacctcacaggcaccttggcccagcagctcacgagaagcgtagatatccttcaggactttgaccatgacgtgaaatcgtaggatgcttgaagaaggaggcgatggagttcaaggccgttcatattctgctccttctgttgctgagagacagggtatcgagttccttctcggccagcgttttcatctcctcctgctgcctttccttctgcatgctcttcggtcgaatgaccaggagtctggattcctggcatgttgtgtgatcttgaacgtagccatttgttttttcatttttaaactgtaatgagggttaaactgagaactttcacacactcagcaagtgctatgccactgaagcacatcaccagccccggatcttggcttttctacgctgcaaggagaatcaggttaaacatagaggtttgtgtatccttagggagtgaatgtaatatatgtgtctttaaatatataaaaatctaataaaacaatataaactgatgtttattcaagctctaaaacatagttggcct

SEQ ID NO: 26321 - DNA, 1183 bp, Mus musculus
cagttacatctctactgtgctcttaaaagagtcttcctattttcatcctttacaaaagaagcaaactttatagttgtgcaagaaccagagcttcctcaggctcacacaggtctgtgtagcatgtgcctcttcttttcccttttgcctgttcacacttctttctgcctctaaccagcccttcagctgcattaaatttccctttgatccaccagcgtttcctgctcctatagccctgctcccttcagtactgatgctcggcatgcttgaacattatttgcctacccttgtttcccagccaaatgccctgccatattcctcctccaggtcatctgttaatgtttgacttaggcagagtaagtacactgttcctttttgcacccaggagacccttcattcttctgtcacattaacttagtcttttagtattacctatctacatgtctcttcaactggatgatcagctcctgcagaccagggactttagcagtcttgtatatattctgagttgcacatataagatctggtatttatgaaatataagcaaacccagtgtgttgtctgggttactgaatttaaccaatactgaaattcagtagagccctagtgtagtggaactgaaagtgaacattttaaaaataaaacaactgcggctcagggagatagtgtgattatttccccccccccatccccatccccccccaacccccccccccccgtggtttctagtggattttcctgccttctgtcccaaggccatctgcatccctgtagctgctatcagttaatgctgattaggagtatttaaactaagacagagccagcctgtgaacacttactatctatcatgccatttagttcttaagttacagaatgtgactcaagtattggaatgaagtagataactaggcaagtattctagctaccacctagcccactgctcccttacagtgagtgctctcagtaattatccttaatggggggatggaggaggacgaagtgaacagcaacaaaaacactggtgtttatatttccagtcttccttcaagcatatgaaagtagggaaaagtgagatttaagatgttgtaggggtggcttagggctgactctgtgcttggcatgcatgagctaattttattcattagaccaagaattaaataaaagtcagacttattgtcctttccat

SEQ ID NO: 26322 - DNA, 1147 bp, Mus musculus
acagcatttgttaactcaccccaaaaagagactccacaacccttcccttccccaaccatggccatcgtctgtttatatttttcccgttccaaaagtttcacacaaacagaactacaccatacgtggcccttgtgactgcctccttcctctccatataatattgagtccatgttgcttagtgtggattagcacttgattctctttatggcctcatgtgatcatagcatgctttgtttatcgactcataatttagtttgctcctacttcatatcttcagcagtgagcaatgttaaacttgtatacaagtgtgtatgtagacatgtgttttcacttgtcttggatgtgtccctaaaggtagaatagcggcttcagtatatagggatgcctgtgtgtgtatatgtgtgcatgtgtccctgtgtgtgtgtgtgcatatgtgtatgtgtatacatgtgtgtgtgtctgtgtccttgtgtgtgtatgtgtccatgtgtgtgtgtgtgtgtgtgtgtgcatgtgtccctgtgtgtgtgtgcgtttgtgtatgtgtgtacatgtgtgtgtgtctgtgtgtatgtgtgtgtgtgtgtgtgtgtgtgtgtgtgtgtgtgtgtatgcctgcctgttcactcatatggatgtacacatatgggtgcatgtgcatgtgtgttcacatgtgaaggccagaagttgacttctggtgtcttcggttttttgaggcagggtctctttgaacctggaattcggtgctatggaggttggtttggtgggaagccccagatattctgtgtcttcttctggggtgctgagaatctagatgtgtgctaccacacttagccttttaagtgggttctgagagccttcttagtggtagtataacaacattgtgattttgatttacatttccctatcaatactgatgctaagcatcttttcaacttgtgtactcctgttttgaatactatatatggtgtcttacacacaaatgctcactagtgtagtacctttggagacaaaaccctcttgagttttgagtactatatatagtatctcacacacaaaatctcacctttggagacaggtagtcagaaggatcaagggatatggcatgtctgtcgtaacccctgaatctgggaaaggctttgagtca

SEQ ID NO: 26323 - DNA, 1199 bp, Mus musculus
acttattgcatacttcatatttccagtgacccgttggccaagggaatattcacaactaaaccagaccccctatgcagagtgcatggtggtgaggagaagatgggattactagagctatcttagtaaactatgtttgttgtaagcaatgagctaaggccccaaggaagaagaaagaagccacaactcactcatatcctagtttaaagctttctaatggttccaaaggtttcctgtctttcggttttcattgttgctttttgatgcaaagtcctgctagatagtccctaggtgtggtggtcacaatgtagcccaagctatgatagtcaccttgtagtcccagctaacatctaattctaagcctgccgccaccttctgaggattggaattataggtatgcataacaatattcagtgccttaaataccttctttctgaatattatggccaggaatgggatcataaagagccaatggcatgcagggggcttttctctgctgcccagcgtgcatttgttcactacctacttctctagtgtcaggagctggtgtggacttcatccatccactcaccctccctctcccttccctgtctgtctctctgtctgcctgcctgcctgtctgtctgttgtctgtgtgtttgtgtccatgcatgcatgcaggcgcccattcatgtgtctgtgtggtggccagaggtcaaccttgactctaactccctttctgtctacccgactgtttagaaacagcgtctctcagtgaacctgaacttcatcgattcatttgaaccagcttccagggcttgagggattcccgcgtctgccatcatccagcagtagggttagccaggtcttacaagggttctggggctctgagttcacaaccccaggcttacatggacaaacctttaccactgaaccaacttctcaaccatccattaacttctcaatctcgtcagagaaaaccaacagccatgtaagccacagttatgcaagttgaaggatatcaggacaatgatttggaagtatcttttagggattatcactaataatatttcatagcttcctgtaagtgtcaaagcctgtgtatttgcatagtttctgtaccaatgtgagaataaattcattttactccaccttttgaaataggtggcagcatctagcagagatttttttttcaatagttccttaaagcatggaccagctta

SEQ ID NO: 26324 - DNA, 1222 bp, Mus musculus
gaatccttcccgcgatcccttctttctcagcacccaagggtgagtagagagttcgggtgatcaccaggaaagcccctgaaaggcctagcacttccaattagtaacaggactgtgcttgataccctacagccctggaggaaggctcgaggggagctccctcccccaccccccttcctcacttctttccgggtccccattggctggctcgctcggcggctaggatggcagtgggaggggaccctctttcctaacagtgttataaaagcagcgcccttggcgttgtccagtcctctgccactcttgctccgggaccccagagaccccagcgctcctacgattcacagccaccgcgccctcattcccttgttgcagtttttccagccgcagcaagccagcccaccttcgaagccatgtctaccaggtctgtgtcctcgtcctcctaccgcaggatgttcggtggctccggcacatcgagccggcccagctccaaccggagctatgtgaccacgtccacacgcacctacagtctgggcagcgcactgcgccccagcactagccgcagcctctattcctcatcccccggtggcgcctatgtgacccggtcctcggcagtgcgcctgcggagcagcgtgccgggcgtgcggctgcttcaagactcggtggacttctcgctggccgacgccatcaacactgagttcaagaacacccgcaccaacgagaaggtagaactgcaggagctgaatgaccgctttgccaactacatcgacaaggtgcgcttcctcgagcagcagaacaaaatcctgctggctgagctcgagcagctcaagggccagggcaagtcgcgcctgggcgacctgtacgaggaggagatgcgggagctgcgccggcaggtggatcagctcaccaacgacaaggcccgtgtcgaggtggagcgggacaacctggccgaggacatcatgcggctgcgagagaagtaaggcctgacctacgcgagtggtggggtgtgggagggaggggagtcctgggccttgcactggggctgccacgcccttggggatgtggctggggtggcggttgtctggaggatagcagaggaagcgggccccaccctgaacctaaactttgcagtgaacatttctcttttcgcctcactcaagcacttccattgaactttttagaaagtttcttaggtccttcttctgggcttacagttaccagacag

SEQ ID NO: 26325 - DNA, 1193 bp, Mus musculus
tccttcgaagttcggcactgcgtgaaagttagcagaagagtcattgcacaaccatttttgaaatctaacaagggtgaaaagaagccatctgttcccgtagctcaagggtgttaaaggtttctatgggcttcactatggaatgtagatagggacgttctggcaaatgcggtggctctggacagaaagaataggggcctttgtgttcccagagcagctttgcaacaggctacattcttattgaatatgtaatgatgtaaccacagttccaattggacacaagtatttgctaacatccattatcttgtgtctgggccaggcttgtgaggtatgccgtgtacaaagttcttaaagctaaagtcctccctcacatttggaaaggcccccttttaggggggtttgtagactcattagcaccctccacaaacaaaattaaaccctaaactgaagaatggagtattttatggagggaggatttgtttgtttgtgtttgttccagggttaggcattaccttagcatcccgaagtggacagatggccagttcagtcttgtttggaacacttgttaggatcaacagccaaactctccagatgaatgttctaaggtagcattctgaaggcatttgcatccttaatggcagtagacgaatatgcagcccctttcagtcactgggcattttcagtcatcaccaaaggaatgttttctacaaagcactgagttaatacacaccatctcttatttgtggactaaaaattgtttcattcattcatttaaatgaaatgacacatttagctgaactttttcgagaaggttagtccaatatcatttatatattttttgatggcttagcagaagtcagaaatgaatgatactactatttaagttcttatattcttttttaaattagtattttctttgggactgatagagtaactcaacattatagttataaactatactgcaaatacagttgcttacaagggaagtttccaaacatttccttgaaaggaaacaacatttcacatgcaagattgaacagtctgtcttaaaatagatcactttataaaaactctgcagagaagtttaagtatagtttcattgtaagtgttttgatctgtcatcctaaaacagacaaagtcattgaaataacactgtgacagctgggacaggcagaaataccctataggctgagcca

SEQ ID NO: 26326 - DNA, 1165 bp, Mus musculus
caacactttggaagtgctgagtgaaatttgtctcacagttctcctttggcccagtcgtcttacttcaggatttctgagtgagagaacttccaggagacaaatattaaggcagacgattagacaaggatcttttcaccttgggaagttaatgagttaagtttgccagatacataatgtagaaactaacacagcaattaggagcaacttgctatagagagatagaataataatagtcttaacattttagcataaaggagaaataagctaaaacagtgccattctgtcaccttaaagtatatacattcctccacacatatcacaatcacgcatcaaattcacgaagagtatccacttagaagagggaaatgggatgggcttagtgataaaacatacatcagtagctttactgcagccagggacgcatccattcttatctcccacaaagtattttactaacattgaactagaatctgagacacaaaactgtaatttacgtaaggttgcattataggagcagaggtagcattcaaactctcatgtctgactatcaagccatttccccagtgtgtaaacacaaagagggaagagaacgaaactcagtctcgatgactgacgtacgccaagggcgttccaagtgtacactggcaaagttctgacctgagcatgatcaggaagccatcgccactgccaacacgtgtcaaatttctcccaaaatattccccgtactaatttgtaatcatttaatccttctaactgcttgatgtttttaccctacttcctcagaattcccgatctgctttttctatagactagcttacatttttacaatatagactgtttacatttttttaggattttatataaatgaaatcatgtttatgtatatccatgtgctgtcttgctctttttctcgaaatgaaacattaagatcaatttgtgtttctgtctcaataatcatttttaaattttatctggctataatgtaagtgtaccaaagtctgtttacacactcacctgtttatacacaactttgtcatctatagttgtggatgctactaataaagttatcaccaacagtcatggacacatcgttgtgagtgtgcattgttatttcttgggaacaagatctatggaaatggctagatcatgtggtcaatgcgtatct

SEQ ID NO: 26327 - DNA, 1196 bp, Mus musculus
tggtgcaagttggagattaatgaagacaggagatctggattagattgaggcagttctcagtgaggtcaaagaatcattgcagagagaataaaagaataagagagctggatctaagagacgtgttaccactgacagtaacgagtgtcattctttatatggaacaaatgacaaaatgatctctagacagggctgtttcaaaaatcaaatgagaatacttggtaactatcaaggtgagttaccagtttggtgaaatagatactttggtagatatgacttgatccttttatgttctactatagttaccatacagacaaagtcgtaatatgtaaaccatggcactttagatggatgtatgactagttgaataagtgtgtcaaaaattgttaaagtgtttattctggacaggcaaagcccctcacacctgtgaccctagtacttgaaggttgcgacaggaggcttactgtcacagccagccttggctacctggctacttgctctgcctacactagtctaagaccctgttctgtgccctctccctaccccagtttttaaacaactgttgattctactactattttagctataggccattgtttggtcaactgccctgatcagtgacttttaagtgagacatttcacagtgggacactatataaggaagacattgatgtcctatagatgtcagaagtaattatatggaaggtccatcaaagatctggcatctcaatttcaggaactgtgaggaaagagttacaggaactatgaaaaaaaatgggcagtcagtagttcatgtatcaactatttctctggcagaaggaggacgtgataaaactgataaattctaaattatcttcaattgtatctaataaagatgtttaagaagtagagcaaatatatattattactgggaaagaaacagaattaagaccccaaaaggacagtaagcagatgaagtaggtggaaacattcaatgcagaaagaaaaatccagaactgtaataacaattattatcctgagtattttattacctgaatttaaagaaaaaagtattctgtcttgacagttgtggggggattattttagataaaatgctagcacttgtcagcatttatgtcaaattctctttttatatacatttactttgattacgggtccatttatgtttttacattatttatttaagaaccctatatgtc

SEQ ID NO: 26328 - DNA, 1183 bp, Mus musculus
ttaataaagattggtttttattttgataggcaggcttagtcccttagctaacctctggcttttcacccttgctgttactgcaaggtgtccttaggctgtgaaaaaaacagggatgaggaggaatgacttccagctcctattttagccacaaatcgtggtattactaatgacataattcttgcctaggtcttgctaaatctaaggttgataattctcctttaagagctgcacagcactcagaactgtgcatactggtttgtgatcgtacaaattcagtatgggcatcgcttggtgcagaggcactgcaaggaaaggtccagcttgaccatttctgagtttcctgtgagataaacccagtttaaaagaggttggtatcatattttggctaaaaatcaaaaatatttttcggctctgcctcacctccccaaaagatacccagagccacaggtgtgggtcttatcagtacccacgagagaaatcgggtccatgtccacccaagccaaggttaaaagcccactcatctacggatgagaaaatcatttaatcacctcagttaagcattgccttattttaacttaattaataggagggagagagattggagacgtactattgaaagggcaagcccttcactgcctcccacccaaataaaaaagccaattggccttgtactacaagagccggtcgaactccttctccctgtttcccacctatcatccaaaaatgcggaggaatatcaacttagtgttattcttattatagtgtatttcacatttgttcagtcaaacttagccagagttccaacgccctacttaaaattcaactagaaagttacctaccaagtactaattagcattataaagtcagagccaacagctccaggcttttcagttagttgtttactaagataagaaaggtcactcttagccagatacagtttaccataagaaaagttaaggaatcccatgaaagcaagttttttctttagccctagattccaggcagaactattgagcatagataattttttcccccctcaggccagctttttctttttttttaattttgttaataaaagggaggagatgtagtctcccctcccccagtctgaaacctgcttgctcaggggtggagcttcctgctcattcgttctgccacgcccactgctggaacctgaggagcc

SEQ ID NO: 26329 - DNA, 2008 bp, Mus musculus
ataactcaagtttagagtccttccgacacacggcataaagcaggccaagtggttgggtctctaaagatatttctagtttaggtaagaactaatgtggttcgtatcctaaatagtaaaatttaagataagatttaaagcaatgtctttttattaaagcattaaagcttgctttaataggtattcataggtattaattgacatccaaacttcgtaatatgatagtaatgcttctaataatgattttaaagataataaattgttttaaacttgggttttgctttcccaaggttataggtattatcctaaccttgcacaaaaaacttaaaaattatggttaaaactgctattgttccattgactgcagcttgcagtttgatttcaaatttaagatctttaattcacctgtatactgtaattaagataattacaagagtaatcatcttatgagagcgctcatacagctcacttcatacaaaactgtgacagagttatctagttatgtttgtctttgtaaatagattagacaaacagtttggttatagttgctgcctggcaggaaactgtagtacaggcaattttttcacaacactaaagttgcaaagaacgttttaactgtaagtcatcttaagaaagagtatcaaaatttagaggcgtagacagttatattgtttctctagaatcggtccttattacaggagggccaggatgctcagattaaaaagtattttacgtttgagtcaatacagggctctgggcagccccagagcggcttgtggcctttcttttgttttacaaacagtgcctgagaaagatttttccctgtgttcaagagaaattctttttaacagtgttgcagatctattcagatgtttaaaataatgctttaattcaaagagttttgcttctagtgaactgtaatcactagaaaattctgcctctaggtatggccaatgtaactttacattatgtaagaaaaaattttattgtttctgcttctatacaagaagccaagagttttaatctttcagtgtatattgtttcctaagtaaaaagtattttattaactaatgcttcttgaagtttaccttaaatccttgctctcacccaaaagattcagagacaatatccttttattacttagggttttagtttactacaaaagtttctacaaaaaataaagcttttataattgttattaattggtaattaaaaattggttgtgcccaaaacaattctttggccaaaaagaaaacattgtaaagtcatttttctcatcctcccagccaatcgttggcccacgtgggcccaactagcttctgtggggcaaagtcttaagacacagtttcccctgttccagcacagatgatctagttgtgtgctgtagatggtgttttaaaatgctgaacaatcaaaccttaatttgtatactaatagtcaatgccatatctctaagctcgcaattgcttaaattgttcatccctcagatactattaattctcaaatttacaattgcttatgaatatttctagttaataaataaattatgcacatgtaactcttaataactttgcaagccttctagttacaactgctccttaagaaaattgattgaaagtgcaattagtcactgcccctttacagccaagtatttaaaatgttttgtcaactagttattaattcaaaagtttaggtattgtaaaattttaaaactttaacttcttaaaagacaaaaaagagagaaattgtatccccgtgcatactatttagtgcattcccatgcacactattaaagtcttacctttattttcaaaatctaatattttaatgtcaaagagtttaataaatgctttatagtatcttaaagggatctacttattggcttatagattaatcctaaaacagctaccttattaaaaaaggggaaaacaggttttctccacagaacgctgcagaaacatattagtaaattcgtgtgacgagctggtaggtaagttgactcatgtcctga

SEQ ID NO: 26330 - DNA, 1236 bp, Mus musculus
actgcacgtggtcttattctatctgctaaaaggttttagaagatgtttttaaaattgcaaaactggttaataaatttgtctgtttacaatgccaccttcccatttatctctcagctacgtagtcctcagacttctataaagagaaaagcatgcaggccggcaccatctaaggagtctttccattgctctttttctggactcattttgtgtacctccaaagaatatggaagtccttctcctctatgtctaggtggagggctcactcttcacagagcactggctttgacatcctaccctgaggtgctcaactgtctctcagagctttggcctttattagtcctacactctacctatgtccatgcattggcttcccctgcatcaaagtactcatttaaaaaaattgaaaccgctctttccttttgcggacatcggtggatcgcagccgccaaaatgaagttcaatcccttcgtgacttctgaccgaagcaagaaccgcaaacggcatttcagtgcgccctctcacattcggaggaagatcatgtcttcccctctttccaaagagttgagacagaagtataacgttcggtctatgcccattcggaaggatgacgaagttcaggttgttcgcggacactacaaaggccagcagattggcaaggtggtccaagtatacaggaagaagtatgtcatctacatcgaacgagtccagcgagagaaggctaatggcacaaccgtccacgtgggcatccaccccagcaaggttgttatcaccaggctaaagctggacaaggaccgcaagaagatcctggagaggaaagccaagtcccgacgtaggaaaggagaagggcaaatacaaggaagaaacgatcgagaagatgcaggagtagagacatcccatgcacggctttcattaaagactgcttaagtaaaaaaaaaaaaaaaaaaaaaaaaaatttgaaaccaccctgagacaatgactctagcaatgcacacacaaggatctgagtttaaccccagagcctatttttaaaaaattggcctgatggttatggaaccaggtggctacctgagtgtcactagttagcctagtctatttggcaagcttgagggtaatgaggccatatggaaaaaataattaattaattagggaggtggcaaacacctaaagttgtcagttgtcctctggtcaactcttctgtctgtctctctgtctcaatctctgtctcgggacaactct

SEQ ID NO: 26331 - DNA, 1151 bp, Mus musculus
caaatatctgttttctcagcttttcattatctagctttattctcactgaggtacaaaagaataagatccttaaggaattacactgagaattaaaaatttaatcatgggttctgaaaaatctatagtttgaagaaggcctttcaatatcattacttgaagagccaagcacatgttaagctctaacatgtaggcattgtgctgagtgtgttaagcatgctagcttccactagcaggcattttttttcaggtgtcattatgtgtaatagaattactagactaggtgttttatggcacacaaaaatttaaaaaagcagattcatctgcttgggtcctcatttattataacaaatcacatttaaaaataaatttcaaagtgaatgtcagtctcagacatctgtttctcctccctttgtctcctctggtatattaaacatgcccagcaagagcttatgagagtgtctcaaccatatagagaacatcataattgcttaccaccacatcctccaaattgccaatatcttcctgctcagagcttagaagaatcctattttgtgagtgaaagactgtgagcccacaatgatgcttattccccaggactaagatacaccaaagatccaagacagagcaagaccatggaacatagacttctagcacagagcctggacttaatatttatggatccatattatctgtctcgggaaggcacactctcccctcccttgttccaagattgtcagggaacagtgttagaagtttatacattgcctccagcactgtctaatagtttccttctggagcaatgagccacctttttgctgaggcttgaaagaaaaatcaagatcaatgaatggtattatagagaaactgtagtagtgtggggttggcctagaaatgacatgaaagacacactatctagtgagactgtactgtctgtactgtcacacatacacataaatctctccctccacacaggtatggttcatagcctacagtgtctcttctattaccctgatgccaccaacaccctggagaatgtttcagtgattgaagcatatgccacccttctaccctttcttacccagaattttgtgatgtaaaccttcctctcgtggaggggcttgcttttgggggggatgttgtgggaaatattt

SEQ ID NO: 26332 - DNA, 10718 bp, Mus musculus
tgtgaagtaaaggataagtttaattttttcttgtgtgttgtaaatataactcataatcaaagatgagagagaaaagcagatataaatcagtgtgtatggtgcatggtggttgaggggtggggatgggaactgagaaaataccagttactgaaagcacactttgcctgaattttactttgttatattatttaccataaatattaaataatacttctcataagcctgtcctcagaaaaagaatatttaatgtcccaatatttctgcttatgaaataattttctgccttcttgaatctagtaagattggctggttcaattttcttctatcagataatatggttattttttatattaccacatcagcattatattgaaagtgttttttaatagttgattgtattttgtcaaacagctactagtatagatgcagatttgctatttaattgttgaaagtacagtttattttacttgtaaatcctttttaaaggcacatgattcatttggactagaagcaactgctgttagttatttggaaatggaatcagcattcaagtagatgttgtgctgttgattggatagggctccttgggaagttcctgtgagacctttgcaggggcttttcatcagccttgctgtttgttcagtaggaaactagctatgctttactccaagagaatgtttggaccccaataagcataggatgctagagagtttcacttgaacatttgctataaatcgaatgactgtaaaatattatttcatgaacttgtaaatgtgtgatgggtgcctttgttattttgagatgagttctcagtttttttactctgttctttcaaggtcacgtcaacagggatgagatggaggggagtggctatgtttcacattctcctttgtctctatatgttatttagtaaagtctgtattgtacagagctcctccccccagactggctctacccctccagattatcttgtattgttaatttaaaaatgaagaaattaagttttaccttagaatcttctcaacatgttacagctaaaaatgaaaaacaaaacaaaacaaaaaaaaccctttgcaaatcacgtgtgccatttccttacctgagcatgttgtcacctagaagcacatttgagaatcactgtagatgtagcacttgcttttgtaagggaatgcactaaatatttttattgttaatgtgatataatttcttaaaacctgaaatattaatatatgttacctattgaaaattggggggttgaatctataatggttgcttttaggttcttgtgttagcattcttaaggggatactgcttttattctatatacactagagaaacaacatatacatttcattcttgaaaggactagctttacataactcccataggaatagtgttttgtaacatggggagtgtctggagacagagcttcaggtagccaaggtgagcagcagcaccaggccaggatgctcctgcttccccatcccagtgctgggattgccgtaggcattttgattgaatataatttaactttcattgtagcataaagaggaaacagttggttttccctgtggaaagaatgagggattcagacaatgctgtaaacaatattccctgacgctaccaagcctggccaccaagaactctttgaagaggaggttttaagtctttggttttgtatctcaacagattatgagcagaattgtttccaaggccattgagtcccccgctgtgttaactgtggattagcagcagactgggattgtgcattgtgcctccacactctggtgatttattggcacttatctctagaggccgattttatgtgccaacttacctgtggctttgaaacaaaatcctcacacacctgaactttagttttgaaggtcctttatcttctgtcaggggtcacctcaagatacagcttctagtcttgtctaggcacacattgcaaagcctgtctcaagaggtggattctgatctcaatctgcccatttatcgtgtatctagttgatttaagacactattgttcatggccatctttttgttcttcccaaagtgaggaccttttaaataagccaagcctcaaatatgtgttctgtttaatattctgaagccttacgcactgtcactattttttcaaatctaaactaataagaggaatgcttgtagtggtgcacctgggtggtcttactcactgtgtgatccccacccgagcatcacgtcctctagtgtgtatacaacacagtatggagaaatagctttcctttggcttaagctgaatttctaactaaagacagtgcaaaggacaagttatattcaccaaaaaatggcttagaattgcttctaagcagcacccatgtgttttggaaacccacttctacaaaacttaccttatttttctggcttttctgactggatagaagtggttagtgtgtgtgttcactgcttctaaggcatcctaaacacttggcttggcagtgctgaaagagtatcatcagccaggacatcagtgtgttacagactgaagcccacttggctgtgaaaatggctgctttttaaggtcattggttttcatgtcttctcatctttattcatttaatattagtgtgaagactgaaatccaagagccagggttggggggaaaaagatatattttaagaattataggtgaccaaagctatatagaggtcaatagacctaggtgctctacactgcatttcatatggctggaaagcctgaagactggttagcctgctaggatggaatcgggacctgtactcacacagaggcttcttgattttttttttttaaaggccagtcctctgcattttctccatgctatgtgtagatggagtctagaaatcagaacatctgaatgaatgaaaaggttttcttgcacaacttgtgaatttttaatttaaaaataattattacctcattttttactccacagagtgctttgcttaagtgtcaaagcttccataaaacccccttcacccaaatgtctttgaatatgcagaatgccctgctagaggcagtgtgagtgctgggccggatttttgttttctttgtttcccagcaagaaggtgaccaggtacacttgagcaaagcacccagtatttaattccttacagaaaggagaggaaaggtctgcagttggactgatggtatgctaacaccgcaaatgactgtcatttgatctcagaagttcaggattgattgctatgttttagctctaattgtgagaaacagtagtcattttagtcttaaattttccctcaggaaattcagggagactgagccttccttcccccacctccgtttattctcttggagtaaactttcagtctcatggtgaatgtttttcatccaaatttcatcttgaaagagcttagctgctgttttcactgaaattgtgaaatacagtgacgattatggcattttccaattatgagatcattttctgtttctccatgctgctctctttctcagaacatagtttaagataaggaaagagcaagctcctggcagttccggcttcactgttgcgtttattctaatgggagtataatgatcataattgaacattctcgtcttcacacataacttggtgctttataacagtaaggagaaacaggccctggattcgttatacttttagcttggattgtaaaactctttaaatgtgcatgtatgttcattttataagatttaaatatacattattatctattacatctcaggctctgcaagtggtctgacagtatctttgccaagcagcttggttcaaaagaccatattattaataggatcaaggtgggccctctggtgttcacagaggaggaaacagtgtctttcatatcacatactgcttcggaaccctaaggaagaaactgatgcgtgcgccattgctctgatacttaagtgctaaccaagaaactgtcaaagcaaataccaaaagcatttcgcaccctcacgccccacacatgcttccaaacttgtttgattatgaggttgttgaaagaaaatgttttttgaattttaacattttccactatcatgaaatgcttcttttatatgttaggtcatattcatgattttcttatttcttcaattatgttctaatgaattgtgtgcatgccaacttacccaaggaaaaagatgcagtttgctctggactgttaatctgttagagaggttttggctcctttgcaatcatggtgcaatatagcatgatatccatttgttttcagtccacagttttatttttgtcataataaatactttttcagtatgaagtgtagcctgtgttttcttttggtgatagtttaacactctctttggttataaatgtcaaaaatccaggtaagctaacgggaattttatcataatgctgccatggtagaggccagagaacccaaagtgggaaataaaacttggttccaaagctctcagcaaaggccagaagatggtgaagactcaggcaattaccttccttctgcatgtctttcttaaactttctttgaacttgattcctgttttcctgtccacagggcaagtatgatacccatgtctaatagttcttacatttctttatacagggaaaagttagatcattgttgagttcttaggaacaattccttatttctctaggaaacaagagaattgttcccgaatacagccgtttggcctctttaatccaaacaatagaacgtacatttagatcaggggaacctgggtggtaggaaagcctggaagaagatgctctttatgttgtgcctacattctcagagagcagttggcacgctttaatcaagaataggctgaaaatactatattcattatttagatccctctaaactagtggtttttaataccaccctttttgagaccctttgagactactgttaggaagatccttaaattcatagggaggtagtaactttgtttcaaaggtttctattctagttacctttgtgtagctctgaccaaatacctgaggaaaaaaactaaaaagaagactgcctacttctgccagtttgaggatgtaatctatcatggcagacagggaaagagacaaggcagcccagttctcatggtgagctatgaagcagagaagtgggccacacagacttgtgggttccccatagagtctacttttcttgatatccatgtttctttctggccactgctgtaaacttgtgtggaatttctgtgctttgtaggagtaatttttttttttttttttgaggaagggctggtgtcagtataatttttacaagttaaaataaccctcggccaggcgtggtggcgcacgcctttaatcccagcactcgggaggcagaggcaggcagatttctgagttcgaggccagcctggtctacaaagtgagttccaggacagccagggctacacagataaaccctgtctcgaaaaaccaaaccaaaacaaaccaaaacaaaaaaaaaaaatcctcactgggcttggtaacctaagcatgtaatcctaccatttgagtgctggatagaggtaagaggattaggacttaaaagccagtgtgggctatctgagactgtctcaacaaaaatatttgtgtatgtatatagtgaacacttgtcagatttatttttctagatattgaaccatttttttttttaaatcccaatacaccaggaggctgaggcaagacgatcttgatttggaggtcagcctgggctacatcgtaagactgtcaaaaaataaactcactaataatcaacaggtgatgaagtgaatgcaaagctgtgtctaactttatagactctggggcctaactgatagtaattaattaaaagaaaattatcaggtctgtctgggcctgtgccctgagtagaccttgggagcaaactctgcagccagccccacaacacccagaggcagctccactcccaggcactctaacacacccaggtcacgggatcccaggagctctgacacacacaggattgcaggattacaggatcacagagacaacgtgactgaggagttctgacaaaaccaggattatgagaaggacatgctccagtcagacatagctagggcccgtagcactagagataaccagaaggcaggaagcaagcataggaacataagcaacagaaaccaaggttacttggcatcataagaacccaatttcccatcatagcaagtcctggataccccaacacaccagaaaagcaagattcagatctaaaatcacttctcatgatgatgatagaggacaataagaaggacataaataactccctttaagaaatacaggagaacacaggtaaacagaagcccttaaagaggaaacaaaaatcccttaatgagttacaggaaaacacaatcaaacagaaggaaaggaacaaaactatctaggatctaaaaaatggaactagaaacaataaaacaacaaagggagacaaccctggagttagaaaacctaggaaagatttcaggagtcatagatgcatcaccaagagaatacgagatagaagagagaacctcgggggcagaggataccatagaaaacgttgacacaacagtcaacgaaaacgcagaaagctcctagcccagaacatccaggaaatctaagacacaatgtgaagaacaaacctaaggataataggtatagaagagagtgaagattctcaagttgaagggccagtaaatgtcttcaacaaaattatagaagaaaacttccctaacctaaagaaagagatgcccatgaacatacaagaagcctacagaactccaaatagactggactagaaaagaaattcctcccatcacataataaaataccaaatgtactaaacaatgaagtttaaaagtagtaagggaaaaaggtcaagtaacatataaaggcagacctatcagaattacaccagacttttcaccagagactatgaaagctggaagatcctgagcagatgtcatacagaccctaagagaacacaaatgccagcccaggctactatacccagcaaaactctcaatcaccatagacagaaaaaaagaagatatttcatgacaaaaccaaatttacacaatatctttccacaaatccagcactacaaaggataatagatgggaaacacacaggagggaacctatacccaagaagaagtaagaaagtaatctttcaacaaacccacacaaacatacttccacctctaacaagaaagttaacaggaagtaacaatcacttttccttaatatctcttaatgtgaaaattaatattaccaacatatcttaatctattgaaattcaaaattttgaggaattagacatttgtcagctgtcatcctgtggtttctctaatttggtaatgggagaaataggtccaatattgtacaatccatatacactttctgcctgcttgtacatgacagggtcttgctgtgtgccacataatggtcttgaaatcatgtttctcctatctcagcctctattagtaggattgtttatttgatgttttaacacaatactatagtttggagaacagcttacatatttcaaaattatgtatacagctaaaagaaatgtagacaatttgggaggttgcttttaagagaatagcatagagtgagactgaaggcttttcttgagatgtacaattagtgtatcaattttgaagaagaaatccttataagttactcttattctgagatgaatgcttttcaaaatcatcacagccaatgaaccagtatcttaccctcacctaacgtctgtgccaccctccaaacagaaccattgttcattgaaacagttgatgaatgacttcatggatagaccatcttaatacacacaccatttcttaaatgaatgtaacctgttccctgcaggctgagaatgacaacagtcactcaagttaaatagctttgaccatagcaggaaatctgtactcaaaaattgtgcctacaattcattccttggcactgcagaactgtcaactcttagcttatggaggtaaaatcctttggtgatgtgagggacattcaagtacagccttattacaatgaactccaatgtccaaaaactgttcttattttgtgtttgtaccacagtaagagccaagattttaaactctactaaaaacaaaacaaacaaaaagactttatttatgttcatttaaaaatctaatatatttttaaaaatctaatatgttattttaaaatatgcagttaatatatttggaattacttaaaatttatatttagaaaatgtatgtattttcagcattgctgtagacaaacatctatataagactgttcaattgattgttgtcttatatcaaacaacttttgtaatactcatttttattgttaaaatattttataaattttaaagaatatgataaaaaacaaaaggtattgtaagttatggtggcggggggggggtggaactgtctggggggagttggagtacaaaagggaaagaagaatgtgttgtaagtctatttactcaaaatatgtttttaaatgtaacaaatacagataaattgaaattatgtatcttttctcttcataatgcaataaaagttaaagaaaaaaagaaaattatgtgtattttgaaagacaatcttaaaatggagttaatagtgtcttatgtgaccttgaaagaatatccctgtcctttagtcatattctcaagttttaaataatctagaaaaattttactttgctaaaatactagttcatcaaaatacaaaatacagaatgggctgcaggtacagaatacatttaattatgtatttagactatctttctgtgtagctctggctggccttaacctagtgatcttgcttcattccctctagtggtatgattacagggtacatcacacattctaccccagtgtactgtggcttcccatataagtactatctctgtgaacaggctagcccagtgtttccattttagctaataatggagagacttcctatagctgtaacccaatgagcagataggctggagatctccaagtggctgttgaagggcctccctttgccgcacaaagctgccactgactccagggactactttgcttcagtcagcatgcctgttttacccatgacatgctcccttactccacagaacatgtggatccactcctgtgtgtgatgaaaggacctcaagagatttgatgctgattctttccaatattaagatgtccccattagtaatttcactacataatccacatgaactagtttcacaggtcaacagaggaaattgtgtacctgcctttctggtcctccttagaaatagataactatacttgtgcttcacttaagagctcttaagaatgcattccaccttcaagagcttctagggtggggtcaggtggttactgattcacttcaagccacagaacgccccaagacatatattgtagtgacaaatttgatggggtgtggcttaggtttcccatccatctcttattttctggagtttatgatattacaagtaagaaaggttttccatttgctttgtgtttggggggtgaggggcacttgttgaacctatgtgctctacatgttggctatatccacagtccttttaatttttaacttaatttggttcttgctatagtaacctgggattgccttgattttagtctgtgtagaaggcaggacttgaactcacacttctttctacatctgtctaggataaactaaagtatatatccacagtattttagctccatttttgcccaagccctggacatacaatagtaaaagtcacacagctgggtagtagttttggggaggggcattgaacatctgcagagctgattcattgattagagtttaagtgattattgagcatgttccaggactagggccaaattatctcgggctatcttcagccttccaatagccattcattcctcaccactgtgtttgatctaatatccttaagactctcatgtaagatccttttttcaatgtacagacttttaatttctcccacttcaaaagctaagaaagtcctttgatagcattagagatgcctccacttggttgtgcctgccaacaagatgtttccatcagggcactttaaaagtaactgactactttctttgttttgtcaccatattggaacgtgatgtttgggtaggtatcctgcttctgtggttcttacccaggatcactcatatttagctccaaaaaagactctccttttgagatgagagctgtgtatctgcatcaacagagcatacaacccagttgtggagataaacatggctaaatgtaagtcacagttaaaggttacagatatctactctgctgtactaagtgcaagtcacagtgacagaggttgaggacttctttttttcagaagttaggataccagtcatctgcaacaactgttttttaaattttgctacatgaagtgtttataagcatatttttatttatttactttacatccctgtatcagcttctctttcttcccagtacctcttcacacagaccctcccccattaatcccctctcctttgagaaagaagactcctatgcacccactcctgcatatcaggtcgcttcaagactaggcatatccataccctctcccactaaagccagacaaggtagtccacttaggaggataggatccacaggcagacaggcaacagattctgggagagtccccattcctgttgttggggaataagctgctct

SEQ ID NO: 26333 - DNA, 1161 bp, Mus musculus
ccagataatacatagtgtgggaaggcatctcatacaacctgttccttttactgacgtgaaaacaaaggcttatataggtacaataattatcgttggtgtcaaaagtgggtttggaagttaaacctctcaattgtttttttttttttttctccttttgattgctgtggcttacattcctctgtaagtaattaagacaactaagcatctggaagtcataatccatgaaaaattaatttcacctgctataaggatgctgtctacacactgtgtcctatagtatgaagcattgaagcaatagtcttctatgctattactgtcctaagaatcctgttgttctatttccagttccatccctgatagggtccttatgtgtcccctctctcacctcctcagctgtggtcatcagttagcagtgctatttatgtttgtcatttgaatgttttttctgcctttgtttcatttctactcaatggtatttgaaaactaatactgtttattgaagaatttctgctacctagataatcaccgtttttacttgttcgtggaaactattcgggaacttgttttccaagaaggtcttatgggaaaagattgtgagatcagggctgttacctatgatatactcatactgttgtgtttttataaagcactttacattttacatagtacattgattcgtgcttttacttgttctttcattgaaccacagaattaattttcctatgtgttaagcacctactgtgtggaagttattctgcagatcttctgatacaagaaaacaaattatatggtgttttgtttcgcacacacacacaaacgtgtgtgtgtgtgtgtgtgtgtgtgtgtgtgtgtgtgtgtaaactgttcagagggctgaagagatggctcagtggctaagaaaacttgctaattttttttttcagaagaccagagtttggtcaacggtgttcaaaccatctgtaacccaagctctaggggaactcacgtcattttctgttctccatgagtgcctgtactcatacaaacatacaaacacacacatatatataatttaaatatgaacaagtctaaataagtagtttagggaataaatataacattataatacaataagattttcaaacacaactttgcaaataagaaataattcaatgaactatt

SEQ ID NO: 26334 - DNA, 1168 bp, Mus musculus
tttttttaaagatttatttatttatttattatatgtaagtacactgtagctgtcttcagacactccagaagagggaatcagatctcgttagggatggttgtgagccaccatgtggttgctgggatttgaactccagaccttcggaagagcattcgggtgctcttacccactgagccatctcaccagccgcttaaagaagagtttatcatttgttaagttaacctatgtcctactatatcatgttattgggccttaattgttaatgtggagagttgaggtaactttaagttcactcacatgttttttccataggatatggaatatatcctatctcggtgccagtgaagagggccctggcagggttcatgagttcagtgaaaggctaatgaaaacagtgcctttgtgaacccaccctcttaagtaaagaagattggataacaagtttggtgtcagtttctgtagatcactgtaaaatgcagattcataattaagtatgtctgtgatttttgtgtcatttttgttcttgtttctttctcccaagacttgctatatatgtgatgaacaaggacgagaaagcaaagcagccactggtgcttgcatgacatgtaataaacatggatgtcgacaggctttccatgtaacatggtatgtttccctcattgtaaagaaataaaatcggcaaacacattacataacatgaaattaaatatctatctacagtttttctgttcagtgctgaggatcaactcagtacctgtggatgttgtaaaagtgttgacccagctacatcccagtgctcttttattgtttttgaccaaaaaagcatatgttgatcttgtttattgtgctgtgattttgaagcatgtaagaattgccaagaatttttccttttaagttgatgaagttttacccagccctggtggtaaaatcatgtaatacctgctactcaggagttataggcagggaaattgccacttcaaggcctgtatgggctacagagtgagttcaaagccactttggacaagctcatgagaggagatgtgtgtttttaaaatgctacagtaagagctggtgagatggcctcagcaaggaaaggtacttgcttgccaagctcagtgaccagagtttaatccttggaccccacatcacatggtggacagaagagcca

SEQ ID NO: 26335 - DNA, 1161 bp, Mus musculus
gatatttactggcccttaaatttggagtcttcattctcttctataactattatccttaggtttggtcttctcattgtgtcttggagttcctgcatgttttgggttaggagctttttgcattttgcattttctttgactgttgtgtcaatgttttctatgatatcttctgcatctgagattcaatctcttgtattctattggtgatgtgtgtgtctgtgacttctgatctctttcctaggttttctatttttcagggttgtgtccttttgtgatttctttactgcttctatttccagttttagatcctgcatggttttgttcaattccttcacctgcttggttgtgtttttatgtaatatattaaggggttctttgttttctatgtaagggcttctagctgtttacctgtgttctcttgtatttctttaagggagctatgtatgtcctttgtaaagtcccctatcatcatcatatcagacacatacacatactttttaattattggtctgttaatttttatattcttgctgtgtctctttgattctcttttaatttcttcaaagttttttttttctaccttttagtatattttacttttgctgcagtagatactgtggccccgtaacaggaaccaaggtaaataaatagatagaccttaagtaatatagtggcgtaaggaatgggcagagaaagctttctatatctgtataattgtcttagtccgtaagtctttctgtgacctgaattctaaatttcacaatccctttctcagctttaaccatcccttttcctctctagagaggagacaatggctgtactgatctgagttgctctccactcgtgctcctgcctggccctcgggctgcaaagtctccatgccaacttgggggctctgcctccccccccccttccccttctgaaagttcagcatatctgggtatagcagggtatagctagctggctatcttctaagatagaacttgttaagaacagaatgctttggactgggtctgacaacatgagttgatttccatggtggatggaaagaaccacagctttgagaacaatttcttgtgacctctacacatgtatatccaacttagcaaaccccaccccaccataaatcaagaacattaaacaaacaaaaaactagaagagaat

SEQ ID NO: 26336 - DNA, 1114 bp, Mus musculus
gtttttcaggaactccaggcagtgtaaagtcatcttctggaagttcagtgcagtctccccaggacttcttaagctttacagactcagatctgcgaagtgacagttacactcacacccagcagccatcatcaaccaaagatgtacataaaggagagtctggaagccaggaagcggcagtaaacagttttagctctttagttggtcaccctgtgacctcgactgttatttcacagcctaaaagctttgacaattcacctggagagttgggtagttcgagcctccctacagcaggatataagcgggctcagacttctggtatagaagaagaagctgtaaaggaaaagaaacgaaaaggaaataagcaaagcaaacatggccccggccgacccaaaggaaacaaaaatcaagaaaatgtttctcacctctcagtttcttctgcttcaccaacatcgtccgtagcatcagctgcaggaagtgtaacaagctctagtcttcagaaatctcctacgctgctcaggaatggaagtttgcagagtcttagtgttggctcgtctccagttggctcaggtaagggtctgtgccatgtttgcccctcaatcactccgcagccctttctttcacgactccaaagagttgtgaacagttgttctgagtgagctctgaagtgccgctacatttaattaagattgacatttgttcatttttatttttttaagtttattttattattatttgtttttaaaggcaagggcttattaagtagcccaagctggccaggatcattctgtaaccaaggctggcctcagagtcttgatccttctggatcagcctcccaagtgctgggattgcagttgtctgttaccatgctggccatttttagggaggagatcgcatatactgtagcacatgtatatactatgtaggccttggattatcaggtggcaacagccttcaccctcttagcgttctcatagaccctagattttccatttcctagtgagaaagaaagtaccctacaatcctagaaaactatttggtggtgtaatttttagcatcaatctcattttacttagttaactttatataaacagctttattagtcatccattactta

SEQ ID NO: 26337 - DNA, 1207 bp, Mus musculus
tctatacaaccctttttggattctccttccccctcctcctctttccctttcctctgctcattgttgacagggtctcatgtagtctgtgtagttaagggtgccataatcattagccctgcttctactctccaaatactggagttacagttgggggctatgtgtctggctgtgttttcattatcactgtttccttctttatgatgccttctacaagaaggaagggtcagatgtcgtaaggtatacaatacccttaaatcatttattcttagcttacgttcttctagattagtagggtgtgaagatatgttgtgatttagagagtggtcccagtacttaaaatccttagttttcacatagacaccacttaccagtacaagaatctgtaaaatacagaaccttcttcctccagactctcctctgtttgatgcatgcatgctcaatgtaggagattatcatcaggtttgtttttttgaaaatgcgtactataaatgtatcccgctttggtggaatgcaatctaaacatgagataaatatgtttattaatgcaattttgaagaaatagcattaagattttgtgatctgcaatgggaaagagttcggagtaaaggaaaattacctttgatggatgagctgtgctgagcatagcatttgacctgtctacttatagcagttagcgatttggtagagctaatcagtccgtcatttccagtctcagatacacatttagcacaagtagtcagctacgcaggctgtgttagtatgttgtcatccccactaaggtgtggctatgcagactgcatttgttacttgtttgctgctttgataaaacaccatagcaaagagcatcttggggaggaaatggtttatttcagcttatatctctcagatgccaaggtattatccaggaaaatcagtgcagtcattcaaggacctaatgcaaaaacaaactcagagcccttcttcctggcttgcttttcctggcttgctcagccggtctttcatagcacctaggagtactcccccagggttgtcccaccctgctgtaagctggtccttcccacattaatcctcaatcaagagcatgctccataggcttgcccaaggtccattgtggtgggggcatcttctcaattgaggctttttccctttccagatgactatctttagtcaagctcacataaaactagccaggagtcagactgcaagg

SEQ ID NO: 26338 - DNA, 1191 bp, Mus musculus
tcttcctggcaactagaaggactccccacccccaccccaatatgtcctctaacaactggatggacccccaccccaatatgtcctcctaatagtgccatttcttgggccaagcatattcaaatcaccacagcagaataactaatttttcactcttgttaaagtgccttttccttgtttatcctagttattatggaatgcatttttatgtgtttgtgaacttgtctttgtaattgaactatatattcctggtgaacacagttttatcttgtttttcttgtttccagttttatttctgctctaactcatcgagtttttcttagtcattactaagtgttaactagatgaagggacagggaaatgaatgggtggataaaagattgtgagtcagtatgccactgccacccacgtatctttctgcgttatcatttctgttctcttcctgatcttgagagtcctttcctagagcttgtgtgttataggattcagtttcattgaactcaatgaatgttagattgatttagatcaaaagttgtaaaacttgtacaagatggaaagagaccgatgttgagtagagagtagtggtggggcatagcggggaggacggcctccatcaagagcacttgctgctgagttcttgttttatgtgctcctcttccatggacagatgtgcaacatgtggatttctgctgcctggagaagttaaaagaggacatcagagtatctgggactggagttctaggtagttgtgagccattaagtttgcattgggacttgaacccaggtcagctacaggaatagcaagtactcttctacgtcatctctccagtcccacccccccccccttttttttttctttttaaataaaaagagtagatacagaagattgagaagatcttacccaagtgtttgtcaggttggtgagtgaaaattagacatctccctttaatttttattactgtgaaaggaatattttgcagtcagtattttataacaaaaacccgagtttcataaatgtctcccaagcaggattattagattgcgcttggtctgggcagtctatgtagacatcctaatgcactgtccaaacagccaaccttctaagtctggcggttggtgatcagtgctgcggagtgctggatggtagttttggctttcatactgtgccgataatactacttacttaacctagaa

SEQ ID NO: 26339 - DNA, 1144 bp, Mus musculus
tgttagagagacagacagacagagacacagacagacagacatgcgtgggccagagctgatagtatgttcctctgtcactttgcactcactatctttttccatgttaatttttgctgaaccttcagctcccagttgtgctattcccagtgcctggggattttgaggatcaagttagggtagtgattttagcaggcatttcactgaccgagccacctcagccagctctgtgatactttaaactacagccttccttcctacggcctaattaacactagttaatattagttacttttaatatttattaatattctctctttgtcctatttaaatcaggttttcgtgatttcctctctccttttcctccactttctcctctcttcctttcgtggttcctatttaggtttggatgcttactgacacactggagaaggaaatttgtccaggagactgtcacatggatcagaagagttttgcaacaactttggcctcttattatgtgtcaggagcattacccactttttacaaactgggacattgacaaaagtgacttctgcattggcatgtgtttctgtggggtagaatccttcctggctagggtcagcctctttttctctgtgcacgtgagtgtgtgtgtgtgtgcgcgcgtacgcatacacacacacacacacacatgtgacagctagtatgcagggggtgctcttggtatatgccatatgcatctggggtcccctgtgcacacagaggctggaggagaccatcaggtgccctgctctctcactcttagcactcctctcctgaccctagagagttttgtttcccgtgagccttcagttcccctccccagctctcacccctgagagagagtgctggagttacagatacatggcttagattgttctttctaaatgaggtactagtgatttgcactcagcttctcattgttacaccatacggctttgacacatctgtcgatcctttccccagaatacagcggtgccccgtagctgctagtgtatgctgaggttgtcttttctcctgcttcactttctagctcttctcgatggaatatcatctacatcctcatttcctttttcctcgtggttttacctgacagaacaatgaaaaaaaaagtctttatcaagtt

SEQ ID NO: 26340 - DNA, 1149 bp, Mus musculus
tgctgtagcaaccatcagtttccaggcaactaaggtacattgacctctcagttgagctgaggcagatctacttcaatttagatgcccgagacaatattaatggtgttgaatgtgaaatgttataagcagtctgtaagggaaaaagatacaaaaatattttgatggaattgtaagaactcagaaaaatggtcattctgtccccttctgtctacttggtggcagcactatttcagcttaacctttatgtaattcttatctacttcatgcacagtccgttgggggtaggtagttaattacacatgatttaaaacaaaacactgttaaaaggtagatttaaaatatgattctagatgtcatgtcacaattattaagaactgtgcaagagggctggagagatggctcagtggctaagagcactgactactcttccaaaggcccctgagctcaattcccagcaaccacatggtggctcacaaccatctgtagtgggatcagttgaccttttctggtgtgtctgaaaacagctaagctacagtatactcatatatataaaatgaatctttaaagaaaaaacagattgtgcaagaacatgaagaaccttagcatgtgcaagggacacatggttcacttactagcagtaccggaaagaaaatgagataaagcaccaccacccccttacccaggccccaggcgttctctctctctctctctctctctctctccctctccctccccctcttcccttctcccctctccagatagatactttaaaatgtgcttatataattaaatgaaaccagaattttagtggctaggttggagctacaacagaaatttagggttctttcttactctttctgatcctcagtgtaagtgaagtcaatagactttattttgatgccttagaaattatcacccagggaagtgatgaagaaggtaaaagtctggttactagacattaaaggtgcaatgataggtggtttgggcttgtgatggtttgtatattcttgggccagggagtggcaccatttggaggtgtggccttgttggaataggtgtgtcactgtgggtatgggcttaagactctcaccccagttgcctggaagtcagtcttccactagcagcctttggatgaagatgtagaactct

SEQ ID NO: 26341 - DNA, 1156 bp, Mus musculus
gacggatgtgttgtgatccagtgcccatgggtcatgctgctttcttttgctgttgacaataaggataattttggataataacaggctggccttggacgctccgctccgctgctcctgattccggttctttaccttaaaatgacacatcttagctgacttcgacatgggacactttgcacatgggacatcaatgcacatagcaaaagtgccttcctatccagcaaacttagtaattacactttctcttttgaaaatttattttcctgtgtgaggtgagatcttcctgtgtagcctcaaacttgtaattctcctgcctcagtttcctaaatacataaaattttttaaaaatcagactttcctactttagaatatgccattaggcatgtcagtcattgtactgcactgccttttgttttgatgtttatatagtgggcttactagctgaaggtgaaagaaaatgccaccgtctaaatttgaagctatcaagaagaaatatgaaacctttggcacagcagcaggggcccctcctttcaaaaattttttctaataagagttggatcttcctgggcagtggctggacacatctgtaatccttgcacttaggaggcagaagcagccttactggtctacagagtgagtttcaggacagccaaagagaaaccctatcttaaataacaaaaacaataaaagagttggatttcttaagaaacttggaagtgaaaaggtattccggcttgtaaattatagaacaggaatgtaactcaggccgtcaggcttggtggcctcacccttacccactgagctctctcacagtctgagtgtcatatgttttagtttattgtgttttcagtgtccatgttattaaattcatagtttagtatccagtgttgatctttaggttgaatttcacttatctttcaccgtggactaagtgatgagtgtgtgtgtgtgtgtgtgtgtgtgttgcacatgtcggtatcaaaaggatcacctgtaaaagtcagttttctctactgagtggatcccaggattagaactcaagtcatgaagtttggttgcaagggtcattatccatccaggtattttgtctgctcaattattaaacaagacttcatagcataaacttactgactctaccgtatatccttaagaagag

SEQ ID NO: 26342 - DNA, 1172 bp, Mus musculus
taattcccttgaatttgttttcacttcagaggatagtttagtggtaaaatttatttaaatgtaagatttcatttttgaaataaagctacaacattcaacacaaagacaccttctccctcttcccccaccccccagttaaataagtgttagggataacaggattgtgggcttcagcatctacttttaattagcctttaatacacatactataattaatagggcctgtgtttgttctcttcccctgtttctagctcctcctcctgattccctgaacagcagtaagagcccacatataggaaacagctttttacctgacaattctcttcctgtattaaatcaggtaaacttttttgagagtggttaaatgttcatttgtgtgttttacttgcaaacattgcaccttacattgaatgatttaaaataatgctaaacagtcttgctgtgctctttgcaacttcagtttcattcttattacactaggacttgacctccagtggacaaagcaccagcagttcttctgctctttctactccccctcctgctggccagagtcctgctcagcagagctctggagtcagtggggttcagcaggtgaatggcgtgacagtgggggcactagctagtgggatgcagaccgtcacatccaccatcccagctgtgtccgcagtgggtggaataattggagctctgccaggtaaccaactggcaattaacggcattgtgggagctttaaatggtgtgattcagactccagtcacaatctcccagaaccctgcccctctcacccacaccagtgtaccacctaatgcagcgcatccaatgccggccgccgcactgaccaacaggtaagaggcttgcttcagtacgttgttgtggttgccgttgttattattatttggttttcttcatgcaacatgttattagtgttgtctttgttttgggttaggattttttaatgtattttgtagatgttctctaaaaaaattaagtgctagctactcatggattgcttgttttttaaattgatgtaattcaattaaaaatagatttcagtatcatattaaatatattttgttgaaaatgtcggtcctgatctgggatatcaaacttaaaatgttacttttccttattacatacatgtatactaaattttgaaaaggcatttttgtggc

SEQ ID NO: 26343 - DNA, 2646 bp, Mus musculus
atccaagggccagagggacgcctgcaaatctgagtactggtattaccatattcattgctttgagatttttctctcgttttaaccttcagaaacattagttttcatttagtaatgaacactggttccgaatgtgggctaactgccgagtgctttctgtttgtcctctcctgtgtgcctgcttcctaagtgtgggagctgttaccgtgcatcttgcccgctttccctacgaaggagtctatgcttatatagacatttgacacactttattgtgctttctgctcatggatattttccacattaaaaatagattaatttttagtggaagatccacaataaagaatgagagtaaccagcttcttgggggggggggggcaacagcacataagctcagctgctcggtggctaaagctggagggtcatgagtttgtggacagatatatatatatgccccatatctatccgcccctcccttccccgcctcccccctctccttctcaggcccccctccccaagacaaggactctgtatagtcctggctgtacaggaactcagtatgtagacaaggctggccttgagctcataggacctgtttatctctgatccgttcttttgggattaaaaacaggcacttaccacaccttgctgagacctaatctcaagacaaacatcaaaaccaactgtaagctggttgggagggaagttaaggagtccctgccaggtacaatgtcatatgtgatttcagttcttgtaggtgggaacccacttacaataggcaagagctaagagaggtcaagaacatatacgactatggggtcaactatggctttttcctagttcattaaaactcagtatttgccctcctttgctcctcctatggaaaggtggatcaggaaaggtgatgctacatccttagaattgtgtccaaggatgggctcgccaccttggtgcctttccatgtgcgcagtgtggtgatataaataaatccatggtcactctggggaagactagctgacttgaggagaaatcacttgtaccacattgaaccagcgacagtctcagagggtactgtctcatcttggccaacattggttgaactaattaatgcttcttatttctgttttgaactgcagagacttagtgataaaactgggcctgtagctcaagagaaaagttgacacttgaaaatggccagaactcgcctttcctgctgttctgtgcttcactggctgctgcagtgtctgccacagctatgaagaatggaggcgggaacacacaggggaggatgccacacactcccttgtaaggctctgattttcttgttgctttgttgcactgaaatggaattcctatatacccatcccctaccaaagtgtttgaacttcggaagaaaaattaataactttttgtcaatgaaataattcatatgcaatgagtttatcaatccaagaaaaatgtaatgtgcttgctgcacagctagttttgttataaattggaaacataaaactaaagactattctatttggaaaccacttggttatatcataaaagttggaatataactatcttattgggatagagtgtgcttgttccacggggcagatcttaagttttgagaactgtctaatatcttctcttggagttgtattcattaaatattgttattatacagatcctcaactggggctttgcaaatgttttaaagaattcctttctaatgagatttgtccatttggagatcaaattaggatggagacaactgcttctgctaacagtagttttcttttgcaaaagaaaaaaattttgtgtgtgtgttaaaacctactcttgagttaagggagctgtaaggctgctgggagaactagatcaattggatgagaacagtttctttcagaaagatacaccaatgtggaaactgctgcaaggttctagcatcaaattgcctgttgggacctccctggatagaaagggctctgtactgccgggcaggccacttgtgccagcagcttccccgtgcttctgtctctgttgaacctttctgtgccaccagagagagctcaggcaaactgactgtccacaaggaaacaagtagacctgggaagagtctacatgcttgcttatctcatcagcctcaaaccacccactggaacaggcacaccaccacagttcctaaaacctgtcccacagccttccgacttagccatgccccgagtagccatgctcttgattgtgacaatatggcagcctagtaggttagacagttggggatataatcattggtctgtttctgaaacacatgaattactggtgggaaaggcccaactgcagttcgacctccactgtgtgcttagctggaagaccatgtgcacggcttagcagtctgtcttctgtgacactgcacacctcttacctcacttctgtaaataaggttgtgaatctgttttgtaatgtgaaaaattcataagataacattgatattttgatttgtaatatttctaattggtagatttaattgaaaagtaaaattaatttatttttatatgttcaggggaattttaaagaaagtcaaaccttttgtagataatttaaaagaatcagtgtggtttattttatatatgtaacccactggttgttattctgtaacaattt

SEQ ID NO: 26344 - DNA, 1174 bp, Mus musculus
cccatgcatcctatcagatcaccatggactaaggctgatcttcaataacagcataaataatagaaagccaacattcatgtggaaactgaacaacactcttatcaatgataccttggtcaaggaaggaataaagaaagaaattaaagactttttagagtttaatgaaaatgaagacacaacatacccaaacttatgggacacaatgaaagcatttcgaaaagggaaactcatagctctgagtgcctccaaaaagaaactagagagagcacacactagcagcttgacaatacacctaaaagctctagaacaaaaggaagcaaattcacccaagaggagtagacagcaggaaataatcaaactcaggggaaaaatcaaccaagtggaaacaagaagaactattcaaagaatcaactaaacgaggagctagtttgagaaatcaacaagataaacccttagccagactcactagagggcacagggacagaaccctaataacaaaatcagaaatgaaaagagagacataataacagatcctgaagaaatccaaaacaccatcagatccttctacaaaaggctatatactcgacaaaactgaaaaacctggatgaaatggacaaatttttagacagataccaggtaccaaagttaaatcaggatcagattaatgatctaaacagtcccatatcccctaaagagatagaagcagtcatttatagtctccaaaccaaaacaaagcccaggaccagatgggattagtgcagagttctatcagatcttcaaagaagatctaattccagttctgcacaaactattccacaaaatagaagcagaaggtattctacccaattctttctatgaagccacaattactctaatacctaagccacagaaagatccaacagagaacttcagaccaatttcccttataaatattgatgcaaaaatactcaataaaattctcgctaaccgaatccaagaacacattaaaacaatcatccatcctgaccaagtaggttttattccagggatgcaggcgtggtttaatatacggaaatccatcaacgtaatccatcatataaacaaactcaaagacaaaaacctcatgatcatctccttggatgctgagaaagcatttgacaaaatccaacacccattcatgataaaagtcttggaa

SEQ ID NO: 26345 - DNA, 1213 bp, Mus musculus
gagaatcaaggacccattcagcaattggccgcaagcctcgcaggacacgtcgtaacgaaatgttactgggacaatcgcactgagtaaagtcgcaacgcaaacagggtttgaatacgtgttttagtaaaacctgaatctaaaaagcaaaaggcacgcatacagtcagacggcctcgaagaggcttagtaagtaacgtaaggtcagcgggaaaaccgcaaaaacagaaacaaaggaaaactcagcctgcaagctgaccattacaagtccttacaaaaggtaattaattagaagctgtcatcttactgcaacagaaccttccaagctggggttgggaggaggggagagccacagtgttttaatccacgcagtgacctgtaattctcctccatcttgaggcataattttccaatatgcttcagaagtagagggggaactcgaaaggattaagaacctttagtaacatttctgcttcaaataggagtcaggcagtaggaaaaaaatgtgtcacagaacctttattattcttcataagagccttgcctggagcagctaggagcgccaaagtctctgtggcgcaatcggttagcgcgttcggctgttaaccgaaaggttggtggttcgagcccacccagggacgcctttcctttttctcttttaaacaaagcttgtctgcggctttttctaccctgtatacttccactgtcaaattcaaacaaactgaagtctaacgttccgcatctattctaagctatctttcagaaatcaaatttgttacaatgaagcccagcttcagcccttttggtttttccgctctaaagtcttagatatttatagaaaatggaataaacctgaaaagaaaacctattatacggtctcataactaaatttctaaaaaaaacgaaagaacttaaagcaagaaaaattaaagggaaagttactttcatattttgctcacacattacgagtgcacaaagtgcccccccccaatagatactttaggaaaataaccatagttacatcataataattcagtcttgagtacagattataggaatctaaagccagttttaagaaaaaagtaaagattggtgtatcagctatcagtaggtacttgtctacagcacaggtttcttgagaagctgaagcaatggaataaccctaacccaagagtttgaggtcacctgtctatttaaaacaaggaagaaaaaggaac

SEQ ID NO: 26346 - DNA, 1205 bp, Mus musculus
gtggccgaaggcaaacccagttatggtttatgtttagccattgtttaggaatggaattttgttatgaattatccctttaactgaaaccctcagttttactgtttacatggttagagaaacagggatatttttgaatctaaaaatttaatatacagcatgtgatttttgaagtttacatgtaaagccattttgcagtgtagggaacataatgtttgttgtgttttgagatatgtcttgcagttgtgtttctgagtgagtgttttgttgagagtacttagtagacagtctatcacataaaagcaaaaggattttgttcctcaagatgtgtatttatcaatctagtggggttttttttctataaaaaaattaaactcaaaatctggttatgtaagttcattgccctaaactgtgctgatcgtgtgtaactgagattaaaaaacaaaacaaaacaaaaaccttccagcatcaattatgtatcttccaacttccctgcattcctaaaaggcctcaagttacagagtcctagatttgcttagagtccattaccaacttacacgctgtttggcagctgtgcctttaaaagcccctgtctcaaatgtgagatggtttctgtaggcagttttagaaaggaaaaaatccacccttcaataattacaagtcaacaagtcccctgccaggctgccttcccagtcactttccttttggcctctccaggtccagctgtgcccaacatgtgtgggctgccttctcagcatctggaagccagcatcagcaccatctgactcctgtgtactgacctgccacagatgcattagcggatgatgctaactcactgtaacatagttgtacacatctgtacctgatgcatttaaaataaccagttgactccgtttccgggcactgttaactgtggtgtccgatccgtttgagtgttctgaagctctgctcttaacctttgatccccaaacttacaaacccgagaccctaaagttaaaaaaatgaaggtacatatacatgatctgagtaaccatttcctctgtggccaatctgtatgcttttagaagtttacaaaactgctttggtttttgtctgtaaccatctctgtcatcccaataagctgtttggacaagagcgagaacagtgctaacagtgtgcgctcgagtcatgatccgggctttacgaataaagcactttgatgactctct

SEQ ID NO: 26347 - DNA, 1167 bp, Mus musculus
tataccacacatcagtgtttccatatatgatgggcctcatggatgacaacactctaaaggagactaatggaaccgaaaagtcaccactgccagagatgtagcagacagcctaatataacagtgtttcacacacatgtctgatacttgtgtaagcaaacatgccatgctaccaatggtgtgtcaaaattcagtagatacaataagtattaccctcttgttgaaatattcactgtagataaaacacaatgtatgtcagcagcaagctcatacatggtgtgtttaaagtctcttgatacaatcaagaagccatctggtagcttgacctagatatcaggttttacaagtttattctagaatctttgccctgtgacaaatacctttcatgacccatctcccaggatgtaccttggctagtaagcagtgcttgcctgtctcattctgttctcaactacagtccttgggggttaaggggaaatactctgaagatatttatctagaggcttaagagctgagctctaggtccagtctgtgtcccaaaaaactcttgaaccaagatcatatgacctaaggggagggtgtgagtctagataaatgctcagataggagcttagaaaatctgcattgtattggatgaaaggtaggctacaaggaagtttattttggcacacacattgaaaattagatttaattaaaaaaattccttgcacctaaatgttgatttccatgtacaaacgaaaatgtccattgactattgtagttgactaaagcccattttttcatagattaaaattctccggacccctacatatgcttatccttcccaatttattagtatccctgatgaaagtggtactttaaaatcaatagcctgtgttgcacattcgtgtagcctggagttcatagttcatcataggctttgctctcagtattatgcttcctgtgaattttacaaatgtgcaactacatctatccaccattgtcattttgtacagagtaatttcaatgtcatgtaagtcttaaatatcagctcttcctatccccttcttaatagctgctggcaaccactgacttccattcttctgtattttacagaatgcatgcagttatctatcattttactacgtaacatgagtctttccctgtcttttcatgactagatagcacatt

SEQ ID NO: 26348 - DNA, 1106 bp, Mus musculus
aacagccgaggcatggaggggggtttacctgacagctcggaggacggatgagtccgaagaccattagatttgtaaagtttcagaagatgaactaggatttcttctttcgcctctgcctcacctgtggagtgcttggtacaggtaaatgcatgtgctttttttttcctgtttttttttttttttttttaatttccagttattgccaaaaggttatttggaaaccctgtggtctgttgtgagcattgttcacttggcaggaagaatggagtctataagcatagctttttcacacggagtgttccagctttggggctatcttaagggcttttttttttttttttttggttgttgttgttgaatgaactgagatttttgaatagagctgaaaaacaagtaatgtattacgtattatgctgattgtgcccatggagaatgctgcagggacagacgacacagagagggactcacaggatgactgagcatcaagatactgtatacatttgttgactgttcccagatgctgcgcgcatgtgtgtgtgtgtgtgtgtgtgtgtgtgtgcacgcgtgtgtgtgtgtgcatgcacacgcatctgaaggtaagactctggtaattctggattttcattttgtaaaatatgaaaactaaaatctttggaatatctaggaaataacctgggactcagatttataaacagggcccttctgttttcaaatgtgcttgcatgttttgtttttttgttttccttcataaaaatgttcgctaagggggagggtataggggactttcgggatagcatttgaaatgtaaatgaagaaaatacctaataaaaaattggggaaaaatgttctctaagactggaaaaaaattaactgtgctggagttattagtttgggaacttttaagaaactagctgtaaatagcaggatggatgaaagaaagaggagggaaaagttaatagttagaaagctcgcttccagacagaagcctggtcacctggtagtggaggcaggtggatggccctgtagccttgatgggtacagacccctcaattggcagcagaggagacatctcctgctgttaactgttctatgagcagttaagctcc

SEQ ID NO: 26349 - DNA, 1164 bp, Mus musculus
agaatgtaagccttttagaggagtccaaagttggtacatatttttttatcatacatagtaatacataaggcctgtggtttgggggtcatttcatattttaatgtgaatttcctcatagatctttacaaaatccgttgccttttcataaagctcctgaccttcacactttacctgtaactttatatgagaggaaatatggatgggtggattttcatttttctccttgatagaggtgtaagatttaaggaaacaggtctttctttttctcctcttctgtgatgttgtatcctgcctcctcttacttttattcctcctcctctttttctcttcctcttttcctcctcctcttctttctcctagttttcctcctcctatttctttttgatttttttttttttttttttggcattgtgaatgggacctagagtctgaaacatcctaggcaagtttacatcattgagcccatcttcagtcccaaggcagtgctttgagatatctaatcactcccctcttacttactgcttataaccaatgaaatacatccttcttgctttatgacaacagtgtggcctcacaaaactggagaccttcagagctttggattctggtgggaagaaataaatccaggacacccttagtagagacaaaacaggcatcctggatcagctttttcctggggacaggaatctctgttgtgtctattttggaaaagagagtgcacaggcgaaagggtgttgagatccctgactgtgtgacttgtaagcacaaatgtaaaatgttaccatgaaaagaaatacttgccctgagttctcccagaaagaaatgagcagatcactttataggacctgtcagttctattagcccagagtccattggatattagcatctaggttcttgttctatgtgcatcatggtgggacattgcatgactttgacagtgcatagttactatacctcccattccaggttggttctaatttaagtaacagatgtgataccatgcttcccaccctgagttccattagggttagcaaatgcagacagtcacattggccccataaaactgatggcagggttcctatgactgtgagcccctacatcacactggatggagaaagcaaagatcctatcaggggagtgtctgcactgaccagtcattaacac

SEQ ID NO: 26350 - DNA, 1097 bp, Mus musculus
gctgggctctcagcatcgtcaagtcccgctgacaccttcagtgctgggctttggtcactttggacttgtgaaaaattcctggcaagctcatgaagtagctgtcaactcccacacttcacaggcaaggaagtgggctttgaactgctatggcctggattcctcttgccctgaggatccagagtgaatctgaaagtgggtttctacagcttcagagagcagggcagtaagtagccaggtgagatgggtggtgtaagcgatcccatcgaaagcccagtgttgtggtaaggatggccctgggtagttttcaaacatttggctgtcagtttgtttaactccttataggagccctttatacagttattgctgaagctcccagttgatgaggcagggctgaaacagttggcaattcaggttttgtcagttgatggtgatttacacaaagttctgcctccaatcccagtgttcatgaactgtcccagcatgcacaccagaaacaggagctagaaacggccccttcccaagcagcttgctccaattttctttaaaattggtatgtgggtggagcttatttggccaagtgaaatgtatgttaaagagagacattcttgctaggatttttgctgtccacatccgtgtatggtaaaactccacccatggtacatttgcatagcagtgaaaaaactggtatttcctatctgtgagtgagtcacactccctttcctgagcctgtctgtctgtctgtctgtctgtctgtgtgtgtgtgggttgtatctggccagctagttagacaaatggactaggctgcaattcaactgcacttggagggggcagcacctgccactcatgggctgggcccttttctgctcagagaacgctaaggtctggctgatggccacagctggacctggacatggagccttcagtctgctctccacaggaaaggccaaagaggaaaacaagccttgggtatttctgctgtggagggccccatggcgcagcaagcaggagacaggtacagaagtcacatgattctaggggttgtctcccttcccaggtgtctctgattcctggctgctttgtcctgaatgtgagtcagg

SEQ ID NO: 26351 - DNA, 1355 bp, Mus musculus
ggtcctcaggagcaattctagtttgggcctccagactccagtggaaggcagtatctctgtgtgttcctcaccacaccctaggccttcctgttctgttgaagggagatgggttcaattgccagatttctgtgagaattacagggctttcagatcatcatggagaaaattacttagattcaatgtcaccggggaaaaagcatattcttaatttgcctgtaatttttcctttaatggatactttggctccattttcaaagcacattcaaagctttctttcccaatttggcatcaaaattatttctttaaatgcctttaattttaggattattttctcctttgattgacataaagtgtatcattctcgaagggaaaatatcaacacatatttgaataagggacttaataatgctgagtttgaaatcacttacctaggagtgaaggttagcagctgtaaataccagggaaacaactccatataaccaacacactatgtgaaatttgagattttggatcatgagtgctaatttctgttctcagtataactatttattatttctcactaagagaataagactaggaatgattatactgtgctcatgggtcttttaatgtcttcccctgtgcagtttgttctagcttaatgtgttgctttgggcttcaatacgttcaaatgaagaatatgtcattctagtctgatccagccttctataagataaaataggccctattgagaggttcatgtatttacccccattttaagctggtcatagggaacacagaaagactaagccccatgacgatgctcactagacctggacctctggcaggaggggcttaagacaaagtaactgtcccataaatacaaatgctaccagggtaaagggtacttcctgcctcctcgcttctctccacatgatcaacaccctttctctacagatggcaatctgcttagagaatataatcagatgaggacagttaccaggaaaatcacttagtaatgttagtacccagactaagaaccaggagggctcagaactaaactaggctggtcctgatctgactcactgtgtggtcttagccacttagatggtttttggacttggttgtcatacctactagagaaatattcatattgcatgtataactgagtaatgtctgaattttctttcaactctaaattgtctctgctaagcaatcaattgtaaaaataatgtgttctaggctagagaggtggctcaacaactaagagcaagggcaaatcttcccgaggacccaggtttaattcccaccacctacgtgcctcatagccatctttaacttcagttccaggggatctgatctttcttctagtctct

SEQ ID NO: 26352 - DNA, 1201 bp, Mus musculus
tatatttttcggacttcatctctaggttgaattttttttttttttaaagatttatttatttacttattatatgtaagtacactgaagctgtcttcagaaaccccagaagagggcatcagatttcattacggatggttgtgagccaccatgtggttgctgggatttgaactcgggaccttcggaagagcagtcggagctcttaaccactgagccatctcgccagccctaggttgaatttttaaacaggaaagcctcactgtgttgcttaggctgaccttgaacccaaatatgccctaacatgtgacctctgatccctcacctatgatgacaagtatgtgcttgcatgggagctcatgtaggtagaaaaggattgatttcttcccaactagtcttaattgtaatatgatgggaagatggcagcttttcaacaatggagccatgtcagtttttaggctagatgtgtagtccagataatggcattttctggactgctgatcagttccctctgatgtctctgaggtggaccctaccacagctctaggaatcagtggcttggtggcagtcaccctgtaagtgggatatagttcaggatgtgctaccctgaggagcttatggaaaggctacaggcagctaccaaccagatctttctatgccttctctctgacttgcctgagcaaacggcatatctacaggacaccagtaggactggtggttgtttagggacccactggctgcttctcatccctatgaatataccttttgttctgtgagcctggtgatgagtggtcgctgctctgagaggctgtcttgggtaaaatgctctaggttgtattgatgctgcctcttcacctctgagtaaagctggtgaggagaagcagggtttccataaggcctttgagatgggctataatggaaaagaccattcttaggacagcactgtgtcaaaggagaggctaactactggcttccagaaaaatcttcatgttattaaatgaatgcaggtgggtaggattaccctcacaagttgaacacatggcactcttgtggtttgtgcttgcttacagggagagggagggactgtagttcgataagcaggaattttgaagttgcacagatctggtcttgaattcactatgagcttgatgacttaagagaaagctatttaatcccactgacctttgtcttcgaaaggtccaaaaat

SEQ ID NO: 26353 - DNA, 1115 bp, Mus musculus
tctgtaacattttgagggtctcttggataaccctgaccgacaactcagaagagggcttctcatgcttggtgttggtgtttttcttagttggtctttagctctaggaaggtacattgtcagacaagatgagaaatttttattttattttaattatatgtatatttctacatacttgcttgcatgcattacaggtatttttaggtagatcgttaatagcatgatgccttgtaactttttcagatattttcttgttattttatcctcctctaatggtctttattttttattttttatctatctatctatctatctatctatctatctatctatctatttatttatttttactttcttgccttccgcagttactccaggatatatattcatatctaaatatttggggctcaaagcctcaaatgggagagtatacacaaactttgtctttctggtctgggtcatgtcactcaacatgatcttttctagttccattcatttccctggttacaccctagagaaagatgtgtggatctggctgggtttagtggttggagatggagtttcatctcttcatgcctagtaagcctgaaccttagaagctctcttcagcagtaaatgccaaattaccttgtcataacacctttgggaatcattctgatgctaccctctcacacctgggtagtcagctacagtgtgttatagtcagctagacactattatttatttcattcaggtatacaatgtccaaagtagctagattgtatgccataattatgtccacttatttcagaaagtattaattaagctctccatttctagagcaccctccagccaatagaaatcctgtgttaaaaaatctctacctattaagtgtttactactgcagctgactgattcccctggattcattccctcagatccatgcctgtgccataacaggagccaaggtggctcttagcttatcacatgtggatggtggctggctaacatgaagtatgatgctaacccaagctaggagtcttgtgacagaaaatcaagatagagacaagcaggaagctttttgaacgaactcattcaaacatatgagtggcccttgaaggtgatctggctgttacccc

SEQ ID NO: 26354 - DNA, 1192 bp, Mus musculus
tcactcactcactcactcactcaataaataactaaagttgagttcatatagctataacagggtagggagaagagtagggatgaagtgggcatgctgacacccacctacagttaaatgtcccctcataccgttttaaaagcctgttgcaagagtgggaggtagacctgggaggccttagcatgaagagtaggaggttaatatgaccaaaatatattgtatgaattatgaaattctcaaagaattaataaaaatgaaatcagggttcaaccttcattattttcctccctaaagtttttggttatttaatacattgtctgctgagcgcgtgtcccggaacttcatgagcaggagggaggtccccttcctcttttgaaggatgcctgtttggtttgctgacataaatggcaacaggtgtgttaacaggcaaaacacaaggtaatgggtccatgagcatgaaagtctttcaaaaacacataactcaaatatccccttggtagggaagtgagaaatggagatgtgttgtgggtgatttcaaaagttaataaaggatatttttagaaaattgaatgagcctccaaagaatagatagacaatagtgtgtgaattaagttggccagaaaaccaattaaaagtctgtctgagtgtggtggggccccttcgtctttgtttctatgctgtgaagttaattgtgactgatttaagaaaatttctggaagggagtaaaggccattgtgttcattttggaggagcctcaaatatgggaacttcagagagagagagagagagagagagagagagagagagagagagagagatccctgctggggttggaaacagaaggtcagaaaaatctctggtcctgaggatgtctggaaggctgccttttgttcaaagaactcagcatgctaaagtgtgggggctccgagctccagccttagaaatacatgctcctaacctccatactagattagctgaatgggaattcaacctcaacaaagctcttaggtgattatggttcacaggaatcaaacatttatgtgtacatagcacagggcctcctcctgtgcagcaagaactctgaatgtctgctggatgactaatgaatgaattgcatagagggtgtggcccagaggagatcgtttcctatacaatccttttcagttttagaaaactgtagccccttctttgcctt

SEQ ID NO: 26355 - DNA, 1198 bp, Mus musculus
ttccatgaaaaatcaccccactgatattaggtctgccgtttaatgacggagtggtgtccatttaatcatggtgcctgtctggaatgcagcatcgagaaagtagggttggtgtctggctgctccttagttggcctttggggaaggagtagccacaagatgtccccacccctccgtgtgccctcaggaatttgcaaatgaggctctgtgaaaataagaactgcatcagcagcttcctctgggtaccgccagattttggaaggtggaccagactccagaagaactgctttagagagcagccctgagtaagcccggcagaggtcctgcatatctgtaaatatagactgaaaaaccaaaaaccatttaaaacagtagagaagggtttagtccagatgacgaccaaattcatcaggtgggggtggattgctgagtttatggcggttctactgcaaggcattggctttgatggtgattgctccctgtggtgacttaaagaacagaggtccagggaatcagagtctgcatcttggtgcaagaccggggaggggagaggggggagaaatcagccatctccaaaggtggaagccaccagtgtggggtggtgactgaaaggactcaggcccgtgcaagtgcacgcgtgtgtgtttgtgagtgtgtgtggtgtgttcactactgtgtgtaccataccacctggagccttcaggcttcagggaattctcctctgcctcccatctccttgtgatagcagaggaattatagatacatactacttctcgcaacctttacgtgggtctggggaatttgaattcagactcctgtacttgtttggcaagtgatttgcccattgagccatcacctggagcctaatatctaaagcatttcgacatttgttttcccaagtactgtcagtgattgcaacgcagtgctgtattgggctggagcgatggctcagcgattgggagcatatactgtctgcactgctcggaattcccagaatggatgggcacctgtgttcttgtttgcacaccttcacacagaaacatgtgaatccacttaattaaaaacaataagccaggcagtggcaggcagactttctgagttcaaggccagcctggtctacagagtgagttccaggacagccagggctatacagagaaaccctgtctcgaaaaacaagcaaacaaaaaaagagtgctttgta

SEQ ID NO: 26356 - DNA, 1100 bp, Mus musculus
cccctggaactagagttacagatggtgtgagctgccacgtgggtgtttggaaacaaacctggttcctctacaagagcagctggttctcataacagttgagttatgagtcaagttccatcttgatcatctctttaaaaggctctcttctaagtgtcttaaattagaaaactacagaaaacaacactatagtagccattgcaaaaactaagcaaatctgtttaatcattggagagatgacacagtatgatagataaggtcattaattgagtaagtcactcaagaacttctctatgaaatgagaacactataacgatgtaatgagttaatatttggaaagggtttaagatcaatgcccagcacctaacaagtgctatatgaggttgtttcaagttttacgaagaaatagttgcttctgtaattaatgccacttaattaacaaacatttttaaagaggaaacatagtgtataaccacacatcatttcccagagctaaccagtcactagaggctggagttgccatgctgatttcagtgtgtctgctgagtttgtggatgctcacaagcaagagtataagtgtgtgttcaatgtaacattctactaagcgggactgcactgcacacgtcctcccctggtctcatggctatccagctttatgttattgagatagacctctggggagagacatgattttccttcattgtaaacagctgtttcatattgcattctatgaatatgccaccaagaatagacacatgccaatggagctccaatggcttgcctggagcagagcctgttcatgaagtttcatcttgatggacagcaaagagagccaagtacaggacttgcatcttcaccctctccaaaggagtgggtggatttcctcatccagtgggcatttttctcagacctcaccatgacttgaagccattagattctctggctttccctgtctgatggagacatattaataatgtaagtgttttcatttcaaattgcatagtcaattatagagaccattctagcatttattggcctgtggagtttcttcttcactgacttgtgtggttattgtcatttggaatttatcactacccattttc

SEQ ID NO: 26357 - DNA, 1107 bp, Mus musculus
gactagtaggaagaagttaagccgtcctctgaagagggttactcactcagtgggcctatgtgcagcaaacactttgttccagaaatggatggttcattagccacttctttagagccttggatagcaaatccctctcccctctccaatcaacttcctgcttactagagggcattcaactcatcctggttcaccacaggattgggctgcctgtcaaactcctgacactgaattaccgccccagtaatgaagaagtctcggatgtgctgtgcagaagagagggctctggagcactttgaaagtgaaaggagctgtttatgaagtgacagggggaggagaccagagagggaggccagactgcctatcactgactcacatggttagcagggtcaccagaagccaccacctctaaggtggctgtcatgaaataatatgttaattatgtcatgcttcactcaaccaaagagcacttctcttttgggagtgagaatagccatggcccctgttactccgaggacagccccttggaacaaggaagacattgtagaagtcactcaaagagcagtgctgtgccctatgccattaaacaatagcattagaggtatagtagagctggatgtggctctcacagacaacgaaggccagcctctaaattccccttcctggaaagccctcctgtgacccaacaaaacctaccaaatgtatgccagatgcctgggagccaagcatttgcttccttagcctgctgaaagataacaaatctgtgctgattagattaaaaaatcaaaacaagggttttcaaatccctcctcctctttccaagcctcttagatggcatctgttacagccacatcatcaaaatctagtttctaatgggacgtcttgggaaggcagtggtgttggggagaccactttccccctcccttaataaccacaagcaatcggtgatggtaaacagttttttgggtgagcctgcaatgcaaactgcctttggacttcacagacgtcacaaaattcttttggtcggcaagtagaacctctgagagcctgaaaatgttttgtttcgttgtagtgtgtttttctttaagtgtccgggcagccatgagtgtg

SEQ ID NO: 26358 - DNA, 1772 bp, Mus musculus
tgctggttagtgctgtactccttccacagagtgtacatacatacatacatacatatacacatataaggtatgtaaacacatacatgcactcctatatatactacaggcatatacacatatacaacaaagatgtataaacacaggcacctgttcacctataccacatagacttagacacataaaaacaccacagacatacatgctgaaaacacacattcttgtgtctgtactgccctagttagatttctatttctatgataaacaccaggaccaaagcaacttgggaaagaaagtgtttatttcatcttacactcccagacaacagtccatcactgagggaaatcagaacagaaactcaaggcaggagctaaatcagaggccatagagaaatgctgcttactgcctgctcatctgctttcttatgcaacctaggacagatgtccagggggcttactgaccccatccacattcatgcaaacacacaccaccatacagatgtacatgtatatatgcatagaccacaagccctcacgggcacatacaccatctacattttgagcctctgctcaatgaaaggcctctttcctgtcctgactgattcatcctggacatgaacatttgcaagtagtgatgcttctattgacaggcagcacgaacacagctgtcatgtacaggggcttctttggaacaagcactgtattacgtatcatccacatattgtgtaatagagctaccagaccaaccactagatataagcttgttttactccatttcgtagatgcagaaactgaggagcagggggattactctgattccgtaataccaccagtgctatggctcggtctagtgaaggctcagtatcttttgttaggcatgctggcacacacctgtaatcccaagctcaagatcctgtcttttataaagagaaaataactcagtagtagagcccttgcttagcatgtgcaaagcttgggagtccatcccatctcacaaggaaggaagaggagagaggaagtactgtatttactgggtgcatgtaggtgactatagtaaccatggctgattgacagcagtgcacccactttcccgtagcagcaaagcagagagaagtgaattctgaacactgcagccagaattcttcagaaatcattttaggactggatgctaagtaactgctcccaaaggacattcacaatcataaacatggcaggatttgcataattatactgctaaatatacacatgccatttaaagtataactgccctagctggtatattagcacaattacacagaaatagggaaaggagaaaacatttctggtagaatttattaaaaaaaaaaaagtgcatctgaatcctatgtcaaaggaaaaaaatgtaaaagacaaataccgggaacaattacaaaagtgcaaaattatatgctatagtcttacttagcgcatgacgttattttagaaatatttaatctgggtagtatttttaaaaagtctaacttcatgagtatgggatataaaatgccaaaccaatttctgttgcagtttcataatattaaaagcaaataaatgagagtgctttttctgtgcgagcctctaagtgagattttacatttaaaaggtgtgctgacagaacacagggacaggaactgcaaggagctgtgcttccttctgtgagccagcaggactcccttaaggtttctaagagcacttcactataatagcccaaatagctgcaggacattagaaatcagagaggaggatcctttcttttac

SEQ ID NO: 26359 - DNA, 1195 bp, Mus musculus
gaataccagcgtccagaaatactgttaattctttgttctgtatacttttcaactttttaatcccctgtgtgtttaaagagagagagaggggaaggtggaggagtctgcactgggggattggagagggatgaggagggggatgaaaggggaagtggatggctagaggagctggcagcagcacagacgtttagcttcttgacatggcatcatgctgtgaataccatacactctgctacctcatggcagtgaaacttctagaacatgagggttacaggctgcgttccttggcacgctgtggactactgtttccatgacatttttcttagtttccagtcttctgtggagaggtaggcctcatgctcaggtgctgtctgcattgtaaggcttctgctgttctttgtgtggttttgttggttagtttgtttgtttttccctcataggaacggcccatgtttctgcagggaaggttctgggctctgtggagttctccctgccgcccagccaacccctgcctgccggaacctcgcccatccacactagcctgcttgacatgaggaggaacgtggctgaactcaggctccaactccagcagatgaggcagctccaggtactcctcacaaacatgtcccctgtcatagtggctctaggcctgatttctctgcatgcccatctcccatctccacccatgtgtcagcttccctgggcgcctttactgtcctttctgtagcagctagttgaaggaaggaacgacacatatgaccagaatggcacaggttccttgtttatctacaagcctggtctagaaccttcccctataactaaagccagtgtatcacaacttcctttaacagtcagtgtgagcatcctaccaggcaaggctgccagctctcagtgtgatagaggtccatccctcctccgcaagcaactgtggtgtctttagaacttgagtttagcatagaagatggagtcatgtgggtgaaaaaagctactcgggatgatttgctgaggaaaaaaatctgcattttacttgggtagtatgttccagatttcccttatccttttcattactgaggaatatatgagcttagggaatcaaagggaaggcaaaactaacccttcctgtccctgatctcagtagggcagaatagaatatcccatctctagcctgagtcctaaggagttgggaggcccagca

SEQ ID NO: 26360 - DNA, 1172 bp, Mus musculus
attgctgctgaagctgatcaagggtgttcactttgtggacatatgaaaacctagcaactattggcaagcatcttctgaagggtagctcaaacttgcatgctctttgttccatgtgatgaaggaccagtgaatcccggaaaccgtatggaaattatggacttagatataaatgcagcctttgtcaaatccagtgaaattagtcaattcccaagagcctttgtctcatctggactcattattgccccatcaatgtgtagtgccacatggtaaggagctgtgattctacactgttgagacatgaagccaaacaaatcagagagctcagattcgctttttgaagacattctgaaaaattcctgtcaacccaatggttgttgaggatctacaagaacctcagagtagctctgccaaggagagcagattctacatcaggagagaaacgcgaaacggagagcaagaaagcctatccaagtgtctggggggagacaaggactgaaggcctggttgatcactgggctttcaatgctagtactcttgactcctctctataaaatcgtctgtgagagtttgtggtgtgtttgtgtgtgtgtgtgtgtgtgtgtgtgtgtgtgtgtaacagcagccaaagactagaaaaaactctaccttttttataggcacagaagttcagctgtcagttgcctgataaaacttagccgttctctgaggaagcaatcctgtatacagtcctgtatacagtccttgctctcttctctttcttactgaaataaagattcagctgtgggttttctctgtgcccacttctgaagactgcagggcattcaggcttcatgatagcagacagatgaagccaatggaggctgatttcttttgttcaacagctgcagaaccaggagattctgagggcgatgatgaagaaggctgagctggaaatcagtaacaaagtgaaggagaccatgaagagactagaggatccggtacagcgtcagcgcaccctggtggagcaagagagacagaagtacctccacgaagaagagcggattgtcaaaaagttatggtgagtcaccctgaagagaaaaactgtctttgttcacagggtgaccttcttagctggtatttctctccctctctttaatgagcacctattgtgtaagctagagatctgctgagcc

SEQ ID NO: 26361 - DNA, 2050 bp, Mus musculus
tgcttctacccctctcagcccccaagcaggacggtccgctcactccgcttccctcatcccttctgtctctaatggctccttaaagtttcagagcccacctcacgcaggtaaaggccatcatcacctttcgttcgcactgcagactcaaaatggccgagctgcccctactacctcttcctcctcatcccctccttcccctgcctcccccacctccctgaatcaaggtgccaggggcatcaggaccatccatactcctagcctcgccagctacaaagcacagaatggaagttcaagcaaagccaccccatccacagcaaaagaaacgtcttaaaggccagatcctattaggcacaaggtggaattgcatccttgtttttaattttcagcaatctggaacaagtgttttcataagagaatgtatcatattgctgtatcgttcaaggcttcatgcagagtatgtgctaagtactgagttggtagctgcagtaaagcttgttttttttccactctgttgctgttgtaattgcatagtgtttactgtctagattcgatacctattacatgaagaaagcatgtgctataaaaagagagagtatgatgagagtgaagacatgtgtgagacaagctgactgtactatgcatgtaaaacatgtatgattccagaattttagtatgttttgtataaaaatatttttcattacagagactagaggcaaacagagaaataaatacgcaagcgtgactatataaattgtaaagcatatattatgatattttcttttattttagtgttatttagctttattacagatttctatttttgtcaaaacttcatggttcctttcaaaatcttttttgccaaaacattttgatactacagcattgtacatttgaaagtagcgtgctagcctttaagccaatgagcttctacagtcgtagaaagaaattcagcaaaactcctgcactgccagcaaaagtttgtatgataattcgctagcgcaagccagctcatttttttctttgttttcttttcattttcttcttccttttttttttttaaagacaaaacatctgagtattctgtagctgttttctttgcactgtctgacccccttttatgttttcttagacctggtaattcataccattgcattgtggattttaaaatgtacacttctgtatggttctgtacactgaggaacttttgtaaatatacaaatataaataaacatcaaaatactatctgtgacagcacatagagtagttttcccacaccaaagttaatttgtatgcatgcttaagagtctatattgggatgggcagaaatgggactatccatacatttttaaaaagcaacaagtttgcacagttagggtggttttgtagataactgtatttgtataacacagccatgtaacatatggagctataagcagagacttggcaaaactaaataaagggctgcatgcttattattttttttttgtaccttgtcactataacgtctttcagtcaacgaatatgtaactattgccacagggtttcagctctgagggcattctaagcaacgtgtaatcacatccactcatacagtgttgcttcctcgaaagggaaggatgaattcctaataaactcatcaaccatgtggccgtctggacttcctttcctgcctgactcttctctagggcatgggggagggggcgtggctaacagagaaccctgcacacaggtttgcacactcatccattgcagcagctttgctgcttgcttggttttgtttttgtttttagtttctattaaaagtaaaaaataaaataaaaaagtgtatttatcagtgggttaaggtttttttttcagttcccaatttttaattttttaaattactattttatgtatttgacttggatgtctgtcacaggcagacattatcagcaacactcagccacaaatgaaaatacattcagaccagggctcagactccaagattgtgaatgtcatgtgttaggactttttgcaaagggtggaccactgtttaaaacagagcttctca

SEQ ID NO: 26362 - DNA, 1310 bp, Mus musculus
ttctacagctaacatccacccccacaaacagtctgaaagtccagacactaaagcagagactcctccctgactttaagctgggtctagccactctagcaaggaaaaactactgttacacagtctagtaactgtaaatatttttcttgtaccagaattgttattatgcagccttgctttgggctggattcaccattttgcactgtgaaatagctttacagtgcattactacagccagaagaacacacgtatatatttaagagtatattggatagttgtatacaaataagcaaggtgtttgttgcaactcactacataatatattccccaaattactgaagaaagtcgctgcctcctgcagccaaattgttcttttggttcctcactaacaaaagtgcctcatgataaaagtacatttgatttttagggtgccatattgttaaaattagaaaattgaataaatgaatgcattttatcagtaacaagtttccttccatttaccagttaacacaggtggatacaggacttcaagtctttagtcattccagacggatctgagttttatattcaaacttttaatacagtttttgagttttgtgtgacttgaatttttaatctttctgtaaaatacgtaataacttaaatgaacatattctatgtgtatcttttcttcagataccagatttgatataaatgttgtaacataggtatgtagatagtgtatcctggatggaactggcttcttactgagaaaaatataattctgcatgaggactttatccaaacctgtgtcatgcctgtgtgcatacccaactaaacactggaaataaaattgtcttggtgaagtttgcactgttgggagcttacttggttttacaaagctgtctatttatatattatctaatccttttttaaaaatatttatttatttattatatgtaagtacactgtagctgtcttcagacactccagaagagggcatcagattccattacagatggctgtgagcccccatgtggttgctgggaattgaactcaggagctctggaagagcatctgctcttaactgctgagccatctctccagcccatattatctgatattaacttgtaaagaccgcctctgttcacaccgtccttccacctttcctttccttgtgactgagaacggtctctcagggtgcttgcggaacttactcctgtgcataggaagtacttagtaactctagctacagcactatgttgcttacttagcaaccaactacagcagtggatgttgctcaccttgtcttgaggcgcattaagcaagggaag

SEQ ID NO: 26363 - DNA, 1129 bp, Mus musculus
agatgtgctagataataaagaatctgtcattctaagagagaaacctcagtctggccgccagacgccacagcctttaagacatcagtcttacatcctggcagtgaatgaccaggagaccgggtcagacaccacctgctggctgccaaacgatgcacgcagagaggtccatataaaaagaatggaggagaggaaagcttcaagcaccagccctcctggtgattccctggcatccatcccttttataggtgagcgcattcagaggccctgcacagcagcagctgggtgaaaagtgttcgaagaaatagagtatttgtattccataggcacagaaatcttaaactgcgcgtgcatttaaagcattttaagtgctgtatacgtgtttattttcagtgccggggattgaccccagggcctcatgcatgctagacaatcgctttcctactaagccacagcaacccactctccatgtgtaagttgtgtttcactcagagcaggttgcttttctcctccttaaatatatttctactagccattttcctttaaaagtaagttggcatctagtgtgtatttgacacagggtgttgtagcccaggctggatttgaatatatggctctgtcctctctgcttgctcagtgggctcatgggtttatgcgctaccctgtctgtcctcttttgttagtcttggttaaatcagttcctgccatctgtgtcaagagagtcagccgaactattgtacctagttgttggtctacctgaatcaacagcagccaggcccttcccttgctttgtctgtagtaaacggttgctggttgggcagagtctcctgagttgtcaccacacaaaggtgggctttttggaaatgcagctacctttgagtcactcctgctcctgtaggtagcccacacccacataagtgacccctggagattctagtggttcactgaagtttaaaacaaatctcattttgtacaaatgaaagcatgaggcagaagaactgccttagtttgggttttactgctgtgacaccatgaccaaagcaactcttataaggacaacatttaattggggctggcttttggattcagaggttcagttcattatcaaggtgggagcatggcagtgttcagg

SEQ ID NO: 26364 - DNA, 1150 bp, Mus musculus
acacttctgagtggaacaaaatatctggtatttagcatagcatttacaaatatttaaatgcagttaggtgctgcatatctagtcatttagtgtttattgaacaatttgtgcttgagatagttagctaacatagaggaagtagtaagctcactaggattagaatcatcgtttttaacccctttcaaattccattttggacaatacttgatgacatgtacactgtccagctagagatttcgtggcccattcactgctctttgaatgtctgtagttagtgctggtgaagtttgaaaatcaggccgatgtaggatgtagcagttgacagaactgtgaagtagtgaacacggaaacaaagtcacctacttcaagagaaaggtgatccaagattagtaatgtttaagatgctttattaaagttcagttatagacagcagctcttctgtattatttttagtctggtcctatttgtttcacttaaaaaaacattttggggtacctaaatccacacaaaatggtaactgtgtttcatttccattgctgtgtagtgacagtgatcttaattgtggtttgtatatttcctgagtatttactttctggattgaagggtgtgactgaatgaagacatgcaatgggctgctccccaccacaagatggcattcctcacagcatttgctattgcccatgacagtctgcttctggttacctttcagagaaatgttcaacattgaaatgatgaaaaaggttaatagttttaatgggcaataagcaatttgttatacaagttttaaattaaaccatttacatgttaatatcagctctctggttttgcttctaaaatgtagttctagggcttataatggaggccagggatgtccctgtacagtgcacaaaaccctgggttccatccttagcacctaggaaggtagacgcagtaggaaaaggtcatgtttagtcacacagtttgaggccagcctgggatacatgaggtcctgtttaaaacaaacaaacaaacaaacaaacaaacaaacaatacttgaaacactttttgttaatagagactcaaagctctgtatttgtgtacacattctatcatttcagaatatttgtttcagtagacttagaaaattatccataaaagaaaaaaattatcc

SEQ ID NO: 26365 - DNA, 1695 bp, Mus musculus
acttcatcccacatctattgaatgcaaatcaattgctttaattaagctaagacctcaactagattggcaggaattaaacctacgaaaatttagttaacagctaaataccctattactggcttcaatctacttctaccgccgaaaaaaaaaatggcggtagaagtcttagtagaggatttctctacaccttcgaatttgcaattcgacatgaatatcaccttaagacctctggtaaaaagaggatttaaacctctgtgtttagatttacagtctaatgcttactcagccattttacctatgttcattaatcgttgattattctcaaccaatcacaaagatatcggaaccctatatctgctattcggagcctgagcgggaatagtaggtactgcactaagtattttaattcgagcagaattaggtcaaccaggtgcacttttaggagatgaccaaatttacaatgttatcgtaactgcccatgtttttgttataattttcttcatagtaataccaataataatcggaggctttggaaactgacttgtcccactaataatcggagccccagatatagcattcccacgaataaataatataagtttttgactcttaccaccatcatttctccttctcctagcatcatcaatagtagaagcaggagcaggaacaggatgaacagtctacccacctctagccggaaatctagcccatgcaggagcatcagtagacctaacaattttctcccttcatttagctggggtgtcgtctattttaggtgcaattaattttattaccaccattatcaacatgaaacctccagccataacacaatatcaaactccactatttgtctgatccgtacttattacagccgtacttctcctattatcactaccagtactagccgcaggcattactatactactaacagaccgcaacctaaacacaactttctttgatcccgctggaggaggggacccaattctctaccaacacctgttctgattctttggacatccagaagtttatattcttatcctcccaggatttggaattatttcacatgtagttacttactactccggaaaaaaagaacctttcggctatataggaatagtatgagcaataatgtccattggcttcctaggctttattgtatgagcccaccacatattcacagtaggattggatgtagacacatgagcttactttacatcagccactataattatcgcaattcctaccggtgtcaaagtatttagctgacttgcaaccctacacggaggaaatattaaatgatctccagctatactatgagctttaggctttattttcttatttacagttggtggcctaaccggaattgttctatccaactcatcccttgacatcgtgcttcacgatacatactatgtagtagcccatttccattatgttctatcaatgggagcagtgtttgctatcatagcaggattcattcactgattcccattattttcaggctttaccctagatgacacatgagcaaaagcccacttcgccatcatgttcgtaggggtaaacataacattcttccctcaacatttcctaggcctttcaggaataccacgacgctactcagactacccagctgcttacactacatgaaacactgtctcttctataggatcatttatttcactaacagctgttctc

SEQ ID NO: 26366 - DNA, 1214 bp, Mus musculus
aggctgaggcaggatggtcaatttgaacccaatctggtctatacaaagccaatctggtctacacggcgagataagataacgaaaaaaaattaattttgcgtagttcattacatccaagggttggtctcccatatccagacatgaacaaaaccgctaaactatgcatgtatacatctctaaggctttcaggatagagtccaaaagctaagagataaggtcaacttagcttctgttacacaataacccacagcgtagactaattagaggaagttggcacgtccactcggagcttggcattgcgaaaacaatggcctcagggttagcaggtaccggaaccagatttctgcacgctttgtcccgcgtaggacaacagttcggacgcacatttctggataaaagcggacgcggctcccgactagagccagtggctccgaggagggttgaagaggacaggcgaccgggtggggaacagggtgcggcttcgcgcttccggtgcccagcttccggctccgggtttgggcttggggcagaggcggagctacggcccgccgcgactttcagacttgaaccatggctatgcgctggtcgtgctggcggcgtggctgctcctggaggccgaccgcggtcgggagcccgcggcgggaacgacctggctgtgtggagcctctcggaacacgtgccgcctcggacacccgcgcgcaggtgaggccgggacgcgcgcgctgtccgcggcgtagaggtcaccatgccaatgacagccggcgatccaatgaatgggaggatgcgcacgtgcgccggggcctgcagtccccactgggtgggacacccgggaagtgggactagtcgcggggccagaagtgcggagctgctgatcgggcatccagaagacattggggttgaggtagagggagcggcggagcgcagccctgttaagccggggctacccgggtgtgtcgagaggacaaccagagccaaagggacctctgctttcactttcctagcaatttcgggtttcggatccagttagcctcaaaattcggaaagggtgttgtagcgacgcaaagtgatgctagccagggtggacttcagtgctgcaggtgcttacaagagaacgcacgcctgaaaggcgctggaaggacactagaaggagaagagccgaagggtgtcatgagagacctatgacttctttgaagtaaaatcattatctaattagt

SEQ ID NO: 26367 - DNA, 1069 bp, Mus musculus
agaaagatttattgcagaattatggttctattttctcaatgcatcagttttgaaaatatttttagcttaatcttaatgtgtccaaacagtcaatgtgacagaattttgcagattttggagctagactgtgtcagagtaagcacatgatattctgggggcaacatctgaaggaggagtgccacaccggtcctttggattttaatgaaactgaatttacattgactcagtgaaaggaaaatcctttacatattgtaaagatggatgcagttcatttgtggataggcatatttaatccattccctggcactagaaacataaaattttacaataattttgaaagaaactaggccatgtattaatctgtaaacaggtaataagcaggtttgtattgtaactttgatgcaacacatgcactttgtgtgtctccttgattcaagggagggtgtgagggatacttctcttgtatataagactgtactgcttaggatattaaagtagatcacacaagtgtgggtttctatgtactgagggttgcagatttatgacagcatagtgatgagagcagtgcaaaatatttctgaaaattaaagaccattgttcctaccaaatcaatgattccatatatattttaacctttgttatttttgaagtactatgtcattagcaatcagatagctttttattatgcatttcctttttgaagcaaaatgttttcttcatttgtaaataacctgttgtctaaattttatctagtcttttataataaactatgctcctatatgaaaaatttggatattgttaaagtataactaatgtggatttaaatagtacagacttcaaaattctctgacctttaatcctatggtgaaacaaagacaaaccacttgaattttaacgttgattatttatttgtgtaatggctttacatgtgggcattaacagtgtaaacaataccacatataaccatcaggatacctcgattagaatttataggactataatgacactggtttaattacatttaaaaagttttccgaaaaactttgccaataaaaattgcccatcaata

SEQ ID NO: 26368 - DNA, 1191 bp, Mus musculus
tggtcaatatgtcgggtaagtgatttagggacttgattgaccatttacttataccgatagaaaaattaagtccatctgggcggaggcagcagctgtacctttaatcctagcacttgggaggcagaggcaggtggatctctgtgagtttgaggccagcctggtctccaggacagccaaggctttttacacagagaaactctgcctagaaagaccaaaaataaataagtgaataaataaatagaccaaaaataaagaagtgaataaataaataaattcccactaaaaatacttagtttttctaaactaattaattggcattacattttaaaagtaaatgttcaagatagtattctcatgttatactttgtttcctccacagttgttgcaatatatgattatacaaaagacaaggatgatgagctgtcctttaaagagggtgcaatcatctatgttataaagaagaatgatgatggctggtttgaaggagtttgcaatcgagtgactggactcttccctgggaactatgttgaatcaatcatgcactatactgattagtttttcttttttcttttcatgtaggttattactccgtcatactgtgggattatatggttaacagaattgttttaatgtttaaaatgtgcccatattttcaaggacatgttttattggtatatttggatgtctacctgtaagcataaattttggaggcagttcaaacattgctgagcagcagtttatatgcctataattgattatgcatatgtactcacaccttgctaagtttatgaccagcctaaaacttctggggattgggtattatgtttaacaaatcatggttcagaatgcaccattacatgtttcagtgcagcatggtcactaacattgtgtcagactaataggaaaaaacagaaaacgtcaatgctggtgctggtcatacttttggtttcaattctcatttttaaaaaaatactgtgtttaaagcatgcataaatttttatgtattgaaatatacttaacaattcaagatgcttccaatttgtgtaacgattatctggagtactcatacttgagtctcctaagctctccatgtgaaatgaaagactatctgtaatgttgtaatttgtatctaagttttttaatgagtgaaatttgcattataaatttttccattcataaatacataagtga

SEQ ID NO: 26369 - DNA, 1167 bp, Mus musculus
tttcacaaaattgttagggttttacaagctgtatgtgtggtacagagaagtcactttgttaagtcagttttggccattttgttttagtaaatgttgcctttctaatagtttgtgatgtttattatttcaaaagcaaaccattttgcataatatttcattcagaaggtcagtattgctaaaccaatgtatttgtgccttcctatttatgtatgagattcagcacctgttttagtgaaatctggtgaatataagatgatatttaaaaatatgaaaatttattttacctttttagaaagtatgtaaatttaaggtattctgggagaacattcagttaaccctttgaaattgagtcagtgaaatgtagacttttttgaggtaggttatttctgtgtagcccaagctatccagaaacaaaatgtgtatattaaaaaaaatgtttgaaaggtaatcataataaaaaaatgagaggaaactatcttaccttttcaaagtattgttcaagaaaaatgatcctgttataaacacaggctcattttgtgggtactgcatttataaactcatttgaacttgttttatatacggatgtttgtttttttttctttgtcttcaatatgcggtattttcctgccattttggaatttttggttctgttttcttacactccgatctgagtgataaactattttgctagaaaacattgtgtctggcttcctggagtcatacttctcccagtgagtgttgctgatgagactgtgtaggcgttggggaaccattagataaattttacatatctgcacttaactcttgtagctgatagattacaagttgctgcagttactggattatagatggtaccactaaaagttaaagaattaaatctaattatttctaatttcttctggtgaaggacctttgaacttaacactataagaacacggagaagactctttattaaatacaatgtggtcctatgtatgatttacaacaaacttaatgggatttttatttgtgatttatttagattgacaaaaactggcagttattacatccagtcaaaggactgggctgaaggtggagataggaagtggaacatggaaaggaaatagagtgtgactgggctgctgtggtgctatcttttggattattctttgaaaatttttgcagcag

SEQ ID NO: 26370 - DNA, 1175 bp, Mus musculus
tttttcccataagaattataagctgcatttctaaggcatagctccaattatgagataaaatttatactttttacttttctaaattaaacacaagaaagaatgcaaaaacaaaagtgattttttaaaaatgaggttaaatcgattttgcatcagtcactgaactgtcagctacgtggcaggaaccggacggaagaatcctctccaggagactgggctttagttagtggcttgattccccggcttgctcaagggaactcagaaaatcatcgtccttgtactgcgcttctgtttacaaacgattcactgaacagacttaacttgatgatggaaatgatgaaaaacaggcctaatgtaggtgtaaaagtgtattcaaactctagacacggctaatcagattttaattcaatcatacacacataatcctttgtaatcatttttcttttaagtgaggatatctactgtctgcttcatagggtgctttgcaataaaatgaaaacgtatttatactgtttttactaaggtaacaaaagcatgataatccttttttttgcaagtgtaaacgacagtctggactcttaacttcttagtgcctcagttttcctttggggtatacttcacaaggtatcagaagtactttcagtctacaggtctctatgtccacataactaaggaatgcctaactaatggaaacttaagttccttctagccattaaaacagagagaagatcaatttagatcccggaacactgtatttgaaaaataatcttcctgtgtactttctcaaacctgcgctcagtaatatactttattctttgaagatttaatttaaaaacttcatagaaaatccttttttgcttttccttttgagacagagttttggtagctcctaccagcctccaattctctatgtagctgaagatgaccttgactacctgagtttcctgtctctacttcttttcagcttctgggaccacaggcctgtaccaccatggccagctttagagagtaaaacattttaatttgttcttgatttgtatgatgttgggggcgttagcattacgtgttgaatattttgagtaagaagaaaagaatccatcttcagaatatagggttgttctttgggaaaaagagtataagaacataatttctttgtcctagactttacaaatttttca

SEQ ID NO: 26371 - DNA, 1181 bp, Mus musculus
atcagactatgcctttcgtaccccaaccagacgacgaaacagatacatcctattttgaagccagaaataatgctcaacatctgaccatatctgggtttagtctgtagcacatgcgtgtcatttttatctaacttgtgatatagaattaagttttacagtaatatgctacttaatactagattggtctaaatgggataaaagtcattattttacccagactgaacagcttttaattactaagtacaacagtttttacagaattaaaatactataagcaatataatcagtaattaatctttaccttagaactgtatataagccataatagcttttttcatcttatttattcactgcactttatgaagagcaaagtatcaataaactaaaacactaccactctaaatagagggagtgagccgtaagcttatctttatctgctgattttaattctattcactttggggttaatatcaaaccaaaaaaaaggactatttcatttaaatttaatttatttgcacatggttacatgcaaagctgttcttcaggctgtcatatgagacaaacatgactgaaaatcatgtgaaccagacatgatggtggaggtccccatgatcaggagcagatgcaacacaggagtatgtctgcaacttgaagactaaggccagccaggactatattactaagcactgtctctgcagggtgtggactagtcaaaagaactaaggttccagctcaccttactagtgatggagtctcactgccttgaatgctcttgttcccctctacaattcctgcttctttaaatgggtagtggaaagattgggtggttttaatagcttgttcacttttaatagaaaaatttatactttatgtcatatcatttcaaacatcataagagacaaatagtaataatttcttttgcttacaaaatgtaactgtaattagtgggttcagtatcattcttttaaagaatatgtattaaaactcagctcacaagtcttatcttaaactagttgagactttcaatatttctctagaagaggaaaattaagatttacatgtctcatgggtaagattttactaatgcccttgtgatactggccatagtgctttcattaacacctagtcacaggctatacagaatgtcgtttacaaagatgcataatcagtgctgagtattg

SEQ ID NO: 26372 - DNA, 1104 bp, Mus musculus
tttttagtgtgaattttatgttgttataaattaatctgtattcctttgtcttagtactcttttcttgtcttgcttcttgatatgtggattttacacacacacacacacacacacacacacacagtttgatatagactctcattctgttccccctggctggcctgaaactactgtaaaaacaaggctggttctgaattcacagagaatttttgcttttgcttctgcctcccaggtgctaagattaaaggtgtggacaacctctccttgctacaagtaatatgtaaatggtacagagaaaaatttaaaatggaacataaacagaaacttgttggttgttttttctctttgttgttgtttgtttgtttgtttctgccatgtttagcaatattgaacattactgttacagcagtgagtatttgtgatagagcttcttattgagggatttaaaaattaatgacttgttcttgtctctttttcttctaggaattcttttagttgggccaccaggaacagggaagacgcttcttgcccgagctgtggcaggagaagctgacgtccctttttattatgcttctggatcagagtttgatgagatgtttgtgggcgtaggagccagcaggatcagaaatctttttagtatgtttggtgtatatttcaaactggtagagaaacagtaatgttttctttatcctttccttgataattggctttagtttcaggtaacttaatgaagctatgtgctttatttaaacaattttactttgtacatatgtgtgaaatatatacaaagtaaatattctcctctacctttttggggggttcaggaattgaactcaagcccgtttgctactgagctctcttactggccctgcattcttttctaatataggctaaacaatcataaggcctggtagatgtgctagatgaagttagggactgttgatgttgaaaaattcttgagtttttttgtttttttattttatttatcaattctgtagcatgtaattaatatttattagctttaattctaattatattaatttgtacaaataggaagagtggaaaccagttcttaaacatgactctttgatagtcttacagttt

SEQ ID NO: 26373 - DNA, 1221 bp, Mus musculus
gggcttgcattttcatttgtggccaatcatgtagagtgtatctaatgtagagtgtatctaagatatgattatttttatcttttatgtgtataactgttctgtctgcatgtatttattttttactatatatgtgcagtaccaatagaggccagaagtggagctgccctgtgggtgctgagaactgaacctgggtcctctgctagagcaattggtactctaaactgctggcacatctctccaggcccagcattggttatatttcgagtttctaattccacttagtaactgctttttgttgttttcagaaagctagtaaaacttagacctcttctggaagttttattattgaaatgataatttattattaataatattaattaatagtaattaataacattaacttaaaatggtatattttgttgtttaagttttaagttcagttttagttttaagatacgtgttttaggttgtaatttggagtagttgtgttctttctaccttcaaaatgtaagttgaatgggaagagcttgaactgataagagatgtattatgttctctttctctatagctgttgatccagaaatcatagctcgagggactgttgggttctctggagcagagttggagaatcttgtgaaccaagctgcactaaaggcagcagttgatggaaaagaaatggttaccatgaaggaactagagttttccaaggataaaattctaatgggtatgtcttccttcctcacgacttctcttgcagttcatctttttctttgtttttactctgtcttagttttttatttttgagactgactttcattctatattccaagctgatcaactggccctcacctttcaggctggctgggaactttagctagtcatcctgcctcagctttctaaccaccatgcctccatcctccataaggagtgcgtgcgtgttctcgctctgtctctctctgttttctctctctctctctctctctctctctctctctctctctctctctctctctctctctctctctctctgtgtgtatgtgtgtgtgtgtgtgtcttcccttccacccccgtgagttgtgtgtggtttatctgttgactttcttcttaccacagagactcatggtctaacctgaaacttactattctcttgccgctggagtgataggattataggctaccatatgcagcctatactgggtatggtatagtatataatatagt

SEQ ID NO: 26374 - DNA, 1112 bp, Mus musculus
caagtggattcttaatacttctgcctgtgctgaagagagaagcttcctaaggaacaagcaagttgaatagagaaagtagtgatcaataaaaggcattttagtggtcgttttaatgttttaatgttttctgctgcgaaacatttcaagatttattgatttcctcctccccccatttttttcccaccacactcacacacgcacgctcacactttttatttgccataatgaaccgtccagcccctgtggagatctcttatgagaacatgagttttctgataactcacaaccccaccaatgcgactctcaacaagttcacataggaacttaagaagtacggagtaacaactttggttcgagtttgtgatgctacatatgataaagctccagttgaaaaagaaggaatccacgttctagattggccgtttgatgatggagctccaccctctaatcagatagtagatgattggctaaacctgttaaaaatcaaatttcgtgaagagctaggctcttgtgttgcagtgcattgtgtttcaggattgggaagggctcctgtgctagtcgcacttgcattgattgaatgcggaatgaagtacgaagatgctgttcaattcataagacaaaaaagaagaggagcattcaattccaaacagctgctttacttggagaagtaccgacctaagaagcgattacgcttcagagataccaatgggcactgctgtgttcagtagaggtacaggaaggctggctggatcgtggcattagagggaactcttggtacttggaaatgtgaagctggattcttacctgtgtcatcagagtagtaatggattcagtactcctcaactcctaatgattgagaagaaggcaaacgataaagaaatccctctattacacgaataaaatgtttaagaaaagaaaaaagaaaggaaaggggattaatttagtgaatgatgattttgcttctagttttaatttctgccaggattgaattatttcaaaatctcctgtgttttttttaaagcttttccaaaatagatgtctgaggaaaaccagcagaatattagccagtgtggagccagttgttgggagcacacacttccattatgcttggc

SEQ ID NO: 26375 - DNA, 1174 bp, Mus musculus
atagctattctagaaatcagtgttgagtatccccaaaaatcgaaaaataaataaattccattctttgatatatttacatcttactctgcagacactttctcagccatgttaattaccaccattttcataacaggctgattttttttttcagataaattgctatgcttctttctgtgtggagttacagaatatgtgttgggaacaaaaaaggagggcccggggggagtgggggaaagacccacaccccgccagagatttccctattctctggtctgtcaggcgtgggagagctgccatacactttccactcagtcctgggtgggcattcaagcctctgacccactcttcagggggtggccctacctggggaccctggagctactttgctaaagccaccaggattataggagagagggttgagggaagaggttcccaaaacctgtgagagtgcatcaagcagtggatctagatgagcagagactctctatggttttagaactttattatagaaatgcaggggaaaagagggagagagagagagagagagagagagagagagagagagagagagagagagagagagagagaagaaaaactagagagaaagagagtaagagaggagagaggagagaagacagagaggagagaggagtgagagaagtgagaaataagagaacaaaggagtgagagagacaagtaagaaagcaagcaggagctggacagccctttttatggtcttactgttgctagataactggggaggagtttagctgaaggtcagaagcttgggccattgcctatgtgacaactgaccatgcttctcttgtgggggctgtgggggccggtaacttaggcaggggccagagttccaggagcataagggaacacctacagtgtcatgaaggtgaattatcactatcctcgggtttcagacctcagctcaactggagaccagcctgtctgtgcagagcccaatgccccacaaatatgtactaaatactttagtacattaagaacatgcttttgtgtacattgtttctggagatcatacgttgtctcctgataggttctctgattcgggggtcatacaagttataaatgaaatgtgatgagcaggcaggtgtccatttttccttctttttaaatggttaccataatagtttacatttaattt

SEQ ID NO: 26376 - DNA, 1172 bp, Mus musculus
catttgacaaactccaacaccccttcataataaaagtcttggaaagatcaggaatccaaggtccatacctaaacatgataaaagcaatatacagcaaaccagtagccaacatcaaactaaatggagagaaacttgaagcaatcccattaaaatctgggactagacaaggctgcccactttcttctacctattcaatatagtactcgaagtcctagctagagctattagacaacaaaaggagatcaaggggatacaaattggaaaggaagaagtaaaaatatcactatttacagatgacatgatagtatatataagtgaccctaaaaattttaccagtgaagtcctaaacctaataaacaacttcagtgcagtaggtggatataaaattaactcaaacaaatcagtggcctttctctacacaaaggataaacaagatgagaatgaaattagggaaacaatacccttcacaatagtcacaaataatataaaataccttggtgtgactctaactaaggaagtgaaagatctgtatgataagagtttcaagtctctgaagaaagaaattgaagaagagctcagaagatggaaagatctcccatgctcatgaattggcaggattaatatagtcaaaatggctatcttgccaaaagcaacctatggattcaatgcaatccccatcaaaattcccactcaattcttcaatgtgttagaaagggcaatttgcaaattcatctggaataataaaaaacctagaagagcaaaaactattctcaacaataaaagaacctctggtggaatcaccatgcctgacctcaagctgtactatagagcaattgtaataaaaaactgcatggtacaggtacagagacaggtaggtagatcaatggaatagaattgaagacccagaaatgaatccacacatctatggtcacttgatctttgacaagggagctaaaaccatccaggggaaagaagacagcattttccacaaatggtgctggcacaactggcggttattatgtagaagaatgggaattgatccattcttatctccttgaacaaagttcaaatctacgtggatcaaagaactccacataaaaccagagacactgaaacttatagaggagaaagtgggggaaagcctcgaagatatgggcacaggggaaaaattc

SEQ ID NO: 26377 - DNA, 1220 bp, Mus musculus
actgcaaagcatttgtaaagtgtcttttcagtaaacttcatttaatcttgtttttcagccaagcaactgacataatggaaacatcggggtggaagtccatgattcagtctcatccccatttagtggcagaagcgttccgagcactagcatcttcacagtgtccacagtttggtattccacgcaaaaggttaaagcagtcttgagtcttgtgtggacagtaggaaatgcatttgcctttcctccccaggtcccgaaggattccaatacaaaccataagtaacagccgcttctgtctctcgtccacggacagaagctggaaaggcattgcttgctttcacatggataattcatggtttatacttcagctttaaatctgactgattgattcacttcaaggccttaaattgtcttcagtgacttctcttgttcatagaatagtttaattttttttattgtgccttgtcagtttgccaaggctctgcaggattgcactagctccacaatgcagtaatattgataactgataatactgagtttcaaaggatcttccattattttagaaacaaaagtattttataggttttgttctgtatgatctccaagtataaaactaggttctattggattttgagattgccacaggcatgtccaatctcagttgtgtagacactaaagagcccgttgccatccaggtaagtgatggccatacactgctctggtttaagttatttttcatttcaaggagcagataagcaatgagttgacctaaaatcttagtaatatttgtttagtaatatgtgtttgtctgtatattaactgctcaagaactggttttatgcacatttgtaaagattgaaaaataatatgaagttaagatttcaataaaaagaaagcatggtttttgttaatgttttaaatttataatgacttacatttgaaagaaaaattcaatagatgttaaagtcaggatgaccaagtacatgtaatgaatgagtgggccgattaagcaagatatatgtgcacttttaatgtggaaattttctatgataaatggtacatatatattttcctttttcgtggattaataagatttaaattatgttttaacatttaaaagaagtttttatgacacatggagccaatttggatattcatgataatagataaaattacacttgattttagattcattgacttggatttcaaatatttatcattga

SEQ ID NO: 26378 - DNA, 1093 bp, Mus musculus
atactactacatggatatttttgatttgtggtattttgaaaaatagtcttatgtaaatattaagctggtttccattttatgaaatatttctaaaattatttaaatacttcatatactttttcaaaatcttattttaatactaattcccccaactttaaatataatctcttcctggttttctcaaagattgatcaataaataaatttttttgtttgtagctaaattattcaagtttgtgggatactatatgaatcttaagactgtaataaggtggcaatgtctcgggaacctactccacctctgcctggagatatgtctactagtcctgttgcagaaagctggtgttacacacaggtacataccatttaaaatgcatttgctgcttgtcacatgcattttctaacgatgacaagtatactgtaaaattgtaaagcagtatggctttatcactctcgttagaatgaatatttgatttgtgacaagtttaagtcatgagtataaaaatggttttctcatctcgtaggttaaagtagtgaaattttcctacatgtggactattaataacttcagtttttgtagagaagaaatgggtgaagtgttaaagagttcaacgttttcttcaggcccaaatgataaaatgaaatggtaaacatattatatttttttgttaactttgtgttattgttattgttggccctaatggttattagtataattttatattaaattagtaattaattcctagaacagtggagaaatataaaaaactatggggttatttcagaagtgctgttgtgatattaatttgtaggtaatttcagttttgtctgccttttttgtttgtttgtttgtttatgccaaatactaaattactataagtgacctattgttttattttaggtgcctgagggtaaacccaaagggattagatgacgaaagtaaagactatttgtccttatatttgctcctagtcagctgcccaaaaagtgaggttcgagctaaattcaaattctctcttctcaatgataaaagggaagaaacaaaagcaatgggtaagtggttggcaaactggatgaaaacttgtcttcatact

SEQ ID NO: 26379 - DNA, 1174 bp, Mus musculus
acatgggattccctttgactcgccccagttggaactgcaacatggctaaatgtagggagagcttgaaaatctatcaccaggctccggtctccaaggtgcctcaagatgggcccactaatttggctaaggtaagaggtaatgcaggggcccgatcgaacctccctcggtgttccttgaaaggcttatggaagccttcaggcggttcactccctttgatcttcccttggaagcccagaaggcctcagtggccatggcctttcataaggcagtcagctcccgatatcagaaagaaacttcagagattaaaaggtgtattatgagagggagacagtcatttaatctagtaaaagaggcagagaaagtgtgtgtgtgtgtgagagagagaggtgggaggcagaagaaagagaaaacaggagggatcttagacaagagagaaagttgactaaaatcttgaccacagtgataggaaaaaaaaaaaaaaaagacaggatctagacaggaaacctggacaactgaagaccgagcctcagctaaagaggctcagctgtgtcagactgaagtgacttatttgggatacaccctttgaggtggaaagcagtggctaaaagaagccagaaaaagactgtaactcagatccccaccccaactacaccaaggcaagtaagagaattcttgggtactgctggcttctacagactctagatacctgggttggcgaccttagctaccctgttgtaccccctaaccaaggaaggggaggtgtttgtgtggaccccagatcaccagaaagtctctatgtaaatgagagagcaggtgtcaccagaagagtcctttctcagactttgggactttgaaaaaggccagtggcttacctatccaagaagttacatcctgttgccagtgggtggttttcttgcctaaaagctattgctgccataaaactgcttgtcaaggatgctgataagctcactctgggacagcaaataactgtaatggcatcccacactattgaaagacctatccaaaagcccctgactgatggatgatgaccaacgctcctgtgacacatcagagctttttgttgtctaaatgagtgagtgaccttcgcttcattccacccacctgctgtcccactgcgtgagactgcacctactcatcactgcgctgacattct

SEQ ID NO: 26380 - DNA, 1378 bp, Mus musculus
ggtggccttgcaagaaaatggtttttcttgctttcccatgaagttttgaatccagtatattgcttatttgagtatgcaagcaagaataactattgtttacagataaatccagcatcaactataaatcctgaccatctttcatacttctgttttattgatcgctttattgcaatggcactgttccatggaaagtttattgatactggtttctctttaccattctacaaacgtatgctaagcaaaaaacgtactattaaggatttggaatctattgatactgaattttacaactctctaatctggataagagataacaatattgaagaatgtggcttagaaatgtacttttctgtagacatggagattctgggaagttacttcacatgatttaaagttgggaggttccaatatcctggtgacagaagaaaacaaagatgaatgtattggtttaatgacagaatggcgcttttctcgaggagtacaagaacagaccaaagctttccttgatgggtgtaatgaagttgttccccttcagtggctacagtactttgatgaaaaagaattggaggttatgctgtgtggcatgcaagaggttgacttggcagactggcagagaaatactgtttatcgacattatacaagaaacagcaagcaaattatttggttttggcagtttgtgaaagagactgatagtgaagtgcgaatgccactcttgcagcttgtcactggaacctgtcgcttgcctctgggaggatttgctgagctcatgggaagtaatgggcctcaaaagttctgtattgaaaaagttggcaaagacacctggttaccaagaagccagacatgttttaatcgcttggatctcccaccatataagagttatgaacaactaaaggaaaaacttgtttttgcaacagaagagacagagggatttggacaagaatgactgacttgtcttggagaagctcttgcatttaaatacctgagccaagaacaagtgcacagatagtgtgtataagctgctcattctgtacagtgaattttatgaacctttcaaagaataaatgttttccgttcttccacagaaatatgcaaaccatttcatcattttctactttatttattgttccctttaaatgactggccaggaagaaaatcatccttaaattttgacgcaagcaagagaatttatttaaaagtatatatctatataaccatatatgacagtggctctagagcgccaggtgtattaaacatgacagctgttcattcacacacacacacacacacacacacacacacacacacacacacacaaaaggatcaaaagtaccattaggaggccatttagagtcattatgaagtggctttagaggccaag

SEQ ID NO: 26381 - DNA, 1171 bp, Mus musculus
tgctagctgcaccacgaccacccatgtaccagctccatgggtgagggttccagttgatgagttttatcatccgctctgggctgtggggtcacagccctgggaggagggccctcacatctcggcctctgtggtggaggctcctgcttccctccctccctcccttttacactggatagactaataaagccctttcttagagggacatggttctctctatcctcctgtgtactgccttcctgggttccatgccagatgttggatcctaagcaggaggtagctgagttgagatggacccagcaaatccaaatcctatgtcatggcctccagcatccagggtgggtccttgggacttttcttaggagggactttctgagcctcgtggagagtgtggtttgtccaaatgtgtggcatgggagatagggtacccctgaaagcaaggaaaggagcccagctgtggcctggtagcacctgccggcaccagtgatctcacgtctcttgtggtcttggagtcaaatagcacatgtatgtagagatgcgctcaagggcctgcctttcacctacactgtcaccataacagggaccaaatctggaggatgtccttgctgttgattctggttttcagtcacaacactttcactgtttgtcatttctatgtagttgatctagaaaaagcagaaatcaaaacaggaaaggaaatgtttgtgtaactttaaaaaaaaagtcaacatgtaggaaggtctccattttgcattgtttctgtgtcttgtatgcaatgttcctgtatgtttctaccctgcctgggatgtccccaatgaccctggctcctctgctcaaccaagtgcctgatctctggctctgagcatcgtggatgaggtacggcctcaggaagcatcgggtggattgggtgggagctgctcagagcagcacgggggcttgtgtcttagggacattgacagtgtccatcagcatgtcagagaagcagctgtagtgcccgtgtttctccctgagtcatgggttctgaagaagccagagcggcacaatgcgtgcttgcatgaggcactttcagcctttttaaatctgactctcagggatgggatgcctgccaagtagggtgtaatctctgttgtgtttttaaaacaacaacaacaaaataaaacaaaaaaaaaaaacc

SEQ ID NO: 26382 - DNA, 1127 bp, Mus musculus
agaggaaaggattcacttctggacacgaagaggatgaggaatctcccagtgcagtagatcatgcccgggactttcttagttagcgtcagcctagaaatcccctgtaatccagaagaggaggcttcctctccacagctctttcaagggctctgctggccacgctctgggttcattgaacagctccctctgggcttgcctttgtgtgcttacagctctgtccttttcaggagtgccactggggaggcctggcatgagatcatgctgtcttgtctgggcaaccgggcctgtgacccacatgccaacgccagtgagtgcgggagcgactttgcctatttttattttgtctccttcatcttcctctgttcctttctggtaagtccctttttgcccatatctgcctatcacaggtcatcttctgttggctcctgattttgacccagtccacatttatgtcagtcccatgcttaaagcctttgtccattgtctaaggcagttcagtgaaaccatgtgtctgggataatgagtaggtaacattaggatgtggtgggttcttaggcatttggaatcttgggaaccttggagcaggagcaggagcaggagcaggagcaggagcaggagcaggagcaggagcaggaggagcaggaggagcaggagcaggaggaggagcaggagcaggacaggagcaggaggaggagcaggagcaggagcaggaggaggagcaggaggagcaggagcaggaggaggagcaggagcaggaggaggagcaggaggagcaggaggaggagcaggagcaggaggaggaggaggagcaggaggagcaggagcaggaggaggagcaggagcaggagcaggaggagcagaaggaggagcaggaggaggagcaggaggagcaggaggaggagcaggaggagcaggagcaggaggaggagcaggaggagcaggaggagcaggaggagcaggagcaggaggagcaggagcaggagcaggaggagcaggagcaggagcaggacaggagcaggagcaggagcaggaggagcaggagcaggagcaggaggagcaggagcaggagcaggaggagcaggagcaggaggagcaggagcaggaggagcaggaacaggagcaggagg

SEQ ID NO: 26383 - DNA, 1184 bp, Mus musculus
cggaccatcaggtacatgtccacctaccctctacttgttttccagggcaaggctgcagctttatcggacacaggacatgggctggggtgtgcggtccctccaggatatcccactgggcacctttgtctgcgagtaagtgggtccctggagtcccacagctctgtttattgtgtttttgtttgttagtttgttttgtttttcatttctggaacttctcatacacgttcatgctctaaggcccttgggagcatgcttcactgtcatgcagacgtgaggataagcagtggggacgctgattacaccagccaggctcccgttactagccctagggttgtgctcagagtttctacctcagtcatttactaaaggtgctagctttagagttctactactagcatcttggtaagccatccctggtcctcaccttgcactgcaaatacacggggccagatccagatcccagcccatagaacttttccagagtgttctgtgtctgtaaccttccatggcattgtttcttgtctgagggcacagaggtgagatgggtcttcccttttcttactacagatacgtaggggagctgatttcggactctgaagctgatgttcgggaagaggactcttacctctttgatcttgacaataaggtaatgtgttgtgaagggccaacacatatgaacaagtgattgcaaaatgtaaaacttgggcagtttgttttagagtattctggaaagtaactggcacaggcagtctagctctggagtcactggtgcatatgggtgtatgctccttacacatttgtcaggttttatcatacagttctaggctcattttggtgttcaaggcacaggcccctaacttgagatatttctgttgttgtagcaagccacgtacctcaagggaatacctgggatacctcattatgccccccagttcccaggctggtcccctaagaccaagcaatagggagcagctcatggagtcacataggaagcagcataggatccagaaatgtgggcgatgagggaggcttttctgtttccattgacatcaggatactaatgtcctatgtagggagagaatagaggaccaaactcggtctgctccaggatttagggtttcctatggcttctgtgccaggcaaaaggtggctaagaccaccctagtctgtcactgtttctgaat

SEQ ID NO: 26384 - DNA, 1166 bp, Mus musculus
tttattgaaaaagttacaaattattctaaaagttgtatcacttgaagctttttttgtttgtttgttttattctggaaaataatattttgcaaaaccggctaaattgatgcactgtcctctgccctcccaaatacttttccctcccgtgagttgaggctctctactccctttcttagacatatctctatcctgctgtgcctatgtgtcagttaatttagaaaggatatctagcaaagatactctgcttgagctagaccttgatagaataattgtgcctgtcggtgtgtgggactgtgtgtgggctgttaaatatcttgcacgtgttgggctagactttgaatccagggccttgttggtgcagtgcctaccactgaatagctccagctttagttactatgtcttgaatgcagttttgaagaatcagacagctggtcagtaaaacagttttagtgctgtttgttaaatctcttcatgacaaatgcagagcctcacaactctttcacttcctgggaaactgactcagcccatctaagtcatctctgttttgctaggcgggtgccaatattgacacttgctcagaggaccagcggaccccactgatggaggctgcagagaacaaccacttggatgcagtgaagtacctcatcaaggctggagcacaggtggatccgaaggtacccacccagtcaggttcatattcctatttcatgtgtagatgtttcttagatgaagagggagcagtttctccttggaacactgcaggaacttgttgccagcaagacatttgccctgttgtttagcagagcctttgtacttgatatagtagttccttttctgtcagtaaagatctagtttggctcatgatttcacagaggttctgctccatcaaagtgtaaaaggcctggcagaattgcagcaggaacttgctgactagagcaggagaggatgtgagctgggctcaggagcaggtataactgcccaggcttctctctgatgacctgctctgctagccaggctttacctatgaaaatttcacaaattttaagctgagaataagactctggggacatttcaaatgcaaactataaatatgtggcgacttggcttgctagtaaagatctcctggtaaccactggatctacatctgtccagtaatagacaaatcg

SEQ ID NO: 26385 - DNA, 1201 bp, Mus musculus
ttgtccccctttgactttttttttttagcttgcttgccttttgttttagcagctgcagtatctcggaagaaaaaacgaagaatgggaacctatagtttagttcccaagaaaaagaccaaagtattaaaacagaggacggtgattgagatgtttaaaagcataacccattccactgtgggcgccaaggtaagagggatgcagggattgtttgccatatattgttggaaatgtattcctggttccaaagttcctggccaagagaacattctgttgaggtcattactaatttaatgaccttaatcactataaaaggaactggagttcttgagctcttgtgctctagcatagcctcgtgtgggtgcattgctgaccccgaacacatactccagggatccttcctgccggcttcttcggctggtagttgccaatgcaccccagtactggcagacctttccatctcctgtcacacgagttcgtagtgagtcagtcaaggttttatgtgctggacagcagtactcctgagaagtgtgaactgctgtgttccagggcgagaaagccttagatgatagtgccctgcatgtaaatggcgagagcttggagatggactcagaagatgaagactccgatgagctggaggatgacgaggaccatggagctgagcaagcggctgcatttcccaccgaggatagtaggacttctaaagagagcatgtctgagactgaccgggctgcaaaggtagaaatccactcccccaggtggtggcactagtgagcaaaaccacgaagtccactgtagcttctaagattctgggcactcttatgtgctgctgatttttttttttctttttatttaacatttataaaaaaattaagtagctgggcatggtggcttaggaggtagaggcaggcagagccctgagttcaaggctagcctggtctatatagtgagtttcatgcctgccagaactacatagtaataccccatctccaaaacatgaaaatgaagaaaacaattaaatatctgtcagccggcagaagaaccaagaaacaaaaggtagatcaaaagcaaatgtaattagtggaaaacagaataaaatggctagagttaaatctcattgagtcagtagtggttttgttatgtaaactatttttgaagactacagatagaaaaagcactgttgtgcattctgagacaacattcc

SEQ ID NO: 26386 - DNA, 1296 bp, Mus musculus
ctcagaaagatttgcttgcccctgcctccctagtgcaggagttaaaggtgtgtgccgtcactgcctggtgaattttagtgggcttcttatctaagtgtctccaagtcactattcagtagtgaagactatgtattattttatcacctaccccttagaaaaacttacaaaaataaggaattagctttgagagtcgctaccttccttcttgtctcctcagttggtatctaggatggaatggtactcttgtggcaaagaggaattattaaatgacctgtttattagagatgcatttaaactgtgaaatcagctgtctcatacctgatccagcagaggatggtaggactgagtgttctattcctatggttcacgagttaggttctttgtaaatggctgtacttctcagatttgtggactttctgccttcctcaataatggcctttcagtaaatgggaagtttttaaacagggattgatttttggatgcgctttattccattcaccatctacttctgcagtcatcataattacttgtctttgtttgaagcatgcagccagcaaagaccatagagaagttcaagaccataaggaaccaaaagaggatatcaacagaaacatttctgaatgtggacgacagcagcttttaccaaccttcccagccctccaccagtcgctacctcagaatcagtgctacatggccaccacaaagtcccagacaggtaaatctggtcaaccatcgccacccactcctgctgcccatgtgtgtgtcttgttgctctccaggtagtcagtgctggctatttttggagataaggtgatagccttgcatggctaagaggccctctgcccttaagactttatggcactgattttgttctcctgacttgctttcaatctcaagatgtatattatgtttcttactgaaatcttacgagatacgagtggaagacagtgaatctcagtgaggtgctggtggaggtactaaggtgctagaacaaggtgcagatagctgtccttgggctctagagttcattactaactatttaactgaacttcgttcattctgggcttactacaggttttttttcaatgggagtagtggactagtgcttgattattattgggacggtcaggctttcgttatatttacttttattttatttcatttctgatttattattggtattgttttattttatcttatattttccagacagagtttttctttgtagccctaagtgtcctggcattagctctgtagaccaggtagacttccaattcagagatctgccttcctctg

SEQ ID NO: 26387 - DNA, 1185 bp, Mus musculus
aaaagagggcgggcacttggtaattctagtactcaggagatagaggtgggtggatgtgaattctaggacagctggggatacatagttttttgccacaaaaaaacccacccaaacaaaacaaaaacaaacgagaaagaggataatgaagggtgaatatattcagaatacattgtatacaagtataaaagtatcataatgcatcctgttattatatataattaaaatacaataatagtaaaagaaaaaattccaagactattaaaaagttgtacattaagatatgatagtaggaaaaacccaagaaagggttttgaaataggaaactttgaaaataatattaacgtatatatgtgcattttccagtcttctcatttaaaaagtttcaaaattatattttatttgtttattcattttttgtacatgaatgtgtatgcgagtacacagtgcatgtttaccatagtcacatgggcagcttgcaagacttggctctatcctttcacagtgtgggtcttggggattgaatttaggtcatcagtgttgatagcaagctttattgttggagctacctgggttctggtgtccttgccagcatttgtgctgctgctgctggtggtgtctgtgtcagtgccttgccaggattgtaacttgaacttccttgaactttcaaatgtgctgctcttctcggtgctcatttgccaactttgttgttgttcatggataaataaccttttacatttttattataaagtattttattagcttttaagattaatcttgcttcccttccctcccttttacacatgcacttctggttttcaactcacagaggtaaataaattctcagctccatgattcctgggtaagggttctctgccaatgaggcgtcttgtcagttatgaggcactggtcccatgtctgtctgttcatgtcccctgtcctgctctcctccattccttcttaggtgtccaggtcttgtcttgaatttgctaggcagaccttggctggcttgcttcaaacagcgatcttttgccttctgtcttctgagttagtgtgtccagtcttgggcagttagagttgtgaccacttatgtttgtctgtagataatttttcctatttctgtgttaggtatccacgagtataattgccatggtgtgcagcagctcttttctctatctcctcctgctt

SEQ ID NO: 26388 - DNA, 1152 bp, Mus musculus
cttccccttacagctatccgggtgacctgcatgggttcctgtggggtctccaccaaggccaacgatggggcatgggtggtggaggagagctacttcaacagctccctgtcactggctgacaagggtgagtgtgagagccagcagtgatcacaggggcagcccttgactggagggggtcagcctgtcctttcccctccctgcaaccgtctcttggattcccactttctgggtctgggtggactctgatgcttagttatgactgtcatccctgttttttattttattttaaaatttgtatttattcacttttgagacaaggtttcatgcagccaggctggccttgaacttgctatttaacagaggatgcccttaaagttctgatttcctccttccacctcccaggggtgtgctaccatatgtggtttgcatagtccttggaattgaactaaatctttgtgtgtgctaagcaaacactctactaactacatttccagccccacactttcgtttaaaacaagcccttgtacgtagcctgtagctcctgctatggtcatgctgctatagtgctggagacaggtagtgtggactggtgggctgcactgtttacttctggtctggcactgtggccgctatggatttcctctggtttgctcccacctcctttttgtctctgtaggaagtctgccggctggagagcacaacttcccttttcagttcctgcttcctggtgagtggaaagcttgtggggacagcagccttgaaatggtgagacccacggtgggaggtgctgggtgacagccaagccctattatctctgtagccacagcacccacatcttttgagggaccctttgggaagattgtacaccaggtgagggcgtccatcgacactccacgtttttccaaggatcacaaatgtagcctcgtgttctacatcctgagccccttgaacctgaacagcatcccagatattgaggtaaggatggaacagagaggcttcctcggttgccttcaaccttcttggaccaggcaaccaagccctgtcttaagctgcttgctgctgtctagagcagcctgagtcttgtctgtgctcgtttgataaactctttccccttttctcttcaagcaacccaatgtggcctccactaccaag

SEQ ID NO: 26389 - DNA, 2146 bp, Mus musculus
gtgcaaaggaggctctgttctctctggtaataggtgttctggagtgttccagtaggttggctacttgtcttagtttctattgctgtgataaagcatgagcaaaagcaacttgggaaggagggattatttcagcttactgtttcacatcgcagtcctctgaaggaagtcaggactagagctgatgcagaggccatggaggactgcttactgtttgctcttcatatcttgctcagcctaacttcttgtagtgcccaggattgccagcccaggggtagcattgcccaaagtgagctaggctctcccaaatcaatacttatgaaaaatcaggacagagtagtagggccattttcataattgtcctctcaaaatgacttgtttgtattaagttcacataaaactagccagcaaagtactatatatccctatgttggtaaatttcaagcacacgttcaagcacagagacccttggagccagtagtaagctgctgcccctgtcccaattgtgggttggaatagatagtgtgatagacagccaaaatgaggcttcattcactgctgagctgtggttctcaggataactgttctttgggggattcacatgtctgagggctgtttttcatttggcatcttgatcactgcagaagtgaattcaccatggctggaatcttacctatctcagggtatggcctctcttgttcaagctttctacctgactgctgacctcggcagctctctggcctggttggtctgcaggtgcctgttaaacctttccctattgcagcatatctatcacagtcttgattttctgtgagttaaacgctgtctggctcagcacagccctttggtagccttagacttgtaagttcagcttctatggctgtttttgcatttatgctacacagtggcttagaagggaagacagctgaaactcaagatggcaccattccttgagtgtttaagcttggagtgttgctatgatagacctgcatcaagaaacttcctcctttcagttctgaaggttatggctttttagttgggatccctactcagaccccatgttgaacatcaatctgatcattgggaaggggagagatatgtatatattgtaaagtattgctacaggcagcagctgactcatgccttcaatgtctccacttggataaactacttttaagaggccagaacggttgttgtaaagggtcaagtttcttgggatgaaccatttagactacaaacttgtagtgatacttgcttgtatctgaatgaccagtgtagcacttgatcctgtcgtcccctcaccagcagagggtgctttactgccagctctgcatcagaaaattccacctagagactgaccgcacagggatggacagctgacctccaggcattgctggtaaaggttctggtataccctgggcttgcctgtgggttttccccatcaaatctgcacatgctagcacagctgctgctgtgcagtgagatgggctccatcaggccaatctgttgatgcttactccccatatctgttaccatcccattctcccttctgattatccctgcctcttgttctttgtagctgttctatgaatgttctggtggttcaacgatgggacccttagtcttaaaatagtatgttgggctacttggccttggaacaagctactgctggagggattggggttttttcagaattccttaggtgccaccgctgcttcagctgccaactggcctgcaagctaggctatatagccatattcctgcttcagttccagggctggatacccaggtgtcctatgaatttgcttcctggagctgctgtaacgaagtgccaaaaactggatggactaaaacgaaattgttgtctgttgggtctgtctcatggtttaatcaagacatttgctaccgcggccactgcaagtgctgggcaaaagggtgctgcaggtctgtcttgtagcattctggactcacttatgcattcagtgtcttagacttcaaaggtacacattaagtcctctgcatgtttccaaaatttcctttacatgaaggctatattggatcagagcttacctggagcagtattttgcctcagcaaagaccacacatctagggctggagagatggctcagcagttatgagcactgactgc

SEQ ID NO: 26390 - DNA, 1140 bp, Mus musculus
ctacccacttagttgtggccttttatctttgtttttgccagaggacctgacccagagttgcagctgatagcaccatcactaagtggttttgggtgggggtgggggttctagtcctcatgtgtatcctgaactccactgtcaggctgcttctgtgtgacaggtgactgttaccagggtctgctcttctttacctgataggcatctagattttcctccctaggacatgcctttgaagcagagtccctcaccagaatagtcctcccccggccgcaactgcgatggcaaaagtgcacagggcacaggcaagcttctgtaggaccaaaccccaaccttgcctggctaaaactcagcacctagtagtatgggccagtgcctcagcctcggtgcccttgagtccagtggacatcccgatgggaggaaactacctccaggggatctggggggctaaaggaagacagagatccacactcacggtgtcctctttctcttgctgcctcttgacactgtggcttcagcatctcgtaagtatgccatgccgtgtgcacttaggggcacaaccattgtcctgggggccctcccacccttggacagaattctgcaggtcagggatcctgggcctgggcagtgagtagtgctaagctcccattagtccagactcctgtggacaactaggctgcagcaggacctgctgggagctgggcctgggatgcccctctgggcccccgtgcttgtgcctctgtctccacgtctgtgtccctcctgccttcagccaagggcagtgctgacttgcggcggtttctcagggtattcaggggctacgcggagaggaagcgtcggaaacgggagaatgattccgcgtctgtaatccagaggtagggcctgccagccactcgccaccagggtctatctctagtctgcactggcctggccagggccctcctggccctggaagacctgatgggggaagggtggtggcgaccactggtctggccctgctctggggacgtggcagacaggaggccatgtggccaggctgcatttcagcccctggacctatactttgagggtacattgataatcatactgaagctagctggcccatccaagtctgtgtagccctgaagcccagagctgttcatc

SEQ ID NO: 26391 - DNA, 1500 bp, Mus musculus
aggaaggagaatgtgcaccgtcatgtgctgaggcttctcctccacttgcatgcaagagtggccccttccaagctggaggcattgcagaaggctctggagcccacaggccaggtgggtatcatcagttcctacttagagggcattgttctgtgaatgtgcttggccagtccagctgtggcatgatgcccttggcgcttgctttgatggtgtttttcatgattggtcttgcctctgggttcactcctccatgtaggctcagacagaccccctgtctatggcatgccatgtctggttttcctacagagcggggaggccgtgaaggagctctactcccagcttggtgagaagttggagcagttagaccatcgaaagcccagtcctacccaagctgcagagacaccagcactggatctgcctcttcccagcgtgcctgctccagccacactgtgaggctgtggagaactgaaactgtttgacagtggtgccctatggaagggcacctagttggctaggggtgtaggctgagctgagaggggtgttctttggcaaggttctccctcctctagtttctcccaggagctggtcccaaaaggtcctccctcagtggtctacttgcatatcatagggggcccttgatgtcatggtgggacttggcccctgcttgaccctggcagaggtggatggtgattgggatataggaaaagcagtgggcagaggcctgactgacctgatattcaatctgcacaaagtccaaggtatgctaggttcaccaaagtagatttgctggacctgatccccaagcacaggagtggtaccctccacagaagctgggggagagtctgcagcaggcctgagcctgctgatgtcagtgctgactgagtccatgctaactgagatctgtaggcagagctctgccctgtagctccctgcctcagtttatctttgcaatacaaagcaaatccttccccagctatgtgttttagcctttgagtaggggagtttcggtgtacacattgaattttccacttatgtaaataaaacggattttgataaatccatggtgaggaatctgtttgtcctgggactgggttcagtggtggatgccatgaccaccttcaccacctcttccttctcttcctcctcttcctcctcctcttcgtttctttcttccttttttttttttttttttttttttttaatgttaggtctcactacctgtctccgactgtcctggaactcattgtataggctaggctatcctcgaacttggagagatcctgcctttgcctcccacatgctgggactagtgtgtgccaccacgcctggagggtgtaacattctggagagtcagtgctttggcctctgtgctgagtaacctggtgtagggcctagctggaagatctcagggcctctcagagtgctttgatctctgtgtacagtctttcaaaatgagggatagggattgctatgaggaccaaggataagccctaagtcagagtg

SEQ ID NO: 26392 - DNA, 2031 bp, Mus musculus
agagtatgagaagacctgacctagtggcaggggccctgtactctccttgaacattggcaggggtgcctttggaagtatttactgtcttagctctagtgtgttctgtacatctccgtctggtctcccccaccccccatccccaatctatgtatccctgcctggcctctttaactgtagaccaggctgaccttaaactcagaactacctgcctaccaagtgctgggattaaaagcttgtgccattatgcacagcaccccctctccccttttttttaacatggcagattgttttgggtctgtacactttattcagtgtcacctcatgtcatttggccccttgggcacatacttagtgtgacctactgttttctcttacaggtcagagtggggctgggaacaactgggccaaggggcactacacagaaggtgcagagctggttgactcggtgttggacgttgtgagaaaggaagctgagagctgtgactgcctgcagggcttccagctgacccactccctgggtggggggactgggtctgggatgggtaccctccttatcagcaagatccgggaggagtacccagacagaatcatgaacaccttcagtgtggtaccttcccccaaggtgtcggacacagtggttgagccctacaatgccaccctttcagtccaccagctggttgaaaacacagatgagacctattgtattgataatgaagcactttatgacatctgcttcagaaccctaaagctgaccacacccacttacggtgacctgaaccatctagtgtccgccaccatgagtggggtaaccacttgcctgcgattccctggccagctaaatgctgacctgcggaaactggctgtaaatatggtgcccttccctcgcctgcacttcttcatgcctggctttgcccccttgaccagccggggcagccagcagtaccgtgccctgacagttcctgagctcacccagcagatgtttgatgccaagaacatgatggctgcctgtgatccaagacatgggcgctacttgactgtggctgccgtgttcaggggccgcatgtctatgaaggaggtggacgaacagatgcttaatgtccaaaacaagaacagcagctactttgttgagtggatccccaacaatgtgaagacagctgtctgtgacattccacctcggggcctgaaaatgtcggccaccttcattggcaacagcaccgctattcaggagctgttcaaacgcatctcagagcagttcacagccatgttccgacgcaaggccttcctacactggtacacgggtgaaggcatggatgagatggagttcactgaggctgagagcaacatgaacgacctggtgtccgagtaccagcagtaccaggacgctacagctgaggaagagggagagtttgaggaggaggctgaggaggaggtggcttagagctgtcttagtcactaaagcatgggagcagtgtgaactctttattcattcacagcctgtctgctagccatgtccactgtgcatttgctgtcctgtgtcctgacatcacttgtacagataccaccattaaagcaattcatagtgtgtggcttcgcctgtccaattccttctgataggctcttcgggtgctgttaccgaatgtcagtgcatagttgtcctgcatggctgcaaggaagaaaggcttaagctgagtacctgcggtgagcacactagagaggtcagagcagcttctctacaatctagcatggaggtagctttgatggcctaacaggaatgactagtgaaccccataatgactgggtgattaatccaggttcaaactgggactggccagtgggctgacaactggttataggcaagtgtggaggataaagcagggtcatttgacccagtcacaggtttggtgtgtcatataaacttgtcctttggaaggaagtgtgggcttctggtagggagcaatactcacatgggataaagcccatgtagaaaggaatcaggccttggcttctatagatggtggtgtttggccagtg

SEQ ID NO: 26393 - DNA, 1205 bp, Mus musculus
ccgcccctctgctcacggttttccgtgctccaggcgtcttcccggaccagcggtgcagtcccaccaaaggaggaagagcttcgtgcagcggtggaggttctgaggggacacggtctgcactctgtcctggaggagtggttcgtggaagtgctgcagaacgaccttcaaggcaatattgccacggagttctggaatgccatcgctctgcgagaaaactctgtcgatgagccccagtgccttgggctgctcctggatgcgttcggtctgctggaaagccgcttggatccctatctgcatagcctagaactcctagagaaatggactcgtctgggcttgctgatgggcgctggagctcaggggcttcgggagaaagttcacactatgttgcggggagtcctgtttttttccacccctaggacattccaggagatggtccagcgcctctatggtcgtttcttgagagtctatatgcagagcaagagaaaaggagaagggggcacagacccggaactagagggtgagctagatagccggtatgcccgccgcaggtactaccgacttttgcagagtcctctgtgcgcaggatgtggcagtgacaagcagcagtgctggtgccggcaggcactggagcagttcaaccagctgagccaggtcctgtgagtactgcttcctaaccatgctgcggtttctctgcaagcttcattagtcctgaattcaaaagacctctcaatagagcttatagactaactggcgatgtcttttttgcccatacttgtaaccagggattattgttcatcacgtttatactgtcctggacataggcatagggtgtgtgtgcagtatctttatggggagagccctcctaggtaagggacagatgtgtgttgtgggttctccatgagcggggatcttttctaggcataggctcagtctgctggagcgggtttgtgctgaggccgtgacaaccaccctgcatcaggtgacccgggaaaggatggaagaccgctgccgaggagagtatgagcgctcttttttgcgtgagtttcacaaggtgagaatcacctctctggtctgtttcttgttaaaggcaaaagtggagttgtggtagacctgataccaaacagtaggcaagttgaccaggagtggtgatggttgaggttatcctggtgctgtctatagaagccagtcctggatcctgatgacaa

SEQ ID NO: 26394 - DNA, 1920 bp, Mus musculus
cccaagtgctgggatcaaaggcgtgagccaccactgcctgacttgccctgttgtttttctgtcattctaaataccctgctcctaccagatgatttcctctccaggcaggccttgtcctaggcatagtgtgggtttggagggttgatctagctgactgctttctcctctccccctcaagctggcggggagccgtgattgagcctgaacaggccactgaacttccttacaaaagagctgaagcctccatcaaacctctggttttggcatccaagatatggaaagagccaggtgagttttcctgcccccttacctcaccagaacctgtgcctaagagcctgggggttggcactctgcatccaggtcatgacctcctgcccgatccctctgcagctcacccttcagcatctatattctgtccacatacctcttacagcatcatgaatatcagagcactgagcagcagagaggatgctctgttagagaatggcttttgccattctgctcctggtccaggttgtgcctaagcatgagaatatgcacaaaattaaaggtatacacttcaataataaagattcaatccggggctggtgagatggctcagtgggtaagagcacccgactgctcttccgaaggtcaggagttcaaatcccagcaaccacatggtggctcacaaccatccgtaacaagatctgactccctcttctggagtgtctgaagacagctacagtgtacttacatataataaataattaaatcttaaaaaaaaaaacaaaaaaaaaaaaaaagaaaagattcaatccaagtattttttttaatcattctttttgggtctttcctttcctttcctttcctttcctttcctttcctttcctttcctttcctttcctttccttttctttctgacagggtccttttttttttctttgtagccctggctgtcttacaacttgatctgttgtagaccaggctggcctctgtagaggcagatctgcgtgcctctgcctttcaagtgctgggattaaaggtgtgcaccaccactgccagcatcaattttaaaaagtcttgttaatggacagaagagacacaatgtcccttgatgtgtcagcttatttctagacctcacaggtctctgggccatgtagcactgtttactgagatgtgcttgatcctggccttgcattctgtgtgcccattcccattctctgtgtgcttggcctgcttcttttattatataatctttgaggtaagagatgtctgcacattgaaccttagaacctactgggaagaggtgtatgctgtgacaccccacagattgctatgtgctgcctagtttaggagaagaaagcacttatgaggcactctcaaggaggccacataagtgcagatgttgttcccgtgggactctggaagctcatttggttggagaacatgtacacttagggtgtatctaccacagtctgcccagtcactggtccctgcttatccctaagtttacattagacattggtggccaggtcccacattgtctgcagtgtagtggcgggccataggaatgctgccctcttccccttgaggtcctagtactgttgagtgtggcctcctggtgacatgcctccttgtcactgtatcactgagggtctaacctgtgctttggcctcctgccttccccgcttcactataactcctgcttctggccagagtcagtcttgctacattaactgaagcctggcctttgagagccttgcctgccccaacagtgggactgttcttgccactcatattttctcttctctagcccccccgaatgagcgccagaagggagtgattgaggcctttctccatgcttggaagggttaccaaaagtttgcttggggccatgatgaactaaaacctgtgtccaaaaccttcagtgagtggttt

SEQ ID NO: 26395 - DNA, 1982 bp, Mus musculus
cgtaggaggagagcacctggtctgggcactgatggagactgaggtgggcctgttgggtccctgaccttcacaaggcccacatagttttgggcagctgtcaagtgtgatgtacctgcccagttgtaggtccctccagtttcaacttttcatgaaggtggtgggaggggcaggagtcagactagcaggtatgggttctggggtttaggctggaaagtctaccaagcctttgacttcctcgaaacctcatatcatggctcctgattcccatacctgaatgaccctgttggctggctaccggcagccccatggtagtcccaagacttcttatcacctcctgggaccacccaggaccccagtgcctgtattgagttcagagtgatagcccaaaccagtgaggtgctgggcatggcccaatggcctgtgatagccctgactcctgattgacccatgggtccactgggccagtgtgaccttgagggtctttgtggctctagtgtttacgggttggactcagggatcctcctggctaccctactgggctggcgggggttagaacagtaaatttgtcttattcccaggataccctggtataatgtgatctctcagctgagaagaaagtggacttggtcccactgtaatggttcttgtggagaggagggaaggggtggtgtctatctagactgaccttaaggggacagcaggttctctggataacatctcagcaactaccctctaaagtcagagctcctgtccacttcaggtaggaaggctttggggccattatacaaacaggctaggatgcttggttgtgccgtctcacaagggcctgtgaagatcacatgctgctgccggctgataggtttgtggtagttgtgccttggtgtctgagcccatggagtaggccctgtctttgatgagttgttactagactatccctgggccttggctaggattctcctatccaattccatgcagtacagcatagggcaaactggacagaatagaaaggacctcaaggctctgggcctgtgttccctgtatatcccaagatctggagatttgacatgctaactaactcatctgcagctcagtggcagccaccttgtgcctctgaggtatagtagctacgctggggacttcctgttaaacacgtggaccccaagccagttctaacaccaaaggtgtttacaaagaaggacttggctggtcacatatccttaggccttgagtttatgggtagaagctgccgccctccacccccccccccccccatcagttataaccctttggttgatgttagcttctccctatgctgtcctcctctaccggagccccataggcttgtgaatggacaggttcaggcggcgcccagggcctaagcattgagaagtgtattctccatctcctgccaaactatggctggtgtcaagggatgacagtaactgccctgtggccctctgaagaggtactgtggatcagagaaactgggtagatgtccacaaagctgggagcctcattaaagcatacaagatgggaatgggcctggaaggggaggctggtgcccagtagaggcaggtttccctcctcctccaaagcaggaaacctgagagctagagtccctgcttaattaaatgtctaaatggtctcagcaagctgtgtgcagtgttactttgtgtagagcatatctccaattatctcatccttccatgcatggatcctactagacaaggacacattaacatgtgtttattcagtttcttccatctaccataaatctggacagtccatcagatacaaggcaagttgtcacaccactgtagatcacataaaacaagggatgtctggggtttgctgcatcttatctggaagggtgctgcttcttaggcccaggccaccgtggcattgctggttgctttagtctggctgctgctacccactcacgaatgagggtagattccagcttacgcacctccacgacagat

SEQ ID NO: 26396 - DNA, 1188 bp, Mus musculus
agccgcactgctagcggagctcgcctcattggaggccgacgcgctgcgtgagcactgccagcgcgccgcagctgcgggcgcgctagctccgggtcctctgccggacctggctgcgcgcctgcagcccctgcccccagaacgcgtgggcagcgcgatccgctgtgaccaagagacacgcctgcggtgggaagaggaaggtaggcagcgccgtgccaggctggggttgggcaggtccggcccgttgaggccggaagagttagagcctatgggcggtgggggtagtgggggcggagtggaggacacggactcgggaagtgcagcggagagttatttgccttgcaacttcttcctcctgtgcctagtaacccccgaagtcgtgctcacttgtggttctccaaagtgaaagaggccttatctcacgatgcacctctcctccaggtttccgacagatttctctgaacaaggtagctgtcctgctgctggcgggtgggcagggcactcgcctgggcgtcacatacccaaagggcatgtatcaagttgggctgcccagccagaagaccctgtatcaactgcaagcagagcggatccggcgtgtccaacagttggctgaccagcgacaggggacccactgcactgtgccctggtgtgtcctccatgccagcctcccaaaaagaccacccctaaattgacccaggcctaccccacaccaagaccttagacccaatcttagcacggccctagacagagcccagtacttgccattactgaaccccttctagacttgccagattgagctggactcccctggaagcagctcactgctaggacatttacaggtacatcatgaccagtgagtttaccctgggacccacaatcaagttcttcaaggagcatgacttcttccacctggaccccactaacgtagtgctgttcgagcagcgcatgctacctgctgtgacctttgagggcaaggccatcctggaacggaaagacaaagttgccatggccccaggtatggcccacaccttggataggaacaggttgccccacctgggccacagagtacagctgtggatcaggaggcctgactcccaggtaagatgtactcaggcaggctatgtggccctgggcatgtggctctggccagtctggagtcacaggctcttggtttgtgcacctgcagcactt

SEQ ID NO: 26397 - DNA, 2102 bp, Mus musculus
ttaagggaagacagacaaagtcaggcacagggagaagaggctccttagagatgcctggagacagagtgtgggaccctgctctgcctaccaggtaggctcacctctgcaggccagcttagtgcacaaagagtataattactttaagctagagtgctgagtctgttcagtcactccgctgccctgggaagcctcagtagaggggctgagaggccagtctccagtatcaccatcatccaaagaggagaaactaggctatgttctccaaggcatacgttggaaccttccctggataagctggtgctttccgtcgtgggtgcattggcagactacacaggtgctgatgtcattcattgtgtctgtgtgctagactgcctgtggacaggtctcagctcccacacctgcagctcctggagcacaaaggtatgtgcaggtgtgcatagagccagtctgcttgctgtcatgagtacatttccatgctcacgtgtgtgttatagttgaagcagatgaaggagttagaccaggaacaggaggtgcttctgcagggcctggagatgatggcacggggccgagactggtaccagcagcagctgcagcgtgtgcaggaacgtcagcgccgcctgagccagagcagagctgctgcagtaagtgccaggccagccctgacaacaggacccaagttgccctggggtggggctcccttgaggctctgagctgagacttgagatgaacaggtgtgccaggttccgggacttcctcatggtcccgcttcttttccaggactttggggctgaaggaagcccccgccctctggggaggttgctgcccaaagtacaggaggtggcccggtgcctgggggagctgttgactgcagcctgctctggcagagtgagtgctctggaggctgcctggcatcccttgtccttgttctggatgctatgccaggaaaggtctggctcactgtgtacttccacaggctctgccttcgtcctctttagggcccctgggccctccctcaccctcaactccagtctggcagcaacagaccatcctcatgctgaaagaacagaaccggcttctcactcaggtgaggtgtgggaagatggggctggggctggaggcccagcaaaccctgaccgcctgcctgcctgctcgcctgcccaggaggtgactgataagagtgagcgcatcacgcagctggagcaggagaagtctgcactcatcaagcagctgtttgaggcccgagcgctcagccagcaggattcgggacctctggactccactttcatctagttggttgtacctctctaggacaagtgcacacagacttagcttcagctccatgacactgccgggagcctgtcttctgactgaagaccaccagggcttagacctcagagccctcaaggaggcagctgcctccagacttgggtgctgctagaaatgtactctgccggaagctgccacttgccactgtcagtgggtggcggaggatcatcctcacgtttacctgatttcaggcagcccctacagagaagggggcatgtttacgtctgtcctgatccacctggcagggtttcctgggatcactggcttagtaaaaagtactggtcacactgggctgtatttctcataatgcccagcaggggctgctagttgagcttagttcctctgccctgtcttaccttggtattactgagtgagtgagcagatagatttttgagctgagggtgggctaggaggcccaggaactaggaggttagaggttccttctgtccaccagaggcactatggaaaggtggttgtggctcagataggagcagaagggagacatggaatgggaggaggatggggctatctaatagagggctctgtgcctgttggaagagccacaaagtcaggggttgtgtgtaacaggctgagaaggaaaatctggctgcagctggaccaggctagtgtggttcctagaaggaagccaataacttggcttacccaccttaccaaaactaactgtctttaaactgttaactaactggggaaagatggcatcaagttagctcaggttgtggccatccccctaaggaggtcctatccccccaaataga

SEQ ID NO: 26398 - DNA, 1181 bp, Mus musculus
cttctggtttgaggtccctagctcagcctacgtgttcctcatcgtcatcaacctcttcatcggcatcacagccacggtggccactttccttctgcagctttttgagcatgacaaggtaaaggtgggggtgaatgggcagcaaggcgtggcttggggcagcaatgctgagctatggctgccccccaggatctgaaggtgggggtgagtgggcagcagggcgtggcttggggcagcaatgctgagctatggctgtccccaggatctgaaggttgtcaacagttacctgaaaagctgcttcctcatcttccccaactacaacctgggccacgggctcatggagatggcctacaatgagtacatcaacgaatactacgccaagattggtgagtctggctctgggtggacagtacgggccttcagggggccacagagtggcgtgcctagtccttgactcttaagttccaagaacaacggggacccttaaggctctcagaaccctgaaccagcggttccacaggccagtttgacaagatgaagtccccgttcgagtgggacattgtcacacgtggactggtggccatgacagtcgagggcttcgtgggattcttcctcaccatcatgtgccagtataacttcctacggcagccacagtgagtggagtgtgttgggtgatgctgcggacccttggtggggtgtgtgtgtgtgtgtgtgtgtgtgtggcttggccaagccctgacaactttgctgccctagacgcctgcctgtgtctactaaacctgtggaagacgatgtggatgtggctagtgagcgacagagagtgctccgtggcgatgctgacaatgacatggtcaagattgagaacctgaccaaggtgggctctgagctgtgggaaagtaggtggggagtggggcggggagtgggtcccagcagtgggatgaagtcaagccagacaggaacccccccccctttgctgagagggaaggctctttggtcaggtgtacaagtctcggaagattggccggatcctggcagtggaccgcctttgcctgggtgtgcgccctggagagtgctttgggctccttggtgtcaatggtgcagggaagaccagcaccttcaagatgctgactggagatgagagcacaactgggggagaggcctttgtcaatggacacaggtggggt

SEQ ID NO: 26399 - DNA, 1263 bp, Mus musculus
tgcaagctttgaagaccccagatcagtggtggggattacaagaaaccaaagactagggggagtgactaccaagctggccaagaggaacagacaccaacgagtacttagtggggggaggatgctcaggggagtgccagtgcccagcgagaagtcaggtagagcgtgaatatcctcagctcccacttgggcgctgaagatgccttcccaagcccattttgtctgctcttcaccaggcccagctctccttcaacactgatacgctctgctgaccatcaagagccacatcagggatgcagctgtgtggggcagatgtcaggcggtggccgtggcccctagtcacacatgccaggccctggaaaggcaggttcaggaccaaagggctcctgccctcctcccaactaccatcctccccgaattgtgccaaaggctggcctggccctgggctgcacataccctcaccctgctttgccttaaagccttgggtcctggcccagccccttaccctgcccagcaccatccaccttcccagggtgacatgggctgccccaagtatcctgtgactcttctctgcagcggccgcaagtctacccaggccagcatcttgcacagatgtcttttcatggacacccttgactgcagttggggatggggcagcttgcctatttattttgctttaagagcctccctcacttggctgtggtacagaagttaggctaccatgggaagccgtgaatgtggctgcctcagccctggtggaatgacaggaacggagaagctgggcttgctggctaggggaggggccactgttccctccctaccccctcaatctgcctttgctctcccgtccagcttggcccttcctgccacccacatgggagcaggactttgtatatagcacacagatgtttgttttcaataaataagcaaaaagcacctacctgtgggagcctgtgcctgtggtggagggagttgtgaaggcaggcccactgggctagggtacagccgcccggtctgactgaaccagatatgaagggcgggggtgctccacacggggagatccattgtgcttccccttacctgcccacacagcccagaccctggttctgtgggtaggtcctgagtgggcttatagaagggtagggtagtgcagttcacactgctgttatctctcaggcgctgcgtgtctcatcccagcctcccccactaggcctagtacccacagtgagtccgtttgtgctaggctgtctctacttcctgaaaggt

SEQ ID NO: 26400 - DNA, 1210 bp, Mus musculus
ccacatgtactgtacttactcttgtattttggtttgttacaactcagctttagaaagagatgtgtttatatctaaagtgacaggaagggacaagtgaccaacagtttggaggccctgcagtacaagcccttgggggatagataggaaagaagaccggcattgaagagcggcagatatgttgctaagaaggacccagaaaagcggaagagcacaaggagtgagaccatagtagatctctgtttggatgcaagggccaaagaacagagcccagaatagcactgagtagctaatgcgctaagccccgccctccgagtgcttcccgccccgccccacgtgctaaaccccgccctttagtcagcctcttacttaatgcctggtacccggaaacaatgtcaaccttgagtaccgcccatcgcctcgtccttccgtccctccagaaaccagaagttccgccgccgagcgaacaccttagattgtgagtcaccgagtttgtacttctgcgcaggcgccctcagcccacatctaacttggctcctgcggcgagaccgccctgctgtcatggctcctccgttgttgtcgctgccgctttgtattctgccgccgggttcgggctccccccgcctggtgtgctactgcgagcgggatagtggtggagacggggaccgcgacgacttcaacctctagtgagtggagtctagggatgtggggtgcgggagcatagcgggcacggtgcctgacagcccctcccacccagtgtgacggacgccgccgagctctggagcacctgcttctcgcctgacagcctggcgaggctcgtgagtaacagtgctggggataggagacagctggtagcttgccaccctccccctccccgtggcagtggttctaatagcatttccagggtagggcagtttggaatgtccagtgggtccagggtcctgggcggggttagtgacaattccttgttcccagcagaaagcccgatttggcctaagtggggctgaagatatccattcccggttcaggtgagttccagttagggaggccatgtgaatgagaagcttggggtagtgctaacacatcctggccataacacacatctccctccttagggcagcctgccaacagcaggcagtaactgtaagcctgcaagaagacagagcattgataaccctttcaggggatacccctgccctggcctttgacctct

SEQ ID NO: 26401 - DNA, 1244 bp, Mus musculus
gcggcatgaggatgtggtcaactccgtggcttttagcccccaggagcaggaactcttgctgacagccagcgacgatgccactatcaaagcctggcgttcaccacgcattgttcgtgttctgcaggctccacgccctcgcccccgccctcgcccccgccccttcttctcctggtttgccagccataggcgctgaaggcttcagtgatttgagccattggaacctactggggaaaatggtaccccgtggttctttattgcactggggcagagtagctcatagcagcaatgccttaggaggggcagcctgaccccaacacacacacacacacacacacacacaaaacctgctcacttagccataaggcttagcactagggtagcccttgttggcagcaccagatcccatgctagcctcttggctagcttggggtacacaggtcattgggaaccctgttcttcacctaccctcttcccttgggttggcagctcacacaggtccaagctggcttctgcctgggtacctttcatattcagccaaacccacacccttggatgtcttgagtgtaccctgggcagcaggccacaggcactggtctctgataattcagtttttgctactgagtggcctgcagtggactgtgggtgctgcatgctgcactcctgaactgtttgggcctgaataaacagttggcaacagcacatgccatctagtctgtttgtagcgaggggccccaggccttgctggccaatgtcgtcatggtgatgtctgcctctggtcctccaagagactgaagagtgagctggttcgggtgcgtagtcctttgacttcagggatgcctgtgcatggctgtgagtgctaatgggtgcaggaagattgaccagcccagcctggacaagcacccaaaagagggttggctccatcctccctcaggagagttccctgggcagagtatagtgatacagatctgtaatacttgctcctcggggggctgaggcaggatgatggggagttaaaagcctgcttggatacaaaacaaatccaaggttgatctaggctacttggttagaccctggcttgagaaagtaagaggtttgggaattgtggtttgtgttaatagtgtttgcctgtcatgccttgagttcaattcttggtgccaccataagctctgaaaatgtgtgaggtcccagggtgcaggagggtagctctaggccatcctaggagcttacgtcatgcacctacactt

SEQ ID NO: 26402 - DNA, 1231 bp, Mus musculus
ttattgttgttgttgttatatacttaattactttttggctgtcctggaactcaactatgtagacggactggtctcgagctcatggagatctgcctgcctctgtctcctatgtgctgggattaaaggcgtgcgccaccacgtctggcttagattttattttttatatagagactcactgtagctcaggctggctgcagactcacatcagcctgcctacctcagtctcctgagctctgggattgctgctgtgagccaccatgctcagcctggccctcagccctttctgagatgcttgacccacactctgaggtcagatgtgaaagcagccttgtgtgtgtgtgtggaggccctgtgaggagtggacagtggtgatggaaggctcaagccgagcagggaggttgggtgggtgcaggaagtggcagagtggtcagcatctcgctggctcgtttcaggcctcaagctccgggggaaggacatcgggaagcctatcgagaaggggccgaaggcgaaatgaacacaaagcctcgaagccagtggttccggctgagctctcctggctggtcccccaggaccaccagcactgccgtgggtctcctcacatggtcaaacggaacacggggggttaggcctgtgtgccccctcaacccataactgctgtcaaacaaagcaaaccttgtaaagtgatagcctcctggatttttcctccctgccttctgacgctcagcaggggtgtgaacctgcaccttctgtccgatggacagatggctgcagagggaagttcaggcctgggaggagtggatgtcctcggcctttgcctcctgtccatctaagggcctgtgctctgctggagagaagcagtacgtagcattctgaagtcttctctcctcaccgttgaccacagttgtggagggtggagatgagtgtctcccttcatgatacgtaccccagagggacctcgggagtttgaaagttctttccctgtccgctcagagaagtgggcatcagtcaacctttgcctgaagatgcagggtggcgcctggccacgccccaccgcctcctcccatgcagctgagttttggataggcaggagcctagcttgaaacacatagtatctttggtgaggacaggtttcctttgtgtaggaagggatcgtctggatgtccactctccctgaggacagccctcgggggcccccagtcctcagtgaagccacatctgaggcatcatgtgg

SEQ ID NO: 26403 - DNA, 1556 bp, Mus musculus
gtgggatttagccttgtgggttgcccattgactctagttctgctcttcatgaccttcaggaggaagaaaagactacaaaaaagaaaagcaaacacaagaagagcaaggacaaggaggagggcaaggaggatcggaagaagaagaggaagccccctcggagcaaagagcagaaggctgcagatgagctggaagccttcctggggggtggggcccctggcagccgccaccctggaggtggggactatgaggagctctaaacatgcctagggcaattgattgtctgggaagaggtgggctgccagtggctgggaggctgctgtctatgcacccacattcccaggaccaccctgccacctatgtcccccagccattatgtctgcccccatgtggtctggcccactctacattgttttttgtgcagaagaccttggtggtgttcaggcccttgggtcaggcgctgcaggtgctgggcctcaacccagcagaagcctgctctgcagggagggaggggacagaataaagttgcagctggcttggtggatcacctggcctcccagaaagagctgcaaccagtccccggtgtttctcagggatgtgcctggggccgagaagggacccaccagggtctgtttacagaggcagggcgtggggctgcttggcttctctaatgcccaccacccagccccactcctgcttgccttccggggctctcccagagccacagcatggcttgggttgtggaccttcttccccatggatccagagtggcacagggtcctgccctgagcacagatgtgtcatgtgtcactcaggagggcatggcagcatctgctactgcaaagtggcccaggccccgcactgggtaagcctggcaagagaacacaatgtaccacttctcctgtgggagaggcactaacgggctgccactgtgtgccagctgcgcctctgcccgctgagcgcctgcgcaggtgagcccagagggcaccttcttagacactccagacccataccataaagctctctgattttactgtggtgtgtgactctttttctggtcccctaaacagcttgagatgaggccaaacaatggactaggtgctgttaagccaaaattcggcccaaagggtggtctgaggacttagtacctagccataccatgtaatccagaggaccaaggtggccatggttcagggcttaccaccacaggctgatacaaggttactgcagggagaatacctgagagtctcaggccctggggccctggtaaggtagttgtgtcctgctctgcactgcctccctgcctgctgggagtctgggggcgcctgcaattgagaatttcgcccccgctggcagctctccaccctcgcccactgtggacacgttgccatgagaaccctccagaggcaggcatttatcactgctagtgacgttgggggtggagcatagtgctgcgcctactgtgggccaaggctgagagtacttccctagaacttgtgggggtgctatgaggggggcttcccttttctgctagggagctgtgtacacaggacaattga

SEQ ID NO: 26404 - DNA, 1166 bp, Mus musculus
cccaggaagggaaggacaaacaggtgtcatcagagagtgatcctgaggggcccattgctgcccagatgctgtccttcgtcatggatgacccagactttgaaagtgatgaatcagatacacagaggagaatggtaaggacaggtgctgactgggcagctcaggcaccatccttccagagctagaggacaatcaagaaggtctgtttcccagagcctgacgagaggcaggagaatgttcctggctccagtgccccagaggcacaatcctttcttatttactgtgtggctgaagcctgctggagaaagtgaatgagagtccatgggagagggcccattgtccacatgaaggccctgctgatctttctgaatctgggtcaggttacccctcccatccagccctagcccctggagtcgtaagtgaacttgccaaccttgtttcccagatccctcggagtggtcagggcacaatcggcctaccagctgctctctttccagggcaggtttccagtaagagaagacctctctgatgtaactgatgaggacactggccctgctcagccacctccaccttccaagctcccaggtgctttcagactgaagaatgactccgatctctttgggctgggcctagaggagatgggacctaaggaaagcagtgacgaaggtaggagggcctggaacctgctggatcctagaggtccttgtctgtgatactcctgtgtttacatttacattgcctatggtttctcttttcaccacagtaattagctgtgagattggtgaaactgtcacaccagctggcaaatgtgcacccaagtgtggtccagaatagtcatctaaacactgtcactgtcactctatccatggttccctatgggtcctcacctctaccaaatgttctacattccatgctttcaggtgtcccaagcctttgggacagaattcttttgggagggggaaaaaaaaccacacaggctaataaaaggttactgcagggagaatacctgggaatctcgggccggcccaggctgcctggagaagtccttggacttgggccatgtcagcccagcaaacagcttaggactgtactgtcaggttctcagccccatagggaggggaagaaattacttgaaggcttgttcaagactcaccaccacaaaaatacat

SEQ ID NO: 26405 - DNA, 1848 bp, Mus musculus
caactagacatcgatgccacactagaggagctatcagtgcagcaggaaaccgaggaccagaactacagcatgtacgtgagctagcatctacagctatgctggccttcactaccctgagcggggaggatgggtcctgtaccctgttgccagtaggccctagtgttcacagataagagctgagtgccagactttggtctgaatctatgaggcagtggagaaagcaccacatacaatcagcctgagtgtccttcagccaagaccttagcagtactcagtgtagagcagtgtggggagcatcggactaacacagctcagcagctcctctcagcggtctaggacctgcgtccatgctatttgtccttgcccagagcccttcctgttcacctgttggggtataattattaatatgagctaattaatagtcagatcaacatttttctaaaacagatggactagtactttgaattgagctatgctggcctgggagcagcctcagtctccctacatcccctctcagttcttatagaaagtgaggacaggtactcctgaagatgggttgtgtcgactctggcactctacacccccaagtactttggagcctacagaacttacaaagtgcttagacatacgttatggttcctacgtgtgggtcagcacatgcctgtgatgagagccactcctcgtgtgcgattgctaacttcctcactgaccataaccagccacactacttcactgttgtttggctaacagctactggcctacccagattccacaggagtgggtggtcctgcacctctgctgtgcagctcagttccccaggctgaggaaatgccagtgcagagggagagcatgggcttgggagctacagtgctaaagagacaggataggcaaggaattagtctgggtaccagggacgggacagttgactggcagacaggccctatcctctgcctaaatataaatgtaaaagacacactgatgcctgaaaaccatggaaaaagagggccgagaagaagcaggttcctcactccatgcccttttgcccctcctagcttccttgaaatgatggaggctcgaagtcgaggccacgcatcccctttggcagccaatgggcagagcccatcctcaggctcccagtcgccagttgtgcctccaagtgctgtatccacagggagttccagccccagcacaccccagcctgcccctcagctgtctctaggtgtctcctccacctgtccctcagcaccatctcctgtaccctctttggaggccatgccctcctctgtacactcttcagccccagccccaaccccagctccagccccagctccagcccagcgtcgcagtatcatctctcggctgtttgggacctcaccagctgcagaagtgaccccttcacctccaggtaagcctgggagcagctctctcatgtgaatttggggccaccttctggcatcttgagcttcatattcctcactggaatgtccctatgcccctgaaaagtcacatgggccagccagtccttagcctggttctaaaatagcctggaccttgagcctgggtgcatgccttgttaagtcccaatcccacaggcacagttttagggcttgcctagcatgggggcaaggaccacataaggaagaaacagcatttctctgtagagccagctccagctctcgaagctccagcaagagtccagaatgttgaggattttgtccctgaagatggccttgaccgaagcttcctggaagacacaagtgtgcctaaagacaagaaagttggagccaaaggtccccagcaggatagtgacaggtaagggtcagattgatagagctgagcacagggtcc

SEQ ID NO: 26406 - DNA, 1169 bp, Mus musculus
acctctcccatttggctcccagcatgagtcataccatgggtatcttgactgtaggatttgaggggggaggagcaaaaactgatgctcatgcgacagaacagccttcctatatggagggcaagccaccaggccttcctaccctgcagaagtagatggaggtgttgactccatttcaactaccccaggtacagactgtttgaggtgcccccccccatttctcagaagcattttgtgccacattccttcatcctggagctacagttctgagagcgaggcatgcccctccctggctcagttggctacctggcagattctttagtttcacagaagggtcagtctctttcttagggttatgtccagcatgaccaaaggatagagagaaatggaaggagccaggtagaagatgccctgtctcaggtcaccttcattttgtatgctcgttgagtccagagatacttctaaatatgaagtaggtaaattgaggtcagcaagctaagggccattgccaggactgtatgaggccatggtgacctgctggccaagcacaggcaccaatgagataacaggctgcttctctggacgggccacgttcccatgagtcagtccatggtcaccctggggctaggagcttgtggcagcagagccacaagcaggagggaatgaccctgttctctgatcaatgagtccgaagtatagggagtagaggtggccttcccagcccccaggaatgggggtcctgcagagcacttcaactgaggttgcagcttatgtacgtatgtaggtgtgaggtagatggagtgtgtatggggggggggtgtgcatgtgggtatgtgtcatgtgcaggtgaccagtagtgtttatgggtacacaaatgtatatgtacaggtgcaagtatataggatatgcacaggtccttgcaggtgtgtttaagtgtgcacagttatatattcaggtgaaggcatgcatggatatgcacaggtgtactcaggtgtggtgcaggtatgtgtacatctgagcatatgcacctgcccatacagatctataagaagcaggcatgtacaggtgtgctcggtaactctgtcctggccccacacactggtgagacatcatctaaggttggctcgcagctgagcaacctgcgcaggcaagtgggagccagtgctctgctc

SEQ ID NO: 26407 - DNA, 2059 bp, Mus musculus
cccgacactgaagaaatctacaaactcactggcacggggccaaaaagcatcaccaagaagatgattgacaaactatataaatacagctcagaccgaaagcagtttaacctgatcccagccaagaccatgtcagtcagcgtggatgcactcacgatccataaccacttgtggcagcccaagcggcccacggtgccaaagaagacccagactcgtaagtgaccatggcaaccaggactctgagaggttgtgctgacgggatccctatttattattttcatctacttggtacgaagttgatgagccatggacagttttctacagcggttcctagagaacagagaagatgctctctcccctgcacacatggatgctgggcatgacatatgcaggagtgagtcctgtgctttcatgggcatggctgctgtggccctgctgaccactgagatcctcagaataagggacaccatggagtgagatcctggcctgtgggcccctcacttgaagttcttcagaataagttaaatgtgatctgctctctggcctcccttcacccctgtgcacattgcctgatgccccatgttggccagctgtaatcgtgcgtgattatagggccaaggctcattcgggtcagggtgtttgaatgtcttcataaaaggagttcgtatgggaaatctttttcattttagaaattgtataatatttattgactgtgtctactgccaacctttatatccagttctaagattctgaaaaaaagaaaagaaaaaaaaaaacctgttccttgctgctcagaaaaagtttactgaaaatgtcagttcactaaaagcactgaaatcggtaaagtttgtcttctgctaaaatgacgtttacatatgtggagtgagtatttctgccacacagttgggggctgtgggtactgctagctgatgctggcctcattggaagccggcagctaagccggcttagccaccactggttaggtctggggaatgtgctggcatgttcactctgataaaggcagattttggtatagtagcgtactttccacccttggctgccggttcctttgtggtgctgtgaaggcctggcttacctaccacggttcttgcttctggaggaacagcgtgctcagtgcagtgtgcagtctcaggtgaggtgggtaattctgctttttgcctcttttaaaacttggtggttatttgcggttatttcagaatggtgtagctgctttgggtctcttccccgctggcccctgtggcagctgcctgcctcagaacaggcgttcctggggagcagaggtgccccagcgatggatcagctatgtgaagaccctggagccacttgtagttttgcacatttctttttgagagtgttacttgaatctgtcttaactgcaggagagacttgaagatcatagagggaactcagacatcttagtgttagcgctagcagtgtcatgtagacagaggaaaggagcatgggacagaacgccggaggcgtgaggcgaggtcttgtcttctcttccttggtgactgtgtatccagtcaggggtggcgctgtgctgtatgagcattaaagtctgtggccacctgtcactggatgccctgtgtgtcttcatttctcactgtgcacttgatgttaccatatttattttaagagagcactaaaatataataaagtaatgagctggctttctgttaaccatgtgtgtggttgtcacaactccttctgctgacagtgtcccacatcttctggcttcagggcagctgcgcatgacttttgggttacctaggaatttatttttcatgaagagttggaagacctggtgtagagcaggaagttgcatttctgctcgacttttaatacggtgacttggcatgtggcctgtcctgaaggctgtctcagaacgcagggtctgcatgtgaagtacagtgccagtgtctcaaggccgggctgtggaggccatgtggcttgatggctcagaagcactcgtgccttctgtgttccatgacacagaagtagttttgattttttttttaattaggaagtttccggtaca

SEQ ID NO: 26408 - DNA, 1146 bp, Mus musculus
atggctgttacactgaaagaacttccaacggtacagagttagttacttaacactgaatgtttcttccaaactacagatcagcggcacaggtcgaattctttaactcgggttgatggtcagccacgaggtgcaataggagcatggccagataaaaaaaacaggtgagtcactgaactgtttctgttgggtgctcattagactaagcagcagttctccagatgtgttccagggacccttaaagattcaccacgctgcttctgggagctggcagctagtgataccacagcaatggcagcatgtgctggcacagcgactgtatgatgtatggtgtcccagcaatagagggagctgtgagggcctcgcagtaggggtctgtagtagcaacaggtgcttcctgtgctatagacgcttttgtttttcatgtttcctgtggtgatttttattcagggtttaaaaaatatctgagctgtcatttgtagtgtgctaaatgtagataatcaaggctcatcggggccttggttactttaaagggtgtataaaggagtgctggggcaaagtgtttttgagtcattcactaaatgttgcctctgcggctcttttgtcctaaagcgtttgtataaggcttcttcctgtaagactgctgctctctctccatatcttgagctcttcttcaggctgctgagcagtgagttggtttctcctcttgtttcaggcctgtgtcacagccaacatcatttgctctccatcatgctgcaagttgtgatgtggatcccagttctggtgacagtgtcagcttagctcgctctatcagcaaagatagcttggcatctaacattatccacctgaccccacagaaccagccccatccctccgctggaaagagcaatgggaaaagcctcctgagcaatgtcaacattgaggatgaggacgaggagcttgtagccatcatcaggacagatgtgtctcctccttccccacagatgcccaggacctcacctcaggccccaggcctggtagcaagtatcaggtctccccagagacaggcagacactttggagagtaagcctgacagtttttacttagaacccctgatgccagcagtactccggccagccaaagagaagcagattaccactaaggaagatg

SEQ ID NO: 26409 - DNA, 1219 bp, Mus musculus
cagaaattgagcagaaaactcccagctgcactcatgcagatacttgagatggcctgtgaggtgccatgggacagatgggggtctaaaccctgtgcctggagccagtgggaagtgtgtaccttgggatgggtgtagatgggtacgtttgtgccacgttctacctttggtcttgtccctggccattttctcttttgccaaggccatgtatcacagtcagtgggatgtacccaggaatgcctgactattgacacagtttcactactgagagcagcatgtgttctccctgtgtagttttctctctacactggtcagctctagtcagccaggtcagtagaggattaggctggagctgagcacctccctaatctttggatggggacaggctcacatgggcatagacaaagggcagacctgtagcctggtcccctgattttctcaagtttggaactgttctttgctattgtgaaacagagttgtaaaggggacaggttaccttccagttaaattgcctggtgttgtgattagctaaggtcatgcacactggaaagcctttgctatcagaggctgtctctaactctcctgtgtgagcatgtgtgtcatggccacacctggacctgcagtgctgacattcctttccaccttccttcctgcttcctgagcagtctccctccaagtggtattggaagttagtacccgtaagtgacccaggccaccatccaccatctgcaaagccatcttgttgccatcatgcgcttccattaaaattgctcgcacccaagattggtttttgtctgtttgtttaagtgtccgcctgggggctgtgcggcttgtctagcatgagccctgctggccacgctgatgggttctgttatgtggcacattgggatgccatgttcattcccctaggctcttagtgatctctaagtgaccagtacagcatagctgacaggacactgtcttttctagcagatgctaagaggactgggggttacctagtggctggaatcatttcatggccttttctttctgctgttactttgcctgggggctggtgtctctaaccaccttccctagaacctgtattctaggctgtcagattgaagaggcattctcccactgagggtacaggtggactgcagagagggctgtcgatggtgtattttgatgtggtcttcttgtttctacccctcaggtcatatggaggtcagctcagattctg

SEQ ID NO: 26410 - DNA, 1232 bp, Mus musculus
cctgattcactagaattgtgattaaacagtatgctgcctggaccaaagataacggaaagctggttgccatgttctgttgtggtagcagacttggcgtacttcctaaacaaaagctgtttggtctctgcttggtacctgaccttgactttggaaagaagataagcagagctcccttctcagaatgaatgtcattgtaccatagccccttctttaatccgatggcatcttggtttcctttgagctctctagcatcccaggaaatttgtgcttgcgtcccaccatcattcagattatgctggcctttgcacaaatgcctcattgtgcctctgtcgtgctaatgaggctgttagttgaccctagatctttgtgtgttgtgtgtggtaccttggctgggattttgctggacggtgcttttgtgtgttctcatctggctggtgatgcttgagactggactgtgcatgtccattcacccagtgctctctctcctgccatagacaacatccctgaggacctccgagacccgttttacatcgaccagtatgagcaggagcacattaagccacccgttatcaagcttctcctgtccagtgagctgtattgccgtgtctgcagcctcatcctaaaaggggaccaggtggctaccttgcaaggacaccagtctgtcatccaggccctgtcccggaagggcatctatgtgatggagagtgatgatacccctgtgacagatgctgacctcagccaggcacctattaagatggtgagtgttgccgggcgtggtggcgcatgcctttaatcccagcacttgagaggcagaggcaggtggatttctgagttcgaggccagcctggtctacaaagtgagttccaggacagccagggctatagagaaactctgtctcgaaaaaccaaaaaaaaaaaaaaaaaaaaaaaaccaaaaaaaaaaaaccccaaaaaacaaaacaagatggtgagttgtctgacaggcattcctctgttcccttggctgagcaggcaagactcagtgcccttccattagggtcagatggtgaggtttgccaatgtgtattggtggaccttaatgacagacctgcattttaaagaatgtcatcattctggaaagaacagcttgcttttgggttttcttctcactgaagagacagtgtagcagggcacaccactgcagagccttcctgctggatatctgcactcagccagaatcggttgctatgttct

SEQ ID NO: 26411 - DNA, 1256 bp, Mus musculus
ctttccagagttggaatgccatgagtccaggctgttgactaccccacttgtggactgtgatctggaatactgtgagcacacaggcagtccattgctctgtaaaagatgtaagcatgggcagctgaccaccttaccctgctgatggctctgagttgggggtgctgtgatctcacaggcagtctgcttccctgccaacagcctctgaagtctttttggtcagtagctcaggcactatggttggctcgtaagggtgagtgtcagggccattgagaaaggctcagtatgcttgttggtgttgggtgctaccactcagctctgtcgtcttcccacagcatttgaagacatgctggagaatccgcttaacagcacccagtggatgaacgacccagagacgggcccggtcatgctgcagatctctaggatcttccagacgctgaatcgcacgtaggtggtacctactgtgctccttggctgtgcagtctcagcagtctgtgaggcagtgggcacagggttcagccgggatcttgcctggaccacagcttctcggactctcctttccagacctaacagcttatcaacttctgccacatggcttgaaagttgcagtcctagcttctgacaggtgtctacagaaagtggctgttgcattgggaaggtgaatgattgctgcccgtccctccagatactctgctgggctcctgaagtgctacttgaattgacccttaggtgtttgcttgtggagcccaatgtatttaaaagaaggcatgttctgatccaaagtgttatgtcaagtgtgctaatttaaccagactgactcacagatggcttctttaataaataaacccttttcctatttttacttgtgttacttcatggcagcaaggacatcacatgtatcccctaggccgtgtacacattgtctctgcccagagcaggtgtcattgccacttctttctagatactatttctctgtgtagccctggatgtcctaaaaatcactctgtaaaccaggctgcccttgaactcagaaatctgcctcctgagcgctgggattaaaggcgcgtgccaccacctctcagctttcatggctacttcttcacttggaaacctgaatcctctgagcccagctcaagttgggtttggggctgtgacatttcaagtagcaggccttccccccagccacagcagatggagcagggtgtgtgtgtgtgtgtgtgtacactcacaggtgcatgtactcatgtgtaccttgtgcc

SEQ ID NO: 26412 - DNA, 1131 bp, Mus musculus
gattaaaggtaaggcccaatatgcccttgtagatttggagggctatgtctgggatagtgttgcagatttaagcaagtttgttggacattctgagaaataatctttttggtttgtttgatttttgagacaggtttttactgtagaattaaggttggcctcaagctcccagcagacttcttttctcagcctcgcaagagcagggattacaggtgtgcatcactgtaccgggcatgatctctttctttatcctactgcagttccagacagaactccggaagatcctcgtgtctctcattgaggtggcacagaagctgttagcactgaatcccgatgcagttgaattgtttaagaaggcaaatggtatgcgtgggtcctaggctgctcctaaaagtgtccccagccctcacactgaaagcaagttctgctttggttaatgggggagagggtttggtgtcagtaattgctaggtgaggtgagcctctactgatgaggctggggggcttcaaaggactctggaatcccctcatggcaggccttgtctttctcctcagctatgctggatgaagatgaggatgagcgagtggatgagactgccttgcggcagctcacagagatgggctttcctgagagcagagcctcaaaggcccttcggctgaaccagtatgcttgctttcttcttgccctgggcttccctgtgattctccttccaatctctggagtcatacttttttttttaatttttatttatctgtgtatatgtacatgtgtgtatgggtgcccatagaagccagagaggaagttggatcttctggagctagaattacagactgctgtgaactgcctgacacaggtgctaggaaccaaactcaggagctcttcatcttaatctaggagccagctccccgatcccattgagtcatttctaattgggtgttctagtagaggcaccttattgctgtgcttcagaagtgctttcatatatgatcttttggggtgtgtgtgtgtgtgtgtgtgtgtgtgtgtgtgtgtgtggagggtctctgttacctatgctggacttgaactcctggacttatgtagtcctcctgccttaggctcctgagtagctaggattgaaggtgtgaaccatga

SEQ ID NO: 26413 - DNA, 1145 bp, Mus musculus
tgcctccccctttttgttttacccaaagtgacttcaccatgctattgcccagcttccactgccggtatctaggaaaggggcacagtgagtcctcttttctaaagggggttagtggaagtctggggtgatggagctgtggtgtggaggagcttttctgtagtgtaccatctggatgaagcacatgaattctccttcaaagcctaaaccgtcccaggtcctgtgaagagttagcccctgttatctttttttttaaagatttatttattcatttaatgtatatgagtacactgttgttgtcttcagacatcagaagagggcatcggatcccattatagatggttgtgagccaccatgtggttgctgggaattgaactcaggacctctggaagagcagtcagtgctcttaaccactgagccatctctccagcccccatgacctgttatctttccatgatgtacagtactagatatgagcagaagctaatgacagacacctctgggatatgtgcacgtgaagatagggttgtggtggtgtgtagtgtgacgacctgtgtcatgtcttgttccggtgtgctgctgacaggcttcagaatacagttagtaggttctaattgtgtttcatactgtattctgaacttgacaaatctgctagaattaaccagggattttagaatttcaaagcatcccacttagtagtttttgaagcagaatggggttctactgttttggttgttatgacctggtaccacatcaaagcaaatgaaaggatgtttattttagttcatggtttggagggatacagttctttctggtgatggggtacggtggcaagtggctctgccagggggagcctgaggctgcttgctcacatatctttgaatcaggaagtagaaagggcagtgctgctgctcagttgactgacttatgggtattcagtctggaactccagcagcccattcgatggggctagcacattcaggcttggttttcttccccctcatttaattctctgtggaaagccctcatagacacccagcagtgtgccttattgatgccataggtatttcttaattcaaacaaattgacattattaaagagtcatttttaggttcaaggaaagttgaggttgtctgcttcatcacaat

SEQ ID NO: 26414 - DNA, 1158 bp, Mus musculus
ccagcaagtggcatttgttaagtttacttacattcagtgaacgttgtactatagttagccttttagttttagttaagtcttggaattagttcttgaagccttcctggctctaactgctcccagttgaagatgaaacagatgtctgttagacactggtagcctatggaagcaccatgccagacaagattagtgccagatagctttttagaggggactcttcggaaagttagggatctacagcagtaggttgtgttaaagttcagcattgtgtttcctctaaaggcagtcttcaagttactatagcagctgcttgcaaagggtagtttatcatctgtgtgcctttgtgtagtcagtgtgtaatgtcaggcaggctccaagagatctgtttcaagcccctcttctgcagtgcattagatgttgagtaaccgtgggtctcagtgtctgtggttcacctcaatgaggctcacatacaggacaaaatgtattttagactgcccaaggagtccccaacctttaagcttgtgttgagcctgtggattttctcaatagcaagacccagaggctcagcagaagcttaaagactggggcctccttgggcatctagactgttccctagcatccatgctggcctagtactatgctgtgtcatctcctaggtcagttcctcgggggctgagcttggagtaacttcaaagtcggtgtaaggattgaaggaatgaaaggtgtcagcctcaaaccacatgagcatgggatgtcaccttcactgctgtgatctcttgcctaactcacttgtggtgtggatatacgtaatgagcatggcagtattctatgaagggggtagggagatgattcacagatgcttgctaatacattttaggggcagtatggttaggcttaggcagcaggttttgatatgatgctaattatttgtgatgtttaatattccagttgatattggagttgtatcattttgaccatttttgtcattattcttgtttaaattgagactattctactccacattttccagggcagagggctgaagcagcaggagaatttcacagcattctagatcacagggctggagagcagaggcattagaactgacccacctccgggtcccatcagctctaggagtcacactgcatttattagaaa

SEQ ID NO: 26415 - DNA, 1146 bp, Mus musculus
aaaaaccagactccctcctttgtttacaagatgactaattccagaatcggggctgtcttgtcctgtcacgtgaccctgacttgtccagaccctataggtgagagcctctcagcatttgtcagatgtctacacctctgttcctagcttgactactagcaatatgcacatactatgtagagtctattgtagaaactattgctacatcagcatctttgccaggacgacagtcgggactggatagggttggagctactgggacagagctggatccagccatgagtcttatgtcctcccagagcagacaatagtccctgaggcagctgggacgaatacagcaggtctggggcaagggaccagagacagggctgatagtgtgagcttggaggtgctgcctgtctgcccggctgtctcagtacttgaattctgtattgttttctataccagttgcttcagctaacatctgatttggtgtcttactttgcccttggatgtagatgcagccagtgatgtatgaaaggcaattgaggagagactctgaggggtcctttgtggtgtgactgcaggtgtgggcctcgaagaaaactagatgtgtggtgtttgtttagaacctaaaggaaggcagaaaggggctgtgagagctggcaagctgacagggccagtcccctccaagggactgtggggtgcctgctgctacctgcttcaacagcaggaccttcccaagcccagtgcatgttgtgctctgccccactgtcctctgcttgggttccctaaagatggtgattcttagctgacttggggaagagcaggtggcctatcaaccagctgaaaactcgaaagaccctgttagaacctgcttgccgcagatcccagatgggaatggcgacaagcacatgatctgtcagctttacgcacttcacttcgtggaaaggtgctgctgctgggtggttctgcatgtcaggcagctcagcctatgctgctagaagaagggctcagtacaaagtgtttcaaaagtggcaaaggtgtttgctttgtttgttttgttttcctagaaaggaaaaggatgcaggatctaaaaccttctgattgaatagcctctgcttgtgtcccattggtcccctcactgcaagctcgattgtgatttttatg

SEQ ID NO: 26416 - DNA, 2161 bp, Mus musculus
tcgcaccaagtacaacaacttcgatgtttatgtcaagacccgctggctctatggctttatacgcttcctgctctacttcagctgcagcctcttcacagcggccctttggggcgcgctggccgcgctcttctgcctacagtacctgggtgtccgcgtactgctgcgcttccagctcaagctgtcagtgctgctgctgctgctggggcgcaggcgcgtggacttccgcctcatgaacgagctgcttatctatggcatccatgtgaccatgctgctggttggggggctgggctggtgcttcatggtctttgtggacatgtgagggcccaccctccatggggctcctgattgtgccatacctagcttctctcttggagggtggggctggtaggggcttttttttttttttttttttttttttttttgccccatcctggaggtaaggcctgaagcacacactcccattgaggggagaaaagggctgagactactctgtaatgggaacagcacacagtctcgctgttggcttctgcgctgtccttgctgtgcacgttaccagatgtgctgtccccgttagcctcttgccttgggttgcctgtgtgttttcaggttgtccagtgggtggcctgtctgtcttttttccaccttgagaccttctgtgtgacattctcaccaacatcaggcccacccagtgggacacaaaggggtgcctttgggctgcacagcccctttatgtgccctcctcctggctgtcctcagggacccacctggctatacaagcagacatactactgccactaactgcgcccactttgagcccatggaccactctctgctgttcacaagtagccgtgtcagtcttgaaccccaagtcaggcctcagagtcaccttggtttgcataggtgcagtttagcagaacagcatatatggcattggctagaccctggtacaagggagcacaggccccaaggcttgaactccagagcagggggctggtccacaccctgggcaggtctgtgtgtcaagccatgctggaactctgcaaactgaaagggcctagaaaaacacttgtgcttaacctggggagtttttacagtctctgagggatggggtctccagcagcctcccagagtcttggccagatctgtagaaaacgggaataaaccgactgtcccccctcagtggtttttactagtcctgtgggcagcctggatgtgctagctacaccttccccacatgttgttaggcctggtttgtgagatagaagatggagtacctgaccacctttggcctctatcaggggtgggaatatgactctcactggtgacaagggcctaggtggcaaatgaagtggtttgagcagtaactctgggtgcaggacattgagcatatcctgctaccacatgcttcaccccccattgtcaccccacatcctgggcatgggagtggcccctttaaccctaccctgccaagaaaaccaaacagggaaaacaaagatgtaggactattgacctagctctttaacttgtagccagctgtcgtcgttggtctggcaagagggctcatggaggaagtctgtctgcctcccaggatagcagatgaggtgccttcccagtggaccctgctgctgctcgcttgctgcagagaattgtttgcactaaaccccactcttcccccaaagcaacattgttctttgttaattagctcatgtatctcagagtggcctgaagccccattttgctgggtgatggtgggtgtgtcagggctggtggtgggagggaatgatgggaccttgtcactcagtgcacacccagctgcctagtgtcctgagtgcctgttaaattctttatgagaggaatcacctgcattaaacctatttttttaatgtgctgatggagtgattgcttacgtttttcctgtgctggggcctcacacatgctgggcaagtgtgacaaggggacagcgctggcatctctgcaaagccggaaatcttgtcctttccaaaggacgtcatctatagtgtcatagttctgaaagcagtcaattttaatgctgagtgttgaagtcttaaaaccagtggttctacagtcaggtggtctgccaagggcctagaattgagttggtcaataaaggtgagggcttggtttctggtgctctccagga

SEQ ID NO: 26417 - DNA, 1605 bp, Mus musculus
ggccttgagggtaacttaaaaacaacaacatcaacttaaatacattatttgtaaaatctcaatggtaaacttgtgcctaaagacttttaacaaatggactaagtctacatttctggaaacattcttactgagaccctccatagctcaggagcttccttttatttggataaagcaagctagtctctctctgtgtgtgtgtgtgtgtgtgtgtgtgtgtgtgtgtgtgtgtgtgtgtgtgtgtggtgagagcgcatgtgcgcatgtgtgtgcatgtgtgtacattccattttgcatattctatcttttatatttgcatccttcccaatgacagttggtcacatgggtaccatttaagaccctgtattatcgatgtccctgctgccacttaagaaaatggacagctgtctccttgggctgttattaaccctcctttcatcacatggcaggatcagttctgagagccagaccttggctggggcagatggccagactcagccacgtgaacctcctgcctcacttccctgtggaggaagtttcttctttgaaacctggagtcctgtgcttaaaaacaaacaagcccagatcatcgttaggtgtttccaaggatgaacactcctggtctgtcagcttgagaattgggcctatttaaggacagctccagtgaaatgtctgagcccgaagggtggccctggggctgccatagcaccccacagtgcctggcgtggctgatgtttgcagaagcccactctgggcagatcctactttcagctgctcttgtacagtcccaggtcatcccttctgggggacaagcttgccacggacatccctgtttgaactgttcattctgcagtgaaaaggcttgcatccctccagggacccatctttgggccaagtgtaaggtctgttttaaagtctgaagttttatgagaggtattaagattaatatctagaatagttcagtaatttaaatgtttatttattttttaatgcaaagattttgagtaaaaagcaattggcatgaaaatgtcaatgaaatttcttaaggggtacattttgtatttaagtaaactctaatgtgcacattgtaagaataaagaaatttgacatttagtaaagttgtttcagttttttgaaatgtgagcagctttatgtaaagctggattcagggaattctccaaacccttttctcccatctagtttgcagacacaactctgaagttctaagaattttttgtataaataaactagaggcattcgggaagacagcctaaaggtcaggcagatagtgaagagagaatggactatgctgagacctgcatcctcagattgtctctgaacccacagagcctgggaggaccagccagtcaactagaaagctgttgagcctctcaccaaatttccctcccatctgtgcccagcctggggcagattgccctgcaggcacctgggaacttctgctcaggacccttcagctcttcagtagctggtgggtttgcatgcatgagccttttctggaaataggggttggagaaaagggactaaaatctgccttcagagtactggatgcaggtggttgagttcgtagttggaggcttctgacctgtg

SEQ ID NO: 26418 - DNA, 1184 bp, Mus musculus
tctttatgaagcctgtcctctggctagctcatgcccgtgtagctttcattctgctcacttggcacctcccagtctcccctctcttccctgcaggtcctctctccccttcatgtggtaacagtctgattgaaaaaaatatctggtggagtgtgtattcacggcaaatgtgtacatgtgtttttatgtgtgggcctggccaagtgagaaatgcctcacaggttgtcccccaggcaacacctggcattgctggcatcaggagtcatttgcctgtgctagcagtgtacgtggagttagcaggtgcacctggccactctcaccaccacgtgtgtgagatttgtcactttgccttgtgtcctattatctgctctcagctgtgtggtttcccactgtatgcatctgctgtgacaggatgtagcatgtcagtgagcagcggtgcacccagggttgtgtggatagtgctgcagccttcactggccttggctctgggcttgggacagacacctagagccacagccatgacccaggttttcttgtgtaggacctgacagggagctgcggacagtcaggcagacaatgatcgacttcctgcagaaccatactgagggcacctggcctcctgcatgcccacccctggaccctattcagtgagtagctgcattgaaaggtggcctgtggggcccagagcattgtgatagtagcctgtggcaagtgggcagccctggtccattcctttttccaagttgcctggtacagtttgggcatggtttttaaaatgtctgtgtgtatagtgactggggtactggcatactgtaacagcttatgatcatggagagcactgaaggtttttctttcttctgacaggtccagtgacatcctttccttcatggatagccacagtggccaataccatgctattgtgtttgaaagcaatggttcttatgttggacgagaggtaccgtgtctcatgtactttgggactacagctggggtggctgggatggactgtggttagtgtattgatagcaacaaccttgagctgccatttcagagatcctgaggaagcagtttatagcaaaaaagaaaagaaggaaggaaggaaaaggaaaaggaaagaaaaggaaagaaaagaaaagaaaagaagtaagaaagggaaagaaagaaaatagtgaagtgacaggacttgc

SEQ ID NO: 26419 - DNA, 1230 bp, Mus musculus
gttttacgtatgtgagtacactgtcactcccttcagacaaaccagaagagggaatcggatcccttccagatggttgctgggaattgaactcaggacctctggaagagcagtcagtgctcttaactgccggttcatctctcctttttcttagtcactatttccatgacaccagactatacatcctgggcccttggctctccaggatttagttattttttgtttgtttgttttgtttttgtttttcgagacaaggtttctctgtgtagccctggctgtcctggaactccctctgtagaccaggctggccaggatttagtttttacatgtgttcatcctctgtgggaagcttgcagctcatagtaaaatggtatgaccagcctagtcctagtgattgtaccagctgtcactccagctgatggccgtcacacatccagggacgcgtgtttgtcatggctccttctaacctctgcactgggtttctccattctggagaacttggggtttcttcagctatctgtgctattgacttccacttcagttttatgagcaaaagtttcatgttattaacacttttaagaagccaccactgtggaggccttgtgacctccttcctggagtgactgcaaagccatggatggactcccttgccgtcctggaaacccagcaagccacaatccctagcagtgtggccccccaaggccaaagaggactcctgactgctgcttttggaagtattttcaaggccactgtccccataggagcaagcagagggccagtaagctacagaaggggccagctggggctctgcataagtgtcccacccttccttcccatacagcactggaagcttttgcctcaactcatcttgtaggctagacagcagcgcctgtctaacagctacactggctgggcagggctagcaggtccccacgcccacctcaggctgactcttgaagggccaccctgaaggagaggctgtggcacgcaatccatagaggactatagctgcctacagcttgtagattttgaccaagctttgtcccactgcacctaccctgcaccactgtccttagacggcagatgaggatatgaggcagggccatgttagaaaagcaactttcagaagcctggatccaggaggaccttggactgcccatccagttcagatgagcaggcagggagggctcctctgctcccagagtacttctacttccctctgttctgttcctg

SEQ ID NO: 26420 - DNA, 1190 bp, Mus musculus
gtctctgctgctgagaaaaaccagctgcaggtgccctatgagacccacagcactgttccaagaggagaccggttcctacacttctcggacacccactcagcaagtttgaaggatccggcctgcaaggtaggccctagaatgtgagcaaggggaatagtgtgtgctctgtgctcttagtggtcactatagctgtcactctggacagtgtggcagtttggtttctgacctggcaaaagccttgtccttttattcactagaattgttgcttagaactggtttcagagttgtgcagtagcagtggccttcataggagctgcagcctccattgtccccaagtcatttgctttaaaggttgtaagaatttctgcttaagggcacttagatagtaggcagttccccatcctcaactgccatgagtcgtggaggtgtccttgggtagtgtcagtccaacttggctggctgtgcattgacctgtccccctctgtcctcagtgctgggcctggggccagccagattagctctggcagtggctggagcagccttttggactatacaggctgctctgctgctctgcactggggattgctggagggacaatgcagtcagctcagccatggtactgcctgccattgggccagagcatctgtcttagagagggcactaagacaggccctactttaaggccacattagccttaccacagagtattttcgcaaatagcaagtggtgttcttacaagggggcgttaaacgtgcacagtggcaggcctgtaccagatcctcttgatatacagcctgtgttgaaggtgcccctagagaaaatgccgaagttaatcaggactcgtccacccacccagagtcacacactgatgaaggaaagaccgaagcagccactcctccctagttcacgctcagggtctgaccctggcaacaatacggctgggccccatctgcggcagctatggcatggaacttaccagaataagcagagacgcaagagacaggctctacatcgcaggctccttaagcacaggcttttgctggctgtgataccctgggtgggtgacatcaacctggcctgcacacaagctccccggagacctgcaaccgttcagactaaaggtactgcccagagcactttggggaacttcctggagccagggtgggagcaagtgccgctccttgatccat

SEQ ID NO: 26421 - DNA, 1138 bp, Mus musculus
ttgcccacaagttgtcaagtactagtgatgactcatgcagatgtccttccacattgctggtgggaaggtccccagcagagaggttctctccttttctccctattttctttcagtggtttgttcagatgtattttagtttacctacactcagcagccctgcagaatcccattcaaaacaggcagacattttcaacagacttgtctccagagatgcacaagtaaccagaaggcccattaaaagatgctcagtcacttatttcaagaatgcaaatcaaaaccacagtgaaatatttcgcacatgtaggggaattgttttaaaacacacacacacacacacacactaacaagtattcctggggcacagatcatagcctccagaaaaaccagagcatgggacagcattgtgctggggcagtatagtctgtacctgcaaaactcccttgtcccaagtgtcccaggagcttgtatattagacaagaatgttaatagaacatccttcattgtcagaaagaaagtgtggggtacaaagccggagtgtggcatttgcagggaaggtcctgataagcgctgtgtgatacatgtggcgccgtgggaacattctgaacattccgtcaaatatttatcaagacatgctcatttctctcaagagcgtctttgggtcggtgactcttgtgcttggcctttggaagaactgtcatctgtgcaaaatgtctctatattgtgctcccacaagcagcatgtgaggcttgtggctgaagccgtccacgtgtttgtggaatagactttgacacagttgtctcacagcagcccctcatggctaaccgtgtgtacaattgcttgtacctgctggcttcttacatgtgtacatctctttggaaaaacacctgtcaagtcccttcctaggtttaaattacctgtctttggattactggcttttacatgttcaaaatgcaagtccctagtcagatgcactaatcaacggctcttctctcccttcttcacaaggcgccttacagcagtggttctcaccgtgtgggtctcaccgtgtgggtctcaccgtgtgggtctcaccgtgtgggtctcaccatgtggttctcaccgtgtgggcctcaccgtgtgggcctcaccgtgtgggtct

SEQ ID NO: 26422 - DNA, 1649 bp, Mus musculus
tctcatgactagatatgggacttgcggtgggactactgcccacatcactgagagtactgcatcatcagcttggcctaagcaaagagcaaaattcagaatcagtttctgatgaacttatctggcttgcaacctaccatctttagttgccttccctaagcttcactatagggtggctggcctgtgcacaggcacatgggccagagggcagccacacagaatccagtgtggcaaacctggttgatagctctgggctctctcctttagatctgtctctggctgcctttgcacggctgaaataatggccctggtctctctctgctttaggcagctggtgtctggggcagacacactgaaccttgttgctgaaatcctcaagtctatcgacagaattagtgaagttaaagatgaggtggactcttgagacgctctacctgccaccgggtcccgtcacctctgcaccgaaggcaccacacatcttccgaatgtgttcctgtctatgcagtcctcatcaaagcatttcacggcctaatcatgtgactggccatctgcagtacggggctcctttccaccagttgaacctaacagtttacatgaagtcccactgttcgatagactcactgatttactggaagacacttttataaaaccactaaagctgaaacgacagttttgtaacaagcttctttcaccaccctctctaggacgaggtcgggctcagcctcagtgttgtcaagtggaacacgaagtgagccagtgtgtaagtgagcagcctgtacagagacgcgtgcctcactgaggcagcaccgcttggtacgtgctgccgtcctcccaccaggaccataggaccaaggtcacacactgtgcacagtgcaaagcttcatacaccctctactgtgtgctgtcagctttggaaagccatttggggctgtcgattttgatgcacgttaatgtgtttgtgtgccttttgtatagtgcaattcagactggaattaaagcacacacccacctggggggtcagcaccagctctttgggctggctggctggtttttgaaggacaggcaagacataagcagctccctgtgctgtgctgaggggtcaaggtttgggggccactttcctataggttgtttttttgttttttttttttaatttattttcccttttcccctcctgttgagatcaacagctttctgatctaaataaatcttaaagatcatttagactgtcttgtcatttactcagggattcatgcttgagagctaccctgctcttttaacttcaaggtctgcatctgaagatattcctgcagggtagtggtggcgcacgcctttaatcccagcactcgggaggcagaggcaggcggatttctgagttcgaggccagtctggtctacagagtgagtttcaggacagccagggctacacagagaaactcgaaaaatcaacaaacaaaggatattcctgccattgctgggttatcggaccctcaagttcttgacccttggagtcaggcattcacaagagccactacatcaacatatcacaacatatcacatacatatcacaacatatcacatacatatcccaacatatcacagagccactacatcaacatgccggatgagccacatcctagcttcacactaagg

SEQ ID NO: 26423 - DNA, 1210 bp, Mus musculus
tgcttacgctggaaaaacatggtggtatctgtgactgccagacctcaaggtatttcatgtccatctgtcctcctcatcatgtcctcctcatccttggtcagagtctcttagagtctctctgaaaatccacagcatgcctgatgttggggacagaaagcattccatactagtttcttctctgacatcctttgacctttaattgtccaggcctttacctgggaagaatgctaagctaaacaggcaggctgctgctggctatctgaagctgggcatgtgtccatgtgaaaccagtcttcatttagaccagctggttatttgtccaggcctaggaagccctgagtgagagacttcctctgtgaagagaggagaaccagtttcctctggttccaaagtatctcatggagagcttcactgtgggcagttgtggctcccagaaggccttcacacccaagaaagaggtagtggtagtgtctttgctggcatgaagggcctcagtgactgagttgttatctggtgtaaaccatgcacctgctattgtggcttatttcctttcagagacaccaccatgtatgctgtgtctgctgacagcaaaggcttggacactgtggtggatctgttggctgatgtggttctgcacccccgactgacaggtgtggctctgaggctgggtggtcaggaggagctttggaagggctataacttcctgtggggaggcactgttagagccgggcactcatgtgccaatcattggagagtgccagtgctgaaacaagcctgcagtgttctacacaatgtttcatcctttaatatatctaaacgagaccttaaagggtttactaaagttctgctcagaaatgtccctcatcccgtgtgtaagcatgaatgccatgcctacagaagtttctcttgcctggtctcctttatcctccgagtctttgagtcctgttaggatgggagagggcgcagcagctagccctgccagctgctttttgcccagtttcacagcagcctggccgcatgtctccagcggaggaatggagccctgactcagggggtgtctggttcctaagtgttaccacagccaccttgtgtcctcacaggtgtgttttggaacagacagcaggtgaagcagcagagcttggagcaggtccaaaggtctgcagaacagaaaaagacaagaggccgggggccctaattttcatctggcctc

SEQ ID NO: 26424 - DNA, 2320 bp, Mus musculus
tccaggcctgtgatttttgaggatgtggggaggcaggtgttggctacacattcaagaaagctgccccacgagctatgtacactcattcgtgagtatgccctaaagcttggcttgggatcatttgagactgccctgatgcaaacagacagacggatctcctgttgtctgccataccacaatccccggcttccccaaagtcctttgcaagctccatcctgtactaataggctcctcagccttgggaaggaggcatctggtcactgtttgagtgcacacagtttgagatggagttggaaactccactcttgccctcactgtcttttactctctgttgtaggcaacgtgaagccagaagatatcaagagggttgcttccaagatgctccgtggcaagcctgctgtggctgccctgggtgatttgactgacctacccacctatgagcacatccaggcagcgctgtccagcagaaatggacacctgcccagatcataccggctgttccggtagagtcccttagagctggctgtagagtgcttgtgtgcatgttactgttggtgtagacactgcataaggctagctagctgtgtgaacagtgccaacagtgaaactctggaaacttgaatgaaagttactgttgccactgcacttttgtgtctttcaaacacaagtggcttatttttcatctaacaagtatttttcctgagtatctgccaaagcaggtgctgtctggccactagatgtttctggagcaaggaaggctgggaaagattagaaagtcttgggactctagggagacaaagcgccacactctgaaagcacacagggcctacccattggtagaaccactggcataaattgtactcatttttttccccttcaaataggatctcacagtaaaaccctgagtggcttgagacttgatataagatatactcatctcaaactcagagaccctcctgcctctgcctcccaggtgctaaaattataggcaagtgctaccacacctggcctcatttctaaagcttaagttctttaacaagcctaaaggtatttcacaatcttctcctttgttttttgagataaaatactaattagccctggctggcctcacagtgagcttgtctttgcctcagttactggtctttctagtaagagtcaccatgccagttgtatctcacaattatttacaagtccagttttaatttcccacttcatctgcactagtttacgtgtttaacttttccaactgaaatgccctctaaatgtaaaggctatctaaatgtaaattgctatggctgtactttgccccccgacccctaagactttatgatcttgatcttgggccaaactgggaagttccaggattacctcagtcttttctaaggtgccagagaatgtccacaaagaagcaccaaactgctgggctgtggtagtgcacgcctttaatcccagcattcaggaggcagaagcaggtggttctccaagttcgaggccagcctggtctacagagagttccaggacagccggggctacagagaaacctgtctggaactcttaccacatcaaaccttattcaagccaggaatagttgaggcaggattatgaagtccagggcagcctgtctgggagagaaaaggctgtcttcccagtagaatttgcagttcacagtggtttattgaagcaggtgactttccatattggagaagctgatgctgttgagtttcaccttattcgttggtttattatggttcactggagtcccaagtcgtcactttttccagctattgctgcttctggctgtgagcagggacagtacctagcagaaagacctgggatgggactgagtagcaggtgacagctgagaccaaatgtttggcctttgacttctatgtccttttaaaaccctggggtgtcctgaggccccaagatgcatgcagacttcttccaaggttcactctttggccagaaagagtttacaattgaatatatccttatttatttaaaaatataaatatggaaaaataaatgatttagaagactagagtggatgcccctaggtgtctgtacattcaaggctatgtctgaaggggtggggtaagattgagagcaatgatgctcctaagctttcttcaaggagtgaaacccagcaaggtgctgtctggtaacaatttctcatgcctttccgggactagcagcacaaaagcaaatggtctgaagctcctaaaaactatgagtttaatatagctaggcttggcctgtagagtggagaggtccctactcaactgggggttgggagcctgggaccaggatgtagaacctc

SEQ ID NO: 26425 - DNA, 1750 bp, Mus musculus
gcagcgtccttgtgctttcaggagtagaaaattataggccactggccacccttgcactcagtgaacccttagctgcccccccctcccccccccccccccccgctctgtagtgctaactcagctcttttgaccttgacagaattggcagaacaaaaacaaatcatgtctgcagtgctgtgggctaggaaatgctgagcagcaggaacttggcacatacagaaggtcttgcttacacttgaagctaacacagagtctgcccatttgttattgatctgtggggttatcctgtagctccatcgctggacagcctctgggcatggacacatgtaggtcattgctgttccttttgttctaggcttctgtcacctcgggaaattcaaggccagggaggattggccaaagaaaatatgcggcattgaactaggattgctgctggattcttatttggaaccctgagatgattagataactgttcttcaccaagaaccaactagctgcctcaggtctcgtggatcccagatggacatggcagtaactcagagccggtcatactgtgtgtctccttccttgcagcctatgtatatgaatgattgaaaaattgatttcaaggttcctttcaaatgctggatagaatgaatctaattcaaagtcttttatgtaaaagaacaatgtttcttttttagtcactttagacaaattaaggtttgagccacttgagaatatccccgcagagaggctaggcagggattcactacaggagagcacagttacttggacaccaaggcctttctcacctgagaaatggtgcaaaccaaccagggatccttaggctactgagaaggctgtctgcttacctggagaggactgactgctgggatgtctggcctaagaggagcctcaaactgcactgggcaactgtgccttgtcctgtgaactggggagtacatgccagctcctcaaagggtcaccagatggcagcggctcccaggctggggaggaagtggttacaagggcatgtctctccaacatttccagcctcactccattttctgtggcctcattagtgctgggtgcgttttttttttgctccgagctttccgtcatggctcagtcactggggagagccccagggagctgatattctgaagctgctgatctgattaaccaggtcaaaaactggctgtgtgctgcaacgtactgccctcctagccaggagtctgtatggagccctctagctgactcaatgtcacctgcagacagcacttaaagccttggtggtatcttggagtggcttacggtgtcctagcgcacactctggaaccttgcatctctaccccaaagcccaccagggaccttcagcagcgactcactggctcacccatatcacttcaaggagctgccaccacataagagtcaaagctttaaggcttcactgactgttcctaaaactatccttacactctaaagaggaagggaaagagagttaaatatttaaaaatcagcaggtagaaaacataaatggtttgtttggtattaaatttagaaattgtagaacatggaattagtacagcccttcccggttttctggttccttgcatcatctaggaaagactcacagaatggcttccaggacgttccatagatgagtgtacttggaccctcctgttcctgtcattaagaaaggcctgtccctgtgggtcagtagcaacttgtgtccttgctgggaccaggcaggacccttgcctctggt

SEQ ID NO: 26426 - DNA, 1166 bp, Mus musculus
gaaaccaagcccaatagtcaattctgctgtgcaccctcattagttcttctgattcagtgggaaccaaatttgttggatgttggaggtcgaatagcgctcaactgaatttgactctccctctcattgataggtgggtccagagctcgctatgtggatgttctaaacccaagtggaacacagcggagtgaaccagctcttgctcctgcagatttctttgctcctctcgccccactgccaattccttctaacttatttgtaccaaacccaggtaggcagcccatgtattcacccggcttcttgatcagtttccatctatgagcctgtggccctagtcttccttagaagaataactgggccaaggtgcaaaggaccaaaggcttgtatatacttctttggcaattggactttcctccctggttgaacccttacatttggactgtttggacagattgtcccagacattgggctggggtgatgacttcatgctccctcattcacagatgcagaagagccacaacctgcagatgggactggctgtaggggacaggcaccagctgggactcagtctaaggcagagtccaccctggaacccaaggtatatacagtgctgtagaaagaaggtgaggggctccctgtatcctttaggattcctttgccccctgcaaatcagtgtcaggtgtgtcaggtgatgactctggtcacattgtctatatttgtttggtagagacattagaaggttaatgcaaggcctgaggaaggcactcaaggttcaatttggaaagaagaaaaactctaaaggtggatggggttgatggctgttttaacagtatcgtccagccgggcatggtggcacatgcctttaatcccagcacttgggaggcggaggcaggtggatttctgggttcgaggccagcttggtctacagagtgagttccaggacagcctgggctatacagagaaaccctgtctcgaaaaaaaatgaaaacaaaaaataaaaaaaccagtatagtccattaatgtttcttgctttgaagtggtatgggtggtaattctatgttaaacatattttaccaaagtttttaaaatcagaaaaaaagttagaaaacaaagaattaggtagcagtacaaaaagtaaagaagggtaaaaaaagcagctgaatccccac

SEQ ID NO: 26427 - DNA, 1643 bp, Mus musculus
ttttttagtatttatttatgtacttttattttccacagaaacactgcctttttatttatatgtattgttttctatggcactagggaaaaacatatctgttccaagaaaataaactagttctcagagccttgattttcctggtcagggtgaagttccctgtgtgtctgtaaaatatgaacaaggattcatgatttgtaaatgctgtttatttattgattgcttctttccaaaatcgaaaagaaagaaaaaagaacgtgacaggagaagggaagctggaaactgccatggccagaattgcccctcccccacactcactgcccctccccccagcgtcacctgggatttgcagatgtgtttagaaacacgcccagaccttgaaccttgggttcatggattagttttgtatctaaaacaggaaacaagtcagatgatgtggtttgtacactttctgtaaccaccagtgtggacttgaagaagtgtcctcagcatgtgcagagtctactacccagtaccagtcgtgagtctgcaggctccagtgttctgtagtagtgtttatgggccttgggagtacttctcccctgccctgccccactgtccccttcctgacaacttgagccagtaagccatgcagggtgtggtgcctcctagagaaaacactgcctggactgttctgtgcatccctccaaacagcatcatccaaatccaactgaggacagacggactgtcccggcctgggcctgggctcctaacacctgactgccaaagggctccaatgtgcattgtggactcgccagagtagcctgcattgagactccaagaaaacagaagctatgtggcctctgatccccaaactggcctgggtggggacatgccttgagtgtgctggaatgtgggtggagcctgcttctgggccacccctcctggttcagggctgtgctcacagcagattcttgcagtatcaagtatacgcctgtggcagaataagtatctgtaaatacatgtttaaagatggattttgtttaaaaaatctaaaggaacaagtgtgtcgtgtgtcaagctgatgaggactgtcagactgtggcttagctcagtgtgacccagaccttgtgacctgtagctgccgaaccagtagctcctaagagcacaacccaggatggcccatctgctgcccaccaagtccctttccagccactgtgtgctgggggctttcgggggcagttgcccacctcctcagggcagctctttctggccttttggggggcagtgtctgtgccatgcctaatagatatgaccagacgcatcctaagatgttgattcttactgtgttgtataaaataaagtgtagtttacaaaaaaaagaaacgtaaaaaaaaaaaactacatgcaaaactgtaggtaatgaaaatgatgtatttttttcatctttttttgttaactaatttgcaataaaaatgatactgatggttgtccacattttgctaaacttggagtgtggtttggttcactttttggggagtgtgacagagaaagggccacccagcactgaaataaccaaatccaaaccctctcttacacagaaatacagaggttgccataaggacacaccattttcagaagctgcacagcgcagggcatcaaggtgg

SEQ ID NO: 26428 - DNA, 1130 bp, Mus musculus
gagattcctagcaacataggaaggccccactataaatactctctgagcctggtggtctaggatgcttgggtctagatagatctctccagataagagaagagaaagaggcagcacctgcttccctagcccctccccccaggccatccatcatcaatgactcagcaaattctacacctgcccgctccctcatgtacctcctgtccgtgtcctacaggaggagactcccctgttcctggccgcccgtgagggcagctatgagactgccaaagtgttgctggaccactttgccaaccgggacatcacggatcacatggaccgattgccgcgggacatcgcacaggagcgtatgcaccacgatatcgtgcggcttttggatgagtacaacctggtgcgcagcccacagctgcatggcactgccctgggtggcacacccactctgtctcccacactctgctcgcccaatggctacctgggcaatctcaagtctgccacacagggcaagaaggcccgcaagcccagcaccaaagggctggcttgtggtagcaaggaagctaaggacctcaaggcacggaggaagaagtcccaggatggcaagggctgcctgttggacagctcgagcatgctgtcgcctgtggactccctcgagtcaccccatggctacttgtcagatgtggcctcgccacccctcctcccctccccattccagcagtctccatccatgcctctcagccacctgcctggtatgcctgacactcacctgggcatcagccacttgaatgtggcagccaagcctgagatggcagcactggctggaggtagccggttggcctttgagccacccccgccacgcctctcccacctgcctgtagcctccagtgccagcacagtgctgagtaccaatggcacgggggctatgaatttcaccgtgggtgcaccggcaagcttgaatggccagtgtgagtggcttccccggctccagaatggcatggtgcccagccagtacaacccactacggccgggtgtgacgccgggcacactgagcacacaggcagctggcctccagcatagcatgatggggccactacacagcagcctctccaccaataccttgtccccgattatttaccagg

SEQ ID NO: 26429 - DNA, 1497 bp, Mus musculus
gggctaccatgaccccacgtgcctgtccgaggtcaacgagtgcaacagtaacccctgcatccacggagcttgccgggatggcctcaatgggtatggcagactgacctgggagggactagctgtagccttgggcagacacaggctgggtgaatgggtgctcctgtgagaccagtgatctgaggtcagcccctagtgtcttcccagcatccctgggctgtatcctcattggctagcatcagctcaggatatagactctaagcacactgtggctgctgaaacagttgtctgatactgtggtgacagcagccctttgtcagtgtgtgggggacgaggagattactaaggtctccgttaaaactattaaagttttatacagagggtcagcattgtcaaggtggcattgttccagtctggaacccttgcacggtcttgggccaggtgggtacctccagcccagtggatgatgtggccttgtcctcagactggaactgtagtttagcaggagagctctgagcccaggctacagctcaggcctctccgtaggtacaagtgtgactgtgcccctgggtggagtggaacaaactgtgacatcaacaacaacgagtgtgagtccaacccttgtgtcaacggtggcacctgcaaggacatgaccagtggctacgtatgcacctgccgagaaggcttcagtggtaagtgtggcgggtgacacagcagaatgggtcctccctttggtctctttctcggtccacctgatgagctagcatttctcaggcagagatcctagttctcttgaggaaaggcatagggcagaggctctggcccacctcctcttgctcaacttccttacaggccctaattgccagaccaacatcaacgaatgtgcctccaacccctgcctgaaccaggggacctgcattgatgatgtcgctggatacaagtgcaactgtcctctgccatatacaggtacgaacagccagggactggaattggctctggtggtagctagtggagctaagagtatatgggcttaccaggcactgaagaaggttctgttcctcgctgagggtcttaggtcctcagactggaactgtagttaagcaggaaggctctgagcccaggctacagcccaggcctcctgggcctggggatagtcaccagatgggcaaacacagaggatgcctaggaggaagctccaggccgtgtgtccgggtgtttatctggtatgtctggagtgaggtgagcactggactcctccagagaaagtctgggaggctgactggtaggtactgcatggatcagggtccactttgcctgtgcctctgggggccctggctgccctcctctgctggctgggcctgggattcctttgatggcagcttctttgtgtgaggagacaaggagccctctgttagatgaacagaggcagctcctgccatgggcactgcctgaggaatggcgagaaatagaccccctgcaggagagatgtgcattgaacat

SEQ ID NO: 26430 - DNA, 1097 bp, Mus musculus
aggcagtgatcctgggcctgctcggtggtttgccaaggtgtggccaactaagtgttgagggagtaactggccctgaagctcactaatgtccacctttcctgccatctaggttacacagggacccactgcgaagtggacattgacgagtgtgaccctgacccctgccactatggttcctgtaaggatggtgtggccacctttacctgcctgtgccagccaggctacacaggccatcactgtgagaccaacatcaatgagtgccacagccaaccgtgccgccatgggggcacctgccaggaccgtgacaactcctacctctgcttatgcctcaagggaaccacaggtgactggccggagctggcagtgggtggaaaagggtgaggccaggcttggaagctgaccacatgtcatgctgcccctagggcccaactgtgagatcaacctggatgactgcgccagcaacccctgtgactctggcacctgtctggacaagattgatggctacgaatgtgcctgtgaaccaggctacacaggtgagtggctgaaggcagaggtcagggtcatccctagagtctgggagggactgtggggctagccagggtccaagggctggatgtcacaagctgggtgtcaactacccagatcttgatctgccaaccagtagaggtatctatcataaagactgggtggcctccatatgcctcctttcccctgtcagtgtcagccctggccatgccagacttaaagccccagtagcctgaagtggggtggccagagctccgaggccaggcttttggatatgtgtttagatctgataaaatccttagtttctctgagcaccgaggacattgtccaccagaggatagaagaggatgggtggtctcaggctgaggtaaagctgggctgcagagtgactcagttggtaaggtgttgacctagcatgtgtaaaccctgggttcagtcctcctgccatgttaaccagatgcagtggcatgcatacgttgtaaccctagcactctgacattggaagcgagaggatcagaagtttaggtcattctcagctacatgtgagtttgtggccagactggatcacatga

SEQ ID NO: 26431 - DNA, 1238 bp, Mus musculus
tgatgcatattcatgacagaagctgggagagaaaagcagaccagcctcctaaatgagagtttcacagagtctatgtcgacatccccccacagggctggggggagggggctctgctgcgcctgtaggctcacttcgagtgtagacccagatttgaaatctgcctggtttgaaattcaggctggtcttgtctctagcctggccccaattaacagtcattattatttcttttttattgaggtgaggttcacttagtatgtgaaagtaacccctttaaagtgagcgcctccatggcatgctccagagcttacgtcatcccagaaacctctgcccagcaagcagccactgcacctccattctagagcctgattccagttgcacccactgcccaaggtcgggtagcctgtggccatgagagatgagggcggggagctgactgccctacatgtctgtcaacagctgcagcggagcctttgtgggccaacgatgccaggactccaatccttgcctcagcacaccgtgtaagaatgctggaacgtgccacgttgtggaccatggtggcactgtggattatgcctgcagctgtcccctgggtttctctgggcccctctgcctgacacctctggacaacgcctgcctggccaacccctgccgcaatgggggcacctgtgacctgctcactctcacagagtacaagtgccgctgcccaccagggtggtcaggtaagggctataggaggttgtgaacttcacggttgggacccttaggcctgggcccaaggaccctatctttgttgacttgacatactctggtacactaaactttatcctctcctggatcagagttaagctgggatctactatccagaaaaatcttggggattccttgggaactctggtccttttcaaccccaaactatctgatttttggctgccctgttccaggaccccaacctctcactgtttctgtgcgtaaagaatgagtcctcatgtagcccgggtcttaccatctccttgtcagggtgcctcaggtttccattgcttctctatgtggggtccaggagacagctaggtacaaattttagactgccattcctactttctgtccttgagcagtcacttagtctcttatgacttacagtcctctgtatgcagaaagatggccacattctgcaacagatactgagcatcatgaagataacactttagatctatccctggttggtacctacatgatgtcca

SEQ ID NO: 26432 - DNA, 1176 bp, Mus musculus
accaacctctgccctccagatacatctggctctaaaccagaaggagagagggagcaagggactgtgccctgttaaggttttctagtgtgcatctgagtaaagggccaggatcctttcctgctctgcctatgcctatgtcaactggtgagaactcttttgacacattgtcacattgacaatgtgttgacacattgtcttctctaagttatcttccctgtccctttggagcttcccagagatccgagcagctgtgacttaaagatgaggaactggggtgggggcgaatctcaagcagtgaccactctttcatgagggtttgggatctgtctacctgtccttgcataatggggaggtctgctctaaagacaagatggctggaactagctgaggctggcaggcctgaggagaggtcccaggtttcaggcctagggaagccatggctgtgtcatcatttgattagcagtcttcctctccaaggtttcagtttcctcaccagtgagaattgctcttccactgctgggttcttgatggggcaagcattgcaggaagccacttgtatggggacacagagcagcaagagtttcctgggactgggacagtcggagtcaggggttatggagacatcgtattagtttggaaagagaaagttctgtgtatagacagaggctgtagcactccaatattggtgccttcacatcctgagtgcagacaaatggttacaatggacttttttttttaatggcatgtggatttcaccataattaaaaaaaaaaagtagctttgaagaagcagtatgcatctgctgcattgtgtagagatagctataacccgttagggaccctttcccttaggactgcagggccccttttccttaggactgccagggccccaggggtggggtataccaatgtacatgtagaatggagtatgttggagtccacctcccctgctctgtcacagtaaagaggacataggcctcctctgccttatagccaacgcccatgacagtctgttttcaatgactggggctgagtagagaacaagtcgggtaccctcgatgggtagggagcagggctaatttgctgatttgcccccaggattctgtgtgcccaagtgtcctgtcctgtgcctgcctgctgttccttctccccagcttgccctcccttctctagggag

SEQ ID NO: 26433 - DNA, 1198 bp, Mus musculus
ggcacaaaaccagccattacaacctcaaagcctctctttggggagatgagtggagcttattacctaatgctccagctaccttgatgtgagatggcttttcaaactgggtatctactggttgctagctggtacgggctggagtggagctcagtggtgctcacttggctgcacacaggcctgagtctccatccctagcaccatgggcaagtgaaactgataaggggaaaagacgaagtgcctgatggtaggtccatgcagcaccgagatttcagaatgaggaagcatggtggagcatacagctaacagtgacagggggtgtcataaagcataagggtaaagggactactgcttcgggcctccagaggtctgggggtgcgacacttgtggaaggtctacattgattgttttctttggtacaggaaagttggtgactaaagtctgcttatgccaaatgcccagcaatgtccagttgaggtaagaggtaggctggagcatgctcagatgggatgtgagtggctgccctaaagatgctgtcctagatcagcaccacaggcatggcacagctgctcagctgagcctgtgacattggggcaaagagcaagtggctgtttctacgctcagtgctcagaagcccgtgagcactaagaatggtttgtagcctgacattttgcagagccgtggtgggaaggcactgggttttgctttgatgctgttggccagaccccagtgtcaaacctctagggctcaccaaagggttgcatggtcagcattttagggagatagaactttggaagtggagggagatagaaattaagttttctaggagacatcctgagggactggaaaaatacaagaaactctccattcctttcatcttccagatccaggagccaggaagaaggggggctacttggccaacatggctgatcacgtgcctgaggtatgccctctgacctcaccagggtaacacagaaccatccatacaggccttgggcagctggaaatttacactggtagctctcccatgtcctaagttaggaactggatttggattggcttgggtttgactcttatttccaagactggtgaggtaaacactggatggaggaccctctaaggctcaacctctctatctaattgtatatggccttaagagagataattgagttgggtggtgataactggtcacttgagttca

SEQ ID NO: 26434 - DNA, 1198 bp, Mus musculus; identical to SEQ ID NO: 26433

SEQ ID NO: 26435 - DNA, 1170 bp, Mus musculus
ggcgccagaacctgcgcaagaagaaggcagctcgggctgagcgacggctacagaaggcccacaagaagggccgggtgcttccccaggacctggagcgtgcaggcctctcctgagcagtttgcacctgccaagttcctggctcagccccttccctccatctccatccttgagggttgggatggtatgtggtgctagtgcaggtctaggcaacagactgggtctcctgtgtgaggtcaacacagttcttgcaccccacaaccatagtgagatctctgactgtgtgcctggttgtttcatcagcatctttaagaaggaccgtgtcctccaggccctgagagggatagaggggatctcccatgtttggagaggtgtgtctacgtgtctgtaagtctgcgtgttctgaactctctggagtcaggatagaggttacagtgaggcaccctcaccgactctttcctgcccacctgcattcccagtggccgtgagcgcacaaagccttggctacctgttctgtatttattagtccctggggacagagagagcccagggagttagtgggagaatctgatccagtcgggtatgtctctgtgccagagctccggggctgtctttgtgttggcatccagctcaaaacctggagtccttcctgagtccacaggatatgcttgctcacctgtgagccaattggtggctgagacttggggttgtatgttgcctagttttatgtcagtttgacacaagctggacttgtcagagaagagaggcctcagctgtgagctccactaccttgttctgtgggcaagcctgttgtgcgcttattaaagatgtggtagggagcagttcattttggacagtgctacccctggactggtggtcctgggttgtttaagaaagtagggcaagctagctgtggggagtgagcccttaagtagcactcctctggcttttgctttacttcctgcctctaggttcctgtcctggttcccttggtgacgtaacccttctctccctcaagctgcttttggtcatgttgttttgttttatcacagcaatagaaacccaaagataagtctgtgcttttggaggaaaggaggcagggcagggtggctcctgggatgctggctaggctgaggttgtgagtggagatagggctacttttaactaggtgac

SEQ ID NO: 26436 - DNA, 1285 bp, Mus musculus
tcatggagctggagtctcctggtgtcagacctatgttagtctcagaggatagcagcaggcaggatctgtcacatagctctctacagggccacttagaatgttgatacctgaaactttctgatccagagaggccttgagaaatcaagagtccagtgtaaaatatgtcgtcggaaccgggctggagaatggaggccttgccccaccccattagcttgaagttaaggttccggtcagcagcaccctgcctgactccccctggtggtaggtttgctcctgctgctgctgcacagaagctgcagtcaactacagatgtccagtgctgcagtggacatcttgttcccatcttagactcagtgtcactgccaagcttcagtagttctaaagttctccagagagttctggggttatctttggtctcagtgttcatcagcttagcagaaaagtgggagtatctactgtaccccaaagtggcagagacttagaccaacccagggtgagttcctcacatcttcctgtcactaccttgtagtacttcaaggacacttgagcggatgagtactgggacagtgactcagtcctgtacaagggttgaggggataaattgctcagataggaacccagagtgctgggtttccaaagcctcggcccctctgcatcacgtgcatacgtttctgggatgatctgtgtcctctttgggcaatcacctctctcatattcctcatggtaaagcagctgccccatgcctaggaatttccttaaatggcagagttcttcggtaggtgaggcagtaggttttgtctgcccctatcagcctcctgcccacaccaccaccagttgcccagcttcccctctgcatggctactcttgcctgtatacgaactgcttgctctttctggctttgccttccctccattctcctggggatgctactccctttgtcttgggtagttctgcgagagactgctggggacaggcatgggagaaagctagggccttgtgcatattagacagctgtagaaacagatgtggtccaagtagccactgctatgaccactgaggcattgtgcttgcctcctcctgtctctggctttccctgtgtaatgtaaggaaatggaatgtgtaaagcctggggcttagagctgtagagctagagtagtggtatatagagaaatgctcagacctgtattgctgactgttacccagttaggccaggaccctgtagggatggaaacaggtctgccaccaggagctctttgtaaagtctcatcactaccctactggtaag

SEQ ID NO: 26437 - DNA, 1168 bp, Mus musculus
agaaaacaggaagccctttgttccggagaacagcccagaaaggaatcactggtattatcgagacctggaagctatggccaagataacaggagcggaccccattttcattgatgcagacttccgtatgttgtggtcagcctgctttggggagagcatgcactattggatagcgttttagaggagaatcttagtatgtggtgtggagactgtttttgtggtattttggcgaagaatgtagctaccttttgcctgaagtcttcctgaggctaaggcaaagaaattaatattaattgcattaacaaagtctcaaaacagcccagcagactttctctggttgcacttaggggtctgacagagctgactcctgtctccacagacagcacagcccccggcgggcccatcggaggacagacgagagtgactctgcgcaatgagcacatgcagtacatccttacctggttagtcctgctgcctgctaccccctccacccaccccaccccgcacaggctataatctctttcaaccacaggtacggactgtgtgcggccacatcatatttgtggttccaaaaatttgtacgtcggacacccatcatgtgaagtaaggagcctgttcccaacaaccataaaataaagatcttgctatgtaaaaaccatggctcagtctgaaaccgttttacagggcacactcgcgccaacccaaataaccaaaggcagtcaagataattttgtaattatatttaggtacagaaaatttagtgtacatttaacccaatttagtggcgagttctttagcctttgctttttccagcttggcaattcgagccacagacttaggacccaggacgttgcctccccagtggcgacggatctgaaatgacagaagcagtagtcgttagcctgtcccccttacactttaaggcatagaccaatattttatgtatcaatcaaaattaagcctgtggcctatatactcacctcgtcatatctgtcattataattggtcctaatagcttccaccagcttagccagagcacccttgtcttccctggaaaggcaatgaggaaggtctcgttactgtttaagaagcaggagtaataaacccttccctccctgcctttttgcctcagacaacagtgtgaccacatagttgattcaggtgaagaaat

SEQ ID NO: 26438 - DNA, 2512 bp, Mus musculus
atacacagaatgatactttactcagcttatgcttctggaggcagggactcccaaggtcaaggtcacatctagtgggtcttgtggtaaggactctgtagattaccaagagaactcacggtatcccaagcttctttttatgggctagtcactcatcaaagtcttacctggcaaacatcactataggatttaggggattttccaacatatggcattcgggagagtacatgtaaggccatagcacctttaatacagaactctttgtaagtccaatattctgtattgttttagggtttgtgtgttccaggactctcactaagtcctggttatgtgagcctggctcagatacaagtgtgtccagcgtttgacctttagtctgaatgtcatttctttttgaatctgtgcagatcatccagaacattgtgggcacagctctgatgatcttagtagccatcggttttaaaaccaagctggcagctttgactctcgtcgtctggctgtttgccatcaacgtgtatttcaacgccttctggacaatcccggtatataaacccatgcatgacttcctgaaatacgacttcttccagaccatgtcagtgattggaggcctgctcctggtggtggctcttggcccagggggtgtgtccatggatgagaagaagaaagagtggtaacacacagatccctcccctccctggctgaggcacagggccctggcctggttcagggcagagtcaacaaactgccggcgtttgtgtgtccttctcccttcccctcccttggtaaaggcacagatgttttgagaactttatttgcagacacctgaaaattggagataaaatctttggaaatagtctggagtcttgactgtccagggctggcgagctggatggtcactccttagccaaggcttggaggagacagcgtgctgggctgtggcctcattcctcctgtctccgagttccttttggggaagtcgtactgagctgtatttttatcattcaaagcagtttcccttcttagttttgagtttacatccttagctcaaactactaaatgacttaggatagtccagccaaacaccaaacggttaaacctccagttcagaattctaccagtggccccagcattgcttctgcccctgtattttataggatcagtgaagatgttagagaaaccaagtcaagagaacagtacagtattggaaaggtgggtgttactgctgtcccaagtccttgatgttagctagctggatgctgtttactgggtgaaaggtaccttgggagttttcatggctccaagcagggatgggatggggtaagcagcaggaagttcttagaaagctgctatccctcaagcttggtggtggaaagggcaggagagcaggctgctcacaggatggcccacacaaccaccatggaaccagcctgggaacagcgatgccatggggcccagaagtgaggagtcccagtactcaagacacccaggctcaacccagttacctcacacttgaccttctcagagcaaggcctgaactccacaggttgtggtccccaacccccagcttaactccctgttccaggctgagccgaccccgtcgacagccctgataccaccattcccctgaggctgttgcttgctcagatttttgtcaacttgctctgctgtatgcagccaagatactttttacaatttgtgatgccttaccaatttgatctcagtcctgtatttaaagttttctaacattgccttacaccgtgtttctctttttgggggaggggtggggtgtctaatgctgtggtcttgctcatctgcatggtagtgccatgagggtagttgggttcctcctggatctctcccaggtctgttggagagaacagacagacttagaacccctggagggaagctggcagcttacctcacccttgggtacagagtcttggaggtcctcctttctggcatcagctgggtaggcaggactttgttctctgagtcactttgggtcagtcccttgcctcgctggctctgcaggctgaattcaccttctcaacacctagcccatgttttcctgcagccttatggcctgcctattcctcccaagtgagttccagcactggctcaggccatgctagttctttaccacagagctgcctcagtgcacagccacctgcagtggcagccccatgacattccagtctgtggagtggggcagaccctgggaggcaagtgcatgccgtgcagcagaagccctcgtcccagggttacttagccctttgaccagcctcctgtgggttctgcctgggatgggaaccctcatcccaagggtacttggcccatttaccagcctcctgtggggtgcgcctgggacgggagaaaacaatgatacacatattggtttggcaaaagttttctgaagatgctttagctttatgtgggaataggtataaacctcatttttatgctgtattttatatcttagttgtgtttgaaaatgttttgatctttggaaacatca

SEQ ID NO: 26439 - DNA, 1238 bp, Mus musculus
gcatgtgagctgcgggaacttcctcctgaactacccagggcctaatcatccagcacctgtgtgttgaggtagactggtcagatacagggcagaagtcaggggtgtaggttcgaggaaggagaacatcattggaatggaggagagtgctgcagagtctatgtctgctgaccacctgtgctaccacttaacaatgagcatagctggtctcagccagggcactcagcaccttcccttaaggagcaagaagcgccttctctgtcaggtaaggggataagctctgctggatccaagggatccaggctaagggcgttcagtctgctgcaaaccagtctggccagcacagcaaccgcccattgaggactttcttaaagctactgggctggaggtcctttcccactcctttgtcctttgcttggcctaagatgccaatgccccgccatgttttctccagagagtccttggggtgagccttggggcacaggtacactcagaggtctgagagcctaccatgtggaacagtgtaagcagaaaggccatcttcccactgtcctgccagcagctgttctgggtagcagcaattgcagagtgaccagtgaactttatggacttagctgacaactcctagaacatgtgcacccatgcatatgatgacagatgtctgcttttaatgcagctgtggactgaggtgtggctcagaggacacttgttcactaagtgtaagaccctggtatcctttcctagaactgtcaaaaataaatggatggatcaaatggagtgtgtggaagttcatgttttttcccatcatcaaggcaggaccactgacagcaggccaggcatgccagaaacagcctagggcttcttttattagtcaccatggggtacgaaattaatactggacctagtgatactttctcttaccacaggaccagaagggcagcatgtcagggcctgaagaggggctctccctgcagtggggcttcctgccctgcaggaggctcaagctgatcctcctggaggccaggttgtgcatttgcttccagtacctggagtatctcatcagcgtaagaaatcagctcctggaaggaggaaacgagaaccatttgctacagtggcctcaagatccgggagcaattactttgacgacataaatcctactgatgggatctttcaggtggtctggctgcacttcccatttgggattggattcagcccagtcacagggaaaggcatcatgtgga

SEQ ID NO: 26440 - DNA, 1099 bp, Mus musculus
atgtgtgagagcagattcagctggactgagtgtggagtgtagagggggagccatcctgccagaggtcctttcgcgaagcatccatctgtgtcctgggtcttttcacagccaggcattctcatctttgtctcatagggaagacatctggtttgatgatgtggatccagatgatattgaggatgccataggcccagaggcagccatgctggtacggaagaggctggggcagaagaagaggaccatctccctggagaaggaacaagcctttggcgggtaagctgagctcgggccatagctgctggcaatgttactccttctggggctgggatcatgggaggaggagcaagcactgagccatgactgcccagcagtcatgggggtgcagaatgaggcttggctcactggcctagaatcccagcccgtgatatctattacactggggcctttggttcccctagcttgacaaaagccttggccctggattgtgagatggtaggcgtgggtcccaaaggggaagagagcatcgcagcccgtgtgtcgatcgtgaaccagtatgggaagtgtgtttatgacaagtacgtcaagccaactgagccagtgactgactacaggacagccgtcagtgggatccggcctgagaacctgaagcagggtatgactgatgtccataagatttgagtgtagtggtggagatggtagcaggactcgtttctcttcaacttccccttctgtgttccagaacatggcatggcaggggtcctgacactgcttagctcttccccagactttgcagatacaaaaggaaagatacctttcctggctgttgtgctgtttgtgtcctgggctcttggattattttctgtcttgtggcagtagggaataaactggagcatgttaggaaccaggagggaaatcttgaagagtgagtaggctacatggtaggagctgggaggacagatcacagggtctctttgggaaattagtgcagtaatggcagagaggcctccagcaggatccttgtggtcatgacattgagtacagggtaggggtcagaagactggttctgaggcaggagctaggtagggaggtagctggaaga

SEQ ID NO: 26441 - DNA, 1548 bp, Mus musculus
tggtatgatgtgctgtgtgtatgtgtgtgtgtgtgtgtttgtctggtatgatgtgctgtgtgtgtgtgtgtgtctgtttgtctagtatgatgtgctctgtgtgtgtgtgtctgtttgtctagtatgatgtggtgtgtgtgtgtgtgtgtgtgtgtgtgtggctgtgtgtttgtctggtatgatgtgctgtgtgtgtgtgtgtgtgtctgtttgtctggtatgatgtgctgtgtgtgtgtgtgtctgtttgtctgatatgatgtgctgtgtgtgtgtgtgtgtgtgtgtgtgtatcgctgctagtctgcactgagaacctccttgtcaggatggcaggttccttattagtagggattaacctcaggtattcttcccaacttgcccctggcagcctggagcctttggagagctgggcagagaccagacccaccctacacagacttggccccttctcgggtaccagagcacagagagtaagcctgcatggttgggacaaggagagctgtttcactggcacatggctccagggacatgccttgctgtcccctcacctttctctgcactgttctcttcccactgtcctgtgacaccggcatcagtggcttattagatgagtccttggccattaggcacatttggtggcctggctgaagatgatgtgtcaagtgctgagccctgcctccctcctgcactagaccttcagccggacctgtccatggaacccagccctggagtcactgagtctccagggaatccttagcttctcagggcttgaggcccagaggagtagacattcattctccttggtatagaagctctgatctgtggactttggggatagcagaagttctccagagagcctggccatgctgaactggggagtggcagaaatgtaatagtgtagctagcttagggggtcatgtgccttcaccgttcatcagaggctatttttcttgagccagagataagtttcaagggctctgtgtatgtgtgtctgtatatgttggagcctatgttctcagtaagacctgtctacctcccaggaggagaaaaatccccacctgctcctctggttacttgggtaggcatggacttgggccagttctgcccaggcctcctgcctccacagtagaattcaaaggctacatgtatggtgagattgtacttcactagggaatccattttgtgctaggcagccatggggtgaggtataaaggtggaggccctcagatataggccaatttggggtggtcagtcacttaagtcctgaggttcttggcagtcccatggcacagtggctctggagcccattgctttgactctgaccatgggcactgtccagcccagactaggcctcattcttgtctgtgtctgggtgtcttctgtggctccttttgcacccacccctggtttgtttgttgactgggttacttttggagtaaagcaagtttgtagttggtatacacagtctgcctgtcacctgtctccagtgcctgtcactggcaaggaggtcctgtctatgctagctgggcctagcctggcctgagc

SEQ ID NO: 26442 - DNA, 1423 bp, Mus musculus
ctgctcaagatccagccttacatcatctctagttaactaccaactgtcttgggggtgaccaggcttcccttggctctagtctcctgccttccctcagggatacccttttcccatacttccactgccatcagagctgaacatatgtttgcttaatccagaaagccttcctgaatttcttcagcgtgtaccacgtatttgagaaacaccaaaggaaccatgtggcatgcttctcgtcaatgggaggagtgaaggactggcgctcacttccttccacctcaccctgatgttcttgggttcttccctatacttcccctcaagggctaggacttttcacagccgcccccctacacacacacacacacacacacacacacacacacacacacagcttaggttagaggtctcttcctgggccctagctccctcatctgcaatgcggattcagtacagcttatccttccatctactccacgttgttggatttttaaccaacctgcaaggagtcttggtgatttaaatgtacaaccaaatgtgagagtcgtggatgaaaacagtgtccaggtgcatggccgttcttagtgggtggaacgatttgtctggttaattccgataatgaatgagactctggcatgctaactagttacaagagcccctcgcggtcggcatcccccaacttcttagagggacaagtggcgttcagtcacccaagatagagcagtaacaggtctgagatgctcttagatgtccagggctgcacaggcgctacactgactggcttagcgtgtgcctagggtaacccattgaaccccattcgtgatggggatcggggattgcaattattccccatgaacaaggaattcccagtaagtgctgggggttggggggagaagaaaacagtgtccggcactgagccaaggtagcagagaaagggattctagttcatctgtccttgcctaggggagatcttcccaccaggttctgagaaaggctaacctgagtacctgagagaaacaggatgctttggggctcagggagaaggggctggggagctttctggagcaggctgctaagttggtccttgagggaagcagtagagggaaagaggctgaaggacccaggacaacctggcagagaccaccctacagcctgtctgcaaccctaaggcaattctgcagtcttctcatgccagccaaggcaatttggcaaggctcttgctgaactgttaattaccccccggggaccataaatgggtttacaaccttataaacaggagctctccgtccccatctccatttctccaagtgcaaagtggaagacgcagccactctgtggaccctccacccatttttggaatctgaatgtgtgctggggatgggggggtagggggtggggcagtgttctggtgagtgacagtgtgtttccc

SEQ ID NO: 26443 - DNA, 1168 bp, Mus musculus
agagccaggctggagcgcagattcctggtgtgtgtagccaggctcctcatgcagttgtcgctgtatttgtgggcttagggagtgcctggccatggatcaccagttttctcctccaccaggtcaaacatcaagccagataaggccaatgccaaccatcatagcttccagatgtacacattcgacaagactaccaactgcaaagcctgcaagatgtttctcaggtaggtgtcttctgtctgtccaaccctgggctccagaatccactgtgtagctgccctgtgacaccgtggcacctgaccaccccaccttggtgccatgtaatgtctcaaagaaccaggatgataactacgggggtcagcagccatggctattggagggtcgggtcccctgctggggaccatggagtgaggggccaggccagggtggtcagatgctccgggatggactgtcagccatcgtgatgactggctgagcatgcagggagctgtgccccacctcaccccaaccctcccacacacaggggtaccttctaccagggatacctgtgtaccagatgtggcgtcggggcacacaaggaatgcctggaggtgatccccccctgcaagatgagtgagtactcggcagtgtgtggagatgggccccgctgctgctcctcatcgtgaggaccacttgttcatgtctgccttttaatccaagggacacacctgagaggcactgaggccaagggaagggatgatcaaaagctatagctgtaactcctcaccaaagttcttgtgacttttccgtccgtctcctccatctctgccccacacccacaccctggtcccagggtgttctcagcaggaatgcaggcttctgtcataagtggccccgctcctggctctggcactatgtgcttgttctcatgtcatttttcagatgaggtggcttgaggccgagcctcgctggtgccaggcacaggaactcgaccgcggaggctaggagtgtgtgatttgggaatgcgtttggagttttgtaaatggtgttccatctcatagtgactagtgctcgccaaaagccgatgacagttctgagaggtgtcagggcctcacagctctgtataagtagtagatcctgctgagtgccaggatccattctctgtgcttcaaatgggaggtccctgtccttg

SEQ ID NO: 26444 - DNA, 2209 bp, Mus musculus
tttatcaaaagccaatatttctgtctcccatctgtgtgggagcctccagctggtagcagagaaacaaaaagctgagagaagaaccctaaagagcctggagggcctttcccaggctgctggtattccgctgtgtccctggcttgggaggagagatggaaggctataccggggtattgcggctcctcgtaccactctcgcagcactgtgcacatttgtccccagcatctaatgattagtcctatcatgctcagggttccagagcaagtgggagaggcttcagtagtcaactctactccccggccttgcagaaagtctgattagggcttccccagagctggcctgccatggcctaggaagccccaccaggttgattaaggtcgctctagggataaatatcagtgtgtaggcacggtggcttgtggccatatctgaccccccatgctctcccgagactccggtagctctcctaggaggcagtcactgtccctggtcctgaagaactccaggacacgaacatgtcctaaaggacagccaatgttctaatatccagcactggtgttggatctccggaattgtctagtccatccacagaggggatgtagacttcttgctgtggagggtctctgagataaaacagagggtttccccacttctcatcctgtccggaactagctaagagtgaggtaattggattcacttgtatgtagtgaggtaaaggcaggttctgctctcagagcccaggcatgagaagttctgcaaggagactctagaccttacgctgtgtcctggttcttccacagagggttctgggaagggctgtgacatggcttttgggactggggctgacagtagggtgagctgctagtggtgacccttacttccccaagcatggcttgaggacagtggacactgctgactggttcaatcttgtttgttcctccatgccttcagatcagatacatgcaggtaagttgcaggtaagacaagctaggtgggctcctgccggctgtctttccacctgttgggaaggtgtcagaggccatagagaaagttaaggactgtgttctccgtgagacattgtcaggcagatccaccccatgggcctcaccctaccacactccatgctgcctcagatactgatggaccacaccaagtcctcgctccatgctgcagagtgattgagagtactgtggtgtggcggcgcataaggggctcttaggaccaacaggaggagggtagctgggtaggcatctgtccagtattagctcttcagagtctttggggcagaccaggctttctgagctgagcgaaccaaaagaaagcatctgtaaagctcactcccacccgctcactgcaccctgtgcaggccatctcccaggcagggagtttgctcctgctagagaggttatgtccttaggtgacccactggtgagctgttatctcaggccttctgggtggaggctggtggctcctctgggaagtttggcctttggggcacttggttttggaagccagaatgggtcagctgtgggtctccgaggagttggccaatgtcaactgcaggacagggctgacccactcaaacaagtgccgtgagcacaactctcctgtctgcggtacagtcctctcctgaagctttcatcccaggctggtgaggatgctgggttctgagtcaggagtgaatacccaggagtctaaaagcctagtgacttccttgctgctaactctccgtcctctcctgtccacgtgcctccatttcctcagacatagagaatgggggaggggctggggctcactgtaaactcagtaatcttgtgaccatactggaaaggtgtcatcctgttgtgtgggacaggtggccggcagcagatacctgggtggccaggtagtggggtcctggctcacgcgtcatgtctcctctagaaaatgggcatgactgaggacgacaagagaagctgctgcttgttagagattcaggagaccgaggccaagtactaccgcaccctggaggacattgagaaggtgagagccatttctcctggaaagcccagggtcagggtcttagcacctgttccagttttctctctctctctctctgcctgtgaggaaactctgaccaaaaggagctgagggaagagaggagtttactttatcctaacttggagattacagtcccagcggggggaatcagtgcaagacctcaagcaga

SEQ ID NO: 26445 - DNA, 1159 bp, Mus musculus
agctttgctaagctgttctgtctcttaattcccttcttgaagtccggtagcttccttccatcctcctgtgacagctgaccagtgctgacagggagccccttaggtcctactcatcactggaaagtgtcacacacgcacacacacgcgcgcgcgcgcacacacacagggtttctctgtatagtcctggctatcctggcactagctctgtagaccaggccagcctcaaactgagtactgggtttaaaggcgtgtaccaccattacctgtttttttctttttcttttctttttttcttttccttttctttcctttttcctttccttccttttattcttccttccttcttcttctttccctccctccctccctcccggaaggccttacaagccttttctgggccgtctctgttcttctcttagctgtatgctatcctctttgcctccatcagatcctggccctgctaagtgagacttgccctggtggtacacttgacagcctggcttttttgcctgctttctgtcttcctggcagtgtccacagtccagtgtcttaagtgctcacttacactaagtcctagtaggggtgagttcctgtcaagcaatggcaccctgaagcctcagtgcatccgtgtgactctgatatgacagacgcttaagccttagtgtgggagagtctaagaagcatgggcccctgactggaccaggaggtctggctctgtagggacaggaggttgattgttccgtaggaggagccttggtttccagaggtctaggctactcatgtgtgtcccagctggggtctcacctgggaacctgcagcccctccagatggtacagttgataccagcctgatctcagacagtcagctactgatgtgggtcacacggtgggatgcttctaatcagtgcccgcccttgactcagtagaaatgtcgctgcacttcctacttctgtagcagttgacctggccctaaacaagacctgagcatggactgacaggtcactagatgattctggcattgcttacccactggcctagtctccactcagcagcctctgagcccctgagtcctctcacttcatggaagtcatgacaggtctctgtcaccagtaccatagactgagtcctttccacccgggagctcctgtatccatgcgaac

SEQ ID NO: 26446 - DNA, 2719 bp, Mus musculus
gtctgagactcagtggggatcctacctagacaagtgtcttagtgcagccttgtggccagacaggtgacctgtgacagtgtggcacactgctcagcaagggtctcccctcctgtgtccttgcagagaagtccggctcagctccctcaggaggcccatcaaggctcagcagtagcagctcctctgagtctgcgagcagtagctccagtggatcgagctccgacagcagtgactcagagtgaactcggactgggacagagctggacagatggacgtggtgcacgccaacgcagtgtcccctcctatggttaatatactttcgttccatggtgtgcaggttttcttttacttcagtgttatgatctcttccagctgtgctccagtagggcggagagcctcgcacgtgcaccagaccccatgagagggccgagctctgcgagggggaaatgcctttgcagctccatttagttgtttggagactgctcctgggatgctaacctgatggccatagacacggtgggctggaggcgtggctggatctgcccaatccttcctcaggaccagcctctcccttagtaacttgaaggaagctttgcaagggtgtttctctggaatgggttctgtgtttgaaagctgttagaacactaaccagcaggttacttctctccgcaggggctgaagacagatgtgtcagcccatgggaaccagcctgggccctagtggagggtcctggtagctgcagaccagagcctcacacctctgggttgggtgtggaggaagaggggtactgagttccctggtcctttggctgtgtgtgcagcgtgcagatttcgggacaccgaaacttttacctcaacttaagggaataaaaacaaacaaacaaaaaaagattaaaaaaaaaaacaaaacaaaaaaaacaaaacaaaaacaaaccttttttgtaagttcatccattttctacagaagtccagcccagagtccccactttgctagtgctgcctggctgccaccgcctaacgctctgaaccaccaccccaggtttatgtatatataaatactttatttattaacatcattggtcattttttaaaaaatgaaaaagaaaaaaaagaagagaaaaacccataaataagtgcattgagaagaacatggagaggatgctgtcctctgcaacagagacaggcccgtggcggggcgcctctggtcctggtgctcatcacggctggcttctctgagctcattggctgtttgtttgtttggtttttttttttttttttaatgaaatgtggggactttgcaagcgtagacgcccttcagctgtagcacatcttcattttatagtatctattcagtttgttcttactaacttctggtcttttaaaagacgtcaacggaggaacctcggttcttcaacacaagctttgtatgtaagccgagagaaaagtcatgtatatcaggcctaggtcttgacacttaattttctattgtaaaaagtaataatatacagagtctaacagaaggtcctgttgggtttgttgtttttgaggctgccgaatggttttggaatgcagggtcagccttggagtatctctgagcattgtggcctcagccaggagcgcactggccagtctcccaggcctggaagcactgcagtgtgcagaggctctccttgacctttctacttttgacacgggtccctgttcgagaatttccagttagccccagaagagactggttctcctgacccccacccgagagcgagagcgccaagtgcagggccttgtgttgtgtggttttacttgggctgggggtggttcttgcggtttcttccattgcttctaggcagagccaaggactcatcctcaccatccatacatgggagatatttaaagtttctaaagtcgatcccaccagccctcgatgtgcacaggcagtgggtgtcaagctcgggaagtggctggctggctggctggcatgtctagacgcctggtgagttatcagccagttaaacttgtaagccagttttgtttataataaagatataagtggattttaaggttccatttttttaaggttacccttgtttttcaaaggtattttttaaacagatctttaatagaatatttaagctgtgactgtaagaaataaacaagagtaaactgacaggccttccttcacgtggggtctcagtggtggcctaccatgacagcttggtcagtgtgcctaggcagggcacattgcctgggcatgtgtagagtgagtgcccctgtgagctgctaggcaagcagagtctggctctgaggtgatgtccccgcagcagggtggtggtacagagctgggcatagggtggaggtctggcattcctgtggctgtggtccctagtaagcagccttggtcattggtgcttttaactttttttttttttctttttgtccagacttaaattgttttgtcttcagagttttggaggaccccggtccccacaatgccaggctgcaggataactgccatccccttctgtgagttatgtacggggacttagactgtcctgtgcagaggtggagggcagctgtctacaggcttcctagaggtcacatgcaggactggggtggccacttggcagagtccttggggttcagacctccacaggctaggtagctcagcttgcttacagactggagacattttcttgtgtggttttctgggtttcgtccttctgcag

SEQ ID NO: 26447 - DNA, 1150 bp, Mus musculus
tcccattaggtgcactaggtgttgagcagggtggctgggtgcccttgctgtactcaggctggccttcaacttggagatccaaatggagatctggctgcctttgcatccaactgtctagtgcagggattaaaaggtgtgcaccaccaccacttgggcttgtcaggactgtttttaagtgtagtgggtgcagggccttaccaagtagtccaatttggtctggaactgcaatcctcctgcctaagaatcgggcttgctctaccatacctggcttgcttatatttttagtgcaagcacaagcactttgagcctccacaggggagtgagtctaagaagtttggtagagctgaaagtactggccttttcctctgggccaggtgttttgtggtgctaacactggctggatttcctgacagcatggtgtataggttagtagggttgatcttttactggtcatttggatttttgtccctcaaaaccaactgttttttttttcccttcccaagggaatatctgatgtagcgtggtcatcagattctaacctccttgtgtctgcctctgatgataaaactttgaagatttgggacgtgagttccgtaagtgacactggtcttccagggagtgcccatagttgagatgagttggctgtgtagatggttggtcttgggtaggtcttcaaatgtacaagaagcttgtatttggagattcagcccctggaagtcacagaccttggtatgctatgtgtgctctaggggaagtgtctgaagaccctgaagggccacagtaactacgtcttctgctgcaacttcaacccccagtccaacctcatcgtctcagggtctgtaagtgcgtggtttctcctccaagggtgatgtgtacagtgtcatattgtgcttggttggggtaggcagtttggcttttatgtggggacaggttctgggtctgagatcacactgttgctgctcctgttcctgtagaatcactttaatgtcctgtctcacctttagtttgatgaaagtgtgaggatatgggacgtgaagacagggaagtgcctcaagactttgcctgcccattcggacccagtctcagccgtaagtagtcttcctggcctgtcctcagaagttcctctggatgagccgacttgatttgctca

SEQ ID NO: 26448 - DNA, 1949 bp, Mus musculus
gccactgtgatatttcttgccaattctgtctctgcctggggaagttcctggtctgttctgtgctcagaggcaacaaatttttaatttttttattacaagagtgagttcagctcctcatgggttgtttttctctgtggttgttgttttggtattgtattgcccagtgcacactggaacaggacctacagccctactcccattccctgcctcctgccctggcctgcttgttcaattttcctgcctgtaatagtacccagcgtgcttccatgagtttctggaaacacagaaaggttgtaagttgtatccgtgtcaagtccctttgttcttttggagttcataggtcaacactgacctctcagtggttgaaatgtctccttgtctcactggtatcactcagtaagctacacacactgtaataaaaggtgggtatggactgggtgtggccctgagttctgaccaggctctttgacacctggctttataaagccctcctcccttcctggcaggagttggaaaggtctctgggaggatggatccttgttgtgcctcttcttcccagtggctgctgtgggtgctgagtgttggagaggaagaacctcagatgagaaagagtggaaggaagtcttggaaaggcaccatgtagtgaggttctggacctctttattctgtgagaggctcagggtcacctgtgcaggagggaggagttcaatatggtgcttgccccagcaggtacagcttcctgccttggcctctaaacccaccaaacctctcttatgtccttggcccccgccccaggtcaccgcctcaggtgaccaggactggaaagaggtagtggccaagctcaggactacacagcattttcacaactgctgctggctgaacccagggtgacctactgtggagcagactgcagaggttctgggagtacagatgggtggcggaggctgctgggcacagacatgggtggaaaggagattctgggtttgctctggttgcagcagcaaccatctgtgaggccaacactgatgtgtattgaagccacatcacccagggcagtagctgctctactctgcctttgccaaggcttgtccccagctgtggtcctgacagccctttctccctccatcgtgcataataagaatccaaaggtattggaaaagaaaccccatacattgtcacttccttgagggagatggtgtgtaaatgggctatcacatcgaagaagccattgttaaagagggtggcttgtcacactgacatgggctctggggcccctggcgtctgttggatagatgaacctgggttctggtcaatgttgtgggcatgttgctggggtttctggagggtagtaaggtccttccagctgtggcctggtgtgcggcctcctcctgagggagggagcttgcttgccatgtcgagcacagtatccccgagtatagtttattttttctacagttgaactctgttgtagatttatgtaaaaatacattctctttttaaaaataaagattttcatgccttgtaattttgttccatataagtttgttttttccaggaattcattctgtgtgcattcattgggtgtgtggagatcagaggattacctgtcattccctcccacttggttggcactcaataaggatttctttagcagaacaggcagtggaggagcacacctttagttccagcactcaggagggtctaagttcaagcaaagcctgtctgcggagctagtgctaggattacacaaaccaaggctcaaataacaaccaaagggagaaaaaaaattttttttaaagatttatttattcattatatgtaagtacactgtagctgtcttcagacactccagaagagggcgtcagatctcattacgggtggttgtgagccaccatgtggttgctgggatttgaactcaggacctcttgaagagcagtcagtgctctcaa

SEQ ID NO: 26449 - DNA, 1175 bp, Mus musculus
atcctgagcgacagctgacgtgtagccagccttcgctgcgcatgcggagacacggtggcgggagccgaggagtatgcgcagactccgtacacagcctcccccgcactttcagcgtttacaacccgtcgcccggaaatctaggaaggattaacaggcgctcgtcctctgattcgtgcccgcccacttccacttcccgccgtccgcaagcgtgtcccggttggacgtgcgcctaccctgttttgtttccggggaatctgctttgcccaagaacgttcacaacttccggtgttcccttaggcctgtgattggctagttttatgaattaattaaagcgtgtcgggtttgaaataaataaaccgtttttacttctaaataaccgcgctgaaattatcaaaccaccaaataaaatatgatacttttcagtaacaagcttttgtgactactaaacaaaattcaccattatctaaaaaggtccgatattgggagctttaaatacgccgcgggaggaatgtacttctgtgttgtatgaaaggagagaaggttagcactccccttgacaaggatggaagaggcccttgggcctaacaacacacatacggttaaggcattgccacctacttcgtggcatctaaccactgttttttttgtgtgtaaatttggaagctgaaggatgtaatcttttttttgtttggtttttttgtttttatttattacgtattttcctcaatgacatttccaatgctatcccaaaagtcccccataccctccccccgaaggatgcaatcttatacagatttcttgctcgagatttttattctaatcaccatccccaactctcttacccagcatatttgggacagatgtaagtctacttcaaacaggcaatttcattctgaagcttggaggactgccatgtgcagtagctcaacttgccacctactaagagctatttgctcatcaacttcggatattggggtgttcctgacagacataaggcacttaatactcaaacaacaaatgaccctgagcactactccagacggtggggagttcataagggctctcctagagcaggtggtacagctttctttattgactgtggcaccaaatctgtctttagtatcagaaatccaagcagtggatacaggtatgtgtatactgtgatcacagttgag

SEQ ID NO: 26450 - DNA, 1091 bp, Mus musculus
agaacatgtgtccaatgccagtgtgtcagccggggaatgatatagagtggccattcctcgatgcatgcacccttaccctccacgctctcctgggaagtgtttgtgagtgatgatggccttggggttactgagtttagggtgctgacatctgaagtgctggggtttatactgcctgagtctaggattgtgggcttgggagttttaaggtctggggttctgtgggaagaggtgctggtatctggagttcttgagtccaacatgttgtggttaaagtgctagcttgggggtactaaagtctaggttactcagatttgaagtgttagagtatggcgtccttgggtccggtatgctggtactgattgagggtgttggtttgcactgctggagcctggagtgctggagccagggccccctcttcttggaggtgccagctattcacttgtgctggcatgagacaactatgaaccaagccaagccatgtctgcatcagcttttaaaaccactggaatgagctcacttgtcatgctgtggtccaaatattttggccatttagatgcaaccttctgtgcttgtgaaattaagtgcattattaatcttgcctggcccagtgacagggtaggcagatcagataaatctcctcgaggtgcagagagggaaggaggaacacgttcttatcggatgaggaagacactggtttccacaggttcctggtggaggggaactgaccgtggggaggactggccaggcctgaggaaggcctgaggtgctgggggtgcttttcaagagaggaacatgttgtgtgtgtgtgtgtgtgtgtttgtgtgtgtgtgtgtgtgtaacactgcttctggatgttacacgggtgacatggggtaaggacaacacagctgaagtggggtaaggggctgtcctgccagatctcatactggacttgggggtggcggtggtcaagactatatctgattacgaaagtaataaaatccactggggaaggaggatgagaaaaagcgcagaggaggccgtgcaagctcaggctctctatagagcctcaccatcgtccatgagtggtgggtgcatttctttccagacct

SEQ ID NO: 26451 - DNA, 1177 bp, Mus musculus
ggtatgtcaccagctggggaatggccaggagcaactgcctgctcaggtcacagcatcgtcaccatagagtggctgtcctggctgatgtgtgtgagctgggcactgggctggttgagctgtcaccagtccttgaaacagtaggtgggcggggacctgatgatctagctgtggtagctgctttccgggcacagggcctcccttaagctgaggtggaacgagctggaggaaggcttcttggaggaaatggcaccgtgcaggttcagacaagggaacagatgaaacagtttgtgctcaggcccaggggtttaagagaagcaatggaaaggtgtagcccagaggctgagaagttcccaggggtctcacgtagggtgtgaccttgactttgtgatattgcagagctgtgggtatgctgtatgtaggggcaacaggacatttgggtgacctgcttcccaggctgctatttggatgctgttcaaacagggtagttcttaatcttccacttcagatgtcagcagcctgggcaggactttgcccaagacaggcagggattttttgtagtcttgggccctgctgggatttcaggcatgagcttggtgagtgtgtgtgtgtgcatatgcatgtgtatgttacgtttgtgcatatatgtacacgtgtacatatgcatgcatatgtgacacctctttgttaattgttaataaatgttagcattccttctaggctgtgccccacagttacctggcaatagccaggtaggcctggcttactataaagggggctgtttgctcccctttttgctctctcggactctcttctctccctggcccctttctccctctctctccctccctctcccacctctacatgtgttcctggcaggtctggccttgcctctcctctcctttttcctccctctttccccccacctcctcctccctccctttatccctctttctctgcctccactcccttctcaactcccatccccatgccctaaataaaccctattctatactataccgtcatatggctgataccttagggggaaggggtatctcagcatgggcccaccgaagtagccctctcacctcaccatacctccatctacaaacatattttttgctcgtttttaataaaacacaataagtaagtagctaattaattgttgcaggtgtgaggg

SEQ ID NO: 26452 - DNA, 1152 bp, Mus musculus
gaattgccagatgtcttcacagtcttagccatacataaacagatggaggccctggggactggtggtgcataccctgccctgtgtcggggtggctgatatcccatcccctacatctgccccacagaataggtttacaccaactgctgggcacagggtcagtgcaaccctgcatccagaaggacctggcaggccttttccaccgaggttcagctcctctcatttgtcagcaagacaaggggttcctcaaaaggacagatctagcttggctgagatgggggaagatccagcaatgcccttggcatcagcccacactgggtcagggaccactaagtcctgattggacacctcttacctgttggacctcaagccgttcctggtttgtctttttctgagacgatgtttcaagtatcccaggctggccttgctatgcacttgaggatgactttgaactcctgcttcttccttccttttctgagtcctgggattgtagaccatacccagtaacgacagtgctgaagttcaaacccgtggctttggctatgctaggcaatgtctgctgtgcgagcccagcccgactctgacattgcttttagttctgcttagcaggtgaatggaccactgcttagcagatgaacggaccactgttaaggatgggagctgcaaatgacagtacatacctatgataccaggaaggttgaggcaggaggatctgagctctgggatagcctaggctacagaatgaagtttggtcaagcctgaggtcttctgtttctgaatttttgtttaaccatatgtacttaaagtaacaaaacagcttttcatttgtgtgtgtgtgtgtgtgtgtgtgtgtgtgtgtgtgcacatgcatgtgcacacacatgctttttggtatgggtatgtgcagtgcatacctgtgggtgtatgtacatatatacagatgccagaggtagatgccagttgactttctcaattgctctccactttatttcctaaagattaaagaagattagtatgtcataagtgtctgctgtgtgtgtgcaggtgccctcagcatcctgaagagggctccccaagaattacgatggttgtgataagctcagcagttggctagactgctgggctagtgagctccagggctccaccagtctccgg

SEQ ID NO: 26453 - DNA, 1171 bp, Mus musculus
ccaggggaatacggctcaggctgcactgcaagcacagcatgcctgtttgatagccatactccaaggtggtaggaggggtcagttgggggtggagcctgggaaggatcaccctaacctcctcttttctgattgcagggggaaatcggcccacctggtccccgaggagaagatggtcctgaaggtccaaagggtcgaggtggtcccaatggtgatcctggtcccctggggcccactggggaaaaggtttgtgcttacaatcctagattatgcttagaggtttctgagtgccagatggcccctcctatgtgcaacacgggtagtgggactcctgaatagcccatgccacaacccctagcctttcgtcacctctcccagtcgatgtgtgcgcgtgcgttcgtgtaccctttgatcttcattctgttccaagttccccttctcatcccaccaccgccgcacaccttggaggagtgtcttccaccaaatataggcaaagcttgggcatctcacccgagcctcacacgagcacccatccctatcaaaccctgcctccactctgggggtgacagaatgttctcactacagcctgacatcatggcttgtgcgtgaggctccggtaggtgcctgtgtcctagcttgccctgtaacaacagcgcctcctacatctggtccccagaaacctgggcaggaggggactcaaggagtggttaagcctcccattccctctggtcctgtggctagaactcttacagagtgttcagaacccccacagatacgaatattcttcctgcccatggtgcccatggtgcccatggtgcttgtttggatttccacgcatgctggtaggatccacacaccctacttcctgagggcttagagacccactcagttcccggggagatgcagctgcctctgtacaccaaccctacccttccaacctgccctagctcctctcagaaccacccctccctgcttacaggacaaggttgagaaagtcatttatgatttatgagtctttttttttttcctgctcctagggaaagcttggcgtgcccggattaccggggtacccaggaagacaagggccaaaggtaactaaaccttgctaagtatgtcctggcaggcactgcctcatgtggcaccccacactccagacgccctcttccattctcta

SEQ ID NO: 26454 - DNA, 2151 bp, Mus musculus
agcctccatttttttttaaaacaaccctcaacacatccactcagaggccaaatgtcattccacacgtgcctttccgatggattaaaggtgcttatgtttttgtgagaattttaagtaaatatttgtattgtattgttataaatgttaagtgtgcctggctttcagtcttgcatggaaacccagccttaggcccatgggggcagcgggcagctgggacaagtcacccgctcgggctcgaaatccggctctcggtagagggcatcgccttacccccacccccacaagaatgtgcaataatttggaaatttgcccagtcagcaagaagcggcattgccactgcaggtgcctgggcccctttccagactctttatttttttctttttgattagctctggataattttttatggggaggggaaaaaggcatttgatatcctgcctttcctacagcactcagattaaaacacaggcttaaattaattctgattgcttcctttttccttgttccttcctgcagaggctgatgggacagtgtccagggctggagagccacgtgttctgtagatgataaataactatgaacatttggtgctgaattttttacacttgtctcttgtggtgctatgtgtccggagacccttaggtggccctagggtgcctgccatgcctcattccctcccccaccttcctttatcctggccatttctccacattctgagatttttgccaaggacctgaagaccagattggtgccagagacctttcttccctcctggcaccttgtactcatgatggtggggagtcccttcctgaagcctgtccccctctctgggctctgcttatgtcatttgaaaacacatgagcaaaacaaagacttcgtgcatggccggcccatggtgtacccatggtcttgttcagttgctgaatgtttgtggtgctaatctctgtgtgtgtgccaagatggaatggaagctgctgtgtgcccacctgacagccagacttcattgagagccataggtggcttgagaaatgtgggatggactctggctccagggtcgctgagctgactgagtttccagcagaggagtgtcctgggtgctgcagtcagtgctggggtccatagggatccctctggatgctgccctcttcctcctctccctcctcctccagggtgtgtgtggtggctgggcgggaggggtgctgccttctgagtgcagaggtctccaggtccaacaaggaaaacctcactgagagttacctgccttccaccacgagaaagctgtggtgcccacagagagtcactctggtgcttgtgtccccaccccacccctgaagtgaagaaaacgaccgtgaggcacccgggagcagccaggattgatgaacgccaccaacacgcatcccccaaagttccctgaagaacaagttctactcttgccaaagaaatgcctggcctggagagctctcctggaagccaggatgccatcgtgagccagggactgctgtgcatgcctctgcatgagaaaaagccatattggaagacggccatacgccctgtggattctgtgtaggtcatgtgattcggattctgcctcccactccatctgactttgctctgtcctgttcttctgtcggtcccttccacgttgtaatttgcattgaaacccaaaatgtgttctgttctcctcagtccactttagctccaatattttacaataaaattacttcttatatttgcagaaatgcctctggcatcattttccgtttccattttctctggtgtgtgcgctctctacatatatatatatatatatgtatatatatatatatatatatatatatatttttaaaaattgaacaaatgctgctgaaaatacacacaaagtaaacagaagggctgtgtgataaaaactataggaccttgggtcctttaaaattccaggccaaacggtacattgtatatttcccagcagtctaaactaagcctcagattttaacttctccccaggaagagtgttataaaatattttaaaactgtgtaacaaaggaatcgttgtaacagtgtctcaataaagcagtttactgtttacaccccagaaacttgactagctgtcttttttgcatggccaggccttccatcacctgactctcccgt

SEQ ID NO: 26455 - DNA, 1451 bp, Mus musculus
tgtagctcccacttttccagaagccaagggtccaagtcctcaccccgaggacatttccatgaaacagctgccaaatgattccaagaatactaacagtcctgattttgagaaatcagcgcaattttgacgccgagagatggtgtcctctctgtgttcctcctactcctgcaggtgggccgcagatttcagaagaaaccgccatgtatgtggatggaactgcagcccaaggctccttggctgtccccatcccaccccatccctctctggtccaataactcaaagaagcaaggcgatgactgttggcccctctcacccaagaacaacccactgttaggattgcatggacatttccttaggttgtgcccagcgagatgatgtgatggccattctccccaaccagctcccccagcccccgaggcactcgctcagtgtaggctgcttcagcccacacatatcgcagctgcctttttcttgaccgtgttgttgtctcttagattaactgtgctgagactcccggtagctcatggacctgtgtctagtactttcccgaagcgatggtgggtgtgcgtaggtgaagttgctgtacccacgttgttgaacttgcgtaccctgtagctagatcgtgaggtgtccgtctgttatcccccaaggtggtaactccgtgtgttcaatttatgcaatgaatgttgtcatgcaatgctgtagtttggattgataagtggatggtttctgtttctaaaaagaaaaaaaaaatcagtgttcgcccttataggagacatagtcaagttcatgttgataataacccagtggaactcttatcttgtcaaggtatctgaattgtgtaaccatggatgggaaggacgcatcgtgggaaacttccgtttcctacaggaaggaactccccaagggcagccatgtgtggaaagatcattttttaaagaaataaataagtcaaagagggcaactttgtactgttcagttatctaaggaacaataaagatattaggagataacctcgatttgcttattgtctgtggcaagagggacatatgtgatgggcaaccctggatgtcgtagctaccctctaagtcatgagaactcagaagggaaagaggacagtggattatgacctcctacttcccaaagccaaaaagtgcttggcattcccccgacctagggctgccccagagaccccacccttaattccttcacccccttctctgactcttcttccctggagcaggtacccacccatgtcagacagctctggcgccattggtatatgtcagccgagacctcactgatgctgataagaccatgatggtgaacccaccccacttccaacccagcctttcgccaagggctgccacagacctagggaggaggtgcccagggaccccaagatatgtagaccctagcaattccaaaggactcaacatgcagataacatc

SEQ ID NO: 26456 - DNA, 1713 bp, Mus musculus
agatggaggccctgcatcggctgcagagtcccaaggggtccgagggcagtgggacatctcctgtgcctgataagagccattccccataacagaaagcccttctcccacactagatagccagccctcttctgagcaggaaggtccttgtccaaccctggtctgtgtccccactccctgtcctcagcatcagcaccacagtcctatttccttagatatggccaccccaaagtccaatgatcttgagctaacccttatctgtctcttttctgggaacaaactcaggtaaagtacctagtcacatggcctctggcatccattaagacttgaacatagctagccaagtttccgcttttcagttaaaattaatcctccattgtctgctaattaatccttcattctctgaagaaaattccaagcaaaaccaacactgatgtccctcaggacccccagtagttgcctctagacctgtaaccaggctaagcaggctcccagagggaagataggaagtatagtccatgcattgtgctgcactactaaagaacttaatgagtttgctaattcattcaagcagaagtctggggaatatatgtgggaatggattttaaaggtttggggtaatggaaagaacataaaactgaatcaggctgagttttatggatatgggcttctctggagctcttatgtttaatatggaagctcgcacagtgaaaaaaggtgtcaaaagtttgttccatgtttggctgaagtattttttaaaagaacctactgatgggagcacaaaagtccttgagcccacagatcaccaaggaaaccaggaatgttaatcacatagggttgactccccaaagaaggaaatccatacctgtttcccacccagaggactgggcgtggatgttgttaatgacctggtgacctttgctatttgtagagccagacctcacccaaatgccccctaaatgtttgtcttggactcttccttcctagacctttatttttaacttagtttctccaccaataaaatccatgcttaggggagatgtcacaagtattttataacctgctgacctctacattatcttggtcagagaccataccagatcctaggcccttaagctataggacccatctttgtggtcggtgtactttgagctgagtttcaatgtaattatgcctcttatacccgggattgtattacatcaggaaacttttccagaattgtactattttaatatatgtttacagtaaaccacctggtgtcagactctctagaactttgaacccgtaccaactaagtcaggcaagttttctttcttgcctttcataggccctgatgcttgcagggaccctcaaatcatactgaaaaggagttggggatacctgataactcttggcttagtagtgatgaagggctcttaaggctcagggaaactgcagtgctagagtggcacactgtaaaatctaatcctccatgatgggaaggtggtggaaacaagcctctcactaaccctgtcatgtaagagggacaccagcacatttgaagagctttgctgttgcccttttccttgtcctagaccttagggttggagatgcttgctctgttggatgaattaaatgtagtgggtttaattgggcccccgcagggtgacagcacggatcaccaaaggcaaggtggtcgagcatgcattatcacaatgagcagcatagacaaagcag

SEQ ID NO: 26457 - DNA, 1359 bp, Mus musculus
cggggacgggtccatacggcgttgttcttgattcccatcgtaacttaaagggaaacttacacaatgtccggagcccttgacgtcctgcagatgaaggaggaggatgtcctcaaattccttgctgtgggaacccacttaggtggcaccaaccttgactttcagatggagcagtacatctataaaaggaaagtgacggtatctacatcataaacctgaagaggacctgggagaagctgttgctcgcagctcgagctattgttgccatcgagaaccctgctgatgtcagcgtcatctcctccaggaacactggccagcgagctgtgctgaagtttgctgctgccacaggagccactccgattgctggccgctttacacctgggaccttcactaaccagatccaagcagccttcagggagccacggcttctagtggtaaccgatcccagggctgaccatcagccactcacagaggcctcttatgtcaatctacccaccattgctctgtgtaacacagattctcccctgcgctatgtggacattgccatcccatgcaacaacaagggagttcactcagtgggtctgatgtggtggatgctggccagggaagtactccgcatgcgaggtactatctcccgtgagcacccctgggaggtcatgcctgatctttacttctacagagacccagaggagattgagaaggaggagcaggctgctgctgagaaggctgtgaccaaggaggaattccagggtgaatggaccacaccagctcctgagttcactgctgctcagcctgaggtggccgactgatctgagggtgtgcaggttccctcggtgcccatccagcagttccccacagaagactggagtgcacagccagccactgaggattggtcagcagctcccacagcgcaggccacggagtgggttggagccaccactgagtggtcctgagctgctgtgcaggtgcctgagcaaagggaaaaaagatggaaggaaaataaagttgctaaaagctgaaaaaaaaaaaaaaaaaaaaagaagggactccaatggtagaggatgacacacttatccttaagccacgcccatacctcaactttttttttttttttttttttttttttttttttttttgagacagggtttctctgtgaaagcctggctgtcctagaactcactctgtagactaggttgcccccaactctgcctcctgagtgctgctgggacgaaaggtttgcaccactactacctgacatcttaacatttcaaaccaattcgagctgctgatttgactctccaaaaatgcgtacagatcatctgtttctgctggcttcagccacttcttatatttggttccaaa

SEQ ID NO: 26458 - DNA, 1341 bp, Mus musculus
ctgaaggtggccacggacaatcccagcaaggagtcctcagcctctgtgtagaaaaatcagacgaggtttgtggagcaatgggcaacactcttcctggacagacaagttttatgggctcagaagctttaaaatcacagagcaccctcttctagaaacaggtgccctcctctctaatgagtttagcttgtgtcaggtagacataaactatccagcacaccatgttttgctatatttaaaacaaaaaccaaaaaacacaacagacagttgtggctcatgcctttaacccaacactcgggaggcagagccagatggatctctgagtttgaggccaagcctggtctaaggagtgagttccagagcattcaaggctacacagagaacccctgtctcaaaaaccaaaacaacaacaaaaaggtaacccactacttgtggctggtgaggtcatttcaaaaccaacaaaagttctaacagaattctaaacacttagccatacccaaagataaatgtagctcttacccctcccctcgccaaagaagcttctttttgcagcatcgtggaaagccacagctggtcaaaatgtagagaactgaccgtggggtgcccagaccccgttgataaatcgaaaacacaaccctgacacctaaggctcaggaactatcacaaaagagagtgtggaaagactggaagaggcagaagacctgggcaggaaatgggtggttgtctgcttcaaggtagtcttttatgttcgacagtggagcattacctagaaatatctcaacaatatccttgcctaaacaagacttaaaaaaaaataccaccacctattgacaggccgacctggatgggtgtggtagtttgaataggctaggcccccatagattcatctgcttggatgcttgaccatacagagtggcactattaggacatgtggccttattggagtatgagtggccttgttgggggaagagtgtcactgtataggtgggttttgaggcttccaatgcttatccccttctgctgcctttggatcaagatgtagaactctaggcttcttcagcgccatgtttgcctgcctgctgccatgcttcctgccatgatgataatggtctgtatctctgaaactgtaagccagccccaattaaatgtcctttgtaaaagttgccttggtcatgtgtcccttcacagcaatgaaaccctaactaagaagttggtaccagagactggggtattggtgtgataggcttgacagtgatttttgtttggaggaatgtggagtgctttaagtggggcttaatgggttatcttagtaagaacatgaaaggcagttgtactgaggatgat

SEQ ID NO: 26459 - DNA, 1201 bp, Mus musculus
tcctggaaacctgctctggctggaagtcctagccagcagagagagccgtaaaggtggtgtggagagacttccttaggctctcattgacctctactggggtcgcaggagaggtccttgttggagctggattggaggactcccaaggccctgctgtggcctggccgggaggaggctctcaggaggtgggggcatctcagccgcataaagcaccactccctgtccctctcccaccagagctgaagattccagaaaacgccaatgtgttctatgccatgaactctaccgccaactatgacttcatcctaaagaagcggaccttcactaagggggctaaagtcaagcatggagccagctccaccctccctcgtatgaagcagaagggactcaggattgccaaaggcatcttctaaggacgtctcctgggacgggctgactggctggagactaagcacttacagactagagtggccctggccacacaggtacctctgcccacctgccagtccaggctacccccctactccactttcaccctgaacctctcctgctgccgggattgacacctgccactgacaggctgacctggcctctggggaccacttgccgccttcggtgccttctgctctctgaaaccagaggactagctgacttttgccaaggagtgttgccaactgggcatgggaccttgcctgccctggacactatccaccacactttgctgacacctccccaggtgcagatcactgccacccatgctcccggatgctccaggacacacatacacccagcagggctgccgactgcattctctccttgtgcccacaggcactggcctgggactttcatggaggtcctagcctttcctcccacactctagcctttctcaggctgcaccaaagattccaccttcagggcctacagagtgagggagcctcgcccaccaggagcccaagccctcccttggatcagagagagaagccctctcgtgaactgcccggttggtattgaatcccagtccactgaaagtgccattgaccaccgctgcatccgggctgtacaagacgacacgcagtgggaggtttgtggggaggaggaagacaactgaacatttgtataaaacgtaaaaagtttactgattggggtgggacaatatttatttgttgtaaatagaaaatgctagacttgaatattatattaaaat

SEQ ID NO: 26460 - DNA, 1268 bp, Mus musculus
ggcgagtcatgatgggacagttgggacaggcttgtgcccccatccaggcagtgagatgaggatactgggcaaccccaggctgtgctcagcctgacttcaccaaatggacctgaaaacaccccgtctcacatcttccttttgtctctgtcaagcggacatccatggaaggtccctgggtgtaagccccagagcagcagcgccacttcctgaagggtgctgcgccagagatgggccattgccttgtgtctctgtgtggcctctgtgccttgaacagcctggtgcacacagtcaagtcacagcaaatccaaagccaaatgcctcgagccagccgagattgaagatccattgtttgatttgggtcaagtgagcactcctgggaacttcccagtcttgcatggaatcagacagaccgaccctgtgtccccgctgaccctgcttcctgctgcttcaaagaatgctcagccctgaggcaggaagtagctcttccaaaaggctagccagccttgcctgtccccataggacttctttcctggtgactgccaggaagcttcagctgggcgttttctcacttctagttgctgcccatcctggttcttggggaggagaccagggttctgatcccatgtacccaggaatgctttgactctggatgtgaggaggttctgagtgagggccccgtgccctctggaggcctcacttacacagagcccagggcgatggccattcctgccataggttggacagactagaaggacttcctgaagtctagccacacttggcaaagtattgtaactgtcctgaattcccatgtaaatcaaagtgcttttggtacaataaatataaaactcccccaaagccagcactggtgtttgatgccctggtcacctggcatatgagtcacagcactgagtcttgttgcatagtgcaccctgtattgatttgtttttgatttgtgttttgctgggtgtgtttgagaaaaggccacttgtctccacagaacaaaagcactttgtggcacttgctagccaagattctcgagaagtggaacagttagcacttattataagcagttggctctcagttaaggtacaggtctacagtcttcagggcatggtataggatggagattcagagaagggctgcagttgaatacaacctgctggctgcatactcccacccctacccctgctgccttccagccctgcagcaggctgtgcatgaagcacctccgctcggaggtgaggcagcaccaactgacttcaacaaca

SEQ ID NO: 26461 - DNA, 1102 bp, Mus musculus
gttctctggaaagcagactcaaaattgacgtgatagccagcacttgggaggcagaggcaggcggatttctgagttcgaggccagcctggtctacagagtgagttccaggacagccagggctacacagagaaactctgtctcgaaaaaacacaaaaacaaaacaaaaccaactaaccaaacaaacaagcaaacaaacaaaaattgacattataatagctcagagttgagtaatactgatttcagtatgtccttctccagtcacagctttctgttttctcttgtgctactgatgaaagatgagattgtcatcgttctctccaagttcaggaggctagatgctccacagagcacatgggttcctgcagggtagaacaacctcgtcttagcaactaaaacttcagcaaatatcttttagtctttttttttttttttttaaatcccatcccctgttagagggttccagggacaggaaagaattacctggctaagttgagtttgacccttttgctactggttcttgggaaatgttagttttgtttctttgttttgagatagggtctcactatgtagccaaggctagtctggaactcatgatcttcctactgtggcctcccaaaagctgagattacaaggatgtatcaccatcccctggctagtttttaccttttttctatataataccttaagatgaaatttgacaaggattataatatttaaaactcctcttacaaaatgaaatttgatgtattggagtcaggtaaatgaactgcagttatcttaagaggccgacagtagcttgtccaaggagagtgattctgtgtccataaggagaggggtggcaggaggactttgtgttttcctacagaggttggctggagagatcctggggcccaaccaccaagcccgggagttcagtgttaggtctgggacttggctatacacaatgaattgcctgtccattcccagccaccaagactccctttagctcagtatagttggagtttgaaagttttcctaagccattgcagattctgaccacaagaatatgagctaaagttgaaactcccttcaccctgtctgagggtatagctccattgatcaa

SEQ ID NO: 26462 - DNA, 1121 bp, Mus musculus
acatcgtaaacatgctatggtgatgtcttttggtgtttgagatggtttccttagggagagacatcaaaaatgcctagccagcctatttgccaggaagtcctcctcactcagctgggtcagggctgagtggtgagggcactgtagagttaccctgtgcacttatctgtaagtactgactccagacctttttataggaagtagaaatgatgaaaactgcatatcggaaagagctagagaaaaacagaagccaccttctccagcagaaccaaaggttggacgcctcacagaggcgagttttggaactggagtctcttctggccaagaaagaccaccttctcctagaacagaagaaatatcttgaggatgtcaagagccaggcgaggtgactcactggaaaggtgtgggtgttggtgtgggtgtggcccctcccgtattctgaaccatgctgtctttcagtggacagctgctggctgcagagagcaggtatgaggctcagagaaagatcacccgggtgttggaactggagatcctagacttgtatggcaggttggaaaaagatggccgcctacggaaactagaagaggacagagcagaggcagcagaggcagcagaagagaggtgagtgcagacacgtcaggctctgtgggaggaaggcaggctctgcacagcagctgggctgccatcctctgctcgtccttcttgtttgttggctgtactcagtctgccctcactattgcagattgtcatccagcatagctccaggtgtcacctggacttcagtgaaactcttacatgtagctgctgttaccctgtctcgaaaaaccaaaaaaaaaaacaaaaaaaacaaaacagaaaaaagggggtgatggcttggtggataaagggttactgctcttgcagaggacctcagtttggttcctggatgtagggaatcggatactgtcttctggcctcctcaggtttcaggcaggcacatacatacatacatacatacatacatacatacatacatacatgaaatatttaattagagaaggagcatgtggagttgggacgcaagtgtaattttgcatttcctctgcagtgctgtggttgtcagctgcactctctctgggtctctt

SEQ ID NO: 26463 - DNA, 4601 bp, Mus musculus
aagtgtcttgcctaaagcagtttgagcagaagccttctgcttctagaaacataatggtctcttctagagaatctaaggaccttcttgtgagtttggttttcgtccttgctttggtcggggactgtctctggctccagagggctgaagtggttggtacatgacactgcatgtgccagtacaccttaaagtgtgtaatgctggctggctgcggctggggcttgctcagcagactcagctgcccattgactcattcatatggagacattttcctaaaactatatttttgaagccaagaataaaatcatcttaatgtatcaaatgatcaggtgactattagaagtaaataattgtcatttatttttatctcctgtcatcagattttctggcccagctctttaatatgtaagaagagattaagtatccctactcttcacagccccacttgatgaccatgtggtaacctagatatttgtacatccaggggaagtattgtcttcctttagtattaaagtgaagcctcagtatttctaacattggcttatccggacatctccctgagcatttggagggaaagctggtctagagacttgtggagaaagatggagttggacgtccttgagctctgtgctccaagcatgtgcagctcaagtggaaaacctaagagtttcctctcctgccaaaggtccttaatctttggaacacaggtattcttctgtgggcttaaagaggagatgtgcactgtcaattgactgctcgctcttaacccagccctgaagcattctggagtcacagtcggggtattagagtaagtttcctgggattggtgctaatgaactggacacattttgaaactgtgcaattggaaatgagataggaaatacagaacatgaaatgctttactccttgatgattctgttttatcatgagtattattttaacacactttcccactttgattttatatctttagcaaaagaaataatgtcttagtacttgggtaccacggcgagagacaggtcacctgccaccctgccacacttctgcactctgggcacagaccctgagaggcacttccagaagctgctctgaattgtcctgttaagactgttgccctgtgctgtgtgtttaatggattgtttgttggggttgttaatgtcctgacgtagggttgtttcaagaacagcatctctccagacttgaggggcagcaaggaaagagccccgagtgacccagttcagagtctgcatggctgcagcagagcctgccgctgttactcctcagagggagatgacaggagtggagatggtaccgatagtcgttgctagtctgtctaccgtgcgtgccaagcttcctttctcttgctctttggaatcaatctccctaggtgttctcacagggaattcgggggaacttaaaacttggttgtttaaagcagtttgcatttctgtgaaattttatcatttagaagtaacaaaagaatttctaggatctgtacttgtgtaaaggaagaaacgtgacaactggaacacaagttttcagcaagaagcctagccctgcaaaatttttggactctgagatccagccacagccaagtgtttccacagccagtagagatgtccccctcccctcacaaacaccacactgatgttaatcttcagagctgggtgaatgagagaatttggggttgatggcagcctcctgtgtgcaacctgtgcacttctgaatcgctctccaagggtcagcatataggcccacagagggttgatggagagaccttggaaaagtgggagtggcgccagagtcttgcgctatgcctcttgcagcttgaactcacctgtgctgcttgagggaggagttcagtagcttccagttgcagctatagtagctgtttctgcagggggaagaagagtagccatcaaattgctgccctgcatttagaagactggagcagactctacagagaacttacacgctgcagcactgctgtgtaccaggttccatgcctagatggtttctgttactctaggtaggaatgggtagcttgttgtggttggcattcaaaccaatgtcctgatatgttcacccccagacttgaagctgtctctgctcctaccagatctgccagaagctgtcaatgagtaccagcaaagtttatgatgggatgtaacaattgttctgcttgtccctctggggtctagcaagtttttaagaacatctgtgtgggcacaggtaggctgaacctagcaataagtttaacaaatgaattgcattgggaaagttttgttttctgtttgttttgttctgttttttggaatggggtctcactatgctatagctctggctgccctgaaactcttgtagaccagactgccattgaactcaaatatctgcctgcctctgcctccaatattgggaaagttttaagggttaattattaagtcacttgattggttatattggtatcaaataaggtgcagatggtggaacacagccctagcctgggagccctgcatccctggcagcagctaaatggcctgggtaaatgacctgttaagcagctgcagtttctgaagtagaacagactcagcttctggccatccccttcttactttaccttccccaagaagtggctcccagcattaggatgcattcaaggccaggaaaatatataatgataagcatttctaaaggctaagtcatgtgggtcttcctaaaaaaaaccagtgtctcatggtaagagggccaaggtactcaaggctgactgccggctccttgccaccacagtgttggctgttgatgctgagctgaatggggtacattccaagtcggtctggaccctcaacagtcagacacacacagggctctttgaccacagcacaccttggacttgagtaaccacagctaggctttgcggtcactcatggtatggtagactgcaaaatctcaacagccttccctctcccccccccccaagtatcggcttggaaggacaccctgctgggtacaagaaagtggataatctggagattatggaaaagcaccagtgtcccctaaagtgtcacactttagaatgtgcctcagattggtgtggccatttcttgtctgctctttcttgaagctaagacgttattgaaggtaaatctgctttgagtctgctgctcaactaagtgctcagtaggtaagatgtccttaagtggaactaagctgtgctcatggtagcctcgtttctagcttccacagacatggcagctctgtccacagaacaggcaggaggcagtgttcttggattgttttcttcaaggtcatgtttatatcgaggggagagaccctgatgcagtcaacaggttctagtcatgaatttatttagagccagatggtgtggttcactaacaaggcctaagtcttccttccttgtgattaagtgaagcagaaaaggaagcggtgtacatctgaattacactgtaggctcacaagcaaaaacgtggtcctatggtgaacagatgacatctcagagttctaaatctccactttatttttaagattagaagttctcaaagctgaggctgtagcttggtggatagagagagcacttgcctagcattgacaagacctcaagttccatcctcagcacttggggtggggttattatttatatcactaccatgaaattatattgttttcataaagaaaaatactctaaaatagactgggtaaggcattgtggcacactgtgttctaagcacccaggagtctgtgaggcaggagactcaagttgaaggccagcctgagctgtgtggagagagcacgtctcagaaaaccagtgctcaggttgggcagcatcagaggcagtgatggcgtagtgacattttcagaccaggtgtacatttggctgacgcgctagggtgagtgctggtgttctcgctgtctctgtaaggtactaatataaagtcccacaccagtgtcccatgaactgtcttttccaaggcttcgtttcacagttgtattttgatacaacatggatgtgagcatcacacttgtttaaacagatgtctgctgtgcttagtggttttacctctgtttacctgatgcctgtgtaaagtctgtgcttggctttgaattgtgtgtttacaccttactgtctctaaataaagagaaaattttatggttatgcaaaggggatttttttttattcttaccatctaatgaattttaattttcaagattttagctaaaaactaagagtaataacaagtgtttcttggaataactaccaacccagccatctgttttccccagtgtgtgtacacagtgctgttagcctgtgtgtgtatgcccctccagggccaggactgtgtctcagttcatgatgctggtgagctggtaagtggggctccccgtccttcactgctcttcatagtcagctgcatggagccactaagacaggaaggcaaggctgacaagaacatgacacaaccctgtagtctttttaggctttccagacccatcagagctgctgagggtgctgaggtccaactggatgctgttggaaacacctaatcccattttctagcagacatggctcccctttaaggatgaagagt

SEQ ID NO: 26464 - DNA, 1166 bp, Mus musculus
agtctttcacagttcccagccttgaacctcctatggaattactgttagggaaatgccccaacatgctttgattggcccttgtccatttattctcatatttagggtgtcagttgtatatcatgtagaattagattacagctgtgtaggttccagtgtgttttcttttgaatgggaagagcatggtggtttattagtaccgactgtggagatgaatgccattagtgggtttagcagtcaggctgttaacatagtcaacactatctagactttgatcttagttgtgaaatatggttaatactttcggcaaactagcagctaaagttgggttaagaagtccaggtggctgctgtaaactgtgggcacagacttcatcttacatcccaaacagccctactggtgtagtgcccttactttgacttgagagaaaatggtgagatcagaactagggtgttgatgagcactgacagtgtagagccagtgctcaggtggattattaaccaataaagagaagagaagagaagtgaggagctggaagagccagcacttgatcaactgtctctggcgtgcaccatcagaggctgaagctgaggagctgacaatgaaaggagaaatggtacctcagtagccttcaagtgtccctacagggacttgggaacagatatggaaagacagtcactgcagcaggaagccctggctgctactccttagccagtcctaagaagatcatgttacttgtgtaggttggtttttgttttttgacaaaactgagtttaatctcaaggaaacatgagataaaaccaattgaggggtactctgaaaaattcctgactggcagtcttcgagagggttgagggtataaaagagaattactgaagaatgttatagatgaagaattgtcacaaacagcatgacaaagcaaggcagtggcatgcatggggtctagctgaaaacagacacctagaggtcagttggtaagatttgaatgaagcctatcgattaatattgagtcagcgctcatttcctggttctgataattctgtagtttcaatgatggtgtgtacaaattgagaatgttggagttaattgtataatttgttcatttttacttttttcgtaaaagcctgagcttccaaaatgaacaggttaaaatttttttttaatcagtt

SEQ ID NO: 26465 - DNA, 1133 bp, Mus musculus
aagcttttgctcaaaccgtaccacaggctccgctgcctggccccaccctcactgtccctaccttaaaaaccgggttttgcccctccccttcctgaacttcactatactctgagaacgggtcagctgctgttttgtgttaaattccttctcattcattacaataccacttttttattgacatggaaataaaacttacaatcaatgagctcttatgaaatatacatcaaagcaggaagcagcagcgcgagggtttcatctgttctagggaaggaacaagggtttagggggagggggagacacggaacattttccttcccgattacatgatgcgattttcaatgaatctataaagaaaatgaaaacataaatacagtgtccaaacagggtgatccctgcagctgtcaaaacttaaaacagctcactttccctttgatttctgttttaagttctgaaatgtacatagatcattctcagcttttttctttctttctatccctccccccttttctttttacagggagtctctttttaaaatctgatctttcctggatcctccagctttgacccttggtggccaaactgacccaataccgggtaccctggacactgcttctcagccctcagcctgcccaagcctccttagtggagacctccctctccacattgttcttcccttgtcagtgtcacactgaggtacaagggcccccgccgcctgggatctatggacctactgtgctctacacgtctcagttttttctagccagggtctgctgcactgggggtgggggctgtttgtgtgtatgtttaagggtaatgagacacagacacccaaagaagtctagaagctgttcagagttaaacagtagagaattatgggctggggaaatggttcagctatgaagagtgtgacatagtacccttgtcagtcaggtgcctcatacctgcctgggatctctctctgacctcctgggacactgtacttaagtgtacatggctacaacagatacatacacacataaatttttttttaaaaaaaagaccacggtgtaggggaagtggttttatcagtaatgtacttggtctgaactttacctgagtttcatccctagtacccacgttaaaagccaggcatg

SEQ ID NO: 26466 - DNA, 1655 bp, Mus musculus
tgaccaaacttcagcaagtaagcaaaggagatgacctgaaaagctgaggaccaccaccagaaattgtcctctggactccacatgaacaaacacacacacatctttaaaagtgttagtttcatgttgatgttggtgtgcttgtgagctgactgaatactctgtaccattgtattgaagcagttacactgctggttccattgaaccagtgcagccaccagtcctaggtgcatcagagaacattacacccagtaaaatgagaaagctgcctcccctgatggctgtcactgtgctctcttccagcgcctctgatgtgcagtgactggatcgtctcttcctcaaactgctctctgttcccttggacctgtgttgtgcattggctatagatcccgctcgcatgtgatacctctcctgtgctgggcaccgagtcacacggtgttctgctggagcattggtagtctgcatcggagcccaactggtagccttgaagagtctgtcagctgaacacagccccactggattctcaggactgggtgaaaggggtgctctttggtcaatcaggagagtcaacccaactgtaggggcttcagagaagaaaacttagggtttgggtaagaagaagtattccatgagatctgtgcactatggagataggtgggggagtgggaagtggggtcacaggattgaagccaacctgggctacatagttcctccagcatatacacacacagtgggatgctggagcatcctccaaaaggagaagtgcattgcccagagagcaggagagtactgcagagaagctctagctctgcaagccccaatttccctgtgttccttctagctgttcccatactcaggctgtctgttgttgccctgcagagaaatgtgtccatgtgtgacccttagcagaacactgctgcaagggagtctgggacacccaaatgttcagacattcagacttctgccccatctgtgctggggagacagaagggaaagtgaggctaatgaaaccgcccatatactgctgtctacgttggtgccactcagcaatcttctgtctcccgagaactctcagacatgatttctgtggcactattagaaggtggactagagggctggtgagatggctcagtgggtaagagcacccgattgctctcccgaaggtccggagttcaaatcccagcaaccacatggtggctcacaaccatctgtaacaagatctgactccctcttctggagtgtctgaagacagctacagtgtacttacatataataaataaataaatctttaaaaaaaaaaaaaaaaaaaaagaaggtggactagaaggagcttctgcttgccatgtacctagcacttccccagatgtgcagataacggagtagtcaggtggaatgcactaatgcacccagcattcatgtggggtaggaggagcgggaggtcaaagtggtccttacaaatagcaggctctaggccagggtggcctatagatgactctggctctaacaaacacacaaataaaacattgtgtgaatgatggtattttagtacatggttctctacccagcccctctgtccctcaggcattctagactctgtgctgacaggactaaattgctcctacaaaaataatagtactaatgtataagccaattctata

SEQ ID NO: 26467 - DNA, 1113 bp, Mus musculus
tgggttagcgcgctgcagccgggcctagccggggtgagacgcgccgcggacaagccgcgagcgggcgaacgagcaggagaggagagcgcgtgcgcggtgaggggcgcgcggcttactgccgttgggaacttgcgcgcggcctgcgggagcgggcgcctgctgtgacccttctggagagctgcgtttggtgagagcggcggcttgccgctgctaccaagggcgggcagcgcttggtgtttcctgcaagcgaggcccgcccccggatctctgctgttctggcatcagcaccgccggccctgggcaacgatgtacagcgaggacccttagcttcggggcgagggaggcctcccgggtaaggatccgaccctctgtcctggcgtcgcttccgcatgggcacccggacgccctccccgccgtaccaggcgttgcggtgtggacagcctcccgtacgcccacagcggatgtgatcaagtgcctatttggcccctggaggagaacagtccctagggaagttggggggggggatcagtgttaagccgttccccccagtagtgtgtggatctaacctgacctaggtaactcattagatgacacaaggcccaggtgagatgcataatgtaagggacattttatcagtttttattttaatttcagaaatgttctttttgggggccaaagtgtgaatctgtctgaatgcagagccacatctcacagataagcccagcaatcacaaagagcatcacttctctgtaggaccttggtcaaggtaattgtcttattaaacaataacttcttttttagttatttgataagtactagagttaaaaatgtggcatagatccataccttgacatgccctcttctggtgtgtctgaagatagctacactgtactcatataaataaaacaaatctttaattttttttttaaaataagtctaatgtgtgcagtaacctctggcagcattttgttaggaatttttggaggtaggtcaggtgaggcagagagattagacttagtaattcgggcaaatgatgaaagaataggaagactcaagaaaggaggagtgctagactcagatgcagcagaggagagggacaaggtgatcctgagg

SEQ ID NO: 26468 - DNA, 1157 bp, Mus musculus
ctcttctggcctccaggaagaatgcctggaaaaatctttaaaaaaatgaagaaatctttgaaaaaaagaaaaagaaaaagaaaaaaaaaagtctttaaaaaaatcttttttaaaaaaaagtattaaaggaaaaagttcatgcataaaaataggtttgagcaaatctgtgttatcaaaccagatgaaagaatagattggcttatagaagtcttaagtgtattgcttctaatagacatatctaaaatgtaagtgagcacaaaagattgatggaataaatggaaaaattaccaaatgcttataaaaatgttaaatagatattaacatagaacaggttcctgctagtctttaaatgaatgagaatgattgtttcataaatgatgtgtagtttgtttgaatcaggattaaagaaggtctatatgcagtaatatagtccccggttgatcagtctactgaactctgtaactaggagattttctttgttcattgttcattgaattaatgaacctacaatgttatttataatacaattacttaggttcggcgatgggctattctgactgcaagaaacctggggaaggtggacagagatgactattatgacttacaggaagttttaacttgcctttttaaagtcattgagctggggcttttggaaagtccagacatttacacatcttctgtgcttgaaaaaggcaaactgatccttttgcctgcacacatgtatgatactaccaactacaaaaactattggctaggtgagtattattacatggacatgtcttccctagtgttctcagcacagagcaatctgagcaattttcttattacaaactttcatggttcctagttctttttttttttggttttttttggtttttttgagacagggtttctctgtagccctggctgtcctggaactcactttgtagaccaggctggcctcgaactcaggaatccgcctgcccctgcctcccgagtgctgggattaaaggcgtgcgccaccacgcccggcggttcccagttcttgttcctttgctaaattagcttaagtattaaatatcatttattctaaatgccttccatacagatacattttcaaaccctggcaagtcttttgtttgaagtagaagtgtcagtctgatgttgattattattac

SEQ ID NO: 26469 - DNA, 2222 bp, Mus musculus
ggagtaaaaaaacctaagaggaaacgctatgacaaagttacagctgaagatcctcagaggccttcctcttctgttggaactgatcaattgcctgatcgcagagatcttactgaaagtgatttaaagagtgcagacatggggatggcaactcccagttcaagtgttgagagagattctacaattttacagaagtctacaaaatctcgaactcactcaaaacctgttaggaaagttccagcctctaaggcaactaagaaaacacattcagacaccagaagaggacagtctaagagttcatgttacataagttgtagaacttctcctgctattgtgccaccaaagaagcttcgtcagtgtccagagccaacttcaacagttgaaaaacttggtctgaaaaaagcccctaggaaggcatttgagttgtcccagaggtctctggagtgtatagtccaattacgtgaccacgggaagactgttggagtagttgacgcccccaagaaagctaaattaatttctcctcagactctttctatcaaaaataataagaagcttctgacaagccaggatcttcaatttcaaaggcttatgagatccagatcacataaaaaacgagactttgattacaaaaatactgatactgtaagagtgtcacgcatagtacagggatcagatgtacttgaagcagactctgatgagccagatgatcatagagtaagtgagccacttgccatcagtaatgaaaaacagttagcaaaatgcatgctttccaaaacagaagtggcagaagcctcttctgatccttgggtgacaggtataacttgtcttgtgaaccagtgtgaatctagagtgttaagtggaggagtgccaacagatgtggtgatggtctctgcttcagaggaccctgtggatggaggtgctgtcacagttcaagttggggaggtggcatctgtgaaagctgcagagccagcgtctagtagtgatacagatgatgatgacaacttattcctaacacaacatgatcctcaagatatggatctgtgctcacagttggaaaataaaaccattatcgtggctcataaaaaagatacagttcagagagaagattctttaagtcggcctcagttggagtctttgagtatcacaaagtgtaaatacaaagactgtgtcgaaactacaaaaaaccagggtgaatactgcccaagacactctgaagctaaagcagcagatgacggcctgttccgtaaacctggcttgcctctttctgtagccaggcccttgagacctactactaccaagatatttagctcaagcagcgcttcacgaactgccaatctttccaagtctttggaaagtactacacttcagcagtcagcactaaaaaataagtcaagtggagcgcagcctaatttgaaggtgacaccaccctcttccatgggttctcagaagccagtggctgaggtgaaaagtctatgcaatatttttcattttcagactccaagcagttccagcaaacagagttgcaagcttacatttagtgagaacaggcctacatcagctgcttctccagtgaatattctcttgccatcgcagtctatctttgacaccttcattaaagaggtcttaaaatggaaataccaaatgtttttgaactttgataagtgtggtgctccaacaagtctctgtcagtctatctcaagacctgtgcctgtccgatttcaagattgtgcagaatattttaatgtttttctacctttgattatattgaatgcttttgaaacagtaagtattctttaattctttgcccctactgtagatagagaaatggttataagcatatagcctgctttctaagtttctataagtttgagtctatactcacttcagtgagaaggtattggaagatttggagttggtcagtatttagaccagggactagtaatacacagtagcttatccttacccaacatccttggttgttgggtagagaataaactgtggaaaggctaacaggtctagtagactagttataggttggttacagctacttgggggtaaaatgatagtggctttgggtggtagctgtggagatggaaaggctataagggtacattttagaatatatgactgatgagtggaaattgaaaagatgactctgtttggaggcttaacctggttatgttatgtttactgtctgccaggagtgaggtagaacttgagttcac

SEQ ID NO: 26470 - DNA, 1234 bp, Mus musculus
tggctgagctctccaaataaagagaatttctatcagttgcaattacgaaaatttccagctgactataaaaaatactgggagtttctgagtaagttcatatgcaacttggaatatataatataataactggaaatttttacttgagagatgccaggggctggtaaggtagaccagtgggacgagcatgtatagctttcaccagtagtacagacagtagccagtgatcatgacgacagccgtgtaaactcaatctcatttagctcttgttacaatgagacattaaggcagaaaacattgagataaaaagaacaaatggtcagaagtttagttaataagttctgtaattttagtgcatgtgtgtgtgatatatagagaaaatatgaacagataaaaagtaaactgtacatgtgactggattgttttgtttttttgaggtagcctcttctgtgtgtgtctccctggctgtcttggaactcaatagtagaccaggctgccctcatttcacaaagatctgcttgcctctgcttccctgagtgctgagattcaaggcacactgcacacaacacacctgacttttgtactattaaatcagtgaagagtgacaagtaaaatacaatagaaatgagtgcctcttatataccaaatctataatatatccacggagatactagtacatttatggtagagctggttttgtagttgtcgaactcttgtggattgtgagtgaagcaaaccctgatattgttaggaagcagctctcgtggaagagggtttatagtgggttaggtgatgaacccgggaacttgggttggaagaaccaacttttcacattcaaattttagagtttacagaaatgtagaactcagactccacagagttttcaacaagccttctcacatgttaaaatctcacatacatggaacagtgatggaatcaggggttagcattgctctagtacagagtatgagagaggcctcattcataacacagctgcggtcccagtgatgcctgttttctgtcctgggatccagtctaaagtccaaacatctggagttgtgctgtctcctctcagtccccagtggtctagcgtagttcactcctcagcctgtcttcactgcatgttctttctaccagttagtttgtagaacacactctttgtttcccagatgttaccttagacttgaggttttatgcatttggtaaaaatagaacagaagaatagcttttcttggtg

SEQ ID NO: 26471 - DNA, 1146 bp, Mus musculus
aaccctcattgtgtactgaagctttcatggtcattattcagtcattttgcaccttcaaaggagttgacttagccatactcttaacctctttgattcactaaactatctaaattgaaagactaaatttagactaggtctggctgttttccaccttgtgacattgtattaggaaagaagagttcttagaactttcactgtcgaagcagagaattaaatggaaaatatcagaatagctgaagaaaagttatttaagaaaatttattgtcatatttgtaaaaagcattaaagtacaattataaataaactgatgggtatggatattaactagtaattagtgtccaattaggttttctctagttgtgaaagatcagtcacttagataatgattttatttgacatggactggaagaaagttgaataggtgctgttcttctcccatgtgtcaccacagaaagaattcattacatcttttctataggttgcctacttaaaagactttaatgaagaccaaaagaaagccatagaaactgcatatgccatggtgaaacactcaccatccgttgccaaaatctgtctgattcatggaccacctggaacaggaaaatccaaaactattgttggtctcttgtaccgcttactgacagaggtgggtgtggcactgttagcctggacatggttccatttgacccacattaagagatgtacctttgccctttatttacatgtgtatttaaaaagatttattactactattgtttgtaattttatgtgtatgggtatttggctcacatgtatatctatgtactacttaaagagaatagaaaaagataagatttccctggaactggagctgcagacagttgtgagccatgatatgtgtgctgggaagtgaacctgagtactctggaagagcggccagtgctctttattgctgaggcagctctctggccttttgaatggattcttggttgggctgaatattcattaagtaatagtaaaatgtaaggcctagtgcatcccaacagttgtgataaactttatggcagagaaggctttatgtatgtgttttatgtaggagtgaaaattaggatcttgtatatgctcacaagtgctatgtctgttgaactgcgtgccacagttacttat

SEQ ID NO: 26472 - DNA, 2700 bp, Mus musculus
ggatggaagtaacttctaattcttgatctgtttgttggtcttgttttcagtactttttgccagttgtatacacttggagagggaatttgtatgcctgtaatcttgttcttgaggtcagaaattcaaaacattgggagcttttgttgtaaaggttaaactgtgaatccatatagcaaatgcagatccttttacagtgtaaaccacatttcctgcctcagcctaaagcactggtcattttccaacagaacaaacttccaatttaaagagagagaggaggacagatcctttcaaccattgtgtggtagatgaatttaacagcctcagtactgggagttagtcaagtttgaacaagtagctagtgtcttcagctggggtttcgtgggcctttagaaagcagcacgttgggagttgtgctcataagtgcactttgaaacaaggcagcttggcacagggcatgactgtgacaagttcatttacctatattggtgtataggttttctggctaaaaatctttcccttctcaaaacggaagaccaattcttgaatggtcattcatgcttgcaaagttttgtgaggttgatgtaactggggaattgtagacagcttagcaaatggaggatttgtgctggcttggttggtctggcctggaagagtccatttaggatgcttgtgaaggcttgagagttgcccggaaaattaaaaaggatgcattttaagggatcccatgggagctacacaggggcagaccagatagcatatctcaggcaggagagaaactccatgagaaagaagagcagccgtctgggctgcaggaccatccagtaggtaggtgaaagtgcagtctatgttgggtcactgcaggcactggactccatcagacctggtgtggttgtgagaggaaagcagaggggcctggaagtcaagtcgggacaagggagggagggctgtttaaccagtctctatgtagaagggcatgtgagtgtgaggtctctggtaactactgtgtgcacagcccgttagctgccttggggcaggaagacagccctaaaacttagtgtttgctgttaggagggatttttgccatctgttcttacacaagggttttgtgttagaaattctgctgaaggaggttttgtttgttaagagctttgaaaaaatgcattttgccaagtttcaacacttgagtttcctgatctctttctgctagtgcccagacatgaaccctaatatctgctgaatacttgtaaagctggggagtaggcaccttctcagagcccttcagcctcctggatgtccccagctaagtgggaaagaaatcctgctctggctagggcaggggttcagtaagctcctgcatatgacattggcaggaaacctcactgtcacttgaaattttctttcctagtatctgtgagaagtgctcagtttagccaaaagtgtgcttctgagaggggaataacaacagcaatagccaggacgtttccttctctaaagacccaagaagtacatttgtaaaaagaagattttccaaaacatgtagttggctgctctccaatgagtatgttgtaggacattgtgtgttcatctgctggctcatggctagccacatccgagtattggaatttgtattgcagcctgcttattttgtgaatgtaagggctgctgggattagactctggccaagggatcttccttctcagcaagcagacttgccttagaactgtctcacagcagaatgtagttgcattatattagatctgaaaccttatttattccagttggtaaaggtatttgcagaaagtgtttgctgtgtcaaggggcctttcctgacagtgctgtcagaaatggtcaaccctgacaagatgaaaaggtcactttgtccttgctgtggttaaaagaacatgccctgactactttcaaatgttatttcaaggtgaatatattatacctgtcttactttgcttctctcttgatttaccacagtttgtccagttatgttttcatgaattatcaggagtaaatttgaacaaaaacatgtgaataatctcctgtaaatgtgttttataacaagagtgtgctaaactattttctaaaaattacttgtgcattttgggaatctttctgtagctttgtgttttgtatgctctggattcataactggattttggcaaatagtaaacctattatctttgttaaaacctaaaatttaagagaaaatggcagaaataaaaacaaacaagaaaactggcctgggttagaagtactccatgctgctaggttaaggctggaagaccctccccctgccagctccttgtcttcactcccctccttgcccagtcccacactcctcatccttggggtcctttggtgccatggaccaccctggccgggtatgggggtccctgggaggtgggtaaggattcggtggtgacagacggaagcaaacacagaggctctggatctattttgcagctctcaagggtttttatacatagagaaacaggtgtgacagctctgaaaaggtgtgttcagtgacgcagtgaaatagacataacaataatcatttggtacatcaaaatatgaaatatcatccaagtcttacaacttcagaaaaaaaagtattttcagaaagacatccaggtagaacggatattgttatgatcatttagtacatcaaaatacaaaaatcatctaaggcta

SEQ ID NO: 26473 - DNA, 1189 bp, Mus musculus
gcagctgaattgttgagcttattgtagaccctcattgttacagggctccctttataaagcacctaaataattacagtgtgactatggtgtggcattggagtaaggctgcttgtaagtgacctggcatccagcagtctgatgagaactgccgagtctccagctctcagctgagcactggagcagcactcacagccctgccatataggggatgagaggcaggaacttaactaccgcatggagtttaaacgtgagtttagcagagagttcctgcctcattacctggtgtgctagctagtcttaagtcaacttgacataagctagagtcactggaaactgagagagaccctcaactgagaaaatgcctctattaagattgggctgttaggcaagcctgtgtgcattttcttaattagtgattcatggggagggtccagccagttgtgagtgatgccatccctagactagtgatcctggcttctgtaagaaacaggctgagcaagccacatggaacaagctagtaagcagcacccctccatggcctctgcatcagctcctgccaccaggttcttgctctgcatgagttccagtcttgacttcctccagtgatgaacagtgatgtggaaatataaactaaataaaccctttactgcagtttgcttttggtcatggtgtttcatcacagcagtgatgaccctaactaagacacttggtcctggagacccagaaggtctagagaagaaatgaatgatttcagctagtcatagtaagatgggctagatatcaagttgacaatggttgcaaggtggatttagcagctcttaatacagccaggcatgtagtaaagggtattctacctaggtgggagtgcggccaaataaaggtgccgaataactgatgtgtggtcagagtcaccctccagacccagttcaacagtaaagctggtctgtttcttcaaatcagggattgcaaacggcaggccaaaacctaattggctgtctgtttttgtgaataaaactttattgaaacccagcctcatgtatgtagtcgagctcacaaagccaggagtaactgttgtcctctacttttagggaaacatgtagaacaagtgaaagtattgtcttatatttgggtaccaggagataggaaaatggtctgtaactgggtgagaggtgtttgcagcataggaggt

SEQ ID NO: 26474 - DNA, 1196 bp, Mus musculus
cggcccttaactcctttatggggagtgggttctgtctaagcctaagagccaggtcacatgagtgagtggcagatctcttcctcagaggacagatgtgcttctagcacactctgatctagtgtttagactctgaattagctctctgatgacaacgaagaaagcccatcctacagcccacgttaaacgactcccagctgctctctgcccctccccttgacagcatgcttgtccccaacacatgcttcactagctctccaccccagcatagtgcagctctgagccactgcagtcttctgtgtggaagctggtggacagtacctctctcagttctccttccctccctttgctcctcgtttccctcccaggaaagccttcacaggagcctgctgtctagagcaggtctaagtgtccctttctggaaggccctggggaggaagacccacagtggtggtctctcccacactgcagcctttcatctcagtggcctctggtgctctgaggaactgacccaaggctaatttatggcatggatctgagctcatttcaagttgatctttgggtgagaggtgtttagagaccaaagccagacagagctctgttgcagtgtttccagcccaccttccatgactgctttaaaggtaaagagacaggcagcctttacccaaaacactgctcttaaccccttgctaaacaggatataaaaacattactgtaaagaaactagatatttcagtccctgctctgtggtagtgctttagtttgtaaaggatgttggaactaaacattattcatcaggcagcctcaaaaaatcatgcatagcttactgactgataattctcttgtgggccataaacccatttacagattcagaccaagaattttgggtgacttctcaaacatgcacagtagcactttgattaaagtatccttggatccaggatcacagtgccttacagtagtgaatcacagcagactcaggcttcctggaaaaagaggaagtgctatgtttccttccatggtcacttcatgactcctggaaatttccattaaacgcagtggattcaccctgttgtccctgccttcctcccctgaggaaggtctgctagggtctcacatgctaggacagggctttgcatcgtaggagccctgcttccttaagatctggagggactgtgccttgggctgttgagccctta

SEQ ID NO: 26475 - DNA, 1262 bp, Mus musculus
gaaccctgccattctgacccacctcatctgtctggagaattactgccctagaataggatccaaggacaatatgcatgctttcccagcccaaagcagtactaagcaaaaacggaggctaaacaaacaagtctttaggcaagagggagttccatgacctctttgctccaaaacatgttggtcatcacccactgtcgcagaagcagacctgcaggaaatgctgtgagctgttttgatgctctgacttgtgataggagagtccttggttggccttccttccttgctggggtgactgttggtaggtagaattcgatggctgggactgtaggatggacacatacacagtgctaatgttctctggatgcagctttgttccctgaggtgagaacttcttcgctgtcagacactagctgtctctttgcacatggatcctgctcagagcccttcctcctctccctgcaaccttgcctctttcccttagatctgagtcttcaaaaaaagtgcttatggaactccagggtcactagtgagagctggtgacactgcctatcccaagaagcctagccccttcccagcttggttgagagaacatggaggtaatttatcagagttggtgaataatgagaatcaggccttcccaggtgtctcacagtcattgcgcacttggctatggcctgaacagtaatcattgctcactatagtccaaagcctctgtctccggtcttccctcaggaatggttcgcccttccctgacacctgcatgctcattatggctctcaggttctgggacctgagcaggaagcacagcttgtgtcctgacagttaaagtcccagctcttccaacagcaggaggcgctgtctcaagtaggtctctactgaaaagtttcatcactcagcagcactcctgtagccttctcctctgcttcatagctcggcctatgcagttgactctggggcttgcttgtgacctgtgacctgtaaggaacattggctgtgggaataggtagaccacacatgcaggtgggcaggtgtgtgtgtctctcagggtgcatcttctcacccaatcagatcctgccctcccagatccactgtgtgctggactcacgagttccttccgtgaaccgtttctggatctctctaaagtaagccctttaccctgtcagcatttagctcattctgaacagggggcatttcccaagctggcagagcgtgtggacaggtttccattcccgctcgctccatccggtgccttctgtagcctgaaa

SEQ ID NO: 26476 - DNA, 1103 bp, Mus musculus
caggcatctgcctctgagtctaccacttggctttgaaaccctgcatttgtcatttgcaaaatgtagttcttgtgattagcagaagagcctcaagcaagagagctgcccctagataagacagcccaaaagtaggcattggcaaatgggatgaggggagcaggggaaagacaagagacaaagggggagtgagagcagtgttacccaggaccctccctgccctaccccctgggcatggtcacatcccaccccaaaggaccatagctgtctccccaggcaaccattgggagctttaaagcttgactacatacctagcctgctgctgccagccaccatgataaaggctggtactctggtgccagggccagtactgagcacagcacctagggagagtccaagtcatgaaagtaacttcctgtgactgtgtttagtggccttttgaaaaagcaatgtggtggcttatccatatttccttttttgttttgttttgttttgtttgagacagggtttctctgtgtagccctggctgccaagcaactcattctgtagaccagactggcctcaaactcaaaagatccgcttgtctctgcctctcaagtgctgggaataaaggtgtgtgccaccaccatcaccactacccagctcatatccatattcctaagaatatccaaaacttagccatcctgaggctgttccatgcagggatggcctgtctctagaggcttccctcacagtcaacacacaccgtcctcttgctgtcatccacctgggagctgcaggctgggtcagattctcagtactgatgtgcaggccacccctcccaccctagcagcctggccaccagaggaatgaaacagagtagctgagaaataagctgccaagacagcacaggccccatcccctggcaactctatgccagcgttaacagagaaagtcagtctcactgaagcttggccaacatcaggcggctctgcctttaatgaattagcttcaagcaaacagaggttgcctgtcagtcttcactatcttttttactccaaaaatgggttgttcgtccaggcatatcttttcagaagagccaactctgtttccatctttcctgccta

SEQ ID NO: 26477 - DNA, 1148 bp, Mus musculus
tggggtagtagaggttcgtttgcacatgtggtgatcagcacagagagtgggaggaagtatagcctcctttcagatagtgccatcagcctgcaggtccctttctgaaagcagtatagtcatgaaagtctgtaaggggttgtctggcattctggcatgaccaacagcccccactaggaaagacaggacaaccaggccatggtggtgcacacctttaatcccagcacttgggaggtagaggcaggtggatttctgagttcaaggacagcctggtctacagagtgagttccaggacagccaaggctacacagagaaccctatctcaaaaaacaaaaccaaaaaaagaaaaaaaggaaagataggacacaccagccatgctgagcctcagttaacctaaccaccttttctcttgtctgttttctccttcccacattcttgtttgtgtgttttctgcctgggttctgtagtacaaatctgtgtttaggtcttactcccaggacttcatgcctcaccaccaagcctccgtccaacctttccttccgcctacctcctcttcctctccacatttcccacctgtccacacgtcccagagctcggacttagcggtgcccaccgtaagcagtccgcctcccagcaccgtggacgggcctctctcgtcttctcaggacagcagctttcatgggaaccctgtccgccttccttccgaaacctctttcactgactcggtgagaattcagcacacacatctgtgcacgctggcctgcagggttttagaaaacgatgctactgcccacagagggccttgtcctccctccctcggcccaggctgctgctgggttaaggctactcaagcatgagtaggttggcacctaggggactgcagttctgattgatccacctgttttcagaacagaaaccaaatcttttgtataggatttctatcacactgggaattgggctagtgaccatttagaacagtaaattgtcacaaagatgagatagagaacactgtgagctttctgttgtatgtctgtgaagaggtgcagactcctgtggagtggaagaaacagaggtaaggtttcttgtaggcccatgcagaggccctgtgcttcatcagaacacagggaggaactacactgcagagcagaggg

SEQ ID NO: 26478 - DNA, 1106 bp, Mus musculus
gacctgaactaaaacagccctgtgaatttgacagacagccctgtagcttttggctcaggctcccacccaaatgccaggcgataccagagcccacagataggttatgcaaagagctctagtaccagcaggcctgtgctgtgtctggcatggcacagcacagccatccttgagtctggtgtactctcctccttctcccaacacgcgcgcacacacacacacacacacacacacacaggctttctctgtagccctaactgtcctggaactcactctgtagaccaggctgacctcaaactcagaggtcttcctgcctctgcctcccaagtgctgggattaaaagtgtgttccactgctacctggaatgtctggcctaccctttgtctcacacataagtttctttaccttccagcctgtgaagtacggctatagtgctcaccagcacactagaacacacccttcaagaggtcacaggctcctgcagtgctcctctgcgtttgtaccccttgtatgcccaacctctgctctttctagaaagttccaacgtaacagggagttggttagaatacaactttgaggctgagcacaactcagggaccaggccccccacacctcaaaggtgatggcacacagtgtgatggtatgacgtgccacacagagccttgagccccctctattttgggaaatattaaaaagatcatcagcaagttcccaagttacacccagctactctcagccccagcagtctctctagccagttcttatctcatggagactttctgactcagagctccaaaatctctctacccaactcgctaagttctcactggcgagtcactaccatgccagccccacacttcaaaactcccatggcctttgtggtgcacatctggcaaacccacactctgccaccatacctttctccctttctctcttgaacccagtcaaaccactgggtgaaggaaaacaccacataaacttagttcagaaacagtggtaactcaatcactgggcacaataactagaatcctaatcttgtaagccatgttaaatctaaatcctctggtggcagatcctggtggatgcaccatggaaaccaggagacactc

SEQ ID NO: 26479 - DNA, 2192 bp, Mus musculus
cacctggccgaggaagccctgtgggaactctctctgaagatcaagcctaggaacataacaaggcggaaaacagaccgcgaagagaagacctaggagcaggctggctgtgagaacgctcaagcagccaggagaggacctggaccatcccagcctcagcctgtccatgcctggctgtgtggcagcacctgagtctcctggccggtctcctgcctccttccctatggctaaagtcccagggttcacaatgagctggctggcaggcctcagggctggcttgtgtactggtggcccctggtctggttttgttttctgttttctgtcagtgctccctcctgttccctcctctcccctgcagctggagagcagcagacacctgagcagcagaccaggggaatggcgggcttcactgtccccaggccaccctagcctccttaagtggcagataagtaggggccccaggacccttgggtagactgccctccgggaccctggagccaggggagctatggctgggagacagaagaaggtagaaagggaccacgcaggcatcttgtgctgcccacttcctgctttttaaacatggagggagaggcatgtcaacctggcccagaaagtatggtgggtggtaggcaagagccacagagctgacacttctcacagcagtggccccagctctgtcctgccatgcacggccactaaccaaggcacctgctgggctgacagcagcagcaccagtagcacctgtcgcccaccactggtccagccccagccccagccccagccccagcccacatcaccggtactctggggatcgggaagaggaggcagaagggacagttcatgctgagctggggccaagactgtgcttcagagagtgaataaggatcttcagtgacctagggagaggcaagcagcccctccgtgcttgctgtgtgccttaaatgccatctcctgttccttccaggcctgtgggcttccctcctattttgccccaccccccgcagccagcaggttcctagtccccgtttgctctctgggagtgtctgttcccaagaagtctaagcaggcctaggacgtgagggcctccagaggtttcctgattccagacaggtggcagagccaccccctgctgctgaggttgacaatctgttcagggctcagggctaggatctccctgggcatggccctgtggccaccactgtgggctaaatggcagggtgcagttcagaatccagaggtgctgctggccctgcaccatacctccaattagctttgcatggacaagctcccttttcttctggtcgtggggcttggtcaaacgaataccaggatctctgcttcctcaaccagtccgcagagcagaagaaaagacagcagcagctgctggccgggtactcgtttgaaacaactgtcactctgaaccctcctgggtttcggggtttgtttttttagcagcttttatcaaataagaactgtgggcccctcttctgtttatttgtgctgtaaatagagaggggacatctgtaaacagccccttggtcagctccctctggtggcagccggaattggattgtttaaggagtgtgtgtgtggagtccggcttgtgagcagtcatgtgggtctttggtttgttcctcttttacaggtcctttcatttcagtctttgcccctgcttcctgtccttcaccagctctaagtgctgctgtgtgcaagtggggaacactgcacatgaggtccttcctcccagcgctgtagaggcccctgcagcctccctgtgtagcacaggcctacctgaggcctagcctactggtgctgcagccaacagagtgggtctatggtctatgtctactggttcccaagcatgagctgggcagaaaggagggcttaccttctagacccagaatcaccaggccctcctatgatcctgggagccttaggcagactaagtcaagagccaggacagctctggagtttccgtgtggggatatcgaggtgcgatgtgtgggtttaacttattagccagcaggcttccccagtcacctgcctctggctgcgactgagcccagtgttcaggcagcctggcttccacatgtctgtttcttagtggtggggtctgggagagctgtgaagattcgtctttgtatacatactaagcaacatggacagttgggttcccagcagaggccagccat

SEQ ID NO: 26480 - DNA, 1552 bp, Mus musculus
caaggacccaagctccactttggagttggaaagctgttcagggcagtaaagggccaggtagcaaccagatggagagcaaacaggctcttcacaggtcagaactggtcactccgcaggagtaatgagatcaggggcccctgagccattatccttgagacacagactaactgcagaggcaagcaggtgtggccatgggggcctatcgtcccagctaattgggaggcccaggttagaatcttaacagttcaaggccagcctagggtttcttagtaaaaccttgactcagagtcaggcatgatgtctcaggcctgtaatcttagccctccagaggtagaaaggaaaatcgtgagttcaaggccagcctgggctacttgcagtgttcagcttttcaactgatgggaaatgccgctgcctcagcactccttggccgtgagcgatgatcttttcacagagggaaagtcttttttgctgtttcaaggtgtctcacagctgagatctcagtactactcagctgagccaggaggatggctctgagtttaaggccagtctgaacaagtctcctggagtactttgtggtatgtgtcagtatttaatcctgccagtcaatcctgcaaacctgtaattagcacctgggtggtggagactggaagatctggagttcaaggtcatctttggctacataagttccaggctacatgaaacgttatctctaagacaatataaaaagcccagaattattttttaaaaggttttctttcttatgcatgtgagtatttacatgcatgtatgtccacacctggtgcatcatggaggctaggaaaggatgtaagagccctgtggctgggcttaaaggcagttgtgagccaccaagaagatgctgacaatggaccactagtcctctggaagacagcttaaccactggtccatttcttcagaatttaatttaattgcctgccctgtgatacaatgctgtaactatcccgtgccccggctgtaaacacaggctgatgattgttggtgtctgcagtgtgaacactaacaggctgatgattgttggtgtctgcagtgtaaacactaacaggctgatgattgttggtgtctgcagtgtgaacgaacactaacaggctgatgattgttggtgtctgcagtgtgaacacttacaggctgatgattgttggtgtctgcagtgtgaacacttacaggctgatgattgttggtgtctgcagtgtgaacacttacaggctgatgattgttggtgtctgcagtgtgaacactaacaggctgatgattgttggtgtctgcagtgtgaacactaacaggctgatgattgttggtgtctgcagtgtgaacacttacaggctgatgattgttggtgtctgcagtgtgaacactaacaggctgatgattgttggtgtctgcagtgtgaacactaacaggctgatgattgttggtgtctgcagtgtgaacactaacaggacagcaagggatggtgttcactcagtggtgccggtggaaggcgtggtgcagagaagacatcgggtttataaaatac

SEQ ID NO: 26481 - DNA, 1141 bp, Mus musculus
cagtgaggaagcacaagtgtcaccctcaagaagacctgtggtgggggctgagacctcctagaggaaacataccagttaggagagcagtcctgagtggcgactgtgtagacaagaagcgtgtgcttagtcgggtgtggtggctcacgcctttaatcccagcacttgggaggcagaggcaggtggatttctgagttcgaggccagcctggtctacagagtgaattccaggacagtcagggctacacagagaaaccctgtctcgaagaaaaaaaaaaaaaaaaagtgtgtgcttgatcccacaggtactggaaacatggtagatagggaagaggtgtggccagttagcaggacagaacaggaggaggagaccaagggaaggcctgtgaagagacagggctggaagctggttgtggtagtgaacccttataatatagcacttggaaagtggaggcctatcttctactacacagcaagtttgaggctagcctggactatttgagaccctgtctcagaagaggcaggtctgaatgagattaggctctggggtggggtcactgtcctgacctccaggcccctctgacttcaggaaacatcgtggggattggccagtgcttactccacggcatgactgtggtgatccggaagaagttctcagcctcccggttctgggatgattgtatcaagtacaactgcacagtgagtgagaagggacaggcatgagcagccccatccccatgtccccccccccttgccacccatacactggggcatctgagcagctgagacttcagaatgctcccttgggcagcgtcttcattgctcggatgagagggaagggactgtcgggccactgtggggaggtgacgaagtgggcacccctagagtctggactgacaccacacccaccccagattgtacagtacattggcgagctctgccgctacctcctgaaccagccaccccgtgaggctgagtctcggcacaaggtgcgcatggcactgggcaacggtctccggcagtccatctggaccgacttctccagccgtttccacatcccccaggtggctgagttctatggggccactgaatgcaactgtagcctgggcaactttgacagccgggtaaggtccagattggggcta

SEQ ID NO: 26482 - DNA, 1531 bp, Mus musculus
ctactctgctgcccatcagagatgtcgttggacatacagtgtccccgtgtcctttctcccctccctagctctccctttctcaacccgtcatcagatttgtaggagctccaacccctgccttgcactttctgacttttcttacccactctctagggaccttcaagttccagaagacagagttgcggaaggagggctttgacccatctgttgtgaaagacccgctgttctatctggatgctcggaagggctgctacgttgcactggaccaggaggcctatacccgcatccaggcaggcgaggagaagctgtgatttccccctacatccctctgagggccagaagatgctggattcagagccctagcgtccaccccagaggggtcctgggcaatgccagaccaaagctagcagggcccgcacctccgcccctaggtgctgatctcccctctcccaaactgccaagtgactcactgccgcttccccgaccctccagaggctttctgtgaaagtctcatccaagctgtgtcttctggtccaggcgtggcccctggccccagggtttctgataggctcctttaggatggtatcttgggtccagcgggccagggtgtgggagaggagtcactaagatccctccaatcagaagggagcttacaaaggaaccaaggcaaagcctgtagactcaggaagctaagtggccagagactatagtggccagtcatcccatgtccacagaggatcttggtccagagctgccaaagtgtcacctctccctgcctgcacctctggggaaaagaggacagcatgtggccactgggcacctgtctcaagaagtcaggatcacacactcagtccttgtttctccaggttcccttgttcttgtctcggggagggagggacgagtgtcctgtctgtccttcctgcctgtctgtgagtctgtgttgcttctccatctgtcctagcctgagtgtgggtggaacaggcatgaggagagtgtggctcaggggccaataaactctgccttgactcctcttagcctgacagcctggctccttgcctacctccttcccctctagcccctttcgcttagcccttgggataagcccttagccagtcctcttttccaaagctctgccttcctataactccttaggagagactcccaccagatctgacaggatgttaaactttggaacttaacctttaaagtaagcatgtggctttgggcaagtgtctcctgaattatgggggtaattaagggattcagaaactacacaaagccattaggagtgggaggatacttggcgtctttgagggaaagccctcccctgcacagaactgtccatggacccatgcgctgttgctccatcttctgccaaatgacccattggagcctccccagccctctgaggctttctatgaaagtttcatgtctaagctctgtcttcttggccaggaggcctctgcacccgggctgagactgacaggcacctttaggatgatgcatctgatccagacagactgcctgacct

SEQ ID NO: 26483 - DNA, 1163 bp, Mus musculus
gctgcaggaccaagacagcatcctcttcatctccacactgcacggcggctgaggcctccccagtgggcccaagcacctttgcaggggaacacaggacaaccacagcactcctcgatctgcttccaggtcctcagtcccccttggctgcctccttccctgctgtacccctgagcttcctctaggcagggaaaagaggccaggtgctaaaaatgagcctttctgggcaaggcacgtgagcagggagagcgaagagagagagcagccgcctgagtccagcactcctcccagcagctgaggtgggggagggtgttcctgtgctgtgtcaggagtagagggggctctgtgcccaggtgacccagctgcttgccactcatgtgtcttggtgtatctaagcactgagtggttgcctggaaggcactccagttcctgagacatcttcatggggaagatagatgggctggagtaactgatgagaaactcctcccttgccaaagattagaagggcctccgcctcagtttccccatctggacacagagagctctgcttgtcccccactgatgtcattatggaaccccagctggggtcccctattcagtgctcccctccctcctccacccagcagctgctctcccccccacccccttctccatcctttgaccctggctggcctcccccccacataggccaccagatgggctcctgagatactctccaggctgcctacaactcattctgttgcgggtagagaatggaagggagcagcctaaccgtaggcagagggggcggggcctcagcatgtgtaactccaggcttcctgaaacaagtgggatttgggtgtgcagcacctagtgggcagaaggctgtgtgtgtccctttcctctatcttctggagacttcatgcctgcagcagctggcctcgggcaaataaaaagactaagtgactaggttgtttactagccttgcttcacccttaaaactggtgggccctgtactctctgggtctgtgggttctaatacaaatgccctgttctgagccaagggttcagagatggccttcacctgaaaggtaaaaacatgaactgttccaaagagagggtggatgagtaggacggtgtggatgggaagggagtgtaagcccgtgatgaccagcccacattctaag

SEQ ID NO: 26484 - DNA, 2046 bp, Mus musculus
aactaattcaaggccatgtacctagtcctctgggcagcttgctgaggcattagttcaaaacagttaaagagctggttgttggtcgagtatgcctttaaccccccagcacttcagaggcagagggatgaagacctctgagttcaaggccattctgacttatagagtgggttctgggacagtcaggactacacagagtaacaacactaaaaaacacagagaaacccaaaaccaagcaactaacttcccccacccccacccaagggggataaaatccatctcaaccccgggcgctatgtgcctcccccagtgttggcaccttagaagaggatgcctttgtctctgattgcccattgttgccttcttattcttggcccctgttctctttcttcggttaggcggatcgcagataccagagccgcctgcaggatctgaaagatcgcctggagcagtctgagagtaccaaccgcagcatgcagaattatgtccaattcctcaaggcctcttatgcaaatgtgtttggggatgctccctatacatcctcctacctgacgagctcacccatccgctcccgatcgccccctgcctgaggccacctgtccagggtgtgatgcccgtgcctgacgccagacaactgtggagttagcaaaccatagctggcaagcccactcgttttcaaatgtgctcagggtctgttcctccactaatgccaggaaggctcctagagcagccagggatgagtcaggaacaatctggttatctttcctgacctgggaacctggtggaattctctaatcctcacagccgtgcatttgccacattaggtaccagattttgaaatccctggaactttacatacagagtctgcttcctttcctcagggaatgtttggacggactgttccatgcagactccttccagccctcctctttccaggcatctctctcttggggttttttgagctaaagttgcaggaatccttctccactgaatgcctacattgccttttctttcctttttatttatttattttttattttatttttttaataaaaatagaactttatttgtatcaagaaatagtgaaaacaggtaaattagtatctgaggtaaattagtcagggctcatggagatgagatgttcacggctcccttgctcctgtggaatctgtagctacgaatgtcatgaaaataaatacattgtttgcgtccctcattacatagcaactggcatagtcccagctacagcaggtgtgttcacaatgaactgtttggacacagacctaacagtggcaagtgtgcttgtaaccatgtggtctggtttcacagttctgggaactgcaactcccagcctcttactccaggaacaatacccaacggtgtcatccttgcgcaggggccatggtgatctgtattgttccagctgtagtggatgctctgctgaaggggagtcagcttttctcctcctggtgggtcctgcaggaagcagtgttctccttggtgcccggggaaacctcccatgtctgtttcctataggccacttgttcctcacgaccatccggcctgacaatcagaattcctatctcattgcttgtcagttctctttgtatctctgggattcctttatttttgaaatttttgtgtggttttacaggaaataaagtttgtatcactatgtcagactcctttgatttcccttatcccctccttactttataaatgatcaagctgagtgaggtgacacatacctgtcgtaagcactctgtgagaaagtccttgatgtgtcaattacccacctttcatttcattgtgggcaagataggcagctgctctttgttggtttcagaagataaaccatctggtggcctgaggttaggcacccatcaggcctcgatgcttagggtttgcggaggatcacttacaagcataggtgtggggtgtgcctatgtttgctattaaatgctacccactttctgggtgataagatttggggccattttttcttttcctgcattgaattcgtgggagagaacacttgattagaatgtg

SEQ ID NO: 26485 - DNA, 1421 bp, Mus musculus
gtgcccagaggctttctgacaacctccttctggcgctcctgatgtcctccgtcacactgtgtggcaggaggggcaacaataaagcaactgggacagcgggcttggaagaatcatgtcagattgagaaattcgtcagtgtgtttttatatatctgtaccccatgaataaggcttttatagttcacagcctctgtcattctcttgtcaggtttggtagttgtgttggcgtcacagacagatagagaagtggcctttctaattctcacaggttacaaaagagataagaaggggcacttagcacttggctgcacttggtctctagtgtctgtcgctcagaaagctggtgattctttctctgcttgactcggacctgtagtgagccctccattttccctccacactgccccactgttcatacacatactgagaaagaataaaccgccaagagtcccttaaagtgtcaggtactgtttgcagtctggggatgaggtaaagtgcttacactgtgtggcttgtggcgtatgtgtgtattcagaagacatgaatgatgttggtgtggactgaaccccagagtgtatcagggactgggtatatggatcatgactgggagcatgcactgtagagaactctgtccccttgatttagaatttggcccctggctggctgagggtgctgtactagattaggtacctttttgttgtttttccaacaagaattgagttgggttgaccatcagcagtgcgtgtgctggggtggaggagctgtctgtctcagttggaagttggtgtttgtttacagacacactaactctgctgcagaagccgagcctctgctctggtcatgagggcctgtgtggcaggcattctcattagcactctcgaatggcttaagcattttaattgtggactagagttcccaaaaatgtaataaagcttgagttttaaaagttctgtcctgatatgtggttacctcaatattttctgtgtcctgtgtatgagctgtgtatgtaaatcacatggacatgactctgtaggactagatatgcagtatatggttcttctctttatctacttgaccttcaccttgtaaagactggttttgcatgatccctttttttaaaatgatgttccagtaactgacattgatctagcaagagatgtagggggttgaggttatagcgtcacctaatgtgcagagaccttgtgctccagctgcaatgcccttcccaggaagagaagtgcgaatagctcggcctgctaatgttacagaagagagtgatcacttgggtcaggtggctgaactgcattcatttttgttttgtaacctgggtatgtctcacctctgaactgcacacctccatttacagagcaaaagaattgttgctgcagtcttcctgctgtgcctggtagtagattctgggtg

SEQ ID NO: 26486 - DNA, 1197 bp, Mus musculus
caggctagccttgaaatctccattctttcgcctcagcctcctgagagaaattcattgatgttgagaaatcagttgattgatgggtatatgctaaagactgtacttttaaagagggaaaggtcacttgccattcttagccactctaagcatagtaggaaaggtcatgtattgctgaattttagaagctttatataaaattacatctatttttcctgtggtcttaaatgactagagtataaaatggtttctttttctctttgatgctggcatggaactgataaccttgctaggcagttgctctactgttgttctctattcccatggtgacttaattcttataagatctaagtagcattatctttgtttctcacataataggtaaagttctctccttgacattaaatttggcaaaactgcttagaaaattgcatgtttaacatgaggtagggtttagggacctgagagatggctcagcagttaagaaatctctcccataggtcttgtaatgggatctgatgccctctgctggtatgtctgaaaacagcaatgtactcacatatataaaagaaacaaaatcaaaacaaaacaaaattagggtttagtgaatttacaccagtcttcacagtttctgtgataaataggaaagctggtttaaatgagagtaaattagaggtgggaaatatatctcaattttgttaaagtgcttagcatgcacaagaccctcagtgtggtccccagtacagcataaaacctggtgttggtagaacattcttgtaagctcaacacccaggagggtcagaaattcaaggttatctgtaattacataacaagtggccagcagtgacatgacacctccctttttaaaaagtcaccctaatggtgcttgtacatttctataatcccagcactcaggaggcagaggccagcctagtctatagagcaagttctatgacagccaggattacacagaacaccagtctcaaaaaacttaaaaaaagtaattcagacatctacaattcaaaatcaagataaaaagatttgttttgagtaacatttatgaattcttcaaatatcaatctttcctttgaatcttgaagccccttagctcttcactttaactacttcactttttgttgctatcaaaaccatcctctgaagagccagagtaggaggtgctgtgaggagtaaatagacagc

SEQ ID NO: 26487 - DNA, 1238 bp, Mus musculus
ctttaacaggtactagggctgtgagaacaaagcagagctcggactctggtgttcccagtgcacttggatggctgtatacctggtttgactggttgacttctgcagggatgtagatgagaccattggttggattaaggagaaagagcagttaatggcctctgatgacttcggcagagacttagcaagtgttcaagctctgcttcgaaagcatgagggtctggagagagatcttgctgctctagaggacaaggtgagtttgtttgttttgttttgtttttctgaccaggtctcactgtgtagctctgtctgtcttggaactcactatgtagagcagctggcctcatactcagagatccgcctgcctctgcctctcaagtactgggattaaaggtgtgtgccactacaccaggctataaggtgggttgaaaaccactgattatgttagttagccacagtgggagagtgatgctgatagaatctgtttttaggtgaaagccctgtgtgctgaggctgaccgcctgcaacagtcacaccctctgagtgccagccagatccaggtgaagcgagaggagctgattaccaactgggaacagatccgaactctggcagcagagagacatgcacggcttgatgactcgtacaggtagcaaataatgttttggtgctcagcagtcagagtttgactgttgtataaacaggagaggcagagggtcaattttagggaccaagaatatatctgtaccctgccaggaatcaccaattgtaaaagtaacttttatttattattacttatttatattccaaatgttgccccccttctcaatcctccctcccagagtttttcaccccattccccatccccttgcgactgagagggtactcatccactcacccacccccataagagtaacttttactccccaaacctaattgtcgtcttggaggcttactgctgaatgagctcagcctttctagatctttctgaactgtggctggctggtacagttcagctgttctggctcaaactcctctccaagctgactgattcagtctggcttctcagctttccactgaattgttcgacttagcttcaaactaacactgacaatttgttctaatctgcttccttcttattctctggcttcagctgcctctgctgacctgcactgaactcacagatgaatttaactccactgtactgtactcactgcactgactcccagttgaccgactctctc

SEQ ID NO: 26488 - DNA, 1127 bp, Mus musculus
ggcgttgtatatatgtgtgtgcactcgtacatttgcatgcatgtatgtatgtaatatattggaccaagagacttttttcaagcatgtatgacacattccttattctaaaaggactttgcagagagtcagtcctgctttagtagttggtatgactaggagacagatgattgtaaagtgtctcaagcacttgtgcactctcatttgcagctctcatttgagagtcctcttcacatagtcttgcttgcagtctttcatctatctcccagtcaccttgacaatttcatgcagattgtttatgataatttgacagtaaattctaggttagtcaaggtggggttcttatggatagcacacacatgccaactctgtagtatttctctatttcctatgataagcttacatacattaagtactattgcacagagaaatgcctaaagtctagcatgaggagtagactattctgggaagctctgtgtctcccagaaggtaaaaggtaactttgtttcccattccccaagctgagcatcctctccgaggagagaactgccctgctggagctgtgggagcttcggaggcagcagtatgagcagtgcatggacttgcagctcttctaccgtgacactgagcaggtggacaactggatgagcaagcaggaggtaatgtgtactggaaccctcaaccagggagttgaaagggtcatgccctgcttctccagtgaatgctgactgtttcagaacgttggagccatttcagttttgaatagagtgaagaagggaactaagcaggtttcttttgtctgccttagtcattgctgactcagcaaggcccttagaaaagatttgtgcagtacaaaaacgatttctaaacattagagtttaaccctgtgtgtaacctgaatgaatgaaaagctgtaagggctatgtgagaggtggggttggtgcctgtttgcattctcactaagaaggctatggggagtggattgcaagtttgatgccagctgggctccttaccttagagggttaaagagtgtctgcactgcatagtgagaccttgtctcaataccctccccacttaaaggaggaaattatttgaaaactgtttgatagaatatatagtaagtattcttt

SEQ ID NO: 26489 - DNA, 1152 bp, Mus musculus
tccacttaacagtgatgttcatgtctgtgtagctcactcttgagaactggatacttttccccctccctccaaaatcacaatagaatctcatacattttaagtttagggttttcatgttactctaaattcatggctgtcctggggtgcatacagcccatgagccacaggttggacatacctgtaaatctgtaggtaaacataatcagccacctgggcccagtagtaagtgtgtgtcacagggcaagcctggacagagagattagggtgttgggtgtttttgcatggcttcatagcacatgcctttaatcccacacttgggaagcaaacacaggtaaatctctgcgttctagaccagcctggactatagagctatttccaggacagtcagggctacacagggaaaccctgtcttgaagagagattgattaagagaaatattgagagagagattgaaagattaggatgtgttctccatagtccaggctctgtgctcacagtgacaactcctgccttcctttctaggcccttgatgaatttgcaaccaaactcatccaaaataaccactacgcaatggaagatgtagcgactcgacgagatgctgtgagttccctgggcatgtcgtgctcctttctaagatgcttgatgcagctcagtcaggccagtcaccttttggggagtataatgtagagtcatgtaatctatcttacagctcctgagccgccgcaatgcccttcatgagcgagccatgcatcgccgggcacagctggctgattccttccatctgcagcagttcttccgtgattctgatgagctcaaaagttgggtcaacgagaagatgaaaacggccaccgatgaagcttataaagtaataaaatcagagtttcctttagtagttgtgtagtaagctaaaccttgcaaaaactacttggagctaaaaaaacaaaaccaaaaaacacaaagaaggtcacacaaaccacactagttagcgtaaatcttctgttttatgagtgtgaagtagctatatatattctccagttcaggcacaaccctcttctttttttgattcgcaggatccatccaacctgcaagggaaagtccaaaagcatcaggcttttgaggctgagctttcagcaaaccagagccggattgatg

SEQ ID NO: 26490 - DNA, 1069 bp, Mus musculus
ttgatggagctagtgttgctgagctggcaattagagtcagcactgtcctttgggtctgttttgtcccctggcctgctctgtgcagtaagtgtgtgcagtacagggaatgcagccttacatgaagcagagttgtcaggaacatgaaggtaaactaaccctctcatttaattttcctgctgtttctccagtgatttcgttcatggcctgggctgcttctaagagcttttgaaggattcctatgtttttcccatttcaagcatccgccatcatggcaccagttggagctgctgctttttattcccatagattaatcccactaatgtgtgcatgcttttgctgtaccccctctgtgcaggacacgcataactaaggaggccggcagtgtatctctgcgtatgaaacaggtggaagaactgtgagtaggctgagaacctggctgagctcccatgtcactgctacacctgtccattcctctctgccgctcttctccaaagcactttccattgagaaggaggtggtgcaggggacctgccacatcttcacagctttgctgcctgtgggagaatctcagaactgctctccctggttgcttctgcctgcttgtgtttggaatggtgttggctcactctagctttgtggtagagcaggagcaggtcctccataaacctgcagccagttctgttgtattcctcaatagggaggcaacaacgtgtgacttagaggttaggggctctgatttctggtgactgttactttttgtttgggaagcttagatttagtgatgtttttcagatttttctttaactttgaatttcatttcttactcagatttgtcatttttgtatcttgaaagatagtggtagttcagcttataagtcttagttctcatgggtgagaaagttcttttgattcttctcaggtcttgtaggtgatggagttgtgtacaaactgcacactaccttatattctttcactgctcaaaaatagagatcaccatggagatgccctactggtcagagatggaacatcctgtattggactatattaaagctcatatcttccccctctt

SEQ ID NO: 26491 - DNA, 1147 bp, Mus musculus
attagatatgactttatttgctcttcaaaagatctctgttgtggtacgctgctgtttgcaagacaatgaaaaattacaggcaaaaaaattattttcccaaggtctggttgtgggtgtggcagacaggttagaagagaactgacattatcattctcctgtaggagctgaatgagcgttggcggtccctgcaacagctggctgaggaacgtagccagctcttgggcagtgcacacgaagtacagaggtttcacaggtgagggtaccaagcattagctgggacaggaggaaataagaactttgccccttgtagacgaggcttgctgagtgggacctcagcataagtagctatgccttactgatgtttgggctcttaacatcaaagccatgtaagaacagtggatgttgttaatcctgttgggagtgaatgtgtgcaactacgacagatatgcatatgccagccctgggacaaggcagtggtgcttgtcactcactcatgtgtcttacctccagagatgctgatgaaactaaagaatggattgaagagaagaatcaggctctgaacacagacaactatggccatgatttagctagtgtccaggccctgcagcgcaaacatgaaggctttgagagggaccttgcagctcttggtgacaaggtgagagatgcttgaggaaagctgaggcctgaactctgcccgtcagagctgtttccctgaattttcttacaactctttgctcataggtgaattcccttggggaaacagcccaaaggctgatccagtcccaccctgaatctgcagaggacttaaaggaaaagtgcacagagttaaaccaggcctggaccagcctagggaagcgtgcagaccagcgcaaggccaaattgggtgactcccatgatctgcagcgcttccttagcgatttccggtaaaaaaaaaatgtcttagttatgtttctatttctgtgataaaataccatgaccaagtcagcttatgtaagaaactgtttatttggggctcacagtttgggagagataagggtccataaccatcatggcaagacacacaacagcaggcatagcactgaaactggaactgagagctcatccccgccctgccccctctctttttctgtttttttgagagtttctc

SEQ ID NO: 26492 - DNA, 1420 bp, Mus musculus
cctgtctacatagcaagttccaagacagctaggactacacagacttggtgttgtggataggtgtaacagttgggactgggcttcatgacttgacaggtgaaggatccccctttttttggtacacaaataagctatataacccagtcctattcaatttatgtctaggttaacctaaaataatcctctaatgcagaagagatagaactggttcctagacagaggcctgcttgattccagatagtgtagtaagtattcctctgtgaatcttgtttctagggacctcatgtcttggatcaatggaatacgagggttggtatcttcagatgaactagccaaggacgtcactggagctgaggctttgctggagcgacaccaggtaggtcctgctggcctagtggccttacccgtccccgtcttgggaaccagggcttgacactagtatgggcatcttcagcaagttatctaatccctttactcctcttggcaggaacaccggacagaaattgatgccagggctggcactttccaggcatttgagcagtttgggcagcagctgttagctcacgggcactatgccagcccggagatcaaagagaaacttgatattcttgaccaggagcgcacagacctggagaaggcctgggtccagcgcaggatgatgctggaccactgcctggagttgcaggtatgtacactatgtctcatcaggtattttcttacaagtggccaactcctccttcacacctacttgtccactctgtagctgttccatcgggactgtgaacaagcagaaaactggatggctgcccgggaggccttcctaaacacagaagacaaaggagactcgctggacagtgtggaggcactgatcaaaaaacatgaagactttgacaaagctatcaatgtccaggtaggtcctggacctcgaggtcctagtctggatttgtcctgagtcacatcttatttgtagccaggagtacatagtgagaatctttcccttaaacaaacaggtgcagtagagtactgcctactatgcttgagggtcctgggttcaatccccagttctgcaaaaaagctcacaccaactaagattttcataccagttacaaaacagaaacattatattgggctggctacatggcttcctggttaagagcacagatttactactcttggagaggaattgatttcaactcccagcatcctcaagtggttcacaagtacatgtaactctagctcccggggtgcttatgtctctctctgctgcgggcccccacactcagcgtttacatgtgcatgaacacatacctgtaatgagaaataatttttttaagaaaaagtatattctgtcatacatccaatgaatactttcaatgaatgttgtgaaaatgtgtatatgaagaactatttttaaaaatgg

SEQ ID NO: 26493 - DNA, 1128 bp, Mus musculus
ttgttagacatctgctggtgtccctacacttgcacacctcagtatgaccttaagtcctcttgaattaaaccctactctagtaatgatgataatcaagctggcttctaaagtgtcgatgtgttccgatcctgctaccagttagtttcgtcactcaaagtgtaactatctcctctgaaaactatcaggctgacaggctttcttcagcccaccctgacctctttgcctgttgcctttaggaagaaaagatagctgccctgcaggcctttgccgaccagctcattgccgttgaccactatgccaagggagacattgcaaaccgacgcaatgaggtccttgaccggtaggtgtcctgcgatggtgacagtccccagctctgagaggatgaatgtccacatgtgagaagccatacctattccagcttcttctcttattggaaagaacactcatatttggtcttcacactcaggtggcgccgcctaaaagcccagatgattgaaaaaaggtcaaaacttggagaatctcaaacacttcagcagttcagccgggatgtggatgagattgaagcctggatcagtgagaagttacagacagccagtgatgagtcatacaaggaccccaccaacatccaggtaaggggctcctaggacacttgttctgaagtgccttgtcactgagtagagctgttaaatgggactctttaagggagtacacctataaaactgtgtgttccatgataaagcttagaaaaagtccactgggtcagtagagccatttgaaagctgctcccttgctagactttgtcgaagctataacctgtctaatggagctgcccctgtgctgttcccatgcgccgatcttcctggggaagtatgatggcagagtgaggctctagtagctgagacatgttcatatcagttactgaattcttctttccatctgtttttgtagctttccaagctgttggtaagtttttcacacttttaagagttctagatatttgagctctgggatttatgttctactctgtagagtactgttactgtggttacatctggtccactggtgtctgttcatccgtcatcagtctaatccccagtcactccatccaagtgtccctgtggggtgtgg

SEQ ID NO: 26494 - DNA, 1160 bp, Mus musculus
ttgtcgtgtcctatgagcctgaacccaacagttaattccagaccttcctctctgaaagtactgtctgccttttgtcccttaggaagctaagctgtgtttgcacacagacatattcatggatattttaaaatattttatccactgctggagagatggctcagtggataagagcactgactgctcttattccagaggtcctgagttcaattcctagcaaccacatggtggctcacaaccacctgtaatgagatctgatgccctcttttggtgtgtctggaaacagttatagtgtactcatataaattaaataaataaataagtgtgtatacacacacacacacacatatatatataaaatccaacggagacttttttttttttttttttttttggtgctggagattgaacctgagatctcaaacacactagaccatggccaatattaccaagttataactccagccccacttagtggatattaaggacgtactaataatttcccctccccccttctataatcaggggccagcggctagaggagtccttggagtatcagcagtttgtagccaacgtggaagaggaggaggcttggatcaatgagaagatgactctggtggccagcgaagactatggagacactcttgctgctatccaggtcaggaaagctaggcgagtgcacagacagtggcagtaccctcgagttgccaacacagcccacagcggagagtcctttttccttccaggagcagcctctactccaggctgtttccacacctccatctccctctgtgtgcactctcctctctggcattccgtctacatgcccatctgtccaaattgaccttgttttgttttgtttgtgtttttttttttttttttgaggacatgatcttactggtaagagatactgcaaaatatcccttaatgacctttttcttatgttcatggccctaaagttaagctcatcccatagacacttccagttgattaacagctgctgtgtgacaacttgtattggtaggcatgtaacctccactgtttccagggtaaaactaagtgagctgaaaagcctcagttggccacagtcagacttgacaaccggggcagcttgttgagcccacataggctctcattcttctataggctagatcagcttcccc

SEQ ID NO: 26495 - DNA, 1149 bp, Mus musculus
cagctcttaggaggcagaggcagaagaatctctgtgagttttaggacagccagggctaatcctgtcttgaaaaaaaaattaaaaaagagggctgggaagatggctcagtggttaagagcactggctgtttttccagaggtcctaagttcaattcccagcaaccacatggtgactcacaaccatctgtaatgggatcttatgccctcttctggtgtgtctgaagacagcatcagtgtaataaataaatcttcaaaatacataagtaataatagtgacaataatgaaccactagtgctcacactgctcacactgtgcgccctcctcatgctttctgtgcactgattcctggaattggattgctagtcccaggtcgtcacgctgagatcttccttcagtatcatccttaggacgcagatagcccacaggacagagattgagcgtttgtctgggaacctgctgcagataggtgactgcagctggaggcaaaactaacttctgcttcttttcctggcctagaacaatcaccatgaggagaacatctcttcaaagatgaagggtctgaatggaaaggtgtctgatctggagaaagcagcagctcagaggaaagcaaagctggatgagaactcagccttccttcagttcaactggaaggctgacgtggtagagtcctggattggtgagtgggttcagcaaacccaaagcttttaactctcataggctaagaagaggggagagcacacagttggatttgtgcaatagagaagagactgatagcacatgggctcagagagtggcagcaggacaggcctagctgctaaatactaaaagacatccagaagtcagaattgccacagcagtgcctacgccaaattggcataagggttcaccaaacaagggcctgcaaacttttgacaggagcaaaacaaagaccgaagtactagtgggctcaccaaagggtcaggtcacatgagaactgcttgccagctgtcctggccagtcagggtccagctgcagcagggtggtgggtgcaggaagtaggcagctgggtgagtgcaaggaagctgtcagtaacttattccatctgccattttgagggctgtgaggggctgggacagtttagatgctttgttttgcaggtgaaaaggagaa

SEQ ID NO: 26496 - DNA, 1891 bp, Mus musculus
tcaaagaccagctgctagctgccaagcacattcagtctaaggccatcgaggcccgacatgcctccctcatgaagaggtggacccagctgttggccaattcagctacccggaagaagaagttgctggaggcccagagtcatttccgtaaggtaagggtaggattgagctggctcggtgggatggacggtagacccatgtgcctcgctgtgccgccatcctgggaggaagaaggaacctcagtggaacctgaggcatatggggcccttgaacttgggcgaatttatcctttgaccctcccaggacaagcatagctcgtgctgaggaacagcaggcagaagactagtcaggaagattttgagatgggcagagtgcaccagacccccagcagaccctactcgttgattcccaaaacttcctcacccactggcattttgcccctctacttctaggtagaagacctcttcctgacctttgccaaaaaggcatcggctttcaatagctggtttgagaatgcagaggaagacctcacagacccagtgcgctgcaactctctggaagaaatcaaagcccttcgagaggctcacgatgccttccgctcatccctcagctctgcacaggctgacttcaaccagctagccgagctggaccgccagatcaagagtttccgggtggcctccaacccctatacctggttcacgatggaggccctggaagagacctggagaaacctccagaagatcattaaggtacgcctgactagcgagccatttaacaacctgtactccctgcctctgggctgctttgtgtagggccagcttcagtaggacttcctgcccccttccttaagtaccactagcctttcccagggtagaaccatgttatgctgagcccatctgaggctcaagaagcaaccgaaggtaacagcacctgcctcccttttgtctcaggaacgagaactggagctgcagaaggaacagcggcggcaggaggagaatgacaagctgcgccaagaatttgcccagcatgccaacgccttccaccagtggatccaggaaacaaggtgcttgccctctagagctagccagggactgtggtgctcctggcagctggatgccaagcctccagctctgggacacagggagcttgtttgaaacctggtccctagccaggcatctggctacagtttggcatctgtaattccacaatccaggaggatggctgtgaactagagtccaacttggttcatatttatttgtgccatttgaggccatagcaaaaccctgtttcctcagaaaaaatggggtggtggggaggactgcttagactaagactatcatagtctgattggtttccagagcaatagcaatagcgggctctgcatggttcattgccccaaagacgatgttggcaactgtcccaagggaggtagaccagtcacacctggcacacaggctcgggcagaagagtgctaatgttctgtattttcttctttctacatcatcctgattgctgctgtatgtggatactaccacggctcctggacacttggatctccatagaacgtatctcctcgacgggttaatattgccttcttttccgggctcctggtgtggtggtgtcttgtgtgcttgtccctttgtcccttgtccccagtggcctggcttgcaaaagatcccaggatgggcctcctgtccaccttgtccattcccattgtccctgctagaagaacccatagtgttggggggtagggggtgtcacttcccctctttcaaggtagggactgtagctgtgctaggaagccagagtcaagtctgaggaccctgtccatgcctggtcaccagaactggattgcctttccctctttgcctgttttcccacgatgacaaaaaat

SEQ ID NO: 26497 - DNA, 1832 bp, Mus musculus
catagccccctgagctatggggtcccagcctcacactgcatttgtcccacccaataagcgcaagcaccaggagattcgagccatgagaagtcagctgaagaagatcgaggacctgggggctgccatggaggaagccctcatcctggacaacaagtacacggagcacagcactgtgggcctggcccagcagtgggaccagttagaccagctgggcatgcgcatgcagcacaacctggagcagcagatccaggccaggtaccggtgtgggggcccagcaggagccagcctagagcccttgttaacaagggacgggtacaggatgggaaacaagccacttcagcatggagagcctgctccctacttttgttcttttaggaacacaacaggagtgactgaggaggccctcaaggaattcagcatgatgttcaagtgagtatggcccaggtaccctggctgaggttagctgggtcacaagggaccatgtgctgagccctgggctatgtgctgcagacacttcgacaaggacaagtctggccggctgaaccatcaggagttcaaatcctgtcttcgctccctgggctatgatctgccaatggttgaggaaggagagcctgatcctgagtttgaggcaattctggacactgttgatcccaacaggtaatgtaaggggcagtgatggacagagtcctgcctccctctgccctccttgctccattgtacctgtctcccacagggatggccacgtctccctgcaagaatacatggctttcatgatcagccgcgaaacggagaatgtcaagtccagtgaagagatcgagagtgctttccgggccctcagctctgagggcaagccttatgtgaccaaggaggagctctaccaggtaggacttgggactggcacagctgatgctgaaggatgcacggcatcagaagcctgagcctgctggcagaactagtatagtgcaagtctttacctgtgggcacttgaggtcagcactggttgacgtcactgtaccatctctcctccagaacctgacccgggaacaagctgactattgtgtctcccacatgaagccctatgtggatggcaagggccgagaacttccaactgccttcgactacgtcgagttcacccgctcactctttgtgaattgatcaatcctcttggcttgtaggcaagcctgacctacactgcttgccctgttatctctatctatctatcacctttgctgcatgtcacttcctctgctttcaaggagaatattccagacagtgttactttccagtgtaaccataagcctgcttagcttggggtaagacttagtagaaaatggtgcttcaataaaccgcttccagtcacaatcaccaatgttgtgggacccagacccatgtttgagccagctgccctcattcccacttaaatcaaagcagctggctcagctcccttgtttctcttcccaaatcctgttttcatgtaaaagaaaaataaaggactcatttcccctctaaaggctttgctcctctttatctagcttgtttagcacacagccatcctgaagcatgctaccaccaccaccaccaccatgctccttggggctctcaggtagagtttttttttaaaagatttatttattatatgtaagtacactgtagctgtcttcaaacacaccagaagagggcatcagatctcattacggttggttgtgagccaccatgtggttgctgggatttgaactcaggaccttcagaagagtagtcagtgctcttacccgctgagccatctcaccagccctcaggtagtgatttctgcttctagctgatccaagtcctcc

SEQ ID NO: 26498 - DNA, 2099 bp, Mus musculus
tttttaattttctccagtccctgggagcaagttgcagtcctttcctccctgtccctctgtgctcagtcgccctgttttgaggtctcaacatcatggttctcaattaatttggggggaagtatcttgagcaaaatacaacaggaaaagaatctccgtttctgttcttaattcattttttatcctttcttgtctaaatttgtggattccacaccaccatgctctgtgggaaaaaagaaaagccctccagttcccttggctctgctggagggcgctaggcccctgtgtagtagtttatagaattttagcttttcttcttttctctgtatattgggctcagagattacactgtgtctctatgtgaatacagacagttagcatttaccaacatgtatctgtctactttctcttgtttaataaaaagaaaaaaaaaaagaaaaaaagggggggtatagacggtgagcaagggtgggtttgaggtgtctggggtaggtgggcatctgacaacatggcttctcctttggcatgtttaattgtgtggtttaacagacatccttgcaatttaaggtgacacttaaaataaaattctctcctgatgatgacttgagccctgacactcaatgggagaatcagcagaacctgtatggttttatttggagttgacattctgttgtaattttaatttttttctttttctttttcttttttttttttttttttttggttttcactggaaggaaaaagatgctcattttaaatgttgaagtgtacaagttgctttgttacaataaaatcagtgtgtacacaaaggacctgatgcttttctgtcaacagatgctcaacagaccttccaagtttgactgcataatgacatcacgtcaaactttgtctccccaacttcgtattttttgatacgcactttgcaggatgacctcagggctgtgcagattgagaaagggatttgaatcatgtcttaacgtctccgtactgagttgtgggcacagcttgctgctgtggacttatacccttgatttttatctcaatttggcattttctttttaaaatgggcctttacccggacctcacggcagcacctacctgctcccaccgttactgacccgttgctctgtgccatctatgagggacagccgctgacgtgtcctcattggcagtgtgaactgtcagggtcagcagtcagtgaggtggttggtagtgtctgtcacaggtatgtagcagaagctctcagatgtgagactgacgtaggtggatgaagagctgtctgctcagcgccatcgggcagaggataatgtttgggaagctacctgatgcgtaagctttttaatgctgtaaaatagagctaaaattcaatgccactttttcagagatgattaatggacagcctggtcaaattcaaagctttctgatgtataaaactttataaatggaactactccatcaataggcaaagtgtaaccaaaatctgtctagatggatagtgtgtaatttctgcacaggactctgtttagtaaatacatcactgtatacgtcaggaatcttgctccaataaaggaacataaagattttttttggactggggtcattctccttgttttgtagtgacttagaagatgcagtcatggctggggttcaagtgatactggcttggcagtaatcagggcccaaatggtgtgcagaaggttggttgtggacaccagattcataaccatttgactctgcatgtggttgggggagggtgctgacctaaatgaatactgaccccaggagagagagtatatgtgtgtgtgtgacaaaatagaaatagcattgtatcactgagctatgtctctacactcccttttgtttttgtatgtgtgtgggttttggggaatatgagcttcccatcacccactgcactgcggtcttccttatgtgtgctctgtgtgattatttgtatgagtattttgcttgcttgtatgtctgcaagaacagttttctggaaggacgggagagggagttaaaagtccttgggcctagagattctagttcccctgctattgttactatctcacataagaatcaggtgaagccatgcggtagtggtg

SEQ ID NO: 26499 - DNA, 1199 bp, Mus musculus
ctctcatgcatgatttatctggaagtagaagtgacatagctcaggttaagggtgtgtgcaatataggaatgttatgctggctataacacaggacagcggcctttgaagaaaggccctgggagccagtccctctcctcactgagctgcctgcctgagtcctctctggcacacactccttgtttagacaggaaagtcatgcagagcagactcagcagcatttcacggaatctctctcaggcccaattctgcctgcagtggcacaggccaattgcacccatgtgaggaaggctggaggcttatgtgaggagtcagatagtcaacctggcaacacctatgggattgcaaaggttcccagtgctgtggggaagaaaagctggtgctctgagagaataggagcctcagtttagaggaggtgaccttgcaggatgtgccggtcatgaggagaatgggaagagctttctagcctaaggaactgatgcaggagtaccctgaggcttggggtaccgtccaggaatcctctcctttagctttctgagtgccacttctctgtccagatcccttccagataacctctggatgccagggggcagtcaccaggctcttgctgcctttctgctcagactggcgttggagtagccctgcccgtaatatgatctgggccaggtttaggtcaagagtcccatcctgtagtagttttgtggaggaattaggggctcaggttctgtcttattggtgatggcagtaggttgttaaggtttcccaagggccaggaagcagtgtgctgggcctaggagctttgaggagtacatgtgcatgcctgccctgtcacactccagatccaagccgccctcctaatgttccatgcatctctccatgccagcagaggacgttctgtgataaatgaccacaggcaggccttatacattgcatacatctagagacagatgggtggaaatagatgattctcttgttggggattgaactcaggacttgacccttagatccacacatgccaggcgagtgctctgccaccaagtggcatcctcagctccacacaagaagtctcaagaagtgtctgtggtctgtgagaatttggctgtgtgccatagaaacacttaaaatatttacacgtgttccttttcacagacacatatgaagtaactgtgcagatgccatttctactgcctttttaaaaactg

SEQ ID NO: 26500 - DNA, 2407 bp, Mus musculus
tttggggcctaggaggctgacagggtcctgccatgcctctgcccagtagctcctcacccctgtgctttcatcttccctgagtcctggtcaggggaggcaattagctaatgggccagaaacaacttctgagtgttggtgctcagactgcctggggaagcaccccagaagagctgagtgactgccagttctagggccaccgtttgtccctgtccggtgtgtttgcttgtggccggtagggttgtctcccaggtctctgctttgtgtgtgtgtgtgtgtgtgtgtgtgtgtgtgtgtgtatgtgtgtgtgtatgtatgtatacatgtgtgttcacacatgccctggcagtggggtgagggtatgtgggaaccctctaaggccctgcttcccctctgtgtctacctctgcctgtcccttttcttcctttgccagaggcgtgtgtggctcctgctgtctttcttttgtctgtcctctttaccctggcgctctcctcccctctgctccctgaggccagcattcaggagtgtagcttagtgagaaagccctggaggccaactttattggcatcctgttcccatccccagcctgaggcctccaggtcctctatgtcagagcaggaatccccagtacctgctccaatggcagcctgtgatgctttgagcctctcgcccattttctactcaagaatggagaaaggagggatggggagagccttcagttggagagtaagataccctggctgctgtgtgcctgggagttgccatttcaggagtgatgtcatctctttgatggccatgttcccatctggtgtgtgtagttctcatcaagggcaagggaccaaagaaagcttctctgggtccagggtggctaaactggaaggcctggagcttcacagtaccagagggctacctctgccatctgcccccatgggaggcggagcggggaggcggcgggggggggggggggggggggaggcttcggaggtgctggccttcctggtcatgtgcttgatctatcttctgactttggggctgggttccctgaaccctatagacttttctgaccatgtttcttccggaggtcaggtggcttgagtcctgaaggcaggttggcagcaagggctcttaaccttctccagagactggccagcaggagtgaggctccagtagctggcacctgaagccttcctgagagcagagggcagggctgcctccttcccaggccattgctttagccaggttgggttgagtgctgctgggactctacctgcctttttactaccttctctctcaatacacaacacctgggacgtattttactatttatttggacacaggctagctatttattgcagagtggcaagtgacctggggaggagtggccaggatgctaaaggagttggagaattcaaatatggattgtcttattccccaaggttaaccctgacatcctctccccgttcctgcctgagagggctgccagctttaccctagagccgagtataagggaggccatatacactcccgccatcttgaccgcccccagacctaggacttggtagctggtagctcagccccagtactgctccctttgttgactgggacgcagcaaatgctgcccaggacgcggatgcattcattccttcttgcctgcctcccccaccccaccccttgccccgtttcctgggaccatgctactggaatcactgcatctgatttgtttctgtgggagacctgcatcctgtgcccaccacttggtccttgagatgaaggccaaggacatggagactttgtcttgggtagggtggctccgcagttggacgctgcctgagggaaggatctgcccttgattcttaagggggaaccccgagcctgagctcctgcagctcccgggagctcagcaggccagggctgttgatgagtcgtccttaataaactgtgctctttaccatgcgtgtcggtgctgtgctggctggacttgagactttggaggagaggaaacagttggagcaaggacagagccagagtcccttagagtgttctaagacagaccaggagatgcttgccaagacacttgcagttcggctgcggccagccagagacggccttaggaaggaggaggtgcgcctgggcacacattattattaatcttcttacattatatttctttgtgtgcagcctgcgggtgagggagtctagctggcattggttccctcttgctatcatgtgggtcccagcaaactcagggctgctgtgagcacctttacccactgagccagccatctcacgcacttccggcagcgcattgttccttaggtcatttaatactatgttttatttagttttgctatgtagttcaggctactcttgttcatcctgtagagcctctgaggccagggtctctgcctcc

SEQ ID NO: 26501 - DNA, 1198 bp, Mus musculus
atgtcaacacatgccttagccagggcagccgtaccatccgcaccgaggtgagccgcagcccgagttcttgcagcccaccttgcgtgccttttctaaaatttacttatgaatgttttgtctgcgtgtgcttgtgcacatgaggagagggcatcggatcccatgagactacaggtgtcaatagttatgaactgttatgtggattctgagaattgaactcaagacttcccggagagcagccagtactcctaacccatctctccagccccagcctaaagagcttttctgaagctgggatctttaccacagccaactagtagcagggactgaacacaagagcaattaagagttgcagtcctggccctgtgccctgtggtagccctgtgttcttaggttgagggacccaggtgatctgtctgtctgtccctctgcagggcttcttgcttccgcttccttggttgtatcctaggtccctctgggtgttgggggaaagtgtgccacaagctctgagcatccacaggatctatgcacccatcctggagactagcatgggattcagtgcctgtggatattatgggggaggctctgttgctgtcagcctcaggggcagtgactatgcagacgggcagccccagtctccctgtctctgaagtcttgcccatatcactaattactgttccaccagtatccctcctgaccctgaggtaggtctcacatggggcctgaaaacaagcagctgggaaggctgcctggcttcctggtcccaaccaacttcttttcttccaggaggccatactcatctcgctggctgctctgcagcctggtctcacccaggtgggatcgaggcccgcctccccgctttctggacccaggatgtagaggaagcagcaggacaggaggatcatgggagtagagatggtcaagtcttctctccaaaaataactgcctttaatgtgagtcagcccatctccccaggggctccagtgagtcctccaccatcacttgctgccagcagtgatagccttgaggtttccagctcgagccagaatattgggcacgaagagcaatcccgaggcccgctcgatgctctcgatgggcaccaggaaccgctccagagggatggtctcatccacgggggcattgggcatcacgtaggaacgtagctcgatctgcccaccggctgcctccaggatcagcacct

SEQ ID NO: 26502 - DNA, 1258 bp, Mus musculus
gctcttctctcctggggcaggcttttatttttgtttgcttttaaggtggttttttttttgttgttgtttttttttttggtgtcctgtttttttgttgtttttttctcctccatgggtcttggcaggcacccttttcatggctgtcagccaaaaggaaggctctggagctgccaagaaagggggagacttaggctggctaattcccagatgaacggtgctccattcccctccctacccccacaatgcccctccacacacacagtgttaaggagcccagagcagctgcttcccctcccccaactctgtccccacatcatgggtttgctcagtgccacccctcacctcttctgcttacattagctctgtcaccatctggtccatcgtgaagagctgacatttagaggcagattgggcatgagaggtcagcactgggagggcaggctccccagttttagggttccaggacagtttgtactgggcacctggtttgcacacagtacagtttagcgtctagtggcggtaagccactctgctttagatcaatcactagggtccccacttagaagggtcctcgccttagatcaatcacatggacactaaggcacgttttagcgtctcttgtcttaatgattatgtctgtctctccgtccatttgtgttttctgcgtcgtgtcatggatgtaacccttggaaatactgcacactagcctttgacaaccatgaagcaatccgttacacgtgggtctgacttgtagactcagttcagatatcaaataaatctataacacagttgcctttggaggtctccatgccatagaactcggggtgtcccttcacttctctggggtgttttggtcctgcttgactagtttattgagggaccactgctcaggctctgctcacttttctgccctgtgaaacttgagcattgtggaggcagttgccagatgtggtgagccagtcagagcacctgtaagctccgggcgtggtcaaccatgtcagctcctgacgaggggtctatggccagcacattttctgttgtcccaggcacttgttatttaggccctcacgagctttgattggtcagggctagaagaagaatctacaataggagccagcagccagaagtcctggttccagtccagttgtcttgtgctgagcccatctcccctcttgtggcctctatatccccatctgtgccttgggcgtctctacccttttttcagaagatgcttggggttccaactcccaacgcttca

SEQ ID NO: 26503 - DNA, 2343 bp, Mus musculus
tcagtttttttccttgctttcatgactttgagcagttctgagtagagtggcctagtattttatacagtgtccttcacttggacttgtctgatgtccttctcattatggacttgaggtctgggcttttcagaggggaaatgccattcttatatcctttcagcgtctatgtgctagacccatagaacaagtggtgatggtaccattggtcactctactgaggagttggaggacaaggacttctgacatggacctctggccccacatatactgccctccaacatgtttaaataatttaacatagcaaaagagatctacaaataacactattataactagtttataaggcacatgcctggtcttgttacataggcatagtcagttctgtgttacaaagtttatagacgtgaatgtgtattttacagacactaaaggaaaaaggaaggccagtgccattgagtgttttttaattttatacccttgggggccattgtgaatgaggaaataactgagtgtttttctcatagtccaagttcagctgaaagagtgaaagctaataaagacgtagcgtcacctctgaaggagctgggcctaagagtcagcaagttcttggtgagtaaaaattagcccagggtcagcatatgcttctgtggatgccggtggctccattggtaatgacgttagtacacgttccaagcttcagtggctgttgctcacttcatgcttcttgctttagggtcttgatgaagagcagagtgtgcagttactgcagtgttaccttcaggaggattacaggggtactcgggactcactaaaggtttgtggctctgcccatctcccattgacctttctttcttgtagagtttgggcccttgccctttatagaagaaaataaagatatacaggtataaagaaagacttatttatttgggttttttagacagggtttctctgtgtagccctgttgtccaggaactgcctttcagagatccacctgcctctgtcttccaagtgctgggattaaaacggtgcatcaccacgcctggctaggcaagacttttaaaggctggaaagagatatcccttttttttttccccaatttttttcaatttttttattaggcatttgcttcatttacatttcaaatgctatcccgaacttcccccttgaaacctccccccaccctgctcccctacccacccattcccactttttgtccctggcatttcctgtactggggcatataaagtttgcaataccaagtggcctctcttcccagtgatggccaactaggccatcttctactacatatgcagctagagacacgagctctggggtactggtcagttaatattgttgcagacctatagggttgcagaccccttcagctccttgggtactttctctagctcctccaccctatgtatgtttaagaagacacctgtcttcatccgtgcaggggttgaaatatcaaagaatcacatgcaagtgagagatctgagagaacatccagcctgctgggcttcagtcttttgtatagagagagagcagagcagagcagagggaaggatttgagcaacagtttggttagacttggcttaaacataaggtagaaatgtttacagaaacaaactagaagggcagtcacgaagggtgtggtgcatctttttctttgccagttgaattctccttgtaagacagcttcttgactgccctgttttccttcagacagtcctgcaagatgagaggcagagccaggccttaaccctgaaggtaagtactgattgctgactcattctttggtggacacttgtgaggcagcttcttggcttcctgtctcatcctgtccggtcccatcccgccccccccctcccctcccctcccctcctctccttttgagccagggtcttactgtgtatccttggacagcctggaactcactatgagccaccatgtggttgccgggaattgaactcaggacctctggaagagcagtcagtgcttttaacctctgagccatctctccagcttgctggaactcactttttagactgcctcactatatagatccacctccctctgctcctcagtactgggtaataaaggcatgtgagacacatcctcaccttgcttcagcttttaggtcttagctgaggcttttattttttttccgagacagggtttctctgtgtagccctggctgtcctggaactcactctgtagaccaggctggcctcaaacttagaaatccacctgcctctgcctctcatgtttgggattaaaggcgtgcgccaccacacctggctagctgaggcttcttaagcccatgatccagctgaggaattt

SEQ ID NO: 26504 - DNA, 1114 bp, Mus musculus
tgccaggatggagttatctggaggtgagtgaaagatgcccattggaaggtgtcccctcagtgctgtataggcacgttgagatcttcctgctaaggacctattgtaggtgctgtgagacttagtgtgacgttgcctggtactgtcttaggacgggacagtaaacttaaacgagtgacactctgagggtgtgctgtgtagttagtggctccccagtgtctgcagggccctgggtttgattcccagcattggacagggtggtaggtgggagaaaggagaggcaagccgagagccaactctgtgtagagtaaggggagcatgggtcaggtgcagaatggtgaggcctaactgagaagagcatgagcagtagtctggtaggaggttgtagacaggcacagacagctggctgaaaaagcaaaagctctttgtgcggcccacgagtgcatgtatgactgggtttcttgctgggtgttggcaggtgtacagcttcctggataaaatgtctttctacaacgaactccataagcacaagccccatgatgtgctctctcatgaagatggaactctgtggcggaggcaaacacccaaactcctgtaccctctaggtaagaagggctgtttcaaggggtcttttcataggaagtgcctgtgaggcccttccccctcttctcaggacttgttgaccactgactgctgagcagcaggctcagagcagtgtgacgagcagtgagtgctccccagctgagtagcactcgctcttctccttctcctcctctccttttttctttcttcttttttttctttttgttgtttgtttgtttgcttgtttgtttttggtttttcgagacagggtttctctgtagccctgtctgtcctggaactcactttgtagaccaggctggccttgaactcagaaatccacctacctctgcctcctgagtactgggattaaaggtgtacaccaccactcccgactgcttgattgttttgagagcatcttgttttgctgttagcccacgctggctcagaatacatgattttcctacttcatactgagcttctgccttttttttctttttttttaaatgaatgtttttgcatcactagtttcccttac

SEQ ID NO: 26505 - DNA, 1186 bp, Mus musculus
aaataaagggttgttttgttttttaaggtttttctgtggtttgtaagcacatgtcacccagctatgtatggccgtagaacaacttctgtgacttctatgatgtgggtcccaggatttgaactcagatcatcagtgttggtggttggtgccaactcttctcagcagccccagttaaacttttctttttttctttttcttttatgtgggagtggggtgagcgcaggactgagatggtttctctgtgtagccttggctgtcctgaaactcgctctatagaccagactggcctctggctctgcctctggaatgctgggattaaaggcttgggcaactactgcctgtctcccagttgcacttctgaagtggaagacacagttttatttatggacttcttatgtttatataagaataattgatttatgagaaacattttaggtttaggacattaaagtatgacaaaataccagcaagggggactagagatatgggggctgtaggaacggaaaatcggcatttcaacacatgttttcatcctagacccaagttttgggagaatttaacaagtccgctgtttggaactctctctcctccttcagagacatctgaggtgagctatgtagagggtagagcagaggctagggtacctgagcagaagggttggtctgtggcttcgagaaaaggaccctcccttaagtcacatgcagaaggcttcacatccagcccatctccagagcagttcctgcttcctgtcctggggggggggggggggggcagagagacagagttgctctgggtggaaagctctggcatctccacattgtgggcatggcacctgtccattggcattggccttttgtgttctataaaggtgtgttttcttgttttctaagtgttaggcccttgctgtcagcaggggtgggtgtggagggttttctccatgtaattaagtgtgttttgctctcccttccacagcccagtgtcctggaaacctgtgccctgatcatgaagataatatgtttggagatatactatgtagttaagtgagtcttcccccttcagtggatttgttactgtgattgtgtagtactgggggttgaactccaggtattttgcttgctgaacaagtgctccaccaatgagccatgtctctagcactcttcccaaagatatggggtgggagatggtg

SEQ ID NO: 26506 - DNA, 1186 bp, Mus musculus
tgggagaagtcagggttaggtgaggagggcctgtgtgtctatctgtgcagtggaggctgcttctaagcagccagactcctgactgctctgccgctcctcccctcagctccttgtggcagcatctgtgaactgcctccggctgggctccatgatgtgcaccctgctgcttatcctcctacgccagtggaagaggtgagtgctgggacgagagctggccgcccgaggctccatctgcctcagcactgcctgcccacccttcctcacccagaccgtctagtatacttcacagaaaatggagcaactcggcagacaagcctgcagtgagggagactgcctgtggcttctgaggggcactggggacactgagtgaggcatgctgctgccttggtctttcagagagctgggtgctgtggagaaaatccttgggcccttgacagagatcctggaaggggtgcttcaggcagaccagcagctcatggaaaagaccaaggccaaggtgttctctgcattcatcacagtgttacagatgaaggagctgcgaggtgagccccagctccaactgggccgtgggatttttacaccgggagtgctttatttcccactaccccttccccttcctcttggtactctactgcctttcgtcagaatggcccacctgtgtgacagcaccctctcatctgttctgcagtcggtgatatcccccagtactcccagctggtgctgaacgtctgtgagactctccaagaagaggtgattgcactctttgatcagacccgccacagcctggcatccgacagcgctgccgaggacaaggacagcatggagacagatgactgccctcggccccggcacaaggaccagcgtgatggggtgaggggacatcagcaggctgtctgacagcacacaggctgtactcaaggctgccaccaccctgggggaggacgggaaggtgggagcctgtgggcgcaggctttgagggaagccctgggagaggcatggctctcagccatttcagcagagctagtcaggcaggcatcgtgtgccgggaagatcgggtggaccgtggaaggtgtgagcagcttcaggtcagcatctgctgtgttctgatccctggttggtgtgagcagagtgagggcaggggtgggctagagagggttgctttatagggcaggcatgggctctttaa

SEQ ID NO: 26507 - DNA, 1161 bp, Mus musculus
tggctgtagtctgatccaaacaacataaatgccaccagggccaggttattagcctagacagtatcaacccctcagcatcgtgtctctctcttccccccaagtcctgagggccagcaggtatgtcttagtctggcgtcaccgtcagaacccctctcattggaatctttatgcctgtttagtcttcttcatctagccaggcctcccttgatttacagggaccatgttaagggccagagaagggcagggatacagccaagcagacatgtctgggtagtggcagaccagatttgaaaccttatgctcttcttgctgagtctgatagccttgcctctcctagctctcctcatacctagtgacaactgtccacttgaagagacttttctttccagcaactgggccacaaggaggctctactgctttgagtgggttcctgtggcatcaatcctgagtctgttgccatttgtcatagacacctagcacctctcgaaagtccctggatgccccatcctggccaggagtctaccgcctgtccatgtccttaatggagcgattgctcaagactctacgctacaatttcctgacggaggctctagactttgtgggtgtccatcaagaacggaccttgcaggtgagaggctacctacgtcatagaagggaatattcaaagccacttagcatgtggctgtaggacttggggtatcaatgccctcgtctttgagcaagagggcatgtccccctccctcccttcccctctcttgtgttcatggccggcctctacttctctactctctccctctctctgccttaatctgcctctactaccctcttactcccccccttgccctaaataaactattctatatcaaaaagaaagaaagatcccagcacttgggaggcagaggcaggcggatttctgagttctaggccagcctggtctacagagtgagttccaggacagccagggctacacagagaaaccctgtcttaaaaaaccaaaagagagagacagggaaagacagacagacagacagactggctggctggctggctggctggctagctagctagagatatggctcgcagttaagagcagtggccgttctttgagaggtcctgagttcatgcaaccacatggtggctcacaaccatctgtaatggaat

SEQ ID NO: 26508 - DNA, 1151 bp, Mus musculus
accctgaggaaagaggggggccgcctaggtctggcttcctgtctcagactcttgccttagcaccatggtaggttgcaaactagatggcctcggaagctcctggaaagcaggtgggaggtcagcctgaggagcaggtcagaggtaagatggaggaaggcaggctaggctggcagagtagactggttgagttagtaggtgtctattgactgtggggggttggccagccacacctctcaccctatgccctgggtgaaactcccgcacaggccatctgacccctctgctcctcttctgagcatgccactgtgtgatttgtgctgtcattccatggctggccattgtctttgagatgtcaatgctctggcctgttaactagccctccaacagggcacacgacaatggtgctcactgtgggctgtgcattctgctggcccagttcaactgtccatgtgtcagggtgttgtcctaggccagatttccacaaatgaccataaactgggtctcctaagtcatggtggggggaggggggcttttcttccctagactctggatgacacttcccgctcccctccctgggccgagtggaaggagaaacatcccggagggtggaggctgccctgtttttttcttttgccactgaccccaagtgtgactctggcccgaggctgccttcctctgccggaggacagaaaggttcagtgactggcccagggtcacttgtcctgtcctgcctccaagcaggagtcagggtggggtggggacattcggtctctaagacccactcagagttgggggaggcataggaaaagtacaagcaagacttgcagctggctggccctgcatgcagcatgctagagggatgcgtgccacctccctgcccttacaccaaaccttgttccagcctcagctcctggttgggctggggtgggttgtgcaagatagggtgggcagaggttgggtccctgggagctggagcaggcacaggctttggcctctggctgtccctgctcttccactcaccagtgcccaccttgccttccttgctgcctggtgctcttctggtctccatagctttggaacgatgaagtcgacaaggtgagttggggtttaggaaactgggggataaggtccagaaggtagagggtaggggc

SEQ ID NO: 26509 - DNA, 2270 bp, Mus musculus
aaaatgtctcaggacccaaacccaacaccagtctcctacccctagcaccagattgtacaatacctgagggacatgttcgacctggacaacgtgcgctacacatctgtgccagccctagcagaagacatcctacagctgtcccggcggcgcagcgagattctattgggctacctgggggcacctgtggctagtagcatcgggctgaatgggccactgcctcgagaaaatgggcccctggaagagctgcagtaacaggggatgggctggaggggagaggtggctgtttgggcctcagatacaaggtgataggagagagaaagctgccactcccttcctttgggttggtatccaagggccatggtggccaagggccattgcccctaagcttgctccacttcctcacctgggaattcccaacacccaggggacaaatttccatggagaggaaccactagaagcactgatagcagctgcccttggggttccctgagcagcagaggcaggccagagtcagcagggactggccaggggcaggtagcaagagagaaaggtgtgggagcaaatggctcttgagtatggaccacagaaccccagtccccccctgctgctgagggagggcaagggatagttgagggatagaacatacagggctaggtggtgacagtcacagggtcctgcaattagcagccaccaatagctacattaagtcccagcacctaggcttctggccagtatggaaagccatgtctgggccatccagaggtgggcttgccccatgtgtgctcacatctgagcaggtactcacccttcacaaacccttggcgctgttctccacattcccacaccctgccaaagattgtttttatcccctctgtcaccaaagatggaggaggcaggactggccgcttcctgctctctggtgagccaggagctcctgggcagtgctgggccccagtcagagctcacagtggcccatctactgctccaaaagtgagcacggaaccatggcagggtgggcatgggctgcacagcgggcagctcccccttcccctttctgacaggaagctggactcagcactttgccttcaactccatgcacacgtgctttggggctgccaccacccacgtcctgcagacagttggcatttgtcacggcagctgcagtagtcctggcagccctccttttgcctgagctgggaagtttttatttattgccttaatactttatttggctgttccatcccttccaggttgtgacaccaggagaaaagactcctggtctggagttgagcactggctcctggaaccaagttcctctccctggaagggaaaagggttccccagggtcagcaggatgcagtaaagagagggcagccatggctctgggtcctctctgaggcttgtgctcagaagggagcagccctcatgcactgtcttgacattccattcatttgcacttaccctgagctgtgaatgtgaccctgggctaaggcctgctctgctctgcccctgacccatacagtgtggtattttcatttttgtcctgttcatgtgtctatgccccaccctctagcactcaaccagcagtggtagagtgtgtgtaaggcctgtgagtcagataaaggaccgaagcgactcttctctgtgtcttgctgggtagaggtgggggcaatgctgagccaaaggctggacacttgccctgtaccatgggtagaggctccaggaggaacaggtcaggagcagcctgatacggccaggtgaaagcttgacaggatgtgtgtgtccctgggatgacaagatgcagatgtgtagtgggtggcctgcacttcttgtcctcagttcccacatctgtaagtcatgggcattgtgcccagctaggtgattcacagcctgtcaggtcttaatgtgtcttcataggcatcgggcttagggttactgctgctgtgaagaaagaccatgaccaatggcagcgtgggcaggaaagggtttatttcactcacagttccacatcacaggccatcatcaacagcattaaaggcaggagcctggaaggaggagctgatgaagaagccacgggcagaggctgtgtagtggcttgttctctgtggccatgtgggccaaccagtttagctgaatcatcatctggtctcagtgagagctcctgccttaaaacacgactggagagcgattaagagaagacattcagtaccgacctctgtagaacatatgtgtatatagacccaggatttttctgttttctttttctttca

SEQ ID NO: 26510 - DNA, 1448 bp, Mus musculus
ccactgacctttcttgtcttgcccatcccctggctcacttcctgagcttgaaacctaggtcatcgtgatacagcccagacaaatgctcttcaggttccagtcatggcagcggctctgattggcccggctctggccccgggtggctgtggtttggtgttgagactaagcagggagctgtgggactgactggccactcagtaccagacatcccccgatctaagccagccccattttgcaggaacagacagcgcaaacttggaacaaaactgcagtgactggtgggtgtggctgcgtctagcctccgaatctggcctgcaccatgccttgcaggatggacagaatgatggatggaggggtgaagcagagacctctacagaccagagtcaccaagtggagcctttttttttcttattttaatttcaatggacacggtggaccaaagtgctgagtcaggtcctcagccaggaccctgggagggcctgctgtgtgtgggtcacatggccagagcccatctctgctgctgccagctcctggctgggtggaaagtgctcttggcacgggcctcagcgtgcgtgtagagcgtgtgtacctctggtcctgagatcaggaagtgcaggtagcggaatgcgcactatttattcttttgggattgtggagttcatgctgaagaggccactctgcagcagctgccctgtgtacacagggcccaggttagctcccagaccctgtgctctgagcctcaggcagtacagcctgcctcctgctgggcctgagcagggcctagggcccagggcccaggagcgaggcctcccctgctgtccctgccaccatcgccattccagaacccttgtcagtgtttcctcgtctggggcagggcccagagtcagcacctgtttatccgtctgtcggctgggctgctggcttgtgttcttccctctaccaacccgacatcacaagggctttctccggtcctctatcccttcctgacaaaagagcctgcacatacgggtgagcacacccaagcgtttacagctccttttgtctggccatcgggtagcagtctgtcttcatccccacttgaacaaaagagaggaagcaggagctgggatgctggctgtgtggcagtgcagacaccctcccccatcgcctgcccatgtgctctggatttgtccctgtccttcctggcctgtcctggaggctggaaaccagtgcaggttgatcctggggtctgcctgggagtgggctctgatcccagctgccaggagtcccttttaagggactctctccaggttgtcctgccacagctgtggagatgcttccagaactgaagcagcccctgggggagctgttgagccctcccccgtttctccctggaggtccctaacctgctgctgaagcacaagtttttggtgctttcctttgtgtttgttaaaggccgtgtccaagcc

SEQ ID NO: 26511 - DNA, 1289 bp, Mus musculus
ctttctccctgccccttcaacacaggtatcttgaggttatgcggaagttgcagaagacatacaggatggagcctgcaggcagccagggcgtatggggtctggatgacttccagttcctgcccttcatctggggcagctcacagctcataggtactagtgagtggtcacatctccacctcgtacccaatgggtgcagctgtgttcccctcctgcccaggacacacaatgacagcttgttgagcaggacattagaccagcttagcccagctagtgatggaggttatgtactgtggacctaatgctgtgagccagtgtggccagctagaggaggtaagggtgggatgccaccaagagagcaggaagtggggaagcaggaaccagggccgcatggcctgctgcaggacagacaggtgagtgcatggcctgctgcaggacagacagacaggtgagtgcatggcctgctgcaggacagacagacaggtgagtgcatggcctgctgcaggacagacaggtgagtgcatggcctgctgtaggacagacaggtgagtgcatccggctcctgctcctggcagcagctgtgggcttgacaatgaaaactagggcctcttgtgatttgtgatcatcagtgtcattcagttaggatggaactctgtgcagggtgtgtgtgtgtgtgtgtgtgtgtgtttaggcgagttgctgccaagtgctgagtcctgtgtgcttcccagtctgctctatctgctccttacagaagaggattatccaggcatgatcagcatcttgggatctgccattggacagggttgctggtcactttagttccatgaagagtgaactgctgctaactagtactcacagatacctaataaatagctgagaacttgccatcctagccactttaaccacagtcttctcagacactgcagaggatacctagcactgtggtgtgtgcttccacaccatgatgcctttctgacacagcgaatgtgtggttagctccactagagggacttttatttttcctggctagcctggaactcacctatctctgtatgttggcagtaaaggtatctatcaccacacccagctgaggtaacttttaaggtaggtaatggtgcttaaacagcagaggttggtgctgctgacaaaccaggtgcagagctgttgtcatggttacaggatgctcaggtgtgtttgtcatctctgctgattggtagcacatcaggtttgtgtgcacccttatcaccacgggtacatgcatggtgactaactgtgtacagtgagcaagc

SEQ ID NO: 26512 - DNA, 1165 bp, Mus musculus
aggcagggtccttgctgagccagcctggagcacctgctgtgagacaaagcaggtggtcattcactcaggggtctgtaggggaccctgtttcatagttccagcctgcaagtgtgcagaattggggcaaggaagtagagagattgacggtggagtctttgcaggagtgttgggatacatctcggaagctgagggcactgtaaactttgccaggctcacagagcctttcagagtctttctgtgtagtatggggctgtcctctgagccctgttccccaaaataaatgctgcctgtaacctggggagggagtgaggagggcgtgccaggctgcatggctagtaaatacaaatggactggccttgcactctcactggcaggatgcacttgggacataggcttccctattcctgtgccccagccgaggctctgatgccccgggactgcactggactgcagtagtgctctgccttcctgcagtcagagtttgagcactgatggactatccatgtgcctgctcgtcttgttgctgtggctttttctgccctactcttgaccttgttaaacaaacttccctcctgtactgatctggagcctccctctatctctgtctctgtctcagaggaccagatccatcagggcctgtccacagcccctttcctgtcctccaggcaggtctagaccacgcacctacagtgtgtctgcataggaacacattctactttcttagggtagggatggtctcttcctgggttgctaaatttgatagacattgggatggagcctctgttttgtctgtgtgaaagaggtaagcagaggctgtagatgagagaagttctgttttttcaacaggccttgtaggtcaaggctgtggtgtgtgtgtgcgtgcatgtgcgtgtctgtgtgtgtgcacgcctgcatactgcctctctagttcctggacttcttttccagatgaagactggcccctttgcggaacactccaaccagctgtggaacatcagtgctgtcccctcctggtctaaagtgaaccagggcctcattcgaatgtataaggcagaggtgagtgggggctggccatcctgcctgcccctgatggcgcttggtcctgagggtgagctcatgacttctgattcttcatcacattgtttgctcgggctctgaggccagc

SEQ ID NO: 26513 - DNA, 2118 bp, Mus musculus
agcctcttctcagttgtgttcagatgtccctatactgctagggtcaggattcgggtgggggtggggggacctttgtcatttcttatggctcatcccttctgggtcaagtgatgtctcttagctgcctgtcttggcttctgctgagtatgggtgcctttgagtgggaggtggggatgaggtgaacgagatcaccttcctcctaggccgggggctgctctccagcacaggtggattcccgtggaggtggctgcagttggaaacctcatgtttgtctgggttactggggatgcaggaggcgagacaggcctcacctccctggttttcccctcctttctcagtgcctggagaagttccctgtgatccagcacttcaagttcgggagcctgctgcccatccatcccgtcacatcaggctaggagaggctgaactaccagagccaccctggccaggttcctgtgctctctgtgacccagcacccctcccgcccaccttctgttctttctgtttgatgagaggctgtttactgagatgggtgctaagcagggcctgagttgggggaattgaccacagtgtgcccagtttttgactgtcctccgtctggtggccgagtaagaagagaggggcctggacgtggtccccggccctgcccatccctgtgctcctgcttcctcccacggtcaggcccatgtggaggagacaaggacaccctgctcttgtcattgctccccctttcctccccatgatgtaatggttccctcattaagagcaggagttccgtgcctccagggccggctggtgggttccccgctagctgtgttccactgggtatctgctatggagctgaagggtgaggctgtcatcagctgttgggagggctggggttgggggaggttggtttgtaggggccatggatgatgaggctggtcttctcaaggtaccatcctaggccctgggggacctgtgtccatcctcatgctggctttgttccctggcccttggctttgctaggtttcctgactgttaacataacactccccttcctggggatagcctagctatggaagctgccctgggctcctgggaaagcccattgcttgggtgagatctgactttccagagctgtcaagcagggagaggaagagactccgggaggcagtaggactgttgtgtctgtggagaacctagttttctccagtcagtctcaggcctgctgattctgctgcctctgcctgctgagtgtctgaagcttcccccgaggccttggcttgctgctccgctcccttgggtcggtttgtggctcgtgtgggagagcaaagaaggtagcagccccctcctcccacttccctctgtgagatgagggaagtgctggcctgggcctaggcatagactcagaatgggtagggctgctaaggggacctagccacagtcaccagttttctctcagcgtgtggctgaactggaacctgcaggctttcctgtcccacttgggcctgcccttcttcactgcccatcctgtgtttgtgcccgcttagctttgtggagtggacactgagaagcacaactcaggggcttggccaggaattaactatggtctgggcagagcggggattgaagtcatcagagtcacaggcagttccccaggaaaagcccagtgccagcttccttccagggccaggccactgccttcctggctcccttccctgtccctgcgtccccagccctgcgccttccttgctatttggattaaagcctctgttttacacctgtcccctgtgtgagacatcttttcctgacatgtctgagtgactgttcctcagcaggtggttttgttcctcaggagggtggtttgtaggggccatggatgatgaggctggtcttctcaaggtaccatcctaggccctgggggacctgtgtccatcttcatgctggctttgttccctggcccttggctttgctaggtttcctgactgttaacataacactccccttcctggggatagcctagctatgaaagctgccctgggctcctgggaaagcccattaccagttgactttctggggatgggatatgtgacaatgactaaagcaggcaagagggttcaaatcccagccatcccc

SEQ ID NO: 26514 - DNA, 1234 bp, Mus musculus
gcccgggtgcgctgcgctccagccgccgcacggcgcgccccaccgcgggcagcacttggagccgctgcagccgggtcccgcgccgctgccgccgcccgcgcccgccgcgctctgcccgcgggaccctcgcgtcccggccgcttgctctgcgccctcggtgcttccgggggctgccccttcgaccgtcgctgcctcctctccgcccgcctctacagccccttcctcatccactggcttctaccggggcgcgtacccggccccctcggacttcggcgtgcactgcagcagccagaccaccgtgctggacctggacactcacgtggtgaccacggtagaaaacggctacttgcaccaggactgctgcgcctccgcccactgcccctgctgtggccagggcgctccgggacccggtctggcgtccgccgctggttgcaagcgcaagtattaccctggccaggaggaagaggacgacgaagaggacgcgggcgacctgggagccgagccccccgggggtaccccattcgccccctgtaagcgcgcccgcttcgaggacttctgcccggactcgtccccggacgcgtccaacatctcaaacttgatctccatctttggctcgggcttctcggggctggtgagccgacagccggactcctcggagcagccgccgccgctcaacgggcagctgtgcgccaagcaggcgctcgccagcctcggcgcctggactcgagccattgtcgccttctagggacccccgagggcatggggaccctgggccccgcggggctggggccagacaaagactcggccaaggggcgatagggagcgagcgggtcctggccactcggggctgagctggggacgagcagaggctgatgttttataaattgtaaaataaaaaaaaaaaatctaaaaatcttggactttatttttgcagagaaaaagcgcctatttaagtatgctttgtgtttctcttactcttttccccccctttttattgtactgattgcagtggtgtttagcgaggagcctgccacgtgaggcagggctgctgcccggaggaggtgcccggccgccgggggcgaggctgggtgcccgggcgcgccaggggcgcaacgcaggagggcgcggggccccggacgccgattctaatcagttgtcaagagccgggaagcccgacgttccgctctcctgagtgcctttctggggtgaggaacgggtcttgtgaaaccctgag

SEQ ID NO: 26515 - DNA, 1188 bp, Mus musculus
ggggaggggcgagttagtcgcgcggagagaagttctgggcgtgtcgagtgagcaggccgtggagcggggttggctgtgggggcgtggagaggtgtgagcaggccctggagagggcggagttggctgtgggggagggacgatctggacgtgagctgcctgtgggacgcggcgatctggccctggggaggggctatctgtctgtggagagggatgagctagtcttggggcggagtgaactggcctcggggcggagcgatcttgagtccagccccctccaggctcggggaagtgacgtgtgcggacaaaggcagaggccgcgaggtgtctggtccggtagagtggtggcggctgctgtgggctacggtctttgccagcctccttctcaacccgtccttttctctcgggtccctggagccccgacccaggtaagtatcgcgagggacgcggccagggaggagggaggtgctcaccccaactgcctgaagcggtgaggccccgtcgtcaagtgacctgggcctggccctggcccacgtgcacgtcccatggaggttcaccgatcagacctgggcagggactctggtgaccacggattgggttggaggaagccacgttggtggaggctggcaagacgtatcttcactcgcgcccgtacatcactttccagtcctcagtttcccctctgagataaggaaagcagccactgcaaggttggtgtgtggaatcggcgccgtgcttggctcaagtcctcgcagttaagtgcttggttgcacgggttgccatcacgtttaactgcctccagctctggccaacatcgttactgtcatgagcccttgaggccaaggtcagcctctcttctgcaaggctgcctgccatcttttccagatgctccaggctttgctgctccaccaactgtgtgatcattttggtctttaatccttttgataagggcctaggacaggtgctgtaactgatgacaatgatgtatggggtggggcactcagtgactggggtctaagtgagaagcctaaatcctctcctaacttttggtcctttcccaagtgctgttttaaggcacatcgtttccttaagctggctttcctgtgtgtgtgcttgtgtgtgtgttggggggaggggggatgctttcctgaaggccagagccacataatcaaaaggtcagagtctgcaggt

SEQ ID NO: 26516 - DNA, 1155 bp, Mus musculus
agagacttagcaaggcagctgcccagtggagcgtggtgtaattagatgactccaaggatgtacaggtgagcatgaggcctctctgcccatgaactagcctcgaataaatacacagccacgctgccctgacccttcctatccatggccgtgcagtttcatggagcaggggaaggcttgttttggctttattttgtttttccagacagggtttctctgtgtaaccctggctagcctgaaattccttatgtagatcaggctgccctgagactcagagatccacctgcttctgcctcccgagtgctggaaataaagatgtgcacctccaccggggaaggatgtcactcttgatgtctggaatcctcaggagccttggggccatggagcagacactagggggctatgtttggcagggcctcaggaagtatgtgtcttcatgagatggctgtaagagcaaatcaacccagaacttgtatttccaggcttggatgtgatctacccccacacctaccccagctgcttcctagaagcaagtgggattcttgtaaattagatttctcaagagactttggcagatcaacagatgatgttggtaacagtgtcatctggtttgaggggtctgggagtctccaagagtgagaaatggctgtccctgtgcatgctcactcagtcactaccaccaaccagcaagggcccttaaactccagcaccacaaaggctgtgccagatcctagccctgctcagaggagctggcatcctggggccggcagacaggcagagcctgctcccttctctggttctctcccattctcctcagctggtaaggaccacatgttctggattgcccatgtgctggtgggtcctggggagaaatctgagttgtcctcgtggtgaagaagatggctttgacatcagtcggaacattttcttaggacttaggggcagcaggggaggctggttgctgggccccagtgtaagcgggctagcattgagctcctgtgtggaagaggtctgaatgttgtcctagctggtagtggttgtgacatagttgctatggtgactgaagagtcacctgacagccttctggttccaggtcatcctccgtccccaggcaagtacacggtgatgttcaggctgaggctctctgtctactctggt

SEQ ID NO: 26517 - DNA, 2505 bp, Mus musculus
ctcagacaagggctgcaagactgtgcagtcccggctggatttccactgagctcttcatccagtggagtgggaagattcaggggaacctcccaccccgttccaggccttgtcatggagcactttgaagagcccccttggggctttgcacatttgcacctgtggacttgggatgctgtcagtgcggcatctgaagatgaactttaagaatgctcacactttactgtgaatcaagtgcctaaaaaaaaaaaaccaaaactgtctgaacgcaggccaaaagtcctgtgtggccaacagcacccatgcctcagatgccactaatgggcctgctgcaccctgctgtaccctcagggaggcagggtttcctaccactgggctgtttttttcttttctgccttgacctggtaatcacaatttcggaagctggtggcactgacagatgctcactgctagaggggagcatgtgggcttgaccttggctggactgtcagtgtgagcagtgggggctccctctgaggcccctggagcacacagggacacagagcctttgagtttatgccttctgttcgctactgctcgcagccctggctgtgggatgctctgtccagtctcccactgtgtatgggtcacaacctgccttgtaccttgcctatcaattgttagattcacccagcctcatccctgcttgcatcaggatgagctgtcatttttgaaggaggtctttggaccctgtttgcctgttacacttgctctgaaggtcaagctccgatttgcagaacatgcataggaagagaagctctaggctggggctgacctggccaaaccccatgggaaggagtgtgtctgctgtacaccagagatgccgttttttttttttttaaaggacatgcacatatttaaaatttatatttttacttctaaagcttaggtaataaatgtaagatgccatgcattttaaaacctaggaagtgccacaagtgctggggcacacctttaatcccagcactcttgaggcaaaggcaggtagattctgggagtttgaacccaaccttgtctacttagtgggttccaggacagccaagactacacagccctttttcaaaaaataaagacctaggaaggacataaaatagaatgaggcttattctcaggtttttaacgttgctggatatggggcacaatacccatgatcccagcaggaagatcagggttcagggttcctcagctggcttgagtttaagaactgcctgagttacatgaaactcaaaagaaaaaaaaaaagggtcttattgttaattgtgtagagagtagaactatactggcacaactcagcttgtgggttctgggtgtaatctcaggatgacgccttgagtggcatctgggctgctctgactgtagggagctgagcctgtgagcctatccttgtgaaccattctgtcctacagttgctatgcagctgcagacatggaaactctgccatgtttttatacaatgtggtagaatggctatttttataacacggaaatgccttaaagagaatcacagcttgtcacttagaaatgccacgctgagctgggtgtggtggtgctcacctttagtcccagaacctgtgaggccatggcaggactgtctcaagtttgaggcaagcctaggctacacaagggaatgccaggccagtggtgtgcatgcctgcaatcctagcacttcggaagaggagtttaaagttagttgagctacgtacagagagaccctgtctcaaagcaggaagcaaaccaaaacgtgccaaggtgagggtgactttcaggccatagtcttggactggagccgagttactgtttgtgacctgttgggctcccggttttctgtttacagtgatgtaatacgtggacacgtgttggccacctttggactgctgttactgatctccaactttgaaaggcctggtgtggcctgccccagcctccctgtgagaacagagatggacgcaagataataaaagcattgcgagacgtaactttcctgagcttttccttgtctgtgtggtagtgcacggagctcagaatcaaggctctggagcggcccgcggccttcctcacctgcatgtgcaggttgaccccatcacgcagaaatcaatgtttgctttgaatgctgttacccacacacataggacgaggcaatatctggtgctggagagcttcctcgggtaggtaagggctttttctgtgctgtgtttacatacacaaggggcaggcaatcacatctctacatatgccaacttgggcacctttcttatttctccaccttccaaacaggctctggagctcagagccagctagacaggctgggtagcaagatataggagctaccagagtcaggctttcctaccacataacatccccccaactgtgagcaatccgcaactgctgggtctgggtcagaactcgacgcaggctctgtgccctactcttggccctcacactcagtgccttggagtttgtggtattctgg

SEQ ID NO: 26518 - DNA, 1180 bp, Mus musculus
aggccctggggaccaaggcatctgacttagaccccctactaaggaccttctcctttccaaactgtggctcctcctggataaagtgagaagtgtagagttagcggttggttgctctgaggcccccaagctggaagctagtaaagactggctttgaaagttttggtaaaggaaaagcaaaaaacaaacaaacaaacaaaactctttgagctctctgtggcctccattctggggctgctgttaggtgtgactccaaccaggttttcatcttgaacagtagtatctgccggttccaccatgacaggtaacctctgttctcctcagggtcccctcccaaccgcaagcgtcctgctaatgaaaaggccacagatgactaccactatgagaagttcaagaagatgaacaggcgctactgaggcagcggtaggggctggataacgatgtgatgcacaggggtgcgtttgtgtgcatgtgcaagcgtgggggcacacacacatgtcctcttgcataaaacctgcttattagctcttgagttccccatcagatagtgcttctgctcagtggctggatttctgttctggttttggttggagactgtagctctctgtgtatcctaggccatgaactccctcctcctccctactactgggattttagaccccccaccccctgcattttcaagcactaactttgtaactattggaagaaaacaatgtgtctatgtctatctatattgtttcctacctagggcaaactctcctcaagagtgttattaaatcctttgtaaatatgttgcctgtcttctaatgtttttccaggctcaggaagaaccagctgtgttcactgtgggccaatactgacaacataggggaggagtgagtgttaagattcattattttatgtatatgggtgttttgcccatgtgtgcatactgtgcccattgaggccagaagaggttgttagctatcttggaactgaaattataaatggttctgagacaccatgtgtgtgccaggtcctctgagagagcagctgcctgtgctcctaatggctgagccatccagcctgtttgcattgtattttgtggttatatacgtagccatggcttatttgaaatggagttgaaaaatacatctgtccttgctgggtgtggtgacccatgcctttaatcatagcacgtggg

SEQ ID NO: 26519 - DNA, 1181 bp, Mus musculus
gcaccaactcagagcaagtggatgaggatgcagatgtggacacggccatggcgtcccttgatgagcaatccagagaggcccagccaccatcaccaaggtccaccagcccctgccagaccccaggtatccgtcagccatgtcactgtttgggccactgggaagtcacagcttgtaagccctgtgtccattgcctgcctagcactaacatgctagagggtgaggggtggggttagactccgcccccaagccttcctcacaggctgggagcagccacagccctgcctagtcttgggcctcagttggaaatggactggatggcatcccggtgtgttggatggggttagggatggacatgcaggaagatatggggagtcaggcattatgcctaggaggagatgctggcagtctctcttgctctggcctcagagctggcatggagggcaccagcttggccaccctggcccagaacttccccttcttgtccccagaaccagacaacgaagcccacatacgcagctcctctcgtccctgcagccctgttcaccaccaccacgagggccattccaagctgtccagcagccctcctcgtgcaagccctgtgaggatggggccgtcgtatgtgctcaagaaaggttcggggcagcgatgaactcagctgggggtgacatagtcaccagtttggggcacttcaacctttgtctaggctgtgtgctgctcacttgagcccttgaacccttggaacagccttggggtgtgagagggagccccattttataaacattagcgctgaggtgccaaggggtgaagggtgtaaacagtgagggcgccactgtctgtgcctatgcctgccaggcaggggaggctggcttagccctgtgctgtgctcccagcccaggtgccaagcactggtggtcggaggcggaaggagcagagctaccgcagtgtcatctcagacgtcttcaatggctctgtcctcagcctggtgcagtgtcttacctgtgaccgggtaggtacctaggggaggctggcatcgcttaccacctgggcaggatggactctcccatggcattgcccctcccaggagcagcagaccctggcaggagtgggcagcaggctgatcttcaccatttaggtgtctaccacagtggagacattccaggacctgtcattgcccatccctg

SEQ ID NO: 26520 - DNA, 1190 bp, Mus musculus
agagggtgtgtctgccctgcagctgagctgctgtgtgcctggtacagaggctgagagcggctggtccgccctgagagatgctgtgctgggaaatatattcgctcggaggactctgtcatcgctgtgtccccaaatttgccctcttgctaacttgggcccagcttttgtcccaggagccccatgctgccccttaggtaatgctgacccctgggatggggggctaggagcagctgcaaccttttgggtattatctgctgtatacttggcccaaccccttggggactcagagaagtagatgtctacacacaggggcagaatggatgcagggctctttgtgtaggccagcagcccctatatcatgatggagacccctgctgcccgtgtttgttctgttgactattgtagtgggacagagaaagggcaagctttgctttagagggtagaggacctgccaccttgtcctgctgagaccactggcagaccaactgtcatttgctctgtgaagaggctcctaagaccctgggggagggaaaacagatacctcatgcactggcccactgtctgacgctccttcatcctctgtgcggtctggagtgagcctggtcccctagccaccccctagccttggtgtcttgagccaattctgagatgtggtctgtgtcctggacctgctgagcctagagagattgtcctatgtatgtctgagatcctggagaaacctaaccgaacttccagggcagggtgttcaaagctaagtctggagtggtgagggggggatcctgggaccaagagggctccagtggccacctgtctcttcagaagtgggtaccagcagctcatccccaaaggcctgggtgttcagtgtcccactgtggtgggtggcaagtgggtccatggccggctgctgctgggacgtgccctgttggctgccatcttttgaagtctctgttgtagagcccttagctcattgcactactgtgacgcagtctggtttgtgttcagaatgtcacaataaatacttgttcctctcctgcccctagcttgtactgtgacactgtggcgtctgccttcagtggtgatgaacacagccagagaccctgtggaagcttctggcaagagctggtggaacacttgaaataccaactgtatctttaccccaccaacccaccaaccacacagagggcccagca

SEQ ID NO: 26521 - DNA, 1129 bp, Mus musculus
gcaagttgggctgaccacagccccctccagagtgttttttatgggtctgttcacagatctcattaatgcatgaaggacaaggaaagacttgccacaaaggtaaaatggagaggctgccagtcttcttcagatgacctttaaagcctgcgcctgtccctgtgtcccctcacttcttttttaatttcctgtactaccttacatccagaaaggatggtggatgagcgtcttcaggccgttctctgagaaagtcggtctgccgtggacatcctgtggaactgtactggctctggggggaagggaatgcaggatttccccagaagctctacactccctgtccccaggacccactgcctgtcacccctagctgctagtgtgctgagacaagaatgactcactgtaaaagaacctgccctgcagatgacttagagatggaaataaaaggaacgtgacatttaccgctttttttttttctatgcaggacgtgaagctgcaatggcccctccctctaggctgagcatgcttatccagggccccagcccaaacaacacacagggaggccattaatgccttctggtggcatctgtagtgaacgtagaatgtccacatgaagttaaaaaaaaaaagttccgttcctgccagtatttttcccagaaattgccgttttgtgattccttttgattttgtgtctgtataacatccaaaatgtctctaatactggccccaacttctcttttaacctgacatcaagcaccttttaaatcatgcgtgtgcaagttcgtgtatgtgtgtgtgtgcctctgtatgtgtgtgtgtgtgtgtgtgcgtgtgtgtgtgtgtgtgtgtgtgtgtgtgtgcgtgctaattctaagccttgagggcagggcactgttgggaaggccctcagagctgtcaggtcttggtcttgcctgtgactctggaggtggaattaaaaccaaacaaagtgctttcagtagagagcactcttacccatgtaattaaatgttagtcctttcaatgttaaataaagtataacttctagtgtacctggttctctgttgtatgaagaaatgacgctgggcctggggagatggcttagtgggtaaaaagctgagcacagcaggcgcctgcc

SEQ ID NO: 26522 - DNA, 1176 bp, Mus musculus
gaactcactctgtagaccaggccggactcagactcacagagatccacctgcctctgcctcttgagtgctgggattaaagaagtgcatcactcccactccgttgataggcagaagccagcagagttctgtgtgtttaagatcggtctagtctacacagtgagttcctgaacaactagaactacataagatagaccctgtcttaaaaacaaagcccaaaacatctcaaagagagaggtccagcagtgagctggtgaacggcctgctaggtgaaccggaggggtttccctctggtttgtgcaggtcctggcttaagtgtgtgctattaagttgactaccttaggatccgaacagatgaatgagttcagcattgactaactgagtgatgctctgtagtttctatctcctcagtggcgaacacagacatttcttccaatagtttgctgtttaaaaagggagactggagatgtgtgtcaggggaaggtggctcggtatgtgaagacatttgtccccaagcctgacgaattctagtgctgtccccgggactcacatggttgaaggaaaagaccaactcccctaagttgacctgtgtcccagaagttgacctctgaccttcgtgcaccatggcacatgtgcacacttacacaaaacacatacaaatcaatgtaatcccagcacttgggacccagatgaaggtagatctgtcagttcaaggccagcctggtctacatagtgaattctatgccagccagggctacagagtaagatcttgactcaaaacaacagaaaataagtaaataaggagagagctgagctgcctgcagccttcttttagctgaggaccatatctgaggttagcagccatgcaggagccgcccccacttagcctcttccacaccctgccctcctgcctccaacaccagtgggcccagctgctcttccccaactcccagaaactcaaagcacttctcagatttttaaaaaataacgcaaaggcactttctctctctctctctctctctctctggtatcaatgatgtgcctaaccattgccaaactccttagactcctccaaccctttgccttacggtggcttttgacatcacttcctgtttgaccatgtctgtgatcctgcacagcaggatatatttgtatatattgcactttggaacctagaag

SEQ ID NO: 26523 - DNA, 1148 bp, Mus musculus
gaggatgaaaccattcgggacctcaaggcaagctgcagaagtacctccatgaagccgcaaatgggacacaagtggggggggaggttggcgggaggactgaaggtaacaagtctgacacggtgtctcctggcatctaaggccttagccaacatggtttcttgtgtagaaacagccatggtcagtagggcataggtggcacaaacctttaacccagcactggaaggcagaggcagtaagatctctgtgagttcgaggccagcctggtctatagagagagttccaggatagccagggctacacagagagatcttgtctcaaaaaaactaaaacctaaaactaaaaaaaaaggaggggggcgaggggaagctgtggttagctatctcagaggccgaatttcctctcctaacccaactcactgactcaccagcttaaaaaaaaagttcctattctaagaacattttacatgcaacactgctgtagtacaaagacacaccaaggtggtgtgtgtgtgtgtgtgtgtgtgtgtgtatgtgtgttgtgtgtgtgttgtgtgtgtgaatgaatcagactttcagaacggatctacacaattcaaaaggcccacatcgccagtggacgtaagtcaaagacaaactgaatgagactcaggttatcttgttgccattggaaagatcaaacctttacttcaaaattctaccgagaaaacccggggaatctccccagataaatccaaatgagccaagtgtgggccctaccatgcatgagtttgcttaaagaacttttttttttagtaaatatttttacttaatgtgtgtggtgttgcctgcatgtggcctgtgtaccatgtgcatttatcatgtctgtggaggccagcaaaaggcatcggaatcccctgccactagagttacagacagttgtgagctgccatgtcagggctgggaacggaatgaaacctgggtcttttgcaaaagcaacccgtgctctttacaactaaggcgtctctccagcccccttggatcttaattaacactgttcccacctggcctctgcatgggagggaggcctttggatgaaaaggtcagagggccattgttaaccagaaacagactacagcccagtgttctgtactgctaaagataaaatcaccc

SEQ ID NO: 26524 - DNA, 1193 bp, Mus musculus
gaacctagagctgggaggagactgcctgttatactatccaccgtggtccaaagctttccctcgttatcctgtgtgtgtgtgtgtgtgtgtgtgtgtgtgtgtgtgtgtgtgtgtgttcatgacgacaagtattgttggttctctcctttctttatgtgagaccctggaatggacctcaggcatcaggcttagcaacaggcgcctttacccaccgagccatcttgccagcccttaccccatggtttgggattctggaaactctcagagagaagtttctgcacttttgtggaagtgcttgttttcctgcagtgagttgttgagatccttgaaggagtgttagtcaattggtgagaggtgagaagaatttgtagcccagctccctcaatttttgaagggttggttgtgcggtgtccccttaggtgttgccatggaaagaaatcaagcctcttttgttgttagggcttcgctgagtctcaaagctagagagtgcagtggttctcaaccttcctgatgcttcacccctttaacacagtgagtgcctcatgttgtggagaaccctaatcgcgaaattgttactccacaaccataatttcgctgctgttatgagctgtaatgtaaatatctgatgtgcgggctctctgatattgcaccactgctatagaggatcagaacccatgcatgactaccaaccagtgactggctgtggctgaccttctctggtacaaactggctttgggaaatactggggatggctccccttctagccagtgagcagtttgtcacatacaacctacttttttttttttttttttttttttggtttttggagacagggtttctctgtatagccctggctgtcctggaactcactttgtagaccaggctggcctcgaactcagaaatctgcctgcctctgcctctcaagtgctgggactaaaggcgtgcaccaccaacgcccagcacaacctactttttaatcacacatcacaatgtggccagaaaaggactctactgtttcgtagaacaaaagaggacagctgttcgtgaggtgcccctgtacttggaaacctttccaatttacttcaaatgccaaacaacggggcagacttaatgacatgggtacacctttaaccccagatctcaggaggcaagcaggcctctgagttcaaggccagcctggtttatgtagtaaa

SEQ ID NO: 26525 - DNA, 1155 bp, Mus musculus
tactttaatgccacaaactgtgaacttcaacaaattcacttggagccaggaggtggtggtacacatctttaatccaagcactcagaaagcagaggcaggcgagtggatatctgagttcaaggccaaccagaactactcagagaaacttcgaattgaaaacccaaacaaacaaacaaacaaatcgatttgttgggactacactgtctaattaaaaaaaaaaaatcgccgggcatggtggcgcacgcctttaatcccagcagaggcaggcggatttctgagttcgaggccagcctggtctacaaagtgagctccaggacagccagggctatacaaagaaaccctgtctcgaaaaaaccaaaaaaaaaaaagaaaagaaaaaaaaaatcacttgggaaaatatggaactaaaagtgagatggttttggaggccctggttttgcctctgtgcttgcacagtcttcatacactgatataccccgaatccttcccctgacttaaaaaccaggccaagttcagtcacaccctcttcagaggcaacagtagaacatgcaggtggagacacagaggttggggtttatcttaagatgcatttcagtttcatgggagggaaaggcagtgacactggctggctggtggctagccttgtcttccctttacttgggtcttgggccatctcttttgaatatgcaatcttccatgtttgaacaggattttcatctgatcccacccccttacagatagataatgaaacctagagcaggaaactctggaattactcttttgcagccctacacagagaggtgagaaattattttctgagtgaacttgattggctatgtgatctacgttatgtcatttataagagtcctatgagatgtcttatttcctttcatcagatcaggtttggttagattagttcagaggcagtctgtctgggtataaatggcccaccagcacaggcagactcaccctgctcacaaagcccaggacaaaagcccgtcttgcctcattgagaacgaggccatcgcatgcgttgttggaccggaaagctgtatagataacccagatttttctccttgtttactaggtgtgagatcagtgtcagggaacattaggtagctttttgaagatcatacagcccttgggcagttttag

SEQ ID NO: 26526 - DNA, 1173 bp, Mus musculus
ttagtggttgccctgatggcaggctgaaataccctccagctttggcctactctgctgcagtggggtgagaacaggccctgtcgtggaggcaggagatggagggctgtgcatgtggatggaagccaaggcctaggacattgattcacctagtatgtctcgactgtagcatctgtcctcaggagcacccctcccagtgcctaagtggggtgtccctgagagcagggaggaggctgcatctgcctagagcactgcttgtacccgatgcctggtgcaagtcagaacttgctcactgagtattgacggatgaacaaagggtgagaaccagagagtttaatgttaaaccaacagcaacaaacaaacaacacagttctcagacatgtagagagatgagagtgttgggcagtctgccagttgttgccccatgcctgctgggtgtgtatatacttgctcctgttgcttgtatgaacatgtgtgtacacacatacacatggacacacatacacaaggacacacacaaagacaatgtatctctggacttcaaaactctcagaaggcctctgacagaactctagttgttaaccgccttgctaacttaggatctctggaatttctgtgggcatcctaagcgtattccccaccccaccaccaccaccaccatcacaaatcatgagccagaggggagaggaagaggaaatttgaatgtctgccacccacagtcccattcttaaactgaatcagtaattgaatgctattaagcaaaattaatttgcctcctgcaggaaggctatgatgaatgaaagcgttgctaatcggggagggagccaggctaccctctacggtcatcaatatttcatagccataggcagtgtcaggaagctgcgcttcctgctttagctgaccttgagtgttcttgaaggtagggcttaacgagggagtctgctttcaaagggcttactatgaatgaagcccgtaagggaaacggattgcacctgagaactgattgagtttgctcctgtgggaggtcctcgggtggtcatttatgccagcctgctgctgattctgattagggggcagctatccctctcagctgcggtgtagagctggagaggttagccctggcccttgtctattctgagaccccaaccatagccccagtttctgctcatagcttcc

SEQ ID NO: 26527 - DNA, 2320 bp, Mus musculus
gcagggtctttttggaaggggcctcgtttcacttgctgggttttaggagagccagaggggagaagttgtaccacccagcccacagagctgtctgggtgcacagccgagcgggtggagggacagcctgctccttccagggcatgggtgcacgggctgggaggtgtgctacagcagtatcctcccaagtcttgccctggaactgctgtaggtgggaagccaggcatggcgggggaatgggaagcctaacctggggctgggaagactggcctggtgcccaggctgtggaaaggaaagcttctagccctttatcctgcactgtaagcgtatctcgtatctcgtctccatcacttgagagctgtgagccagcattccgcggtgtccttgggtagaggagtctgattggagtccagccgccccagctcacgagctgtcctctgcagccttgagtcttagcccacctggcttcacacagccctgtttcagtggtaaagcccatgtgttggaggggctgagcaaaaatggggtgtgcattgcactgccactctggtattaacagctctgctctgtgtctctcccccttctgcctgtgtgaggtatccatactttgagagtgctgtggactggaagctgtgggctgtgacatttaataaagtgtggtagataattatttcttggacaacaagagcaagtgttcaactctgaattctggctctaacaggactcagcctctcatgtttgaatagcagagcatagtctaatgttgagcctgcctgggcttcattttctttagatagaggggcagctcactccaggtcacatcaagcctgagtcttcagttctccttcaaaaaccacttcagagtaaatacctaagtgtccccactctctagccctcgcctgtgcagccagccagggctgcccaactcctgaagtgctcgcaggatttctgcttcccttggtcctcgcgtcctcctctcacccctctccttccctcgtgccctctccttttctctctccctcgctccccacactccctcctgccttgccactgactccctggcctctctggcatactcagccgcaggctggtgcactgcagcattggctgcctgcagctgcgtgcagaatgtattttctaaaccagggagcattttatcaagagagtgcaaactatgcaaactcactctgtgtattgctgctctgaccacatggtgatctccgcacaccgcaatgcctgtctggctcttggagtgcagtctaaagcaagtctttgcagaacgggaagcccatcagcaatctctgtgttcattttcagtggcccctgaccacccccccacccacatcccaaagcgtggtccttgaggaagcattagtctgatggggttgctggcccagttccacacacccagaaggacaacctcgctctgccaagctgctggtcctcaaaggaagattctagcctaccccccagccttgttcccacattccatcacccacctgagctcacatgctgacctgcccccctcctcagcactcaccgtgtgttcctcaggggcctgcgctgcccactgctgccgcctttcctgtctagggctctgtgaggactttattcaccctctcagctatttagagcagaatagtgttctcaaaggtctgccttttgttcctcctttcctgaggctgccccagcaagattctgcaaaacattcacaggagtccccctcatacctgtaccacctagaatgtgttcacaggccaaggagtctcccagttcctccaaggccttgtctgtcctgtagaggtgtgtttgttttgtgcttaaaaagtatcatacaaagctgggcgtggtggcacacgcctttaatcccagcacttgggaggcagaggcaggcggatttctgagttcgaggccagcctggtctacaaagtgagttccaggacagccagggccatacagagaaaccctgtctctgtacaaacaaacaaaaaaaagcatcatacatttaggtgaccctctgcctggccagggaccacctgcctgcttccccacactataaagagggacagacagaacaagcttgggagcagatgtggtcatgactggcatgtcaggacctggtatgattttgaccacagggagacttcatcctggccagtggggaaggcacacaggctcctagtgtgtgcatacagagcagagtgaggcagacacattcctgagacaggatgctcatttggagttgaggtgcagtagacggggagggaactggaggaccagtcttcttagcatccaagtgctgtgtcctgctgatggggctgga

SEQ ID NO: 26528 - DNA, 3162 bp, Mus musculus
ctagcctctttctgtgccatgaggccaccgcagcctgacaccgcccctgtgcccacccagccttcctcatctccacaaagccagccgcccttgagcctccaggccctggttctcttcccccctgccctgcatccacctgccgcctgaagccactggttccaatcgtcaacaacctccgcttgtccaaaacaacgacaaaccgaaacggaaaggctccagccctctgcaaaactgagcgcccggctgtctccctcggcagccaccccattcttcctgctgtccggcctgtgtgctttctttttttatttcaaacggacattgtaaaagaaaacaaactaccttctgttctaaaggatactgaccattgggagaaggcctctgtctcagagaactcagtctctgcctggtcccctgaagtggtggtgaccagggccagtgaggctgctggcagcaagggtgttagtggcagtggctcacgtgataacagtattgtgcgttttgtggagaaactgagggttttttttatactcatatataatcgaaccttttatttattggttgttaactcttgctgctaccttgtgtgtctgaaactcccaggatgctgggcctccgtttacatgtgcacaccctcatccacctgcctgcctcacttgggaggatggtggcctgcagcggccaagaagccaaaaatcttttcctcttttttttttctcagatactgtgccccatttttggagaggggaaggtgggcattgctaaatggctaatgtactgttcccccagcttctgccctggagtccccacccctcgcctctgctctccttggaatccataacactttttttcaaaaacaaacttgaggttttttttttttttttttttttttaattttgcaactttaaatttgatgttaacagcagaaagaaaatggagagccttgttctgagagtaggagctaggagagtgtgtccggcacacagtagagagcgtatgaagtgggtttccctgcaaactgctggcctcagcctccctgatgctaagaggctgggtaggtgtggcatgtgaatccctctgctctcctgccctgactgctttttgcagtagtcttcttccctaccaggagtctgagaaagaaggggtaggaggataacaccaggccctgttggtcctcaggactgggtccagagccagagagatggctccatacttgtcaccaggaggagcgggcaaccatggcttctctgggactttgtagtctttcccttctcgatcagcagggctggaaggcctggtggttggctttgttgatcttgtgtgattcttagcccagagctagggttcctgtgtttgtgacactgttctatggctgggttttctagtctggagggcacaggatcgtatgaatgacagtacaaccctcatatagtctctgggcacagccttggttgccggagtgtgtggtctgcctcagaggctgactgtgtctgatggcaccccctttagcccctctttaggatttcccagactcttgagtccctttgggctcatcctcaccctggggagctttccggggtgagcctctcagctgcagaggcagacctaagctcacagttcttgcttctagtttgtgtaacctctctgcccaccattgagagggggaaattggttcccggatttttcttctgctctgactctcctgtaatctccagcatacttctgggagaccaaaatcttccttgctaatgacctgtggatgagcagctgtcccctggaggattgatgtcccccatcaataggtggctttggctgcctgtccatccctgtggtgggaatgcttagctagtccatgcacactccctcttcctgggtagaccctttgctcatgctgtgcccattgctagcccaccagatcccacagggaaattttctttgagacctctttgggtcatcttcctgcttgatccctgacatgtcctagagagtagatgtggtgtcataggttgagaggccctctctctggtctctggagactcagctgtccctctgtcagtggacatttttggtggcatcaagacccagtgattccaagctgaggagaggctcctcagctaaggtgttcacttttttctgtgggtccaggcttcctctcaggatctcggctttttggtttgtagccttcagtgtggcttttggtcttcacagtttatgtccttgggtccaagcctcggactttgagacagccctgggctgccttttcctggcagggtgtgggacactgtttttgttcaaggacgcgtgctgactgatgtctgtctctctttcaccagcagttagctgaggcacacagcacgcccagaatctgaggccaggcctcttctgtgcagcctgaggacctctccaagttcatttccacagaggccccaccccatctgatgctgctttctttaggggtgtggtccagccagtgaggccaggcccctggtacctcggcagaccctcctttctagggccaggaatgctgtgaccccctcttcccagcatctgctgcccaccttgtgtcgacggtgacttgggagcctatcacgacttttcagtatctagccaggtttaaaataacaaggcaaatgtatgcagcattgacatctctttctttaaatggtctacagtttgacaggccatttcctaggaagctgtgtttcctttgcactttgggggaccttgtctcttctaggagatagtggggtgtgcagtccctggggatccctggcatctctcctgagaaagcccccactgctggccaagcagaaagcctccaagattctttccagtgtgtttctgcatttacatgatctaaagatgcatggggacgccccctggtggtgatgagccgcagtggcacccggggatgcagtggtccagccagaggtgaggctagaggtgggaaggccaaggtgggggctgtgatttccgaggtcctgggcccccagccctacatatctggcagcatgcctcccacccacacctctgctaggtcagctgggactggcaaggtagttggcataagggcacagtgggaagctttgccctcccaactttaattttttaaaaaaatatctgcagaataaatccaatggttaatttttgaatgaataaaaggct

SEQ ID NO: 26529 - DNA, 1184 bp, Mus musculus
gtctagaggggggtccctgtgctatgaaggcacatagtcctagctctccacgtggcctccctccaagcagccttcagttctgggatggcaaataggccctcggagtagcttaatgctacttccccatccagggtctagagcagacatcactaatcgagccgtggcacttacagtccttcacagtctcagaatctgtagtcgtgatgtcaggcctgtgatttagaaactccaacctagctagtgcagctgaaggccacaggacaaagccaaaaccaaaagtcagttcttggctctcatagcagaagtccgggagacggaagccttcaggcatggctggatctgggcacctgcctgccctgcttggtctccaattggctttattcttgaccttttcacagtcagcaagatcaaagcccagctgtctcaggctcactagctggtagtgaagcctaaggctcctcccactggcagaggttcctctctatgcctgcacctggggtacatagggggaggggagggcgtaatgagctcccaccaccacccctagggagaggatcctcccaggggagaaggtctgaggaaaggactctgttgctttggatagtgatgttggcctagggccaggaggggtctctgtgtgtagtctgctgcctttgttacctgctacaaagactgggagggggaggggaggggatggaattcacctggtgagtgtcagaggtgtgtgtgtgtgtgtgtgtgtgtgtgtgtgtgtgtgtgttagcactacagtccccagagttgccagctggcaggttgacagctgagcaatctcagacaggtagagctgggccttgggaagaaccaggatacgaagagcagcctgtgggtaccggtagggacccggcaacgggcccaagtccacaggcagaataggtttagcaccttctacccacctgtcttagtcagggtttctattcctgcacaaacatcatgaccaagaagcaagttggggaggaaagggtttattcggcttacacttccatactgctgttcatcaccaaggaagtcaggactggaactcaagcaggtcaggaagcaggagctgatgcagaggccatggagggatgttctttactggcttgcctctcctggcttgctcagcctgctttcttatagaaccaagactaccagccctgagatgg

SEQ ID NO: 26530 - DNA, 1205 bp, Mus musculus
agatggcttctctgtctggcaatgtgccttaggttcccggcagccaccccaggtctgcagagacctctctgcagccacagcccccaggcccctccacctcctgcctcctgcttcgcctgtggcttataaccccataaaccttttgaaatggcccagaacataatggcctcttcatttctcctattgcctgttaaatgctttatcttcaacaatgacaaacaatgttttcccctctgataaattaattacattatcctgattggaggagccaggggaggctagggcaggagaggggactgaagaaaaagacaacttcacatacatcttaacaaacagctgcccccaccgcccccatcctgcctgaattaattgaacggagcgcatgttgttattgtgaaattacatttttctttgttttccatctggtttacaggctgaaggagtaccatcgccttcagagcaaggtcactgccaaatagaccctgacaaagaggagcgggcctccccactctgcagctctcccaggcttcagcattaattgttgtgataaatttgtaattgtagcttgttctccaccacctgactggggctgctgtgtccccccccgcccccccacagcctttgttccctggtcccctatagcctacaaaagtggtcatccaagggaagggagggtggcgggcagctgcagaaagcataaaatgacaattaaaagaagttacattagtcttttatttgtctctgcgtgtgtgcctgtgtgctcatgcctagcccaaccttgttgtcttcctttaaacagtgtattatgccatacatgtatatatgtacatgtatacatataaataaaatggggtgcacatgtatattatatatgttatatataatatatataaacataatgtacacatataaatataatagggtgcacatgtatatgtatgtttatacataataccatatataatattatataccacgcatatatataatagggggtgctcacctggtgctgcactacaagccattatgaagccatcagacatgggcactgagaacctaacttgatcatttgtaagagcagcaaacactcttaagctcctaatgggtgacccgtctctccgaatgcccccagctcctttatttttgaagtgtggtggaagttcatctttgccaaagaacctgcttatctggcagggggatcctcc

SEQ ID NO: 26531 - DNA, 1145 bp, Mus musculus
acacatgtacatacatatacacacacatatatatatatatacatatatacacacacacatatacatacatactcttcatgtacatatgcacaccagaagagggcacaggatatagatgactatagttttagatcactgtgagccaccatgtagatgctaagagttgaactcaggacctccagaagagcagccagtgctcttaacagtaagccatctctccagccagaatgcatggtttttgtttgtttttaggcagggtatatagccctggctagcctggaactcactatgtagagtaggctgacctcaaacttagagatccacctgcctcagcttccccagtgctaggattgaaggcatgagatttattgatatattgatttcattttttttaaaaaagaataattggattctcagtataagggacaacacttttgagagtgaaatttctcatctgtgtaaaaaactgttcatgagctatgaagatagttgagcacctgatgacctgaggtcaatccatacaaggagagacctgactcccacagattgtcctctgagctccacagtgcatctgtgcacaaacacacaaacacaaaatacattaaaaattaaaaaaaaaacaacttagtgatcttatataaaagtccacctcaaggttgtccaaattcaggtaaccatttttaaattgctgctgctgctaagtgcaccttatggcctccctgtttttgttgagtgatttctttagacctaggatgggtaagtgtgttaagggcagttctgcccaagtgaagagtgactcagagaaacctctttccctttccagggctttgcactttgttcctgtgggatgtcgatataaaataaaatggagttgtctggctctaagcacagagcttcttaatggatggtatctctctggtccagtgttcccagaaatcacgatcaatcatgttacagcttactgggttctgtctagcaattcagcctgtgaaaataaagtgtgaagagagggcagtggtgtcttttgcatagggaatccctaaacatttgctagtgaaaccctctggcaccttgaagatgcttttctcttgtctgaaagaaatcagtaaacgttttaaatttatcaataaaaagcactgagtagc

SEQ ID NO: 26532 - DNA, 1153 bp, Mus musculus
agtcctcaagcagtgttgctggcaacacggagacgttggaattgagaggctgaagcgtggctactaacccttgctttctccgtctctctcatcgctccttctcccccaccctcgctaacaagtgtgctgagtgtctcctgtgagggttgtgctagatgggggaacagaggtggacaaaggacaaaagagctgcattgaaggaggcagggctctgaggatgcaggcaggtgcagagggcagacatgaggggtggggtctgacagtggctagcttctgagactccaggggaaactatgctgtgctgtgctgtgctgtgctctgctgtgtgttacctttgaattgcagtactgtagcgtggcgaatggttgagacctcccaggttatgaggcaggagcaggagctggcgctggatggagggctgccttgactcctttgtgttttccctggtacctagaacgtcttaaacaaccatttaatgctgggtctcttgtgatttttctccctcccaaagacaagccaaacggctcctggggcagatcgtggatcgatgtcggaatgggcctggctttcacaacgatatggatggcaacagcacaatccaggaacttcttatccctgcatctaaagtggggctggtcatcggcaaaggaggggaaacgatcaagcagttgcaggtgatttgagaaccgtttggtgctgcgctgggctgcccttgcacactcaagagccgaggctcccttacagacctctcttcgaatgccacaggagtcctccttttttttgttttgtttttgttttttggttttggtctttcaagacagggtttctctgtgtagccctggctgtcctggaactcactctgtagaccaggctggcctcgaactcagaaatctgcctgcctctgcctcccaagtgatgggattaaaggcgtgtgccaccacgcctggcaagagtctttcttttgacaggcatgtgctgatgctaagtgtgtgaggcaggagagataccatgggacagtttaagagtcagcgctcctgaaatctgcttcttgttaataatgacccatgctcttaaatatgctcatttagacagactagggatatatacctggaacttcacccctgggctgaggacaggaggatcaggggttcaa

SEQ ID NO: 26533 - DNA, 1146 bp, Mus musculus
gacagtagtggagttgtggggcctcatgaggtgttcatgaggaactaggttcagagtttgagaaggctttggcttccaaccctgcctcctaaagaccctggttgaagccaacttcacgggggctgaagtgagccatggtgggagttgatgagcaaggcctgactgctgtctgttttctgcacaggccagcagagtcagccacagaacagccagcccgactacagcaaggcctgggaggactattacaaaaagcagagtgagtgcagccatcatgcgctgtccagggtcacccgtaccctctctggggctgtgtctaggtgcccatcttgtctctccatatgtcctgtcagaggaagccagatgtggccagtgcctacggggtgtgttgtcctcagtctttgggggccatgtcagggcaggcaagaggtcacagtgcagagattggggctaccacttcactggctgctggtacctgtctttcctttggagtccatttctccttatactaccaggaaccagatcaggcctgagggtgatcgtcattagcgaagggcctgggcatgttgcagtctaagccatttttgggtctagtgtaggattgcacggcaacatcttacacctagaaccattatgtgctgattggaaggcccagggtaaagctgcttggccttgggggccaaaaacatctctgggctgcactggtgactgatgggctggtgtcaggtgtctcctcactggggcttggggcctatttaacacccacccaccctcacccagccctacctgaaagctgccctgcactggctctcccagctctgcctgtgcccagggctgttgcaggcagtcagggcagtgtagtcctatagaagtgtagcatctaggtgggctttggctgaggctggtaaggcctgagagaagggacctcccaccccctccccttctttaactcctgtctgttctttgtcctccaggtcatcccaccagtgctgccccacaggccagctcccccccagactacacgatggcctgggctgagtactacaggcagcaggccgccttctatgggcagactttagggcaggctcaggcccacagccaggtctgtagccagtccccagcgccatgatgccacgcagcctttgtgct

SEQ ID NO: 26534 - DNA, 1704 bp, Mus musculus
gatgggcatctgccgcggctcttccccgaaatcagtgtgagagaaacctgtttgttacagagatttttagatttgcaaaccttttgatgaagacctttgttttgttctgtgaaacactatatttagattaacagaaattttctaaaaattgggaaaattagttactaaacattgctggtaatttttacgtcatgatttctttgtaaatgtgtgagctccggggctcttggagcgaaacctgcaagctcgggtgcccaagctctcctcggagcctggcatttcatcacacgatggctttgtcttgtgtctttttagttacagtttggggtgggtttgttgttgttgttgttgttgttgttgttgggtttttggttttggtttttgttttcccttttttttttttttttttctgttacaacagaaaaaatggcttggaagtcttaggtggtaatgtaacaaattctttaaaaatttttgaagcagtatttaaatattcgtaaatgtaaattcattgtgtttcacctctaatttcttgtatcttggctgtctggttttattgcattttttaaaaaaaactgaactattatgtattgtaattaatgatgtgaattttgaactgagacgggtccttgtgttgcgggagggtcatttgtgggttatgtcatttctagcgttttgatggtgatgcagagacgcggtctgccttcgtgtaagctgctcgtctccattatccagggcagttgtgtgtctaagacctccaagctggttttaaaaacaaaaagcctttctctattctcagaaatataaatactgttatttttaatattaaaaagaaattcaatataacttttaacaaacactgtggacattaaaccatataaaaaaatgtagtaactattttttaattccagggtgtttttgctttttttccttaaatattttcttaatatttgtcaaattaactagataaataaataaatctagtattaacaacagtatgagttaaataattttgatttaataaaagggatactatgatttccaatgtttactgtagtgtatctgtacagataacatgtatttttaaaggaaacacggagttgaagctattttttcctgcattttggattgacctgaggaacattccgtttgaaacgtgctcgttacggtttgccgttcttgttttccttatgatgcttgaaatgtctaactattaaaaaggcattggaaatgttatgcatgttgttttttaaagatgttctttttatttgactgacaattcattttacactctatataataaaatttccacaagatgtcttgtgggcaaagtgttcttagtctgttttgtttgctggcccctgtctcttgccctgcctagctgataatggctctgcatcagcccaactctttgatatacacagcctctggggacttctgaagtaaagttcgttttatgtggcagctttacacttgaccctttgacttaaggccacactaaggaccggccttcacagtgacagcatctgagcgagaacagtcctgcttggtcctgagaaaggtgtggtccctgaggaagccaatgggtcagcaccccactgagctgagaccctccccaccccccactctgaggtggcatgttctcacctaaaagcacaccagccctgccctgtgtgtgcgcgcgcctaggcggtctccctgcct

SEQ ID NO: 26535 - DNA, 1099 bp, Mus musculus
gccatgagaggcttcttgcaggaaggcgacctcatcagtgtatcctgcacctcattctctctcccccacagggctgcgagcgtgtcggactctgtctggccaggggaacagaaccttgtgggactgagtccagggtaccatgttcagggctctgctgccctacactcattttccttagctcagaacgatgctctgggttttgtaacttgtgattcatggtgaagatccaatggtctttcctttcttattataaagggtagcccaggctgtcttggaactcactgtgtaccccaggctggcctcaaatacacgcattcttatttcagcttcctgagtgctgagatgtcaggcataggccatcattcttgcccatggacctgcctgtgtccaaattaagaaaatgtggacccaaattttctttgtttgttttaaaaaatatttgatcatatttgtttgtgcaattgctgtgtgtggaggtcataggacaacgtgcaagagttggttctcttcttttaccttggtctgagggatagaactcagcttgacagacttgatggcaggtgtccacctcaccagcccgcagatgatatgaccatgtatccatgaaaaggttggttgtagcaagatactcttgccaaccaaccagggggaagctgaggtcatagtgatatctcccatagagggccatcaaagatggccagagtgacctgctggtgatggtggtgggggagaagctggctgcaggtaggtggcacaagggagggttgccaaggctactgttgttccttcatcacatgagtaggcggaggtccaggctgtgttctcggatggagctgtttctctgcacacgaggagcctgaaatatgggaaggtaagacaggctatgaggctttaagttcagttctgaatccgagtagctccctgcatgctgacctaaagacctggtagttagctgggtgtggggtcatgagcctataatctcagctccctggaggcagaaggaggtgattaaaactggaagccagcatggttatatagagagactgcctcttcctgcatgaccccctgcccccaacctccaatctaagaacaaaaagca

SEQ ID NO: 26536 - DNA, 1399 bp, Mus musculus
aggagggatgaggccgagagctgaaggatgggactgggcaccccctgggccagttttgggagtgaaaactctgccatgtggtccccaaggagcatctgacaaacacattcctcacctgcagtggggctgcagagccaggcctgtctttctgttctgagagaaaactagggggaggtaatggtgggttgggctcttgggtcccagtagttttaggtctttcagagcacagtgtcccggcctgatgctgacttaccttggaataacttggagaatttatgacttccaatcaccccacacaatgtaatgccccatgaaactgtcctggtagaaaacatggtgacctggggatgtatctcaggagtggaccacttcctaaaatgtgcaagttcccaagttccatttccagccttaccctaaccccagaaaaaagaaaaccaaagacaaagacatggcagtgccatcgagaatggtctctttccacttccgctctgtctcctttaatgcacaagtgtgtggttggagagaaggtggtggagtcaggccagagtcaagtggatatgagaataaagggagggctggtgagatggctcagtgggtaagagcacccgactgctcttccgaaggtcaggagttcaaatcccagcaaccacatggtggctcacaaccatccgttacgagatctggcgccctcttctggagtgtctgaagacagcttcagtgtacttacatataataaataaatctttaaaaaaaaaaaaaaaaaaaagagaataaagggaggtagcagcctttgttggagtctcaccgcgtgttccgtctgctgacaggttcgagggatccataccctctacctgggcttccttccccttgtgtgtgagctgtttctttagcatctcaggtcctccttcagcatgtccaccagcaggaactggctggccttttgtgtttttcccgcctgtgagagtggtttgtaaaaagctgagccactggtgatgacggagaataaatattctgggcaaatagtggtttctgatgctctgataagaaaacagaaaaaaacgagccaggcgtggtggcacatgccagcactggggaggcagaggcaggcggatttctgagttcgaggccaacctggtctacaaagtgagttccaggacagccaggactatacagagaaacccttgtctcgagaaaaaaaacaaaagaaaaaaaaggaaggaaaaaaaaaaagagagagagaaaacagaaaaacgagttgggaaaagccaagttctgtgtaattgaaatggtgatgtattaacttttcaatagtgattcaaaggggacaggatacaagtccttggcatagagtgcaggtttccatgcttgctttccttctgacagtttaaaatggcctcgc

SEQ ID NO: 26537 - DNA, 1109 bp, Mus musculus
agctgttctgaagcctgatgttcctctactcagttctttagcaggagttgctcatttgggagttgttaccttgtgaaaattttctgtggtctgaggggttgatgcatgatgccctgtcttactaagttgtcagactgacctagaattcttcatgtggctcaaggtgctgtcaaaatttttaattactctgtgtgtgttcgcgtgtgcctgtgaatgtgcgtgagagagagacataggcagagagagacacacagagagacacacacagagaagagtatgtgtgtacacatcagtgtgtatgtgtggaggtcagaggacagcctgcaagagtaggaccatttgggttgtcaggcttggtggcaagtgcctttactgactggcctgccaggctatttttgaactcaggattctcccactcagccctcagagtactgggattataaatttatgccaccctaattcaagtacagggtgattcttgtatgttcatatgatgaaccatgtcatttcctctggacttgaacgttttccaagatgctatgaaggcagctctgtatttacaaactatactttttttgggtggggaggtgttccctagttttggtgaggaggcccacggcttctagctcagcaacttttcagtgggctttgatgtgggtgcacaggccgtggggttatgctgcagtgaacactggagcagcctagggtactctgctgctgttgagccctcccttgtagactactataaggaactgggatcacggttacaactgcacgagtaagtggtgggctgggtgacttgctctcttttgggtcattcgctatctttctcttagaaccttctctgtgatcttttttgattgttcatttggtttgtttttttgagacaggtcttactatgtagccctggctgtcctggaacttagtgtgcagaacaggctgaccttgtactcaagagagtcacttgcctctgactcctgaatggcttgattaaaggcatgtgccatgattcatttaaaaaataatttaaaaattattttatgagtatgagtgttttgcctgaaaattatatacatctgtaagtgcctagtagttcctgcgtaggccag

SEQ ID NO: 26538 - DNA, 1145 bp, Mus musculus
ccccaggtcctaacactggaagctgctcagctcattcccttaaagcctttaggtgtgcctccccttccagacacaggacttcagtctaagccctcataaataaatgaacagccaagtttcattgaaaattctagaagaaggagtaaagtagatgcacagaaaacgggaactcagtgggactagaggacaacaagaggagctggaaaggacagctcttctgatcctcaggaacagcacagcatcaaacagcacgtgctactgacagcaggagaaagaacactttgttgttgttgttgttaatctgttgtttgtatagcagagtcttaagtggcccaggtaaaccttgaactcactatgtagctaagcctggccctgaagtcctatgaatcagtattttactaatgaaaaacattgcctgggcagtgatggcccatgcctttaatcctagcacttgggaggcagaggcaggtggatctttgtgggaattaaaaaggggccaggggaagagtagggagggaagatatcccatgtccggccaaagttctacctatgctctggacaggtggacgctgggagggctgccagatactttccactcagccccaggcgggcatccgagcctctgacccactcaatggggggtggacaaggggcagcccccaaaaccaaaaggggccccgggaatacaccctggagccccagggttatgggagagagggcatagggaagagaggttcccacacaggcgagagtgagcgcagcagaccttgactggagcacaggaacgccttccatcgggagattagaaacagctcattagaagaaagcctatcccatcctccaagcgcagtgggccttgatgaacagacactgtctatggttttagagctttattatagaaaggcagggggaaagagaaaatgtaaaagagagagagagagagagagagagagaccagccatggccaagaggagaggagggggaaaaggagagagagagagaaggcaggctagggaataagaggtagagagaggaagagagaggagaggagaagacaaagagaggagtgagagagtgaggaggggccaaggagccccttttaaagtatgctgctatcttttctgttgctaggtaactggggagga

SEQ ID NO: 26539 - DNA, 1139 bp, Mus musculus
ggccagcctagaacagagcaattctaggtgaagaaaaatttaaatccaggtttggtggtccatacctttaatccctatgcttagaagtcaggcatgcagatctctgaattcaaagtcattctacagagcaagttccaggactgcgaagcttaggcagtgaaggagctggaaagagaaagctggtggagatgtaatagaataaggggaacatgttccagccccagcaagcagcagaactcggcagctttggccacgtagttctggctttagggtgaaaaatagaagggactgctgggacattgatgctggttagctggagctaagaaattagtggtgattaggaagagaccagcatgactgaggtgaaatcttctgggaagtgttttttgagagcacagagaagctccagagacagccaaggctgtaccttgcactgtagctgtacttggaaatgagtaagagtcacccaggtggtactggttttgaagacatgaagggttatgaagagcagctgagtcttggcactgtgagaggtcatagaagaccattggtgaaggtgctgccacagttacagttggtggcccaggaccgaagggatcatgcaaaggagtcgaggcttggcaccatgaagagagcctatgagaggctattgcagcggaagcctcattgtagcggaagactccagggtattggaaatgccagtaccatgggatggtcaccaagaacagccatagcagtggtggatcaacctgagcttagagtgctgcagaaggcagagctggagaagtgatgccagccctctggaggaacccagatcatgtgtggatcccagacattgaaacaaaaagctgtaacattgaagttgccttggagaccccccaagatgttcgagatgccagagccatggggtatctgctgagaaaagctgctaacagggagtggaaacagcccaggagaaagaagttgttgcagtcaacaaagatgaaaaaggagttggagatctgaagactgcgttgacatcagccatagagatgcagagttttgagtttgcccagctggtttcctgtcttgctttggggattacagttaagtgattggatgagtctcagaagagactttgaactttggacttttaacgt

SEQ ID NO: 26540 - DNA, 1167 bp, Mus musculus
gcctgggccagtggagcagctaatccctggggaaagaagtgtttcatttctgagccacttcggatttagttgaatattaaatgaaattcgtaaaaggccttcttcctgatagtcttggttccctctgaaaccgagcattcctgaggccagcactcactcggtaaagcctctctctgcctgggcttagcttcattgtgtggcttttcctccttttctttgtgtttccttgcctaccagctgtcaccgggtttagggatgtttccatggctggagaattatatacatgcaagccggttgctgtttttaaaacccagagtgttttgaccttcaagtgtgccacaattatctgggtttgcatgctttgctggtggaagtggcttcctagcagagtgacaacctgtgcaggagggagcctgatgggcttggcccaactccgtcatgcaagatgttctccacgccactgtggtgacctttcctacccaattaactcaagtgtgaaacctcaacatgagatttcatagccaggaataagtagcgtgtatgaaatgctggcagcccctcggaagacagatctttttctgctccacgagagcccaatccaaatgctcctgtcgctcagcaaagtgtagcctctgatgctgcaaattgagatttcctgacttctggctcgccttgcatggccagctccgttccccctccattcacatactaaaaatgccttaccaaaaatcctattaggcacaactcttgtgtgtttaatttttctctcattgctggtgatcaagctgtatcacgcagtcgttgccctgagctgcctcatactctcattccttggttcccagttacctcaggacttcatggttaacagccatgaaccaaagattagacccttcctcccgtgaagattcaggaggtgattatatgggagagtttctcaaacacttgagtcaacatcaggaagcaagaagaaagtagggatatcacatacagctgcccaaggcacaccctgttactgtcgtcattttatatgtgaggtaattaacaactccaggtcatgggacaggacctgcccccattgccaccctgtctgcttgtggtgttgctgctgtagcccgactggtatttgctgaggaactgttgctccacagcagggtatttgaaagcttc

SEQ ID NO: 26541 - DNA, 1112 bp, Mus musculus
ccctgtccttgcagaacgacctcctctgatggaccttcttgtcaccaaggcatgggagcccctgtgcttactgtacctgcacctttgatgcttacaaactgtccccgagagcctgtgctcactgtgttttcattggaaggaagctgtcgctttaagggtcatgaggtgctaaagccaggggcccagatgggtgggcactggaaacaggagctgggcagtgtggtctgtcacctgctctcagtatcttcagcagtgtgcccggcagatcttggacagcaagcttgagttttatgggtggcagtcactggctggctaggcacatagccaggccaaacctaggcctccaagggctccccaaaatctgaatttctgagtagtcttcatcccctctcctgctctaaggtcaggtccatcctctctggtccttaccttgatgacaaggatccagccttctggtgtttttgagcatttcaaaggtctgcatagaaaggaacagccactaggtacaaacaggcaggaatctgggctctcctgagccctgactgcttctcagaactgctgcttaaccactgagaacagtgctcagcccagagctcctgagagccatgcacatcacgctggggttgggtgtcccttgcagactcagccaggggggccatatcttcctcctaaggcaggcaggaccagagctgagcacaggcacaggtgtgggcgactccttgactaacccagagccgccagcctaggcctcgtgccaggctgacccaaaacagggcgcatgcctaggccttgtaccaggctggaagacacctccacactccctgcttctccactgcaggtgtgctgtgctggccccaggcccacactgatcacctagatgcgggcctggtagagatgatttcctctggatggtcttccatggtcctcgtagcacctcacctcgttacctccaaaggctgctctgcagcccaagggaggctgtgccacactgccagcgaccttgaatagccagacaccgccatcccctgacactgtgctcacaaggcccctgctctgttgctgccgtgggtgccactatattttgtattacactttgatattacactcttttt

SEQ ID NO: 26542 - DNA, 1138 bp, Mus musculus
caagctgcttgactctagcagcaggagacaccagggagtgacttccactagggggcagcaggagacactggggagtgacttccactggggagagacttccactgtggggtgggggtggtgggactgggatcttggttcacacagcaaaagacaactttagaatgaattgttactatttatttacacctttgtatgtagtgtgtgtgtttgaacatgggtgtttgtgtgtgggtggtatgtgttaggacaatgtacaggaatctgttctcttctaccatgtaggttctggggtttggggatcaagcaggttgtcaatcttggtggcagataccttcacctactgagatgtcatttcagccgtgggccccttcctttcttccctcccccttcctttcctccctcctcccctccctcttttcctttttttttttttttgagacaagttcttgctatgtagttgtgtctggcctgcaattcatggagacccacctgcctgtagatgtgccttccgacattgccccctcctctgaatgtctgtgtttgaatccaggttaaaaccttttaatacactccaaattcagttcattaaaaataaaaagggtgacttagtgatcaagggggcttgctgctctggcagacaacctagattcattttctcgcaccccacgtggtggctcacaacccccagtgactagttccaaaggatctattgctctcttctggactccgagggcactatgcacatagcgcacataaaaaccctcatacacacaaaaataaatacatctttaaacaatttttagcttggtggtggtagtgtgtgtcttaagtgcactcgggaggcagaggaaagcagatctcttgagttcaaggccagcctggtctacagagtgagttccaggacagccagggctacacagagaaaccctgtcttgacaaacaaaagggaagaaagaaagaaagagagagagagagagagagagagagagagagagagagagagagagagagagagagagaaggaaggaaggaaggaaggaaggaaggaaggaaggaaggaaggaaggaaggaaggaagaatatgggagggctggagagatggctcagtaattaaaagtgtgtactgctcttacagagg

SEQ ID NO: 26543 - DNA, 1122 bp, Mus musculus
ctgtccatgtttcagctttcttcctctttaaggagagatccttttgtgtctgttgggtgatgattatgtatatttttttagtatatatattgaaaagtgaaatctctaggtcttttgtattgtttttgatgctgaagatttaatctgtgccatagacacacaaggattctgtcatgttatgtttttagcccttccttggttttctgaggtaggatcttgccccaggatatttcagtttgtccgtgaacttaaaattagtttgcctctgcctcccaactgctgggactctatgcatgttctgctgtgcccaggtgatgtgcccttccttctttgatgagctttatagaaagcttgtgtctcaggaaggttgtgccagggttcctattcaccactgccagggctccctgctcaggctttagtgtgtgtgtccacatttacaccgagccagtatgtgaggaggtgtctcgacggttttcttttcttttccttttcttttctttccctttccctttctgtctgtctgtctgtctgtctgtctgtcttttttggagacaggatcatctcatactgaactgggaatcactttgtagtgcaagatggccttaaattttcaacaatcctgcttcagcctcccaggtgctaggattataagaattatataggattataagactgttgtagtaactcttgggtgtctgctgaggttcagtttaaaattacatttatcgagatgtcttctcataatcttagtaagtcttttcgatgggagtacaaaagtactggctaactcctgatggatgctttctgtggtggaccaagaatggtcagtcagtgaaggattcttcacagcccctcagataggctctgaggaaggtgagaaaaccatgtgacatacaggctgagtgagtcacccctgtgtgtcctagagcagaacatgacagaatacagttcctattcagttgactggtggttgggtttctgttccttatgttacccagtgcaccttcagagctcatccctatgtgtgtgcacagacttttgtatccagtttctggtgacacttgagcgatttttgccttgagattatgagctatgtagaggccaaagaagctgcacatatga

SEQ ID NO: 26544 - DNA, 1236 bp, Mus musculus
tgggctatgaggattacccatacattagctgataccaagagtaggagggaagcccttacccagggcactgtgttgagagcagtctctttggggacaatgtgtccattccatgtctccgagatgtcacacgtttgttgtgatgtggtgatcataaacagaatcttcattccttcccacttgagagctgactctgggagtgctaatgttcctgtgcagagcaagcggtcatcctgccctttcacaagaactctgccattagaaccatacgtttcgtccctgactgaagagaaagattgcctgagaagggcaatcagtacaaatgtgatgaattctattttgctaaatccaactcttttcctggtttctttttcttgctaggggcaggaccccctactaaagagccaacccagcttgaggcattctcatttggcgggggaggcaaacctttctctgaggccattcctgggaactcccctgccacaggagcaacatcggcacccagcacttctgtaacagctgcctctctggaagactctgctccatccagcagcaaacctgcagctcctcctgaaactactgtgtcctctgcttctagcaaattggaaactccaccgtccaagttaggagagcttctgttcccaagctctctagctggagagacgctggggagcttctcgggcctgcgtgttggccaagctgaggattctactaagccagttagtaaggcctcctccacaaacctagctggagcccagccagctaagccctcaggggttagctttcctaatacttcagtgttagggaagccagtggagcccgctgtgacctcctctgtgagccccgccccagcagcaccagcctcagctctgaatgtgagcactagcagttcctcagcaactgtctttggcagtgtgccccttaccagtgctggacctcctgggctcatcagttttggtggggctgctttggctagtagcaaagctagtttctcatttggaaaccagcagactagtagtagtacagcatcatcagctaccccaacatcgacctcagttgccccttcccttccagcatctttccctactttgtcatttggtggcctcctgagttcaccatcagcttcttccctgcccgtgtcctctggtaagagtacagaggaggcagcaccaccagctgttcctgacaagtcagacagcagtgaagtttcagcaacaacaccctcacttccagtacagc

SEQ ID NO: 26545 - DNA, 1193 bp, Mus musculus
ggtcagaacatggagctggataccttggaaatggagttacagatagttgtgagctgctacatgggtgtgggaatcgaacctaggtcctgaaagagcagccgttgtttttctttttttaagtttatttattttattttatgtatatgagtacactgtagctatacagatggttgtgagccatcatgtggttgctgggaattgaatttaggacctctgctcgctctgggcggcccctcttgttctggcccaaagatttatttattattataaatacaccatagctatcttcagacacaccagaagagggcgtcagatctcattacagatggttgtgagccaccatgtggttgtaggatttgaactcaggaccttcagaagagcagttagtgctctgaaccgctgagccagctctcctgctccatgaaacacattgttaaattctgtcacctgcctgtctgcagtctgtcactgcctgcaatgctggtcttattggtgggagactggagtgagggttttgggagggggcaggatggtcctctggaaagggagccgagcctctagcaatctgtcctcctcgggagtgggcagtactgtttgcccttggatggatggcctgttttgaatagttccctgcctgaggaggtgacgctgatcttggagtggctgacccagattagaaagtgaccctgaggtgcagtggcttttagattcatgctgtgtttctttctaaaaccctggcttgacaactgagtcctaggttactagttcttagcatcttttccttagaatttggtaaaaggtactagaaataggcattgcaacttcgtttgggggctacatacagaataattaaaaaatgaaaaggacacagcttttagctctaatacaaggacaagtttggagctggtggtactgacagtcagcatggccacttggcaacctttctttttttttttttcttttttctttttcaaggcagggtttctctgtatagcactggctgtcctggaactcactttgtagaccaggctggcctcgaactcagaaatccgcctgcctctgcctccccagtgctgggattaaaggtgtgcaccaccacgcccggcttctttttttggggaggggggtgcaacctttcttaaaaaacaaactgggtggctcctgatcagtggcctcccacacagctcatgaca

SEQ ID NO: 26546 - DNA, 1959 bp, Mus musculus
gccacaagtggttgtaaccactgagccatctccccagtgccttttcccgacctttaatagttggttgcttgacataggtatgtctgtgttggggttttactgtctgaagtcacagcatgtcctctgagttcacatgtattttttttttaatctttcttgtgtaatgtcctggcttatttgtggcattttcttctgcaggctgtggttttgattttgtttagttttagatgggttttgcttttcttttgtgtgtacatggtggtggtgctggcggcggcggtggtgggggcggcggcagcggcagcggcggctaaagaagtccagaggacagtcgctaggtgtcctggagctggagttacacggtggctgtgaactgcgtgttgtgggtgctgggaaccagattctggtcttacctgctgagttctctctccagaacacctccccttttttctggtttatgagaaaggcaggtacccccgggaacccccaacgcccctctttgcctactgagtttaggatggcaggtgtgagtaacataccaggttgtttaaattctctattttaaaatctttttttgggttggttggtttgttgaaaggaggtatctgtccgtgacatgagactcactatgtaaaccaggctggtcttgaacttggagtgggtccctctgcttttcaaagggcctgagttcttcatcgatttgagggtttgaggagctagaggtggaactcagtggttgagggcttgtctgacccttgtagcctgcgcccatccagcccgcactcccgcccccagtccccgaagtcaggttttcgaacttattgaggctttcttttcttctgtcttttctttccttatttttagacagggtcttgctgtgtagcccagggtagcttggagctaacagcaattctgctgcctcagccttcagtcataggcatggaccaccaaacctggcttctttttgaattgttttagcctctgtggacagagattttgtttgtttttctggattttggactttccctcaaggctgatacaaactcctttttgagtacctttgcgttctccctgggggcagggagctggtatcttctttgcacctatttgagtgggctttgtgtaccaagctgtggaaatttatgtatattttctcttgtgtttatgacttttattttaaaattgctctgcacatttacgttcatgtcgggtccattcttctgtgtgtggcttgtccccgacctttgcagagtagctctccgccttttacttgtctctcctccagcatcactttgtgcgcttcgtccacacagccttgagtttatttgttctcactgctgaatagtcaacacagtgtttacccactgtagggtgatgggcatctggcctacttccgttagatcacgaggcaccaacagtctcgggtcttcaatgcatgcgcctgtgtgttttgtcagtcctaggcagggtgtggcagcgataccatgcctttccagttgtggcttgattagcacagcaccggcagtgcccagagctgccatgtacggccccacaggcttgccagcgtggtcctgagagggtgtagtttctgcctagactgatctccagcttcatgtaattccaggagcggccccagcagcctcttcttgttggcatttgtttagaaatatacaaaccgatttcttaaatttctttgaaaatgcaaaaagccaaaaataatgagggcattcctgaagaacagagctgaggggctgtcccaccaggtatgaggatgtcatgaaagcctcagtcatggaggtagtgacataaagacagaagggacggtcagtgagctgaaggacaaaaatgtctagaaccagatgcattgctttcgatagcctgtctctgctggtgagcttcctgtcactgttaacacatacctgtggtaacttacggaagaaggacaaaggtccacagttc

SEQ ID NO: 26547 - DNA, 1105 bp, Mus musculus
tggagggatgggagctgctgaggttttactgggcaggcactggcagtctggatagacaacagccccagggcatctgttctgggtcatgtgtggtattaatgctctgggtggcccaggttgccccgaaactccacacctttctgcttcagccttattagtattgtaaaccgccacagccagctcactgtctagtttcttaacatagatctagcaagttcatctcgtgtatgtgtgtgtatatgtgtgtgtgtgtgtgtgtgcgcgcttgcgcttactatgttcagcatgagcccagtgccctgtgcaggctaggcaggtcctctcaccactcactcagctacactccaggtcccttttatcctttaatccctgaggaatctggccttaagtcacagctggtgcggggttgggacaagctgcaaacccagtgtttcggacatgggactggggagagatgtaaggtagtgttagggcttggcagcgggctctggactggacagtgggctgatgggaggctgtgtgaggttaagctcgttgctgtctgagctgtagccctgatgaaggaaggggcctgaggactacaaatggaggttgatgtgtgtcaggccatggaaaggctgtgaactgagtgcaagagaactgagcctgggaagaaagtggctttgtttcttattttagtttttggtgctaatttgggctcagagtcctctggtggtatctcccataataaaccgtagctcattagaactccacaattcagtcctgtttcctctatgccttcctgcctgcctgcctgcttacctgccatccatccatcgagatagagtttctctgtgcagccctggctatcctagaacttgccctgtattctgttgaccacactggcttcaaactcagggatctgcaagcagattgtccttggtgaggtctccacagaggagagagccttggctgtggtgtttcaggcctggcttcagctgtctagacggaccagcttctgactcggaatggacatgtgggatcaccgctgtttcctaagggctactttgctacttttgctttgctagtgtgtgtgtggtgtggtgtggtgtaggtgtgtgtatgt

SEQ ID NO: 26548 - DNA, 1193 bp, Mus musculus
aaggctgatgtagagaaggaagacggtggtgaaggctgctcttggtctccgtttcattgagcagagctcactggtagtggatgggcacttggtgttgaaatgaatgaatgaatgaatgaatgaatgaatgaatgagtgggtgaattaagagtaaacaaggagaatgctgatagacatattgaagggtagaagcttccagtgttttgaggttttgtcttagtggagggggtgctggtatagtttttcatagccaccccgctctgttgcatggctgctgtttctccagcctttcttaccagcaagtcttgagttgggggtggggtagcccaggctatctgcagagcaggccacctggagggagcacctgtggatgaacgctggggacattttccttgggacagtccctggctgtctttacgtctccagcatgttggagattcctgacggacctgaattgtgattggtgacttaccccccctcccccctttccatttcaaaggcaaatcgggagcggtgccgagaaaatttccttactagatgacatttcatcgcaatgtccgatcgtttggggcaaataacccagggcaaggatgggaaaagcaagtactcgactctcagcctgtttgacaagtataaagggaggtcagtaggcgctgtcaggtcctcaggtaaggcccggccgaaggcccctcttgcgttctttgcttccgtcccttgtaagatggccaggcccgccaggcacttgtgtctctagccagtttgggcaggcaggtggggtgacagcgtttgcatagccttccccctctcagtttcctgggtctgacttcctagtggaaggattggctgccacccacaaggccttcctgggggttcttgccgcacagccaggaccatgtcatattgcaggggtggtcactgtgggctgagcttcctgggcctggctccaccgtggcgtgagctccacagcggcctcctgccaaggtagaatgtgcagatcccagcagtcctttgtctctagtctgggggaggagctggcagaggctggagtgactaccaagcacttgtcttggcttgacttggctccttagtctgagcagtggtgtgtattttggcctctctcctcctgtgaggtgtgtgctctaccccatgttcttttccttgcagttattcctagacatggcttacagagtctc

SEQ ID NO: 26549 - DNA, 1147 bp, Mus musculus
ggcatgcaccagcgattctaaggagccctctctccgcccagctcagcccagccgcagaggggcctcccaattcatggggcacggttaccagccacccacgtaccatgacatgctcccagcgtttgtaagtactcaaaacatcctgtccataactgtaggctcctgttcgcccctcagcctgagctctctcagggtagcagataggggccactgtggccggcagcagagtcccgctccctctggcctttccctgtccactgcccctggcttctgcccctgctgttcaatgccactgtagctttggttctttagaaaaagggaagacaggtgttctcagccttattggatccaaggcagatggggcactgtgattcattacaaagctctccactcttcccggttcccgacccctcgttttccactttccaaagtgaattctcatttaccatataattggagccatcattacaaaatctcagtcattgatcctgtatttcagatgtgttcaccacagtcatcagagaaccagactacggtggaacgaagctcttttccccttcctcagctccgcctggaaccccgtgttcctttcagacagttccagatgaacgaccaagatgggtgaggctgtgaccctgtggccgtgtgtgtcagtgtgggacagttcatgcgtgagtgctctgtgctctggagactggggtgggcggcaggacttggacccagcaaggagcgtggtctgcagggctaactcctgcagtgcaggagtctggtagcactgtggtggggttggcagtgagcatgtggtactgtggatggaaccgaaccgtagcaagaatgcaattgttcactgcaggtttcttctaaggaagtagctcagatattcactcagacaccagaggtggaactcgtttttggaaagtgactgtttgcacttacaggttgacatgagcccatcatcttttgtctgtctcaccaggaaagaaaggccaggcgtggcacggccagtgcgcccactgaggcagctggtggagagggcaccaaggcccaccatcatcaacgcggaaaacctgaagggcttggatgatctggacactgatgcggatgatgggtgggcaggtgagtgggtggagggccagcagcccttata

SEQ ID NO: 26550 - DNA, 1148 bp, Mus musculus
gcacatgcactgtagtgcacatacccaacacagacataaacacataacaaaaataaatcatatgtaattcttatgtacatgggtattttgactgcatgtatatatgcatgcacaacatatatgcctggatgccctggaactggagttagagacagtgtacaggcgagctgtcatgtacgtgctgggacttgaacctgggtccactggaggagtacactgtgcttctaacagctgagcagtttctccagcccaagaaaataaaacacagactgcacaagcgtgtgtggtctggatggcccagtgggtacaggagcctgctgccaagcttggtgacttacttgagtaagggcctcaggacccagatggtggaagaggagaactgactctccagagttgtacatataatacacacacacacacacacacacacacacacacacacacacacactcacacactttttttttaatgcgagggccatagagatggctcaggtgttttctgctctgacctgcaccccactccctccttcttttggcagaaacccacaatgggcagcatgttccgccagcactccgctgaggacaaggaggacaagccacccccacggcagaagttcatccagtcagagatgtccgaggccgtggaacgagcccgaaagcgcagggaagaagaagagcgccgggcccgagaggagaggctggctgcctgtgctgccaaactcaagcagctagaccagaagtgcaggcaggctcagaaggccaatgagaccccgaagccagtggaaaaggaagtcccccgatccccgggcattgagaaggtctccccgccagagaatgggcctgttgtccgcaaaggtgagaggcctccctatcccacagctgggagccttgaactgtcgactccactttactggctgtgaggtagccaaacctgtggcagagacaggagctctgtgttaaggtcagcctggtctttgtggagttccgggacagtcagtacagagagagccccaaccttaaacacatgcatgcacacatgcacagaggtgggcctggggccttatctgctctcagctctgcttttctgaattttaatttgtgcatgcactcgagtgtgcatgagagagtgcgcgtgtgcgtgtgtgt

SEQ ID NO: 26551 - DNA, 1319 bp, Mus musculus
cgttacgggtgtcctggtctatcggggccactccaggctctccctccccaacagccagagtttccaaatacaaaatgtagagtgtccttgtccatcttcccatagggatatgaggaagtgaagccaaagccctgtctaagtcttcctaggaggtctaaatcaactgagtgctggctggtcatgtgtgctgcctgggatttggcccatccagtccacacagctctgccgtgtggtgctgtgctcgctccccagccctgctgggcagagatctggctcctgtttattgtttttcttacctttcgagtggtctctcattctgggaaccagcattggcttctacgggccacaggcaggtcagatggtacacctgcataccagcaggctcccctggtcagagtaaagactcggttgtttaagggatacctgctgtgtccgtgtggcattaggacaactgccactttggaaggctatgttctgccttgtggcttccgccgggcattctgtgttagatgagagaggttgatcctttgccttcttcaggactgatgaagcccatgatgccccaagagtccctcagtgggactggctgtcgctctgaagatcaaaactgtgtgccctcgctccaagaacggaaagtgaccgccctcgacccagctcctgtgtggagcccagagggctacatggcactgcagaacaaaggctactcactgccccacccgaagtctgctgacactctggccatgggcatgcatgtcaggtgagcttccctctgcggctgaaggaaggctccgcagtcccagtggagggccctaggaagaggccccgtcccgggagacacagcccagggtgggtggggaggagtggaagcaggtgtgcttgaatgtttgatgcgagtggctctctctgatggccaggctgaggcacaggaggaaccccgtggtcgtcgaactgtgggcatggagtaaaggggcagagggtgggctcacaggccggtgggtcaagagtggggtctgggctcgctcctcctgtgcgtataggagctagccctgccaccccaggcccaggctccccactcccaggctccagcttgttcattgctccaggggaccgccagctcctctgtctccagggcagttcattgagctccactgacatcttcacggccacggacgccaggggccaccgagcaacgaaccataagctagaccaaatgtttgtgttttcttttctttttaaaaaactttttttttctttaaaaccaaaccaaacaaaccaaaactaagccctgttcagcatggcggccaggaaccaagctccaa

SEQ ID NO: 26552 - DNA, 1199 bp, Mus musculus
ccaggcccgtagccgtggccgcggcttcagagagttcaccttccggggcggccggcctgcaggcagcagcacaagtggtctttgtggcacgggtgtccttgggtctcgtggcatgtacagtagtggccagcgcagtaaccgaggcaggggcctgcgtgacttccccccaccagaagactgccccagagccaagccaaggcgtcgcattgccagcgagactcacagcgagggctctgagtatgaagagctgcccaagaggcgccggcagcggggctctgagcatagccacgagggcatgctcacggagagggacgagggtgccctgaaggactcatggcgctccaacagaacttacaccgaggaccagggcggtatagacacccgcagccggggatcccggacatgcgggagagccctcccaccccgcctgagcaactgcagctatggccgcagaacctttgttgccaaagaacctccccactggcagagcaggagcccaggcagctcctggcaggaatatggctcctctgacccgtgtggcccacggcgaggcaccgacagagactacataccagactcctaccgacaatctgacacatttggaagcaggctttttgaggacagccgcacggaggacaagaggtcctttttccaagatgaccatggggcagattctgaaaatgcagaaaacaggcccttccgtaggaggcggcccccacgccaagacaagccccctcgcttccggcgcctccgtcaagagcgggagtccctgggcctgtggggacctgaggaggagtcccatctgctggcaagccagtggccaggccggtccaaactctgtcctggggacaagagtggtcctggaggtcacagatccccagagctttcctaccagaattcctctgatcatgccaacgaggagtgggagaccgcctccgagagtagtgacttcagcgagcgtagggagcggcgagaaggcctcgtggctgaacccgaagcgcaaggggatggtggcctctctgggtccagtttgggtgaaaagaaggagctggccaagaggagcttctccagccagaggcccctggccgacagacagagccgcaagctggagccgggagggtttggggagaagcctgttaggccaggtgggggtgagccttccccccgctgcgagagccagcagagcgggacgcctctga

SEQ ID NO: 26553 - DNA, 1093 bp, Mus musculus
tggggtgcagaggttttacccctcctgtccttagaattcagagttcacaactcacgtgtacataccccaaagaagttgactcaggagaatatctgttaagtctcggtgtgactatactgcagccccaacaaggcatcatgaatgaactcaagagccctgcagtgagatagcctgtgctgctctggtctgtgggcctctcttgggtgcctccacccggcctcttctcggcactgcagtctgtggaagcagcatacagtgggagggaagagtactgtggagagggtactccagcagccttcaccctgccgcagaacaggaccagcacggggctcgcactgtgggcaggctcttgtgacccttgatggctcagtcgcaggaaccggaactagatagctgctgtgtctgtgtgtgggcctcgtgcattcagatcctcctgcccctctttcctagcctttgagtagtggagcgttcatggactcttccttcctttgcaggtctccagatgaggccttgcctggaggccttggcagccattcaccctatgccttggagagaaccactcacgccagctctgacggtcctgaaacccccagtaagaaatcagagagagaggtttctttgcctacccagagggctagtgagcaggaagaggcccggaagcagtttgacctgggctatggaagtgagttggggctctcctttggagtgaggggtggtgcaaaacaacccagcctcctgtcttatgatgcttccagccttgctgagccccagtgacatctgtataacttcacagacttaaaggggggcatccaaggccacatggctagcaagagactgacctgggtgtgtgaatctgcatctctaaagccattatctccacgggtgctgtctgagcacttgtgggttgtgcttgcaatgtctgctcacatgggcaggaggagggcggggcaccgtgtctagatttccacaggcactggtgacattgctccttggtgagtggacttcatcagttgacggttgggtgattctcatcttattctttgtgtggcctttggttcagatgctctcattgacaactgcgcctccagccctg

SEQ ID NO: 26554 - DNA, 1099 bp, Mus musculus
ggctgctcaggtaagcaccacgggccgagaggaggggaggactctccgtcgggcatgcactgtctcctgggacctgtcacaaagaggctggcttttccagggtctaatagccaaactgtgaccggctaggtcagagataagcctcagcgcccctagtcttcctcttcccttagtgccccagactggctaggtgatcctgcaggtcacagtgctcaggaaccctgacagaaatgcttgcagctagacactgcattcggccccgtctgtcagcctgctcctggggcaagtctgcctatcctggcagtgcaccctgagcccggggttctgaagacacgggtcaggcatctcaagctggtttgggtagtaatatgacactttcctaggagagtgtgcttaagccatgcagtcatggcttaaggtgggactgcatcagctcctcttccctgcaggtgcctgtcaaaggtcggggcctttcatcccggattcctcctcggtttgctaaaaagcagaacggcctgtgtctggagcaagatgtgactgtgcctggcagcagcctgggcactgagatctgggagaacagcagccaaggtgaggtgggtgcctgcctcaggagaggcagggcactttccggagactcacacctttgagccgtcagtataagtgtgtcatgacctattcctgggccccaagcagagtcagtgttgagcagcagctgagctgacttgttgcggcagtcacaggtgggggatacatctctggccccaggactactccaatagactagcagaacctctgcaccatgtcaccctcaggaaggcgccctgtttcagatggccaggagggagtaagggacccccttcctcagcacagagaagccctctgaattcctccctcttgttttctgtggaagaagaaaattcagactaacggaagttagttgaaaactatttccttacatcttttttgtttgattttaatgtccctttcaattgatcaagttctttttgaaggcctgcagtgagcacggcctgcacaacagggagcctagaagatcgcacagttaacaagagcttttctgtggcttctaagagagcgagga

SEQ ID NO: 26555 - DNA, 1147 bp, Mus musculus
atatcccttcacacgtctctgcaggcccaggcccagcttgggctgagaggtgggctccccgtctcccagtcccaggagatcttcagctccctgcagcccttcaggtgagatagcccaggtgtcagacctccctaccctggtgtcgtgtgtgctgctccggggccatggactgggtcaccacagactgctaggggttcctgtcccctctgccgggtctttttcccactaccccatgtcccatcccccaaaccccagccaacgtttctgtattcgtgatagcttcagtcttggtcatcactgggtcttcctgagcctgccacagcttggggttgttcatggtcctctggtcaggattgttccagtccactgaatcattctctggggaagcagggatctttagcaagtccttggtatctgtgttcatcagtgttggagatggctgtgtaccttgttcacctgtctctgacccccatctggcttttgcaggtctcaggtgtacatgcaccccagcctgtcaccacccagcacgatgatcctctcagggggtacagccttgaagcccccatactctgcatttcctggcatacagcccttggagatggtgaagccccagtctggctcaccctaccagcccatgagtggaaaccaggccctggtctacgagggccagcttggccaggctgccgggctgggcacctcccagatgctggattcccagctcccacaggtcagtttggtctgttggtagtctcctccctccttgcctctcagttgcctcttgtgtgctgatgttcagatgtatctctcagatgcagacagactaactagtcccacagcgctgtgttctgctggcttcccttccctctagagcgacagagatggtggctgtgggactggaaatgggccaggtgtcatgtttgttcctccatcccttctagtccccacttcagagcctgccctctctgtgtgttggagctacccccacccccacccccatccgtgggtcaaaatgtacccttcactcctcaccctcgggccctgtgtggcagctgagggcctttccctctgttaggcagctggctcgccctcttactccatctagatgtcctggtccatgcctgtgtgtagggagcatgcatgggccagg

SEQ ID NO: 26556 - DNA, 1712 bp, Mus musculus
aaatgttcaccaaggatgtgctactgacttgtctgtggaggaccgggagtcttcccgcctttctcaatcactgcacccttgggaaggacaggacagttctgactgcacgccaggctcctccctggttcctgtgaggatagcttttggtctgacactggagcagatagggagtggtctctacacattttgccctgtggtcactttggttttcctgttcatctgtcctaaggcaaagcgagtggatgaaaaacccggcctgggaaccgtgaagctgcaggaggcctcatcagccacctcccagatgaagcgaaccggagcaatcaagcctcgggcagtcaaggtggagggaagcaaagcctgaaggtgcctgggtctcttgcctcacctaacagggacggtgcgccccacaccctaacagggatggtgtgccacaccagcctggacagccaccgcctggcttggacagagctctcttccattcacgaaagctcctgagagttccatcgtcagccagcctgcatcgtggacatgtggctttgacctgcttgctttggtacaaaagagcagacttcctccttcccacccctctgcccagtgactgtggagtgagcctcctgtgcagtgcagacctgcccgcccgcccgcccgcccagttccctaggcacagtggtttggcagcagggtcattttagctggaggctttttgttttaaaaagcagctaaggtttttacaaaggggaaatgagaacaaaatgctagctacatctgtatagctgaacttttatatggtcctcgctgtcctctctctgctctgctgtccccagtggtcaccttttatctccgtcctgtttgacatgtcacagtgctaccttaagaggtgattcttaagagtcacacacacacacacacacacacacacacacacacacacacaccccggttggctaaccgttggggtttggaggatgtgattggacattctggttggtccctcaccaccttgggcactgtgaagttggtatctgagtttagttccctggtgtggagttaatgtttcagaataagaattatctgttcagggcccttttgctgtcattggacacagtgagtattgagcaccggaggaattgtggagttttgtaatccagattggccccacttggggactgcatcttgggctccgtgctttagccccctgggtggctttgttccccactcatttcctttcctctttgtggagcctgctgtgtccctctggatccctgtccattcactcctcacagcttatcaccaaaatcaatataaggacacaggtgaacacctattagtcaagtttgcgacaggaaagactatgtatggcacattcatcttccgtccttcactcctggtaacagggcagggtgttgggtagggtttctaagctataggtgtgttacccttccttagagaactggacagggtcaaggtataagtggcctacagagaaacctatgcagcctcaaaggaggctggtggtgtctaaagggtggtgtcttggggctactgcttgcaggttttgtgtgagcacctgtatgcgaggcttcttgctttcactaagaacaaggaaaatttcccattgctcaaaggaaaatgaagtgaatttcagggtgctcagctgctgcttaggacccccatttaatcacccatctggggtgttggagacagcctgcttc

SEQ ID NO: 26557 - DNA, 2717 bp, Mus musculus
agaagcactgtccacttaggagtccccagcacagatctgcctgtgcccctatcagcccttccaccccccggaagtgaccgagtcctctgccccactgccaagctctaccccataagtctcactcagtaaaagccacacagtcacctcttagaaatgcggccagacccacctcacccaatgcttggtgggcattatgtgtcaaaagaagcaaacatttttctctttcagaatttcacaggatgctgttacaaactcaaaatgtgccctttaggtgagcctgctgtcagaatggcagtactccctgttttaagaagaaaaattaggaggtcacctgttttcagtcctttctctaaccctgtatttccctcctgcctcccaccctaaataaaaacaagaaacactagaatttatttatatgtattgatgttgtaggtctagatggaaaaaaaaaagtaaatgtcccactgctctgtttatataatgtctgaattactctgtgcaggaaaggccaggaaattgcatgtgaaatttggtgtgctcaccacctctgtgatctcagctgtgggctctacccctctgagaggcacatttgcaactagacgctgaggacagagggcaggcttcaggccaaatgtccctactcctcggatgatctggtcaagccaagtttttagtacagaggtgttttaaggtgcaatatctctttgtgtggtttttagagtcaagctcaaagtataatagaacttgggccttattttggtttcaaacccccatctttagatcacacataaaaacaggagcgtctgtcagggtgccatggcctttggtgggaacaggtaaagtccagccctgccttttctactgctgagatgggtggaggtgggcagaatcttttactcctgcctgctgaagtcacctcctactgctggtggctttgttggtgccactgatggtgaaatccatggtttggcaaccaggactcttcagtctgttggtcctgatgcggcgtgtagcatctgtcggtgaagacttctgccgactgcatttagtctggtctcttaacagttgctttccttgtctgattcccaagtttagcattttcaaattcagagttcacagaacacttctgggtctaagcttccttaagggggataaacaaaggatgattgcagtacacatttagaaatgctggttcacatccaaagccacgcttgctctgccacttctagagatacttggataacactgtccaccttgctgtcctgtcctctggagccaccttccagatggtcagtgatgaagtcgtgaatgatttgacactcagggcccagggcacaagagtgtacccgctgaggccatgaggcaactctggctaagtccgccccccaacatccactggggtccccactctgccaggtacctgcatgttaactttcatgttcgccttgccctcatttccagcaagtctgggttagagggtatgttgggaatctttcacaggcaagggcacagaagtctggcttctgtattctttgatgagtggaaaagccagctctttgtgagatggctctaagacaagttaggtcatgtggaacagagtggtcagcgttggggatgagcacagtcacccagctgtgctctccactgtctaccagctctgactagtgatcttccaggtgcatgacacctgcagcccccagctgcttgcttcagacctgcaacctccccaggccccatctttggcatgtcacaatcctggagcagcagttcctgtgaaggctccttagctgaagggtcctgtgctctaggctttccacctcaaaccttttatagaaaaggacttgggggattgttctttttgagggtccttttgttttcctttgcttttcttttggccttccctctgtctttcacttagaccagctatttgaaagggcagacgatgctaaaggtgtactgtgcagcttgtttagacgtgatatggggaacttcttcggatgggaaatggaatcgtgaattcaccctcccttccctccgggtcagtccctgttgtttctcctttcaaatatgtgattgtactaggtctttccatacgaaagaactctccttatttaaataaaaaaaaagtataaaaaaataaagccaaacatgctttctcaggctgtgtcggttttctatcatctggaagagtacggctggcgcactgcttcccgggagactgggagtggccagaataccttagggagcgcagcactgtgctgtggtggtgttcccaaggctcacctaggcagccatcccaagaacagctttttctatgacttttgcctttgtcttccattaattggttattttaaaaccttaagacaggattcgaaagatgtcctcggtgtggagggaaggcgacttgggtaaacggagcaaggtctcaagcaatttagcagggactaggacacatgtctttccttcagggtctctgagaaggctaagcacggaaggggttgcagatcatacaaattaatatatattcaaagacattagttggtctacatggacatttttttctttacactgggcctcaggaaccccctaccacaacaggcagcctgtggttaaggcacatctcgaaaatgggcagcaccaagaagccttgtcctctctgtgggccaacccatgaccatcctatcctgtacttcctgcctgattgctatctgggtttc

SEQ ID NO: 26558 - DNA, 1105 bp, Mus musculus
ctgtgactgcttccttgttcttctgttttctcctgttttgttcagccctttctcagtgcactggtggctgtggctactgctgaccggggtctcttgttcctgtgcagttgggtgagttagagcccctgacttggatagtattcttcctgtctgtggccttgtctgtcttgtaacctcattttaattctgtctttttcaggatcaaatacatggggattttcacctacctgcttgtgctcggcattgcagctgtccacgcgtggaatctgatcggagaccagaccttgtcaaatgtaggtggtcacaccagggcctcgtgaatctgctgtatgtggggattagggtgtcaagctgtcctagggagtagttggcttaaagaagtggagcctctggatcctcagggctggagagatggcacagtggttacgagcactgactgctcttctgaaggtcctgagttcaattcccagcaactacatggtggctcacaaccatctgtaatgagatctgatgcccttttctggtgtgtctgaagaggctgacaatgaactcacatacataagataaataataaaattaaaaagtaaaaaagaagaagaagaaggaggaggagaaggagaaggagaagaagaggatcttcaaggcttcaggagcagggagtagggaagctggcgcccctgtgagcttctagcagcatctacctgggacaaagggcttcagggtttctcaggaacttccctgagcctccatgcaggttctggaaatggctaccgcactctgcagatcgaaagacctatcctctcacccctggcagatgcgcgtgctcagtcacttgctcgccagaatcgtggctctgctggtcgtcccagtcttcctgtacttactcttcttctatgtccacctgatgctgctctaccgctctgggccccatgaccaaatcatgtccagtgccttccaggccagcttggaggtaagaaacacacagagcaaagacagtcaggctcagcttctctgtgagcaatgcgggatctgtagccctcgggagggaaaggtggggcagggcagctagggctccatctcgagactttgttttcagtaaccaaat

SEQ ID NO: 26559 - DNA, 1229 bp, Mus musculus
gtgggcttcatggcttttctgcccacagccctctctctagtgaccctctcagctctcctgaggctcctagtgaccctgactagtgtcaccccatcacttggcctccctggtagccctgaagtaagcagcacagcacctcagggtttccccactctctttactgctggggtacctaaggtcaccttaccagaaacctgcctgtactgtccctcctatagatcttattctgacactcactctgtctggcagcccatcatccactgctcactgctgggcctcttcgggcgcctggtgcatcctgagatgaagtgagtcctgcctgagtagcctggaggtgacaggctgcttgtgaacactgaggctgacccacacagagtagcctgctgtctcagcgtgagaccactgtgcccatctcgcccagagacaacagtactatactgattttccgagttctgccagaccagtgatacactggggccagttcttagactcagacttccagttcctggaacagacattctattctcagagatttgctcacctgtccaaagagtgagtgacacccatccaattgtttgacatcaattctggacacacacaatgaagaccctccctcacagatacaccaacaaggcggttggatctgggcagtcctgcagttgagtcttggttctcagatgactttaggctgtgtcatgttgaccattaaagcctgccttggggtggcccacatcccggatacatagcctctgtgggagctgcatttgtggccagcttccctagccttggcaggcagagcaggcttggtttccaaaggcactgtttttcccttagtgacactctaaggaatagctctgctctgctcttgcaggcacgatgtcgcagccccactgagcccccattctcaagaagtctcctgctacattgactataacatctccatgcctgcccagaacctctggaaactggtgagttccgtgctggcctgggtgcagcagggtctcatggcggtcagtgggagcacctgctccctacctcagagtacccagaatgcctcctcagatgaagggttcaaatggaaacttggataagaaactttgatttagcaagtctgagatgtcccaatggggagcagtcacctcatcaggccgagagtcctctgggcctcaggcatggattgggaaagttccaagtgctgtgtcttccctgccagggcctttcgggtcagg

SEQ ID NO: 26560 - DNA, 1168 bp, Mus musculus
tgaccagcaaagcaggcatgcagttgttgctttattttgtccccaggatctcaagcacaggtcctacttgggaacgattttgagcaggacttaccaacctgcgagattgcagtaatggttcctgttcttcatggcctgcagagacattgagataccatggctgcctctaatgaccgacctgcttcagtggcagcaaggaccaaggcagctctttataatatgcagtgggatttatttcctcctccaactaaatccagagtcttgagcccaggcagatgcctgtgtatttgtctgactagaacagttgtcatggaagtcaggccagttggggtaagatactgtgtagaagccttatataagctcatagcactttccactggctcagagtggcagaccctggtgttctgcagccaggaggaggatgtttagagttgcactgttaacagctcctgcctgagttttaacacttgttacagagatccctgttgacatccaagatcccacagcccaggggaacccaagttcacagcagaggggagtcatgtgtcattgggaatgggtcccagaggagggagcagaaaatagggaaatgaaagtggctaaaaggagtgatcagagccataaaaggatgtggccaggtgtagtgggggattgaggcaagaatacaagagcagcctgagttccatagtgagccccagtcacagcacctccaggtcatatgacctggaccatgtgtcctatcactttcctgacttttcagtggatatttactgggcatctactctgtaccaggtaccctaagatgctggaatggtggtgaaacatgtgggttgggttttagtgttgatagtgggcagactgtgtctgctatcagtagatgaatagaaatgctagtgtattaagttctgtgaagggaacagcagagatgggaatactgaagtctgaagatgggggcaggagcgaagaagataggtgtgtcttaggcagagtagcaagaggagcagggttgggactggagagatggctcagtggttaagagcactgactgctcttctgaaggtcctgagttcaaatctcagcaaccacatggtgactcacaaccatcctaatgagatcatcaggcctcttctggcgtgtctgaagacagttacagtgtacttacatataa

SEQ ID NO: 26561 - DNA, 1212 bp, Mus musculus
agcctcagcaagggcagccagaggttctgccccaacccacacccttcctcagccacccttatctttataataataataaggtcagactccatcccctccaggggctggggaagtagctcagttggtagagtgcttgcctgctgtgcacacagccttgggtccccagtacctctgaaaaggctgatacctgtaatttgagtgcttgggaagtggaggtggaagaatcagccatcctcatctacctagtgagtttgaggccacactgggctacatgcgaccctgtctgaaaaaaccaaaagatcaggctcctatcttaatgggggacacagactggtacagatctgcctcttagccagggcagttttactttgtaaattcctgttacagaaagaacgccagagactcagtgatggagcagactgtgctgggtggcctgggggctttctcaccaaggagggcctcaggccttactcaggactctggggcagaacagagtggcagcattctcgtgcccaggtgcagtgcaggctggtaaactggcctagcattcagcagggcttctaagttttcaccggctcagtcctccctatcctccttttcctccccgcccccattttatcttcattttctttacggagtgtctcctgtagcccgagctgagcccctgcctcaccgctgtgcctggtggttggcagtgctaagcaggcactctaccaagtgatttacccccagcactccctgcctttttcctttgtgtggtgatgctggggatggaacccagggcacagcaggtccccagatcaactcccatcttctcagaggcactttagggcagtggggctgggcagcacttcatgggtcctcaggcagttggggctaactgcctcaggaaggcatcccactttggagggcttccatctttttgaggcactttgggacagggaaagtgggtaccattctctcaggccttatgacaattggggtaactacgccaagcaggacagaggctgctggggcagggtggccttcccctcccccggtgtacatattgtacctgtgtactattttgtatataccggggtagggacacccctgtatcatagtggaggttggagctggcaaatgggaagagcttctaataatcactttgggctgggaaccttatttattggtagtgttaggtcagagggcaggaggcggagacaaggttgt

SEQ ID NO: 26562 - DNA, 1184 bp, Mus musculus
ctcgcctcttctcgctttctgtctttcggaactgagtgtcccatgggcctgttaggaggagaggcaagggatgccccttgaggagggagggaggagcaggggcaggcaaggaggtcagagccgagggttgagaggatgggctgccacacgcacgaggctccaggaggcttcgtctgtatcacagactgtgcaagtgggcagtgcagaaccttggtatgccaccgagcgtcctagcagaggtagccgatagggctgagctcttgagtctggctgaagcaagtcagggacactcaaaagcctagacttgcacaggatgtgtggccaggtcctggtctgggtcaggtccttaggaggacccaaggggcccgggaaagagcacagaggaggactgtagggagcacccctgggacagagaatttgaacttggaaagggctctctcagagcaggggtttggttcccttaaacctttggccataaccccagagccctgggggtgggggtacctggcagcacctggcaggtgcaatcctgggagaggtggggggctgggtcccatgctcacggtgtcttctgttctctctctctctctctttctgttggtgtctctctctcttccccccatgcctggccatcctcacctacccttgagcccggccgcttggctttcactcccaccctctgcccacccggctgctccctcctctccctcctcctcgggtgcaggacgggcctcttcacacctgacctcgcttttgaagccacagtgaaaaagcaggtgcagaagctcaaagagcccagtatcaagtgtgtggacatggtagtcagtgaactcacgtccaccatcagaaagtgtagtgaaaaggtatggccgcctgggaggggctgggcccagccggcaccacgtcccagtggttacggcttgccaggggcagaaccatctacctagcagatgtgatggccacttggctccccactggaacccaggcagtccccggcctgaggtttcccaccatcttataaccctgggactgccttcactcaggatcctgccagacccttgtccctgtcagagggccataccccaccccattgttctcctttccattggtaaccacggcgatgacaggggatggcggctgtttaatgagcagctactatgtgcctcagtgggccaagtgctggc

SEQ ID NO: 26563 - DNA, 1197 bp, Mus musculus
tacctgccccatgtcagccgccctgatgagaagaaaacgatgctgaaggccttaattatgtcttagtgggtaaaggatttggttcagaaggacaagctggacactgcaagtgccacactcgctgtgagcccggggcaggtagtttccctgctctcaaatctgttctgagagccctgtggggccaagcgggaccagcctcacattccacgtgtgtaccactctgcttggagcctatttattttgtatttatttgaacagagttatgtcctaactatttttatagatttgtttaattaatagcctgtcattttcaagttcatttttttattcatatttatgttcatggttgattgtaccttcctgtcatcacctggtggggcatgggaagacaagatgggaaagtggctacagagtgaccttgcctgctgcccacactgacagtgtgtccgccccaccagaaacagagggaacggcacagggaagaccacccaggccgggtagggtagtggggaaggtggcagcttgacattctttcctggaccgggaggatttctttattttgccctttggaacgacaaggcagtgaggtgcttcaccaggaatttggtttgagggtgaggactgaaggacagggtggcctgccttccccaacccgtgacctggtctccctcctggcccacagctgcccatgctcaatgagtggcctgctggccacttggcaattgtgcctccattgccccagaatggcctgatgaggaaaatccaaacaggatgcaaagatcaatgcaaaaatcaccggtctgcatagtctatgctgtaactggagtttgtcaaaggcaagcagccttctaataaagtcgcttcaaatgtgacaatggagccagggtttttctgctctgggcttgggtgttgggggacattaatattttcctcatccattgcctgcatagttaccccctcatctctagggaggcacttcgtggtgttggttagattggggttgctatggtctccaggcactacagactgcttttgcccaggcctcccaggtgatagaggctggggcagctcagacctgtctccatcacacccactgaggtcgcctcagagctttgttagaggactctcattttgtacttgaagccagatgagtccctgcttgcacaagctcaccctccccaccagaacagctggtga

SEQ ID NO: 26564 - DNA, 1228 bp, Mus musculus
tagaagggcctgagcatcatggttccatctgcccagggctgggtcctgagcagctggccttcctgcaggaaaggaaggacgaggcccagccgtgctgggtaagcaaaggccttttcccctgctctcatgtcagccggcctgggctgggttccaggctagagagtcagccaggtggcctgtgactgggtgaactggagctggcttcctgccagacgagcctcagccctcctgggcaaggggtgtgctttccctggggagtcttccccctactactcaccctcttggtacctccccaaccccagcactttctgtcctataatttgcttaaggagagtataggctgccagctcagccctggataaattcccacccccttaagtttcactcactttgtatcaacccagcaggctggtgtttccttggccccttaaggtgtttttcctcctgagttcacagttcttgtattccttccaccccaacaaggggagataggtgcctctgttccccattccacctgcaccccagcagggctggggataggcgagtatgggacattgtttctgtgggtggggatggctggactccccaggttgggaaggtccttgcctagtttgtgtcttcctcagctagcaaaagttggggctgtggtcttagagctgcctggtgtcaggaccagatcatttctataggttctgtagccgttgttttaatcagcagatgaatgttagaagatgctgccaaggcaaggcagaacatggctagagaaggttccggcagctcagattccatcctgcccagcaggtgcctggcactttaagggactctggcagctctgttcctaggtgaggtgaccaccagaagatggacagagccctagtgtgcttgtctactaccttccccagtcagcattgttttggtctagttctaaattccagggctccaaaccaagcagttggtactgtcaggaagactgccccaaaccaagagcccctgcctaactcaagccaaggtctgggactggatggccactccagtagacgagagctgccacatcctctgcttccaggcactgggccaggataacttagctgaaaacatgaccacaaccaaatgaacactggtggcagccagaggctaagagcctttcctcctgcgctcagtgatccccacgggtgcccagagcacctggacttcaaattctatatacaaagatagaggatatattaga

SEQ ID NO: 26565 - DNA, 1137 bp, Mus musculus
cctgccccgcgcctacgccgtcctcctcccgttggccgcaggcctcctgctgctcctatttgtgggtaagtctcccgatctggggcagggtgtctggaaggcagcgtgcttccacatgctggcacctgctgtacatctgcttagactctccttgtcaccaatgctccccggggctttcctattccttaaaggccacgggcagaagctcctctagtggtgttcccagttttcaggttcctggggcaatgaggacatggctcccctttctttcctgtctcagcttcatcttcatctcttcaatgttcctgcctcaagtcaccctggcatctcttacggctctgtgggttgggaactgtgtctttgctgttacgctattctaagctctagcccaggagcctaaaagagtgcttgggttgactgaggaaccacatggccggatgatgcacaggtggttagccttgcaccattttggtgatagttaactgaccctcagtggctgtgtgacctagtgaatgactgcaaagatgcacccctaggggggttggttgggagcctgaccttgcatgcctggccacctagcttccactccaatcctcccagtccctcctattctgtgtattacaggattgttcatcacctatgtgatgctgaagagccagaagataaccaagaaggctcagtgaaggtccagcagggatgaggctgtaggggccttctccatatctcctccagaaaagggaccaagggtcacagcttacaagatggtcaagctggctgcactgcagccctctttgggacatggggctgttttcttctcagtttgacaacctggagccctctctctcttggtcatccttttagaagccaagagaaaggtgggttgggaagcctctcacttcccttaggctcagaggctgaacattgctggttggtcctgtccatctcacagtcaaagctccctgtcccttccaccgagttctctcctctcacctctgtgctcctcccactgtgctgatggattgagcaggccttcccgcctctctgtacaagtcctgtcccgtcacaaggcagctcttccgagtctgacacttcccaggctccatgaggacttctggacccaggaagccctggggaaag

SEQ ID NO: 26566 - DNA, 2074 bp, Mus musculus
ggctcagggaagggcagagatcgaccccactgaggctctggagcaggtaaggggtagaaaagacccctaacaggcgtccaccttgccctcctgtccctgattccccgtttgctatgcccagccagcggccccgcctgcagcgcatgccataccactactatgaacccaaggggccggacgagtgtgtcacctacatccagaacgagcacagccgtaagggcaatcaccaccgcttcatcaccgagaagagggtcttctcgtcctgggcccaactctacggtatcaccttctcccacccctcctggacctagttatcctgtccaccgatctcggacagatacaaacgaagtggctctggcccagccatttaaccatggccatcttccagccagttcaggctggctggagtatttcccagccaatcaaatcagggccttgatgagggttttttttttcctccagccaatcggggctggggttatctcttggccaatcagggatttggaattctgtatggtttaatcgggtgtcagggggtctttctcgtctagtcagggtctgagcatagtctatcagggtataggggtctttctgagtcaatctgaagcttaggacatgtcttttcccataaggctttgcttcagagccccaggaatgggcccccaaatcactccctccttagctgggacaatgaggtcctgtcctaaggatctgaggacttggtgttgccccacagttgccagaatcagagctactgtaggggggaggggctgccaggaggccaggccaaaggatttgtggagttctaggagtggtagggaagcctaggaggtaagaggcggtgtccagttcccggtttcttcctgagtgaccttaaacagaccctcttgtctttctggtatgctgtgatgacatcatagctccgtatgtggagaccctcactctccgttatacttaagtgtaaattcctcagctaccattcctcgctgggggactcagctccctggggatggggagcctggggtacccttccctgcctccttctagaaactttagggtatttttgtgcaagtgccccccatggttgggggatcctgacagaaatggggcaaacatgaagctgtttctctagcccctcaatccagctgccgttagcctggctctagaaaggccaggcacctcttcctaccctccagcaggagagcattccctgctgcccgaaggagcctttgggactgaggaaggggtatcccagccacaccagggcttcgtgaagtttttgtctggagatgctgagggctttggggagaagtatcctcccccaagtttgggatgagactagagatggggactgggttctgtcccttgcttaagcactttattaagggcaggactgggtgggggtgtgggtaacccccattcttccacagcctgcaagggaagggcttccagaaaggctgtggactgggggttgggggagactagccagcagtgagccctgcacagcaaggtaatgggggttgggcagtgacagccctagatctggttttgtaatgatttatacagaaataaacacgcctaagcccaactcagtgttctgtgtctttagtctgaactctttgcttgtgcccctctcccacttgggagtatcctaaggaccatgctgcagcctttgggttcggagcttgcaagagggggtgtcagatttctgttttagctgcctggagagtcttgggtccagactggatagatgtatgtgatgttgagcaagggcttttgtctctgagaccacagtgggcagatgcctgctctcaaacagcctgagttctggggagggaaggataccagagttctagggggaattctgacaagttgaaagaagttgacgccttgcatctgccactaaagaggaaggggaaggcatgtagggaaagagccagtctgggaccaaaagtcaacacttgggacccagggcctgagggcaggaaaacacccttctaggtagagtgagtttggcaggttgtataaatagctgctggcctcttagcacaagggctgtttagttagacaggca

SEQ ID NO: 26567 - DNA, 1192 bp, Mus musculus
gttacttgatttatttatttgttgggaggggtatgcatgttctgtgggatcaacatggccgtcagagggcaatgtgaagggattggtgtgcatcctggcagtggaactctggttacaaggcttaaaggcaaatgccacctttgagccattctgctgacccgtttgtccccttctttaccttactttaccccttcattttatgccatgcttagagtcaccagctcattgtacctcagtctgtcccctccctgtcccctgccctggtgaggatagggacagcaaaggcctgtagaagctttgtgtccaggcccaggacatttccgggctggaaaggggtttgctgaagcccaagcctggagagaggggcttgctgggacttcacacgctcccggaaagagggcaagcttgggtgggctaacacaggtcgtgctcccgaggggcccccggggagagaaggctcaagggtcccctgtgctggacaacaggacacggtgctggacatgctccgagatgctatgttagccaaagtggattcttccaatggcttcctgatcgacggctacccgagggaggtgaaacagggagaagaatttgaacagaaggtaagacccttgactggtcatcggcctagagggaggggtgatggaggcggagtctacagtgtgcaggtgggaaggccgcacaggacctaccataaccaccccaaagaaaggcgggaggaggaggatttgagagactttatcctgtggggcttgtcaccccacatgtacacaggcagacatttgcgcacatgatccatacctatacaagcaataggcaatgtaggatgcacacatgcacatgtgcacatgtgtgtgcacctggatgaagctcacactacacaggtgctgaggagaaaggggtagtaggtgttgaggaggggagggtgaagggctgactggcaccctggtgggctggggcagagtacctccagcctcactcctgcccacctctgcgcagctcagtcagaataggagagatggcatgtcacaacctctaagtgaatgaaagacctcaagaaaatgtttgtcttgctctgagtctcagcatgccaatcattgaaatgggagttggtctagcttcctttaggcgcaactctgaggcacatcttggttttcctcagctgcatgaagtcatttgccaccctcagggc

SEQ ID NO: 26568 - DNA, 1519 bp, Mus musculus
cactaaagaaattgccaaggagggttaggattgctcctttcctttgcttccagttatggtgattcatgctgccacagccggaggccccagcgtggccggcccattcttccctgtgcctcagcccagctgtcttgtctccctctggctctgctgggatcctaggcccttccttagccaggctgtgtcaaagcctaggggtccctgggttggcaggctgctctggggggtctggtgttcaccctgtttctcatagcctcgttgtgtggctttggccctaagccattgtctctctggagtgagttttctttttttctttctttctttttcttttttttctttctctgtttctttctttttttttttttttaagacagcatctcgtgtgacttaagctggcctcaaccctgttatgtaactaagggcaaccttaatccttctgcctccacttgtcttcctgtgtgctgagattacaggtgtgtgtgtggacctccaccactcctggttttgggggcactgggaatcaagcccatggccctgtatacgaggccagcacgctacagagtgagctgcatcccgggctgggcaggttttctgtgcctgactggggtctggcatgggcaaagggcaaagggccatgggctcaccagctggggccacgtggtcactgggtgccaaggagctgtgcaatgggcatacagctaggtgggaagctggggtcaggggtggccttcctgaagaaggctcccttggtatagacctgccaggccttgccatcctttggctggttttaaagcttgtcctgtcacgctatgtcccaacccttatcctcggcgttaagacaagagcatgcagattaaggagtgtgagctgccatagacaaggatgtgggatcaaggaccaggcctgggacccggagaggacacccagggatgccaagaagagctggcatctctcttctgctctttattctttggtctcattacacaggaagcctctgttggtactcacttgtcctggggccccgtctccatccctagtgacttcccctgtaagcccagatagcctgtaagccagcagccatggctgtcccagggacacctgcccctgggggtgacggtgctcactcctttctgtttactaccagtggggccacctttccttctgcattgcctatttaagctgtcctttaaaataaataaatgtatttcagttataagaagtgagtgtattgaaacacagggaggttcagaggaagagggcaggcatcaccaggcacagccttctgcctgatcaggtttgcctctgtcccccagggtgacttcaggaaagcaaaaggctctggagccccgcaccagtctgtgacagctctgctccaatgctgtgtgcatgtgcatatacacacagacacgcatgagcgcacataggcatgtgcacacatgcacacgcacactgcagccccgctgaacatggatctcttaaggccggcctaggagcagacagaggatgcacagaagagggg

SEQ ID NO: 26569 - DNA, 1156 bp, Mus musculus
gaactcagatatctgcccgcctctgcctcctaagtgtgggatcaaaggtgtgcaccaccacgcccagctagcttgtgcttttaatcccagcacttggtcggcagaggcaggcagacccctgtaaattcaaaggccagcctggtctacagagtgagttccaggccagctaaggctatgtagtgagaccctggagagaaagagagacagagacagagagacacagagagagacagagagagacacagagacagaaatcaatggaatgacccagtggtgaaacatttgcacacagcctgcttacctgagttcaagccccagaacccacaggaaggtggaaagaagaacagctccattaagccgtgctctgaccttcacctgtgtaccctgcccagggcacacactagataaccataataggttagttttaaaagcaaggtgctttgcactgcatggtatctgcactcagcagttctttcctgttgggtgttcaaaagacagtgtgatagaaactcactatctggcatcgttggtttcttggctttgtgcgtgttaaacctggtatttctaatgatacagtttaaaaaaaaaaaaaaaaagcaaggtgcagtagtaaaagatgcccgatgcctgatagcaaactctgtgctccacacatgagcacctatgtgggggtgtacatatggtagataggccacacacacacagagtatataaactgcacacacaacacacatagagagtatataagctgcgcgcgcacacacacatacacacagggtatataaacttcacacacatacacacacacacacacacaaagtatataaactgcacacacaacacacacagggagtatataaactgcacacacatacacacacacacacatgcacgcagagagagaggcagagagaggtactaataccttcactatgtattccttattggactagagccttaaactcacagagatccccctgcctctgcctcccgggtgctgggattcaaggcgtgctccaccctgccctacacagaatggaggaagtcttcatcttcccttctgaacttgtgaccctcctgacctcccctcctggatgctggattatattatattatattatattatatacaatgctggattatattatatattata

SEQ ID NO: 26570 - DNA, 1011 bp, Mus musculus
agctagaacttttaaccatgcagccatctctcagccctttattttgagacaaagctgtcatgtagactaggatgtccagaactgcaggtctccctgcttcctcctttatttagggagctagggttacaggtgtgcgccatcacttacacagcaatcttggtcctggaaaccatccgtcagcatcttctgtgtatgtatctgtgaggatatctgtcgttgggtttactgcccgggataatcccatcttaatcagttatgtctgcggagactgtctccccgtaaggccacgtgcttagggcatgattggagaggacattattcaacccgctatagcgagaacttagaaaagtctttgtggctaccagcaggtttcaaatgctcagtggcatgaagacaaactaatagagctgttctgtttcagaatatctcccctgaagtattcaaggaattcagccctttgctagagattgaacccagaaccgggtaagtgctctaccactgagccacgcccagtctcagggtttgtattcactgactccctccgcagcttcctggaagtcactgtgtataatagatttattgttggatttagacttcaccatagcccaggggactttctccagtcgccattttccggttaagtttcatggctgggaattcaggctctagtaggttccaattaattactctgatggagtagagtccattagaagtgaaggcctggggctggagagatggctcagcagctaagagcactgactgctcttctggaggtcctgagttcaaattccagcaaccacatggtggctcacaaccatctgtaatgagatctgatgccctctctggtatgtctgaagacagctacagtgtacttactatgtgtgataataaataaatctttcaaaaaaaaaaaaaaaagtgaaggcctggggagatggcaagtcagtcaagtgcttgctgtccaagcacaaggaagcactaaggaggtgagaggggtctggctttctggcc

SEQ ID NO: 26571 - DNA, 1164 bp, Mus musculus
gtagacaagtatgagctgtttgaaaagctggaacttgtgaagggccagaagcggaaggtgaaggaccgtctgaaggcctacgtgcgcgacccctatgctctggacctcattgacaagctgctggtgctggaccccgcgcagcggattgacagtgacgatgccctcaaccacgacttcttctggtcggaccccatgccctcggacctcaagggcatgctgtctactcacttgacgtctatgtttgagtacctggcaccgccacggcggaagggcagccagatcacccagcagtccaccaaccagagcagaaatcccgccaccaccaaccagacggaatttgaacgtgtcttctgaggccggaactggccggtgttgttcttaggttaggagtggattgcttcctttgcatggaacatgtgacatgatgggacatttgagattttctcctccagtacatattaactcccaccctggcactgggaacagctgcctgagtgggctggggtggagctatcctgcctgcccctctctggaggtctcagcgtggacacaaagtgaggtgggagaggctcacccactgtgactttctaagaactacttgcatggtgggaggaaggcacaggtccctcgccatcgccagctcttcctctggatgagagtttgagggacagaggcgcctccaaaatgggctacttttggtctggaccttaggggcgtggggctgtgtgaactcctggttcctttaaaaggagaattttattttgttttgttaagtttagagacattcctggacgcagtttgattggttaaattaaaagttggttatttttttccagtaaatggctgcgtttcctgtgttcagaccttccctcagctcttgtctcagctagaagctagggtttggtcagccaggacactgccagttcttctgtaccacccaacactctggagacgttcagggtttgccctcttctcctcctgggtaccttccactgcgctcttcacccccgctgaaggcgtgtccacggtgccagtgtcctgtgcttggtgttggcaagtgctgtaagctgagctggagtgagctgctggacccgggctgctttggctcctaaatcctcagactggactcataagcagggcactgcagccttacagtcatggagt

SEQ ID NO: 26572 - DNA, 1175 bp, Mus musculus
gaattggattccagataggaaccatcacacaggaacgattctctcgcctgtctttcaacctctgtccctcagtatagaccccaaacacacccccaccccacccacagttcctccgtctgttgtgctctcaattttgaccacttcctctttctcctccctagttccccatcacagccttgagggaaatcaagattctacagctcctaaaacatgagaatgtggtgaacctaattgagatttgtcggaccaaaggtgtgttgcttgcctcaggagaaaaggggggtttgagacaaggtttctctgtgtaaccctggctgtcctggaccttgcgccatagaccaggctggcctcacacttagaggtccacctgcctctgcctcccgagtgccggccccccatcttctctggtcttgtttggagttgggtgtctgtgggttggagggctgggagttggctgtggaaaatgaggtggatgcaggtttttattttttatttttctctctgccccttctgtatcagcctcaccgtataaccgctgcaagggcagcatctatctggtgtttgacttctgtgagcatgaccttgctgggctgctgagcaacgtcttagtcaagttcacgttgtctgagatcaagagagtgatgcagatgctgctgaacggcctctactacatccacaggaacaaggtggggcagaatggggcttctctgctcttgactgctgtgtaggccaggctccaggatgctatgaaacctgactgagctcttgtgtgtcctcccttcagatcctgcacagggacatgaaggctgcgaatgtgctcattacccgggatggggtcctgaagctggcagattttgggctggcccgtgccttcagcctagctaagaatagccagcccaaccgatacaccaaccgtgtggtgacattgtggtaccggcctccggagctgctgctcggtgaggactcccgagcgggcagaggggggcaggggccgggtgcctacctggccacagcccccattgcctggggccttttgagccatcagctctgggacgtggagtctcaggaggcccttgggcttaagaggcactcccggtaccctcttcttctcaggagagcgggactacggcccgcccattgacctttggggtgctgggtgcatcatggcagagatg

SEQ ID NO: 26573 - DNA, 1333 bp, Mus musculus
gtcccgtccccccaccatcacattgtccactgcactgtagtcccatcaccctctgccacattgtccactgcaccacagtcccgtccctcgccacactgtccacaatgaagcctggattcccgactagaaatgctcaccatggcctctgtgcctccctgcagatggcttctggcggtctggcatcatggaggagcacctgctggacgctgtggtgcccttcctcccgctccagcggcatcacgtgcgccactgcgtactcaatgagctggctcagttgggcctggagcccagcgaggaggtggttcaggcggtgctggacagcaccacctacttccctgaggtagaacagctcttctcctccaatggctgcaagacagtggcctcccgactcacatttttcctctgagaagcccaggtggcatcgctgcctcctctgcctggtcagagcaaacacgaaaggcctgggtggctcctggaagaaatctttcctaagctggttggcaagtgggacccagagcacaatgttaagatgaagaaaggtgttggccaggccaaggaagaaaggtctagaagcatctttgctaagaaactcctgggtaccccgcaacctcacagccgtgccattgccctgcagtctgagcctgagccttctcaatgtgaacggcaactcagggacgaaggctcctggctgcttccagctggggactcttactggcatgccttgtctggctcctttcccagacctcagcccacagactgtggctggacccagcaatccagctaggccaggctagcacctcacaggttccccaaatggaaggactcaagctactacatgggcctgaatttcaaagtttttaattttgtacaagagaacagagattaaataaacttagccttggtattagaacattgaccaaagtttcttactgtcctgggaggaggcagcttggctgaaatctgttcattgctcaggaagggcttcattggccctttgagggagtagttaatcgtcagaggtgagcttctctctgtctcctgggatctgttggacttcctgagttaaaaggttagtcagttccaagaagctttcactactgctgagatctgttgacgagatctcactgaagcttaagctatcagcagccttgctgggccatggagtctggcccggggtatcattggcactctcaccaatgtcactatgggtcgtgctgtgggtcaggctgggagtctttgttactttctggctgctgcgctgggccttgagtttccagccctgggcgcgaacagccttagctcttctgattctctcctttacgctcagggtaga

SEQ ID NO: 26574 - DNA, 1810 bp, Mus musculus
acagaaactgctggacacgctgaagaagctgaataaaacagatgaagaaataagcagttaaaaaataagctgccccccaaaaccccggctcccttcccaaaatgctctgcagctcccccgtgcgccacctcggttactctgctgcctccccagccctgcacgccctggccaccccgttgccgtgctgagttcttctcctgtgcgatgacaccccatcttgtcctctgaaaagcaagagagtaatgtgttgttttttaaaaatgagcatcttctgtatgtatcccacagtaagttcacatgcaagctccacactgcagaagcgtcagaactccggaccgagtgaattctcccttatttatgaccccgtgacctgtatatagccctgtcccgcgtgtgcacattgcttgaatatggaaaggtagatgtgtgggtgtctctccaagcttggttggattcatttctgtccttgttggtgtttgttccccggataggacatgctgagggagtgatgttctcgctagcccctgctcgctccctgttctcagcgatgagcagacacctctggaggctggcgtggaacgagcctcctctttgcacctatgggggaggcttagggtgtccacaggaagccagtctgagtgccggccagtgtggtctccagagcctggcactgctttccctgatctgtgtccatactgttgtaacaagttaagcccttcaggctaaatcagcctgcctagtgccctcggagcctccagagttaggtctgaccagccccctgcttgaacacagtttggatagaggccaagggtcaggggtgggctggaagctgtgagtttggcactctggtcaagggtgctttgctgtaggagctaggcctgaagaatgggggccctgctgcttagtcagagtcccctcagtttaagatacttcatcaatcttaagtttgtgtagtgtacagtcatgtgtcattgtggttgtatgaaaaggatcattttattctttgtattagtcatcactgtataaaacatagctagctataaagcagaaattccagaagccgatgctggaaggatggtctccaccctcaggacgcagcagccccctgagcatgctgctcaccctgctgctgtagtcgtgaaacaaagacagtggaagtcacaaaaatgtccccagcccagtccccgcccctccctcccgcagatttgtacgtattactgtgtctcgtgctgtcttcgcaaacgtggtgtacgcctgccgcaggtgtcctgtgcccttctccctccctgactctagagtctctcttctccttagttctcaggcctctcccctgctcctctccagtgaaccttttcccttaggactgaaccacactagcaccggttgatttcttctgtagcgcttctcccatcccttcctccggtcaagcaatgctcatgcttcaggatcttgtttgtcgaacatgtggggtttcctttatgttatttatataaataatttctcaaatggatatttaaaaaaaagctagtctgtcttgaaacttgttaacttgaaactcttgaatctcagtgtttaaagtatggaagcacaaccgtgtaccgctctgtaccgtcctgtactgcagcatttgagtctaataaagacgtcagctctcactcatggtgcctgggcccactgcagagctggtttgactttgaggactatagaggaggccagccaccccacagctggggcttggaggcttctggatccagggggttgtggcttgcattgcatctgtacctatctcccatctggggtacaaagcttg

SEQ ID NO: 26575 - DNA, 2026 bp, Mus musculus
accgagctccgaggcctgttggcccaggacctgcaggctgaaagctccccaccagccagccctcttctcaatggggctccagtccaagagagctcccaacccgtggcagtcccagaggcctcaccgccagcctcacccctccggcatctcccacctggaaaggctgtggaccttgagccccctaagcccagtgaccaagagaccggagagcaggtgtctagccccggtagccgtccccccatccataccaccactgaggacagtgcgggagtgcagacggagttctaagcatggcctccaggcttctgttggactctgcaccagggcgctcctccttgggcaccacagcctctcacctctggggaggggtactccagtttgtgccttgtgggaaaggtggctggggtggtgtggcatctccaggggtctggcctacccaagtcactttatggggttcagtacacctgttactgccccgttttctgtgggctgatctccaatgctgggtctggttttgagggtttcctctttgtgcaagggtctggggagcccctccatcccgccctcgtactgttacggcggcagatgaaagcagtggtggtgtgactcacgtataggaagctaggaagctgtcatctcactctggggctccttgggaccaacgtggcaaggaaaaggcagaccaggcctctgtcccgcccactccctgcaggtcccaaggttagacactggcctcactttgctagctactgctgtgggagggcggggcttaggggtcttacaggggagtgatgctagaggtcagaggtcatgatggaatgagaaaggcccagaatgtgttagtctgtgcaggggaagtgtcctgagggggagggagcttgggagtgtctttgccaggatggcaaagtgaaggtagctgaagttggagtgtcttgggtgacccgttcctgctcatctggctgacaacgctcattggcagggcttagctgtgggctgtttcactacgtgccaggaagctggtggggctccagagggacattgagggctatggctctctgagacactgctgaccattcatggcctctgctcccgtcacctaatcctgataattccagacccctcttccaatgtccttgtgagccatttgggcttgtctttccctcttagtcacaagggtcaaaccaagagtcagttagctagatgactctccccagactctgtcgccagagttgggagaacaaagcagagactgccgctccaaggcccccaggacgaggtccctcccagtcctgtgtcccttgctctgtggacctgctccccagacgcaggcctcagacccacaggatgtggccggtgctcagggacacccagtcccctgccctcactccgagtactgacttctttccatgttctctagtgccttgggggtttccaccatccttccagatatggtatgaagaatctatgcaaactgtgtaagcttctgctcatcaataaacgctttatttaaagctcatttcctcatgtgctgctggggtgggggagatctgggcctaccgtatctagggatccattcatcccagatctcttgggctcatcatatgagctaccaggcccctgatctgagtgtgttcctgcacgtgtgtacaggtacaaattcacatgtgcatgtggaagccaaaggatctcggatcattccgcctcgtgttttgagatgaggtctcattagcctggaactcactaactcggttagcttggctgactggtgagtcccagggtctgccggcttcagcttcctcagtactttgattacatgtactggcctggctctgtgagatctggggagccagacttccaaatgacaactaatgtactgaggcctctttctctaactcattcttacaatcccctattttagagggagaaactgaggctcagaaagaaggggagaggccatagagctttcaggtgactagccttctgatggctcatcagtcccatgtgtccaccatgagggtggcctcca

SEQ ID NO: 26576 - DNA, 1181 bp, Mus musculus
tctgcgcacctgcccactgtgccgccaggagatctcccagcgcctccggatctaccacagcagctgaaggcacagcacctaccagccctggcccttccttggtaccatctccaccactgctggactcccacctaccctcattccccagactagggcaagactgccataggcctttgtcacccaccacctgccaccccgacccccactgctctgagcactaggcaggcaggtggaatgttcctggcctgtgacatagctattctgaacagtgaacaaaagacagggcaaatctgctggtggtggagccttggggcagggggccaaggtccagcgtagggaggtggccctgcaggactcaggaatccatgttagtagccaagcctcagcgctacacccagctgtctgcccctcctggaggtgtccatatctgtggaatgtatcagccatcccgtcctaaggtgcaccagtgtctctgggaaggggtgggttgtgcaagactccccagcacccttttgcttctttctgaacacccaccctcccatatctgcatccttagcctacacaggcaggttgattcaaaacaggagcaccagtaaatctgactccttgcagagtcacccctaggtccatgagaacttgggaggggtaggagtaggcagagtccggggagagggcagctcttctggggaaaagggcgagagctgctgcccctgggtcagagggaaggcaacagaaacattgccccatggagagttaggcaacaccctcttgaaagagggcgaggggaacagagccagagatgggggtctcattatttatttataagtagcctgtgctcatgggacaggttgtgttcctgcaatgattatcctaggtgagggggctgctgaggcaactggaaggcatgttaactttcagaggggcagcccaccctcaccagctgtagtgaagggttccatgtgacatggcaccctactgccctccccagtatagtgtatatggcctacagcatgtgctcaacaaatattactacttgactggctctgggggaactagacattagcacctagctcaggcctggaggccaccctcatggtggacacatgggactgatgagccatcagaaggctagtcacctgaaagctctatggcctctccccttctttctgagcctcagtttc

SEQ ID NO: 26577 - DNA, 1172 bp, Mus musculus
ctttttctccccaggcaaaagaagctggggcagatgacattctcgacatctctaaatgtgagctctctgaggtaaacaggatgacgcaggctgtgaatttaatctgtcctgttttcttgggtccttggggaaaaaacagataatggcatgagactttgaaaatggcagaagtaaaagacgggcaggtagctccaccaatgaaatgctggacctgtgagcacgagggcttgctagccagccatccagttgagtcaacagactatgttcagtgagagactgtctcaaagcataaggtagggaaagagacgctcacagtctgcctcacctgtgtgcaagcatgcgcacacagacacatccaggagcactaattaagaaattatattgtgttcttttccaaaagaattgagatgatcttttggcctcaacataacttgcaaaagtcagggcctacttagaaagggaggcaggtggggtagaacgcacctgtattcccagcatcccattcgcaaggcagaggtggggagtttgaggtcaacctgggctacatagtaaaaccctggagaaaggcaggacagaaaactgtaggcaaaagtcggtggcagcattcaccatgctttcgaggtgcctggcatttaaccaggacgggaaagtcgggggagggaaactacatctacagatgcctgaggctccacctgtcgatggttcctggtaccacagaataggtaggccagagcaggctgggcagtcctgccagctgactgaagagggctgacaacgcccccagctcccctcttccatagccctctcctagctcagcactgttctcccagacagtgacttactgtcattagtcacctcccaacaccagcgccacagagagataggtgagacactggtaggtgacgaggtgctaacccgtctttgtcttatcttagattccatttggggcttttgcaacgtgcaaagttctacagaaaaaggtgagcagtcttgttcagactcacttgctggatgtctgcttgggggaaccacatgagacttagaggaaccctcattccccccacacacacaccaccaccagtgccattaatagaaaggacactcaatgcgttccgccactccctcagttagaaggagatgaaagtgtttacacacaggtggatacatgaaca

SEQ ID NO: 26578 - DNA, 1253 bp, Mus musculus
atgggtcttggcaaagatttccctgtcccggtgaatcggattttatccttgtgggagggctatacgacagggttcactgtaagtcagtagtaggtgccagggtgcaggagtccgccatgctagggattcaactctggaggtgaggccagcaggaagcaccttagctagccgagctgttttttcggggccctttagcgtgtctggtggtggttggttttctgggctgtgttcacatcaagtctctttgcagatcgaggtggtgccttctgcctcagccctgatcatcaaagccctcaaggagccaccgagagacaggaagaagcagaagaacagtgagtcggccccactccctgggtttccgctgcagtgtgctactcagctgtgtcgacccctttcttgggacctaggggtggaatgagatcacagtaggcgtctgttgtctgttccctttcctgggtgcagaaatgaaacagtgcctcaggggtttaactttatctgtttccatccctaaaatcgtgttagggctgctggtgaggacttgcttgtgccccagccacccgccactgcacctgaccagtattgttggctggtgcaatccagtggtgagctgacagtgagccccagcttttaggaaacagggctgtcctacatgtggatggctctgtgccgaaagcatgggaacagcccagcgataggtaaaatggagccatgatctcagaagacaggggaagctgtaaaaggccctgtacttgctttctgcagttaaacacagtgggaacattacttttgatgagattgtcaacattgcccggcagatgagacaccggtctttggctagagaactttctggtaagagcacgctattttccctgagtggtggctgccactttgctgttgaaggttcaagatttggattttcccatggatccatattttttccctgtgttcctgcaatggaaccctggaattctttcccctgtgactgaggccaccattcttactgtaggaactatcaaggagatcctgggtactgcacagtctgtgggctgcaatgtggatggccgccaccctcatgacatcatagatgacatcaacagtggtgcagtggagtgcccagctgtaagtgactgttatataagggggaagcagttaggctgggggaaagctggacttttgttgctttacttttggtgttttactggggcattgttaacttatattccctgttgtgattgacaatatttcttttccca

SEQ ID NO: 26579 - DNA, 1253 bp, Mus musculus; identical to SEQ ID NO: 26578

SEQ ID NO: 26580 - DNA, 1147 bp, Mus musculus
tatgagtcttaagtcagatggatgatacactaaagcttgctctggatcctccccatcctggaggtacagtgggatctctggcatagcaattgcattaatccttaacattttccataagtctggggaatgtggttttggtagatatctacaattaacaaaagctactaagtacagcagggcatattgaaagagcagcgtaaacctggaccaatggcagtagcagtaacaacacaagggaaaataatgctttgtgacctttgcatttttccaataaaattgtatttagagaagcaaacccagtgcaattgttggggctgcagcagtgacttgagtgggacatcaaatggacctgaatttgattcccagcactcaaggtggttcacaaccattccagatgggtaataggcatggtcagcattaacctaagccacatcctgctcaccagtctagtctggtggctaggagggaggcgccaaggaggcctgtgctgtcttgtggggtccttttttcttttttgttttgttttgtagacagggtttctctagccctggttgttggttgtcctggaactcagtctgtagaccaggctggcttaaaggcatgcgccaccacccccggctttgtggagtcctctttaccataaagggaaactgaggttacagtccccaggtcgttgtgctgtgggtcagtgctaccaagatccaagcaatgtcaccatactgtgaagcacttggttgtatgtgatgctttctctgtaggtatgggtttctagaaaccaattctctggagaaaatgcaatatcagtaacaagccacagagcacacaagctctctcctggcacaggctatagttgtggccaccttggaggctgaggtagatcttaagtacaaggtcaccccaggagaaaccatttaaaatagaaccctggagatgtctcagtttttctgccagaggacctagtcaatttctgatccacaactccctggttcccaaggatttgctggcgtctttaagttgccttttgcagaggacctgagtgtttcccagcacccatgtcaagaggctatcacctgtaattccagcccttggggattttatggcttttctgctgtgggcactgcacacatgtgaccgtaacacatttttc

SEQ ID NO: 26581 - DNA, 1199 bp, Mus musculus
accccacaggcacacctgtgctcatgtgcacatgctgacacacacacacacaatttaaaataataaaaataaacctttaaaagtttaccaaaaaaaatcctgttggaaactggcccactgataaaatgcaagtgtctccgtccagctttgctgttttacttgctgcttatgcacagccatgagtcacacttactcgtcttccccactgtccccagccttttgttctgctctacagattcagtagtaaagtatgtgtgatcttttttttttttaaagatttatttatttattacatgtaagtacactgtagctgtcttcagacacaccagaagagggcgtcagatctccttacagatggttgtgagccaccatgtggttgctgggatttgaactctggaccttcggaagagcagtcgggtgctcttacccactgagccatctcaccagcccagtatgtgtgatcttaatgggaaagagatacatgtacatgttcaagatcagaattccagtggggacgggggtgtaaagagtgagcagtgctgtggtggagggctgcattgagaggtgtcctctctggaagttgctgatggggctgaggcttgcccagcagggaagagcatcacccccaagaactaggaagcattccaggtatacggtcaggtggaaatgccctccctatgtatgtgtctatctagaaagccactgttacagaacagcatgcatctgtctcccaggtgtactggggacagaggagagttcagaagcacaaacctcagacctgggttttcagattcctcttttcctaagtgtgtgcatatgctgtgtgtgcatgtgtgggttcacgtacacacatatacggatgtcttaggttgatgtcaggactctttcactatccatcttctaccttattcattgagacgggatctcctaatcaaatgcaaggctccctggtacgtccacttttgttagccagcttgttctggggagtcccctttctctctgccttcctgaagtaggatggcaggcaccttcacaaacctaccaggcctgtctgtgggttctagggatgtgaagtccagttctttgggcatgtgtggtgagcactttaatcactgagccaccagctcaagctgggctctcaaactcttacttttgccattccacctctgaatcccagcatcttgcattgacctctcacc

SEQ ID NO: 26582 - DNA, 1168 bp, Mus musculus
atattaaaccaccacagagccccaagacaactttcctggaatgtccacctgaagcagaagattctatataatttctcatttaaactggggctctttgggaagtattaataatagctggacagcagaaaaaggagatgcagaccaggttcatcatggcaacctggaatcatgctcttctccctatcagtgaccttgaaggatgaaaatcttctcattccaggatacctagataatcccatcctgcatccactttgcccaatgactttgtagtgcttcatcctggcctgataacgtgtttcacaactccatcccctccaaggcctcagccaggatgctggtagcatgctgccaggctcagaatatcatccccatgaagtttcttaaagttttagccactgacatctctgtctgcactctcagctttgctcagtgcagacctgtcttgtgaatactatgctattgggaagagtcaaaagccaaaagaccttgatcccaggtctgcctgctgtttgcttatgaccagccttggccaaatctcttgttcctggacttctctgtctgtggcctgtgggtcctttctggtcctaatgagctgctagcatacctaatccttctgtcctctgcttactgtctattggctcagttggacccaatgccaggcttcttggaagcctcccagttagttccttttcttcactggttcttagagtctgtttcttggaccagcagcaaggacatctcagggaaatctttttgatgcaaacttccaagccagatgcaagacctactgagcgtggaacactgggctgggagccagccatctcctagcaacccctccagggctaccaatgctgtcaacctggacaccaagtatagagggccactgcttcactgcttcagtcttcctatgactactccagaagggctgtctgctagacacattgttagctgctttttgtgagggtttagaacagaagagatgccaacatcttagagatgtgtggctgctgtcatcactccaaaaacagaagaagaaacatgaaggtcatggaaactcaaaagaggtcgaactcctgacagaaccacagagattggggctgagagatggctcggggttaagagcaaatatgctgtcctcacaagacctgagttatgttcccagcagctc

SEQ ID NO: 26583 - DNA, 4097 bp, Mus musculus
gcttttcaaggtttttactggcttataactctaccttcattctgtactgtagaatcatacataccaggtaactaaatcgctccaccttgagttagtactccgactaaaggacaggaatttgtagagcttgtctacaaaattctccaagcagtgttgtggttttgttattttgttttctttttttttttctctcaaacagccagttcaggtgcacagcaacttttttctatgcagttcccagggaaactgcagaacttggaatttgtactttttgtaaagctatatactctacgggaattgcaagcaatatatctatcttggtattgtgtgtgctaatgagagccccagaggctccccactctcagtgtttcctgcttaaagaaaaaagtcagaactctctctaagatcctctgtgtgtcaccagatctgtgtgtgtgtctcacatttttggtcatgtggtgctatttttatgttaactatcttttaggtcagtatcggtctagaaaatgtgaaacctaccagtagtactgatttagttactttcctctcaagttcacagcttggaaagaaacctcaaaggcatgtgctggcaaactggttactgtctgagttgtgtctggtcagtgctttggagactgtctctgcttgctgttagattcatatacaccaacaggcttcacaaatggctctggtgctgtggactcaggcagagagggcagtttagtcatgcagctggctgccggggacagcggcgctctagtctctgcctgagaacctgagcctgagacatggactcaaaccaacagacccagaatctgaggaccaacctcaaaggctaggagctaaggaatacagaaatagatgtttgctggtctgtcatgcttttgtggctcttaagataccaagaacaatgggtttggggggaaaactttttcgttttttgtttgtttgtttgtttgtttgtttgtttttgagaaaaagtttgatcccagcccttgtgtgtagcagccccggtggcggctcagtagcacctccttagcacacaggatctgctcacatgtgaactcgcctcacctcagtgttaactcctgtagatgactaatcccgctgctcctggagcagcttttgctaatcgggtatacggtatgccttttcctcgtcaaactgcctaagtcgggatctcttctttccctggagcatttgttcagccgagaaagctgagcgcctcaaggggaggctgggccccaagtgtttacctacttaagtgtgttctgaggcttcaggtaaatgtctgtgattttcattttccttacatgattgcgtttgcttttgatttttttttaattaaatgcaaaaacttttttttttcgtattgtgatatcaattaagtttgtgacaagaaaggccctaaatctaaggatgtgagacatcgagctcagggaaggagcctccttttcactgaggcctggggccttctgaggagcttccagagctttctgtggtgaggctggcacactcgggcagcgtgtccatgtcctggctcttgtcactgtctgttggaactcacagacatggagttcttgtgtttgtcaacttgtttagctggtttgagtttaccaaagagtgacttatccaaaattgtctttgacaaaaatatacattgctttgattgtacagttcaggttcaaacattgtaatgggactgttaaagggcagaaaaccgatttgagttttaaatgatcatgattccgtgttttacaaattgcgcttgctcccattcgtgttgctaacactttaccctctccactgctagcagtgttaagaatgaattctcaagccataacacagtactgtaaagttcacagggcttcgagggggacagcgcccaggccagcacagcgctgcatagcctgtctgcacagtcaccctaggtgcctaccggtgggcatggctaccaagggcccactgtgcagatagcgcagcagcggttaattgtgcctagccacatgaggatgttccaggagagacagcatagccacctagcaggcctctctccccaaagctcactgtgcaactccttgtggacagcaaacctgtccctgtacagttgtaggttaggtctctcactatagccgatgcacaagtccactaagataaacaatatgtgaagacatcttttgcagtgaagtatgtcctgctttcatacaggcctgtgcgtgattgagtctcttctcagctacctttccatgttagacaatgtgaagacagccacagcgcccttccctgcaacattaccccattgcacaaactgtgaagatgttttatacttttgctaacacttgtggttttcaatctttgtttgttctcatcagtactctgccctcttgtttctactaaaactgtaaatacatttaggaaccatttgtaaatacagttacaaagatgagttcatcttcctggtcagtggaaaagcctcccagtcaattggctctgccttggcatttttttgttgttggtgggtttctctctctctctctctctctctctctctctctctctccttctctctccctctctctccctccctcctctcccttcccttcctccctctcttttctttctccctctctccttccttccttccctccctccctctcccccctctctctctctctctcttgtgtgtgtgtgtgtgtgtgtgtgtgtgtgtgtgtgtgtgtgtgtatactgttggttcactgttaaacagaatatactgtagaactaaattggtaatttttaaatctcccagagatctataaatgtatgcctctcttaatgatggcaagtataacccacctctgttttacaggcatgcatttgtgtgtgtgtgtgtgtgtgtgtgtttaatttttaacaacctagattctggggagaatccgaaagaacatgacgcaagggcggggggacgtctgtgtgagtgagctctgccttgggttgctgtgttttattctaagctttccgcttgttactgctatgtgtttgtagttctgttgttgttagattctataatggtttcctgtgaagccgccactgaaagggactcaaatatgcaacatctaaactattttccaagggctcatgccccttgaatggtgcttttagcctggtcagggttatttattaaattttatatatgaaagtactggggaattatgtaaactctttatacaagactatctagttcttacatcataggtttcattactcagcgcagctgaactgaaagttcagggaagtcattcactttgttccagatttgtaatggtcgtcacacatgtcgtcttcagtaagtgccagagttcccactgttcctgccagggcttgccaactccaggtgctcccctgggtctggtacagacagggctattgctgctcctggagcaagctctgctcactgccctgagtggcagcctgagcttacagacctctcaccgccctgcccttcagtgacaagcatgctgtgaatgtggcctcaggacttggagaccaagctccaggctgctgccctgagtagagcaagaggtaaactcccctgcctcccctgagaacgaccgttttcctaatgtgaaatcacctctcaccactttagcagtagggctaactagtcttctgttacaaatggctgagcaatttgaatgacttcacatggtgtcattatcttgcaatataaactggtaacctcaacgccacacttcatcaccacgtgaagtaaatgaagctagctaagcggatgctgtgtcactagtaacttgccattaagggttattttatagcatgaattgaagactatttattcaaatgatattttactcgtattcattttgctttaggtttgtgacatgaatatttcagtgctgcttcatttcgttctgaattcttgtttcttgcttgtaaatggcttttttatggtaataaattcgatggaaattgctgtttgtaaataaaaatgctgctagagcaaccttgctgtggtctctgtgttcccaccccacccatgtcctccaggagcgcccctgcctcagacaagcatctctatttctcaagccactgactct

SEQ ID NO: 26584 - DNA, 1211 bp, Mus musculus
ttgtcaaaagctgacaaagctttcgttcagttggaatgtggcagaccctgtgagaaggtggggtgtccacggtccagaaggcttctgacctgcctttcccagtagagagcctttctggcagcctgccctgttagagtaccagcctctcccctcaccactgccttaggaaataaatcctcacccttccagaagagcctgactagtctagtcgtgggcagcactgcccaccagtacaatgtatgtctccactctgagccttggctggttgtctccagtccgagtacaaagggcttcaaggccccactggttgcgtttcctaatctgcaggcacatgccttcaatctgggatgcacacgtcacaggagctcctcttgtgctgtggtttaccttgtgttctcccgagccctggcccaggacctgggatttctgctctcaccacctccgcctacatcttcagagcctgccctaaaggctcccttccattgcaggagagaggagtttcctgaaccactctgaccctgggccgccttttagctgttgggaaagctacgtgctaccgtgggtgatgtaccctgagaagttgaacattctggaaaaggtgtactggggctgagtccccaaggtcggggtggagctttgctgtgcccacagatgtggttgctccctaaattctcagatactttggaaatgctgagggccataggccaggctatccttggcctcctgggaactaggctgctttgaccgtaaaactaactttatccagagaatcctgggttgctttgggttttgtttttctttttgttctctctctgctatttacatatttaaaggtactagtttgcaaacctctactgatagtgccctgtgggaagatgctggaacaccttttgcaaatgtgattttttttttcattttaaatgttgcttgaagcctgtgtcatgtcagttgctgctgcctcctttccttttatgagggtcccaatgtttcttccagaaagttattttatttatgcaagtcaggtgactcttagaccacagaaccatgggatgataagcagattgtcattaggtgcatatcatggatatttgtgaaccacctgtgttttagaagttaaatagttctttctagaattgctgtcttcagtgtacagcgtggttttaattgaatgttaccgtttaatattttcttcttatagaagagaccatgtc

SEQ ID NO: 26585 - DNA, 1154 bp, Mus musculus
agctcttccagtcagcagtggctaaggcaggggactgggtggcagaatctaacccagtcctgcccaggtggcagcggccggctgtcactgttgtcctgaggtcttgttgcattttgttctctcctggtagctacagggcttctgggctttgctttggtagctgcatctctggatgctgctcccctcaaggctacagcaaggactcctgggctgagctgtgagcagagctcttttttgtctactttcataccgttctaaaggttctagctaaagccctggtgatgtcaggcggagcttcagagtccgaagcaggagacactgtcaccatgctgcagattctggataaggcacgattttatgtttaattctacttggtcaagtctatgggtgccagagataggtgtttctagttggtgtgttgtcctacgcttccctcatttaatggcaggggaagaccagtttgcagtgtcacacgacagtgctggctagcagtgacctgtggctcctctgccttagatcatggtgctacccaaaagggcagccagggaccacagctcctgagactaagccagaatggatggctgagggttctccaggaacaagacgttcccagactcagtaagtgagaggcagcaacttatacacagaaggcttgagaaaggaatcctaaaaacactggtgtggacagtgctcagttagagggtgcgctgagcaatattgtcagctctttgtggcttcagagggggaaggagccctacattaagcaacgtcatctacagactcatgttccccagtcacagagaaagctgcatttacaagtcccagtagtttatgcatacacacaccatacatacatacatacatacatacatacaccatctctgcaaggacaaggctgtccttgaggtctgttctgcatggtcagatgttttaggttgggaagaaagcttaagctcagaaagctttaagcctgtgacgggcctgaggctcctgctgggtaggggtctggtgtgctttgcgttactggccaaagcagcttagggaggaaaaggtttatgtcagctcacaccaccgtcagtgaggaaactccaggcaggaacttgaacattgacagtcaagactgctggccagacacgcccacaggccactcccac

SEQ ID NO: 26586 - DNA, 1137 bp, Mus musculus
gatgagtagggaaaggagagagagtgatgtgccagacatgttaagaacaagtgattgagctggagagatggctcagcagttaagagcgctgactgctcttccagaggtcttgttcaattcccagcaaccacatggtggctcacaaccatctgtaatgagatctgatgctctcttttggtgtctgaagacagctacagtgtacttagatataataaataaatcttaaaaaaaaaaaaaaagccgggtgatgttggcgtgcctttaatcccagctcttgggagacagaggcaggtggatttctgagttctaggacagccagggctacacagagaaactctgtcttgaaaaaccaaaaaaaaaaaacaaaaacaaaaaaacaagtgactgttaagaaaacctcagtttcttcacttgtcatctttcctgtctctcaagcatgacttctgagggactaaaggatgatgcaagtgttataaggaagacttttaagaactactgtgggcgatggctcagttggtgaactgcccagcaaacacgaggaccagagttcactccccagcacttacataaacagcttcagtgggggtcagacagggggaatcttttggaacttgatgactagccagcctggaggttgtcttaaaatcacaagtggaagtccctgagaaacagattaaagctgacctctggtcagcctgcacattgggtcctacctccacacgctcacattaaaaataatcataaactaacatctttaaagaacaatagcttttgatctttgagttgtctggctctttatatgttacttagaaagcttggtatttattgatgattggtttctagtattagatcgaggtgatacatggcagtgatagatggtggaggagtgtatgctcatgtgtgcactcgcgtggtagccagcaattgataccaagtgtcttgggtcattctcacctgcaacctgagccttccctcacttccccaggagctcacccattagccagtcctgccagctagctctctgccagaatgaggcaggccaccacactcacttagcatttacatagctgctggggatctgaactcccggcctcatactttgcagaggagtacttttcccctctgcgtcatctcccc

SEQ ID NO: 26587 - DNA, 1184 bp, Mus musculus
ggcgcggagccgtctgaaggtactgcggggcggggaggctgggcgctcgcgcgggaggtcgcggtcggggtcacgagtggccgcgacacgggacactgctctccctccgacggcggtgatgcgggacggcgcgagtgactccgaagccccggcgccccggcttagagtcctgcggcctcccgggcgacctcttggccaaggtcaccccgcggcaggtgcaccgccgcctggagctcttggagaatccgcccccggggcgacctccgggtcgagccacccacgcacgaaccgacgccgcgaaggagaacctcgctgccctgagtttcgcctctttgtcagaccgttgtcacctgttttgtcctcacctggcctcttgtcagctggagtttatactttgcatctttggtggtgacaacctttggactttgtctttacctctgtctcctcccttgcctcagtgttttttgactctgcttctgccccctcgggccgccctctggttcagggcccgaaagtcacactgacttcttggtcatttgtctgtctgtctctctgtgtgtgtgtgtgtgtgtctgtctctctctctctctctctctctctctctctctctctctctctgccaatgttgtgttcttgttctctccttcccaactgagtttgtttaggcagggcgggccttgcctggacctctgagccatggaaggtgactcatgaccctgtaaaactcccctggccgggcaccattaccagtggcccgatcacagtctggtctcagttctgacaagtgtcaccaaacctaataaagtgtcaggagctactgctttcacggtgaaggcccatctcaggatctaggcagtggtttgcgcaggtctccacaactctttgctctttccagaaaccctgggtggcctccagggctgtttggagctgctctgtttaaccaggccagcatctacaggcttaggaaggactagacttccatctgcctctgagacccttaacttagcacagtagcagagttctaggagcagtttactgaagaacttagaaacctaataggaatccattccctgcttgtttccaaagtattgtctgagacagagacaccatagggaggaacactgaaacttttggagtggagtgtatctggaatagacaggagatgaaacatattttatcaagtg

SEQ ID NO: 26588 - DNA, 1177 bp, Mus musculus
ctgcatgtcctggtcctaagtacctcctgtgaggatgcctggtccctgtgtccctggaagcctcaagaaagaaggctccatccattcttctctttcaccctgtccccagctagcatgatgctcagaggccagcaggagaaggtggctttcaaacaggctgaggtggggaagcccagggccagcctgggccacagttgccatctgtctattgcaggaggctgctggcctgcagagtcacacaagagcagatctgcccatgtgtgtgagctccagaatgctgcacgtgctctagtgtgtgcctcttgcttattgtggggccattcctcctcctcaacccactgctatcacgggggcagaagtgtctctcccagccctcaccccaagccttgtgcacagccatgcatgtgcaccagggtactaggtcatggtcttcctgactgtgtgtgtgtgtgtgtgtgtgcatgcgcgtgcatgcgcgcatacacctgtgaatgctatcgaggaacttgtggatcagcagggttagaccaccctgggaccccgaatgaggaagtgattatatgttggggccatgggacatggtgaagaaggatctatgggcctagggaaggctctacattatcctgaggacattaggagccataattgtcagcagagggtgagggaattctcgcatacaggtaagctccaactgacaggttgggttgtatcctccacagtgaagagtgaggatgaagatggagacatgaagccggccaaggggcagggcagccagagtaaaggcagtggagatgacgggaaagacccgagaaggcccaaacggccccgaaccatcctcaccacacagcagcgaagagctttcaaggcatcctttgaggtctcctccaagccctgtcggaaggtgaggggttctgggtggggcagtctggggccaacgccccccttttgcttattgtgggtctgttcctcccccatgacccactgctatcaccaggggcaggaatgttcctcccacccctcaacccagctgccaccttccagctgccatctacacagacctgacttgtctccctctctccgggtcaggtccgagagacattggcagcagagacaggcctcagcgtgcgtgtggtccaggtctggtttcagaaccaaagagcaaaggtgagaggtcacg

SEQ ID NO: 26589 - DNA, 2895 bp, Mus musculus
cagcggggccttctccaggatcctgtggtctgactctgcctctttccttctcttgcagtacgagtacagcttccgcaccgagcagagcgcagcagctcgactcccacccagccctacccggtgccagcagatcccccaatcctgaggagcccacagcctcctgggggagaagacatctcctacccggtgcccagactactgatggggtggctggggtgagagtcactccctccctcacctgcccgttctgcttgccctgctcactggccacgagactctgggcagctgcttggtcatgtgtggtcatcagctcgcccgctgagacttccctgcctccctgggaccgttgttcataattgtgactaatgtatgtgctgttagtgaccagaggctcctgtgtgatgaccacttaccccgccaagaaagaaaactccttccttacctggactcacccatgaggggcccaggcacacactccagccgcccagtgacacccactggctcccctcaactgaccgtcacctaccacagaaatcccacaaagccactagctccctcctgggacattccagggttgattgcttcacttaggaccctgcaagatccactgatggcctctgacccagctacctgggaacaagcgccactcgccagcaggctccagtggcccacacatgcatttcatgacggcactaagcagcaggactaagatgcacttgagacaactgtggactcttccccctttccacacactggacgtccagagagcatagatgggaccccgctttctatggaggtgactgggtgcctacctggatggaaacttggctgctagggtactatgcccagtcacaggtgccaattcccacaaagggctcatctgtggagtgtccgacgacagacgacagctccataggcctctgcctggtgacctgacctggtggcagctggctctgagaagaacagtacagaggcaccaactcgtcacagccagacccaccccaccatctagaaggcaccttccaccagggagctgctgttttgaaaagcccttctgtcccaggcctcagaatttgggccaggacatttcacaggtgtcaacctgaggtgccaagttgaaccctccatgtgtcgccatgagaacagtagtcactgctgtcccagctctcagcctcaccaccatgcgctgctttgccaccattggcttttagggctggaatgacactggtctccagagcatctgtggatgtgaagatctgcccagtggttagaggccatgggcagctacttcaccagctggtacaaacctctccagtcacagctctatagagacagctgggtgtccaaggtgcaaaaggatcaggagcaagaacaagccaacaagatggcgtgagctggggcagggccaaaaatacctcaccagcctacaccagcccctcctccgtcccagaccctcaggcccagtcagccagtctttctgcttgatggtacttcatttctatgtgtcaggaagggtcaccttgcttcctcccctcagatgtgagcacaccctatggggtacccatcaaccccttgcctctgggccccacatcctccgggtagcagaggtccatagagtcaacatagacatctctagcaaaacctagtgccacgctggtgctcaaaggagctaataaactgacctaagactgctccaccagctggggtcccaaggatctgtgtctgcggctgcaggtgtgacatcaagtggcttgtgtggcctgaggcccaagagaggggttgaccaccgttgtctgagttaaccgggaaggttgggcacaaagttctggactctcctaacctcttcattgaagtctgtacactttggccactctttctgttcctcggttatgaaatcacttctgccacagggagccaggtggccctcctcttccttggaggagaatgtggcttctctgaagctctcgaaggtcctggcctggaagtgcaaaaccgaagactgtgggcctgttagtgatccagaggccaagtgaggggattcctggagaaagatctagtgctttgcagcccatgcgtgcactcccacaggactcagcccctggggggagggcaaagcgcccactcggagctggagcagtctccggatggacggacggacggatggttgctgcacacttagctgaagaagaaccctgactgagaatgttgtagcactgacagcttctagcttttgaggcgttgaggacgacttggtgtctgtggtaggttccaggttgcacccaacccctggtttcttgtcttctggtgatggtaatgatcgtgtgtgcttacccatgcccgtcttatgtggacccagtagacccagacctgacggtagagctgtggctcacagcagcactgagtggcctttgggtaccatgtggcaggcacactgtcagatgagcacaaggagacgtgaagagccaaacctctcccatgggtctccccctcccctaccagcatgtcccaaactgctactgtccctgcaagcacacacatctctcttgaaatgactaaccagagcacagttccctatccccaccgtcccctctgaaaacttggttccttcctgagggccttggaaatggcacatgggtaacaagtggggagggggttgggggtggggggagggttgttccaggctcacttgcaaatttatcgtaagaccaaatctaagaattcctgtcagcctatctctgccacatggagagccccgctctcctcgggggaaacatgagagagaaccatgactcttcttcctggtggtcagcagcatatggccacctgtggccaaggtcatgctgaagcccctcggtcagaaggacgtccagcaggggactggggtcctgagcgcac

SEQ ID NO: 26590 - DNA, 1178 bp, Mus musculus
acacccaccgtgcccctgcaagggcaggctgagagacccacacccaccgtgcccctgcaggacaggctgagagaccccacaccccaccgtgcccatgcgtttcacagagctttggcctaactttccagaccgagaaacagcctttctgcttccattttcagacttcaaagatcactctggaaataaagtttcgttgctttttttttttttttcccagtgagattccaaaggttttacacacatatgagggcagagtttgcctggaggctgcctcccatgaagccaatgccagcccatgctcaggctgtgccaggcgcccactagcgtggcggtcctcagcacctcttgctaattttcgggtgctaattttcattcagctaggaattaatgcagcaagagggcctttttttcttttttttcctggaaggaaccgttcctgtcttggcactgttcacagctattcggccatcccggtgaatctatctaaagagtgggtgccacagtggcccagagaacagaagggtttctagtcttgaccacaggagacatccactaagagtaagggcaagggctggagagatggctcgggagttaccaatgcttgctgatcttgggagttctggggttcagttcctaacacccggtcagatgactcagaacccaccagtcactccagtgcaagagtaagggaaaccttggggtggggtatgggccttgtttcaaccccacacagcatcctgaatcccaaatactgcttgtagttgactacaaagtgtaaaaggtcatctcaaacagcaagtattttgtaggatatgtctctaaaatgtccccagattgccatattaaaaaaaaaaaaaaaaaaaaacctctgtagtccacatgtccctcacaaaactcagcaatgcaggaacaagtgagacattggtgaacttgagaatgaatgattcagtaagtaaaagatgacgtcatttatcaagttatttaaataaattttcgctgaaatgaattcctcgagaggtgacatcattgttaataattttaacggtaagatttctttacataaaaacgaattgactttttttaacaagctgacagtatacttggctggggcttttactaacttagcccccccaccctccacttcctgtctagagtgttcaaagtgtaggctgggtgga

SEQ ID NO: 26591 - DNA, 1141 bp, Mus musculus
tgccccctgtgcttcccttccttcttagttagtgccggtgatgatcctaagcctctgtgctatttactagagggaaagaaaggagggagggaaggaggggagaaggagagcgagagagagagggagaacaagcctttggtccagcctgtgtttggatggaattatttgtcacatgtcacagagaatgagactcttcacactcagatttgtcttagcatcatctctgggatggtgaatgatgccaaactttcctccaaggtgagatcctttgttggcgagtgctttcttttacagcatgagcaatctcttgattcactggcaaggcgacatccataatcttgaatgagggagtggagcttacctcgctggccctgtgcatcactctggtgacacatagaggcatcctgaattgctcactcggtagaggcagtgaacacactgggcttttacatgccttgccctgtgtattgacttcagatacatccagtgccagcagaactctgtccttagagaagatctttgtcttgaacgttgcctggtccccaactcttgctatttctgccaacggtcctgtcacctctgtagactcagggcaggtggcttctgtggccactgagcttcctggttacatacgtttcctggacagcttgggcattgtgcttgactgcccaggtctaaggaaggagttctacctttagctaacgggtcttgttcagggttattcaggactgcaaagatagttcagagtttatgtgaggacctgagaccaatccccagcacccacagacaaaactgggagcgggggctctcattaataatcccggtgctggggagacaaagacagaggactctatggtgctcggtggccagaacctagcttagtggagagctccaggccaggaagagactgtatcaaaaaactgaggatagccttcctgtgtgatgacacctgaggctgacctctgacctccacacacatgtacacacacacacagagtagttgttttcacagccaaagttcaggattcatttaggataacaaaacaaaggcatctcatttcccagtgtgccgagcacccagccaggaccaggcatacaggaggtgctcaatatttatggtcttgttccagagaagaactgg

SEQ ID NO: 26592 - DNA, 1182 bp, Mus musculus
gagaccagaggctttcctatcacttggcctggcagaaagtttccaggtacccttcttgcttctgacttccagatgctctatctggggccaggcacactgagtgtcagtagaaaagtgcctttgtatttattctcatttttaattaatcttaaaattcttgcttggtcctttgcccctctcacagccagagctgtgaatcattgatgtgagactcagaagaggagaacaggacagtgtattccatttccccttaccaatttcctgcttgtttccactgagggaccaatgtacagaccatcacagttcagcagtagagcaggctgtccttagtggcccgttcagcagcctggatctgttgtgagctctgttgcatgaggggtcacgtgccctgtaacttttgtgcttcccactgagtaaccgtgggtcttctgcaagtaattgtatccatttctaaaagatgaaaaccgtttctgaatttaggtgtcaatttctatattaattacactgctctgggttgcgctgtgtgaactcactagctgattgccatggtaccccaatctgtgatatcaggatgtgtgtgatgtgcatattttaatttgagaaatagtttaacatttctagatattcatttaaatgtggttatgcaggttaaacataacgtatgattgctgcttctttcattgcttccaattaaaccttgcttgttagtttaacctctaggtaatcccatcaaacaattgatgtcaaggaaacactgcccacagtagctgcagatgagtggccattaattttaattgccttgatattaaagattaagaagtattgggactggcagaatggaaacgatctgatgtcaagcaaacccacttgctaaagcttccccaggctgctggtgatattaaaattttactgtgagaattaaataaacctttattagtgatgactgttgtttgattggtccaggggtgtgcataaacagaggattcttacatatccagagatgaggccttccatggtagagattcctcaattatgaaactgttaataaagctgtaatctgattttctaggctaggtttcattaatgtattatagcttctctgattgtcaaggtaatattaactacaaagtactgaatccaacagagaattgttgagaaggagagaattctaagacagggcct

SEQ ID NO: 26593 - DNA, 1236 bp, Mus musculus
tcccatttgcataaaccagtaaagatcctgggctacatgaatatatatttactactggccagagtaaccaagtcttgactaaagatatagtattctgggctagagatatgaccccatgtttaaggacacttctcccagaggacctgagttcaattttcaacactcctactgagtgtctcacaagcacctgtaactccagcttgagttgatccaacaccctcttcggtcctcttggatacctgcacacacgtggcatacacttatatagatggacacatacacataaataatataaaaagaatggtaaccttaaataaaagtgcattctaaataaaatttatgcataaattcattagtcattcttaaaataattaagatgttaatgtaacatttctactgtcattcactttcatacagtaattgttttttgttttttaaagaaatattcaacccactacaaaatacataatctcacagatgcagcctttaaacacagggtgtttatgtgtagacataagaactgatctgaatgtcagatcaactataaataagtgatgggacagacagagggtcctgttaagacgtttcttctgtggcactgtggtccctcatccagaaaaagcagaaaaggctcttggggaggtgtcattatatcttaggggtcattctctcagttggggagatctgttcttaccaacaaggacattgtctcaccaccattctgcagtttcttcagaatgatcacacctgagaagacagcaaatagtccccagaaattcttacagtctcctttgccataaaattctatatgagtttctggaaagttggtgttacaatttaaattagttttagaaagtaaagtaaacaagtttaagggccttttgtactttttaagatccatttcagaatcattgggctacttaaagatcatagttcatagttacaatatccaaagagtccacaccacattctgaacttgacaagaagcttgtaacacatctggttcagcctgttttacaggtagagaagttcttcagaaggctgaccttattcaaggccatgtgccaaaagctctatgtgtggtcatcagataggagctgggttgtaggccctgcttggccctgtgctctagatggccaggattcaagccatagtgggtgattctatgactatctgtcatatggttattttatattgaatgttgaagttgttgcaagtatataatttttagtgaat

SEQ ID NO: 26594 - DNA, 1132 bp, Mus musculus
aatgtatatagaagcttttagctgagtttgttggctgggctcagcacgtgcggggctcagttctcatactgcttgtgttacagcccctttgcatgcttcaaagttactgagggtagctgggctgcagcttggtatgagagcagatgcttagcccatttaggacctcaagttcagtcaccagcaccaaaggacctgaagcaggaggattgagagtgccaggccagcttaagacacataggcacaccttgtctctgactgaataaatgaatgaatgaaacaggaaacaaaaattcccaaatcaaaacaatacacaatgacaaaacaaatcagatgtgtgcactacctaactaataaaaatgtattgaagactacaaaagttatttgtctatacctaaaatatagacaggaagttgtgtttattaaatcattaaaaacagtagatctgttagcataaatgcttttgtaaaaaacaaaaacaaaaacctagattttctttaaaatgttcattggaagagtagctctctgtgttacgccccagctctgaggcataacaccaccaccccaccaccacccccgcatgctaggctcacgggtgtgtgcatccatgcctggtgtgtgcgtgctgagctgccctgctgtgcccagggcctcgcacatgctaggcagacgatctgccacctgagctgcggcccagccctgttgtgcgctcttccacgttcttgtctggttaataggatatcttagatcttcatatctgtttctgtactcggtttgttgcactacattgtttgggttgtagtgtaggaagacaatttgtcctaacacagatactttgttgaaacagaggagagagttgctgtaccctttcagataattgttggtattaattttcatttatttcaaaattcaagtggtaagtttcctaaaggttaattgcaatgtgggaacagagctctttattatactgtgcacttgtaagagaatgagtgtaaaggcaaaagatgttttactgttactatgaaaacagcacaggaccgtaggaccctgaagggagcttggaggtagatgtacccacccctggcccaggctttacaggagactgaagttgctttaacttgcactagactaggcc

SEQ ID NO: 26595 - DNA, 1854 bp, Mus musculus
attatcttgctcaaaaacaaagaaaactgaacaggcgaacaagcttcagcttccagaaggagaagaaatcagggcagcagtgacactggcctctagtctggtgccacagcccaggtggcctgcaaggccaggtggaccggagtccaccagcatcctgtagtgccgagacccgcaggcacaggctgctgggctctaggggaaggtttagaggtaggggtgcgattggactgaaacttggcaatggttctaagtagcaatgcccaggagccaggccacctcctggaggggctgagtgctgctcagccgtgtgtcctgcctggcagtcccagcaagactgtacatagccatgccagacatctccttgcaacttgatcaaatttcttaaagcaaacaaagaacaaaagtgtacatttctctttctttccttttaataaacaggtatactctttatcgtggttggtatgatggaccattctttggggtagaggattgactatattatcttccttaaaatctgttcccatattgaacaggcagattacaaaagctgtggttggagctctcagaagcaatgtttagggcttagccagtagtttaactgtgccatttgtttaaataagtgatttgctttgagaatagcatcttactaaagttaggaattgaggacctagcatgtgcccagcgtaagtgcatgcgtgggtgcgtgcgtgcgtgcgtgcgtgcgtgcgtagccttctaaggccttctcaacatgtcagcgcctgtgatctgagagacaggtgctggtaatatagtgtgacagtgtctccaagtggtgctgagttcccagccagggtcttctctcatctcctcatagcaagtatgatatggtcagcctgcctctctgacctatctccaatcctcttaccggtgcctgctgtggagccagacgctgctgctgctgctgctgctgctgctgctgctgctgctgctgctgctgctgctgctgctgctgctgctgctgctgctatactgaatcagggagaaggagagcaagccctgggcagaaaaggcaaggtacccagcaccctgacaccacaccacacctctgtctacaccagatgcctctgcagacctcaccatggtcccgcctgtggcagcatccttgggccagggccacagccgatatcttatacgacctgtgtttaggacattttttaaatcattgtgtctaagcatctcagagtcaagtgtgcttctttgcaaaggggtcgactgaatgaatgcctctctcattctgatctgttcagccaacaggagcacccttttctaatgtcttccattcctatctccccccaaaagaaatattatttgtagcttgctctgtatttgaatttttagcaattttatatttagatatctttgaaattgtaaatgactaatttggtcattaaatcttgtcacatattcaatattaaaatactaaaataaaagtcataaataccctcttttgtatattgctttgaattcctaaatccttgcacacacggtgctgagatggtgatgtcacagcaagtccccgggggtgacaccctggcatttgataatgcagcacacactgctgatatggtgatgtcatagcagatccctggggtgacaccctggcacttgaaaatgcccagccatgctaagctgtacacaagccacgtctagtcgtcctttactcccgggacgctgggatctctggctctgctctccacagttgctggcacatggctctcagctggttaggttctcaggggtttgagttgcctggtgtcacagtccacggctgtgataggtgggcggcggtggccctcactccttgggcagtgg

SEQ ID NO: 26596 - DNA, 1218 bp, Mus musculus
tctaggaacatgtagcagcttctttgaaagctgaacattgttttgtctaatgctctacagcttccagacgtttccacatggctcttcctaagcagattaacaagctacacgcaggtcctcgttcctttcggcctttctgagttgcatattttatttcctgaccccaagtagagagtagtactgcaaaagggaccatgtttttcaggtgttttaaatttttaaaaaccagaacagaaatcttttaggaaacgtctagatcttggttcatgaattccctgttcgtccttctcatttttagaaagaacagtgtgccccttccaagttgctgtgtgagcgttcggtcgtgaggcacctgcacggagggtctcaggagatgcgcaatacgggctccctagatacactctcctaaggaagagctaagaaggaaatgtaaatctaatatatatttatatttgatgtactatgggcatcttcagactctaataaacaacaaggacagttgctgagagtaggctgtgacattccctcttgtgaaatggtttccttgacaaaatttaagctgagcttaaaagcaaaagcagaaatatttattagtctggagtagagtttatcgctctgcatgtgtggagtttgatggggaagtcatgaaggcgtgtaccaccatggacatgtgttgagcctgcgcattggggcagactccaccatgtggacaagcagtacgtggcatggcaggtgtgctcatgcgtccttcctttgcacctgcgcactgagtggaagccaggaagggctccttaccgagcctcagctatcatctgtctctgatgatggttcacattgaatgcacagaccaggaattcagtgaatgtcattttttaaaactaatttgtatcgtctgctctactgatccaggtcttactagtgttaaactattttgatcagccacactattcttatggaaaaaaatctattttggcaggttcctgtgcctttattgccctcttctgaaaaaaaaaaaaaaaaaagtgtctctgtagtttggtttgcgttgtacatcagtaattaatcaggaatgggctttggtgcctgagaagctggccaaggaggcacaccaaagcttcaagcacaagtcttgtacatacgccatcaccgaggggtttcaccttgtatgtttcctaaacctgtctagcttttttgacaaatgctgcaatcccatacttc

SEQ ID NO: 26597 - DNA, 1196 bp, Mus musculus
attccttactctccagtgtacacagcttgcacagcagaggctgccacccttcacctgtccaatgcacagaaattcctgtggtccaatttttatatgtttttctaagtcatctaaggatactttgatttctttttaaaataaattgtatatgtatttgtgtctctgccatttgtgtttggttgcccacagagactagaaaggggtggtagagaccctagagctggaattcagacagttgtgagctccctggcatgggtgctggtatgagctcaggtcctctggaaaagcagctcatgctcttaattaagctctgagccctctctccagttcccgggacgttatttctggctgtttattttataactagagcggcagtactgcttggttctaatggtttgtggtgcagaagaattgacttcccaattacggagaggttatgaatcctaacagaattcttgtttttttgtttgtttttagacaatgaaattgtatgcttcttaaaagttcaaatagctgaagcaattaatttacaagataagagcttaatggctcaacttcaagaaacaatgcgttgtgtgtgccgctttgacaataggacttgtaggaagttgctggcatccattgctgaagactacaggtactattcccgacctgcctggtttgtaagctgactgtagaacaacaatgttttgtttgtttgttttggttgggttttattgaggtaatgaatctagttataaagcacatggtggtgttttcttggatagagatttttaaaaacacagtttagaattgttaactgacagttcttgttagttaagaagtgtagtttacttcaacttttcatcaagggagataaagaatgggttgggaaatggctcaatgagtaaaacacaagcatgaggacccaagtttgcttgtccagcaccaggcaaaagcgggcatggtggggtgtgtctgtgactctgtgactccatccgggagaagcagatgcagaggatactgggggcttgctgatgagccaaaaccgctggctccaagttccatgagagagcctgtcgaaaaagaaaaagggagacggggctgctggggagaggtcactgggtaacacatgtcatggaagctggacagtctcaggtagaaccctagaattcaccaaacgaaggagagagctgagtttgcaaaaattgttctgt

SEQ ID NO: 26598 - DNA, 1172 bp, Mus musculus
ctacacagagaaccctgtttcaaaaagggatggagggagggaggaaggaaggaaggaaataaataatgataacaacaacatagcaagtgtttctgagtctgtgaagtaattgtttgaaagtgagttttgtgtgtatgataggtcagtatctttcaccatatcatcccaggatgagagtagcagcccagctcagactacacatttgaatttctagtcaacattctttcatttatccctggatggccaggccagtgagatagcttagtgaataaaggtgcttacagccaggcctgatgacttgagttcaaccttcaggagagaactacacacatatggccgtaataaatgtaaatttttccctgggaataacttctccattttaagagatatctgaaagtttgtttgattgcttattataataatctttttgacataaaaattgtttttcttttaattgtatgttcacgtgggtatgtgcactcgtaatgcaggtacccatgaactcccgaagaggttattgaatctcctggggctggagtctggcattacaggcagttgtgagccacctaatgtgggtgctgggaactgaaccccgtcctctgaggaccaacagacactcattactgttgagctatctctcctccactaatttgttatttttattttctgttttgagtgtttgtgttcatgtatatcatatatgtgcatatcatgtgagtgcctgcagaggccagaagagaacatcagatcccctgggactggagttacagtcatttgtgagctgcaatgtgggtcctttgaactgaacttggtcttctataagagcaccaagtactcttaaccactgagccatctctccagtctcttaaaagagaattaattttatggcacatacatgtattattatatagtgagatccccatctcaaaaagttagtagatggggctggtgagatggctcagtggttaagagcgccgactgctcttctgaaggtcccgagttcaaatcccagcaaccacatggtggctcacaaccatccgtaacgaaatctgatgccctcttctggagtgtcttcagacagctacagtgtacttatgtataataataaataaatcttaaaaaaaatgtaggtaaagtattaagtaaagaaatgattttcctgtcttcctttt

SEQ ID NO: 26599 - DNA, 1166 bp, Mus musculus
cccactccagtccccgggggcctggcgtgaggggaggacctgaacggttaccggcggaaacggtctcggggtgagaggtcacccgaaggacaggcagctgctgaaccaataggaccagcgctcagggcggatgctgcctctcattggtggccgttaagaatgaccagtagccaatgagtcagcccggggggcgtagcaatgacgtgagttgcggaggaggccgcttcgaatcggcagcagccagcttggtggcatggaccaatcagcggcctccaacgagtagcgacttcaccaatcggaggcctccacgacggggctgtggggagggtatataaggcgagtcggcgacggcgcgctcgatactggccgagacaacactgacctggacacttgggcttctgcgtgtgtgtgaggtaagcgccgcggcctgctgctaggcctgctccgagtctgcttcgtgtctcctcctgaccccgaggcccctgtcgccctcagaccagaaccgtcgtcgcgtttcggggccacagcctgttgctggactcctaagactcctgcctgactgctgagcgactggtcctcagcgccggcatgatgaagttcactgtggtggcggcggcgttgctgctgctgggcgcggtgcgggccgaggaggaggacaagaaggaggatgtgggcacggtggtcggcatcgacttggggaccacctattcctggtaagtggtatccgtcgaaggaggagggggtggggaggagtggggcgtggcctccggggccagcgtgagaaagtgaggtgctgattccttttctgtggggtttccccgtcagcgtcggtgtgttcaagaacggccgcgtggagatcatagccaacgatcagggcaaccgcatcacgccgtcgtatgtggccttcactcctgaaggggagcgtctgattggcgatgcggccaagaaccaactcacgtccaaccccgagaacacggtcttcgatgccaagcgcctcatcggacgcacttggaatgacccttcggtgcagcaggacatcaagttcttgccattcaaggtcggacccgttttttttttctcatgctaatggggcggctggggtgataggagtatttaggggttgccacttggccaaaaacactgttcaaaggacttaaaagaatgtg

SEQ ID NO: 26600 - DNA, 1277 bp, Mus musculus
gccgagccatctcaccagccccagaaacctttcaatcttaacttttagtgatttagtgttttgtgggaggtcaaggtatatgctagtcagcctttatgagttaccactgcttaattctaatgacaaaagcgtatgatatagcagtaaactgacttagaaactgttgtggcttgactagttgataagagtgacagaagtgagaacaccatgtacttcaatcatctttaagtatgattgcacggttgtccttctaggttacccatgcagttgttactgtaccagcttacttcaatgatgcccagcgacaagcaaccaaagatgctggcactattgctggactgaatgtcatgaggatcatcaatgagccgtaagtatgggactcagagctctaccatattcccaagtgggggggaaatatgaacccctgaccaagctttcttccctcctcttcatcctcacagtacagcagctgctattgcatatggcctggataagagagagggagagaagaacatccttgtgtttgacctgggtggcggcaccttcgatgtgtctcttctcaccattgacaatggtgtctttgaagtggtggccactaatggagatactcacctgggtggggaagactttgatcagcgggtcatggaacacttcatcaagttgtacaaaaagaaaactggtaaagatgttaggaaagacaacagagctgtgcagaaactccggcgtgaggtagaaaaggctaagagagccttgtcttctcagcatcaagcaaggattgaaattgagtccttcttcgaaggagaagacttctcagagacccttactcgggccaaatttgaagagctgaacatggtatgctccttgacagtgctaatggaatccgcttagactgtagaatttgggataactaaataaggtctgggtggtcagcaccatagtaaccatgccttgcttttcttttttgctaggacctgttccgctctaccatgaagcctgtccagaaagtgttggaagactctgatctgaagaaatctgatattgatgaaattgttctggttggtggatctactcgaattccaaagattcagcaactggtgaaagagttcttcaatggcaaggagccatcccgtggcataaaccccgatgaggctgtagcctatggtgccgctgtccaggctggtgtcctctctggtgatcaggatacaggtaggttgttatcactgtgtctttatctgtttaagtagctcgatgggaggactgttgctttaggaaactgt

SEQ ID NO: 26601 - DNA, 1904 bp, Mus musculus
tgcaggtgatctggtactgcttgatgtttgtccccttacacttggtattgaaactgtgggaggagtcatgacaaaactgattccaaggaacactgtggtacccaccaagaagtctcagatcttctccacggcttccgataatcagccaactgtaacaatcaaggtctatgaaggtaattaaacgttcacaaatattgtatgttttgaaaggatgtgatctgggtttcacaatattattaaacaatattattaaataagttaaactattatcctcccagggaaagaagtatgttttgtaactcaaatgaagaggttcttagttgaaccagtgttgaatttttttcatgttaactagcttttgtaatacaaggtcagaggggcttacaatgctttgaagagttgaaattaagagcagtagcacccagtgagttaatgtagggatcccagtgccctggctttgtcaatagttttttctgtgttcttactctaggtgaacgacccctaacaaaagacaatcatcttctgggtacatttgatctgactggaattcctcctgctccccgtggagttccccagattgaagtcacttttgagatagatgttaatggtattctccgagtgacagctgaagacaaaggtacaggaaacaaaaacaaaatcacaattaccaatgaccaaaaccgcctgacacctgaagaaattgaaaggatggttaatgatgctgagaagtttgctgaggaagacaaaaagctcaaagagcgcattgacaccaggaatgaattggaaagctatgcttattctctcaagaaccagattggagataaagaaaagctgggaggtaaactttcttctgaagataaagaaaccatggaaaaagctgtagaggaaaagattgaatggctggaaagccaccaggatgcggacattgaagactttaaagccaaaaagaaggaactagaagaaattgttcagccaattatcagcaaactctatggaagtggaggccctcccccaactggtgaagaggatacatcagaaaaagatgagttgtaggtgcactgatctgctagagctgtaatattgtaaatactggactcaggaactttcgttgggagaaaattgagagaacttaagtctcgaatgtaattggaatcttcacctcagagtggagttgaaaatgctatagcccaagtggctgtttactgcttttcattagcagttgctcacatgtcttggggtcagggagaggaggaattggctattttaaaaattgagaaaaaggtgggtcagggtgtgtgttcaccttggatatggtctatttaacaattgggtcatgcacatgtggtgtaggaacttttttctaccataagtgacaccaataaatgtttgttatttacactggtctaatttttgtgaaaagtttgtaattatatccatcttttattttagataactaaaatttaagactggattctcaggtgtgtctttcttcggtgggcagggaagtggggcttgtgatgctgtggggtggtaccacttcttggagatttatttagctttataacaatgtagagatgtttgctgtttactcccctaggcgagggttatttcaggatgcctaagtccaattcttttgaacatggttgaaatcatacttcccctttgtaaaattgctttctgggcttttagttttttcaagataaggtctttagctttgtctgtcctcgaactcaacactgtagaccaggctggccttgaactcagatccacctgtctctcgatcccaggtactgggattaaagtgtataccaccatggccctttctgacttttgttacaagtagtgctgtggtactgcctggaatctcttaataaattgatcatgttccaggctgtgtttagtcc

SEQ ID NO: 26602 - DNA, 1222 bp, Mus musculus
tgggattcgagcttaacccagcccctacccaactcccttaccatgttttgtccttgcttcctgcagtatactttgttatttgtcctgtcttcctcctacgactagacatagacctcgcgcagttagggatttgttcagctgtgtcagaatcgtgtttgggaggtgccaggtgtcaatgggctgtttgaatatcgtcacatgtggatttggagccttagccctttctctcctgtgaaatattaccctaacttggttaaaaaaaaaaagtagatgaggaaaataaacattgtgcaaatctagaggtccaccttgctcaggatcataaggtgtaagcgcagacggtggtacagcacatgttcggcccttttccacagtcggggccattctttcccaggtacttggagggcagagacggaagtagagccgcttccgcccgacgctgggcgccggaatggcgcgcggagatgacgcagcagcaccggaagccgctcccctgtgaggctgcggacccagagcagcggccgtaggtccaggtctgtatttgcgattggccgggccgggctggacaggaatccccagcgcccgcggcgttactgacccgccgccccggcctgttttctccctttccccgcaggcgccatggctgtggagcggacccggccgctgcgacgctctggcggcccgagcgcgcctagtcggtgtgagcccggcgcgaggtcccgggccccggggcgctcgctcaggtcagtgccgcgcggaacacggctccaggagcaggggaccaagggagtcacgaacgggctgagagactcggagttaattttagacaggaaaattagagctaagagttcctgccttctggtgcttcggtttttcctagccgcgaaacgagttaacattgatgccccaaggctagcactttaattaattaaagatgatgaaatgtggacaggtggtttataaaatgcagaacgtagtagtatgtgtaggaaggcaccatgcttgtgtgtatgccttgaaaacaggtgtgtatttgagatgatgcttctttttaaaaggggagaaatgacagtattagtactacattataacagtaactggcatttattgtaggcttatagtgtgccagatactgtacagaacgctgtttaaccctaacaatcttgtaggtaaaacagtaccaggcgacagtttacaagtgaggaaatttggcttgaaacac

SEQ ID NO: 26603 - DNA, 1550 bp, Mus musculus
ttttttggtttttgtttttttgttagtttgaaaagttaataaaaacaaaagacactaagagtcccttaatgaggtggaatctgttgtactgggacaactgcactgtggactgatgttatgaaaacatgggcactctacagcattagatggttttctttaaaaattcagtgagagccaggtgtggtggtgcatgcttttaatcccagcacttgggaggcaggagcagtcaaatatctgcattcaaggccagcctggtctacagtgattctgggacagccagaagtacacagagaaaccatctctcaaaaaatcaacagttgagtgagaaataaatcagaataccaatataccagtatgctgccgtgcaccgagtccagatctgtgcattctgtgcggtgagatgaggaggattcaccccgcccatttcactccaggtcgggttgattagtcttcctcacacactcgagtagctgagggtaatgccccttgaggtggtctgctgaagtttacagtgattgcacctggtgcaatcactccctgtcattggtatccattggtgtgcctatgttctctctcttcctccctccttccctgtctctctctcctccgtttccttctctccctacctggctatagaccaagctgacctgtaacacacagatagttctctgcctctcccctcaagctccgttgacaccttggggaatttcgttcttggaaccacacagatgggtctttgaatctccttagctgtccgctgcaggcagcacagtgcttatctgtctcctcctgctgcctacagttactgataattcctgtggaaacatggagcccccaacttgtgtttcttatccttctcctaacgtctatttttgtaaatcttttaggatttgtgaagttttttggaaacctggccgtcatggatagtcctcagcagatctgtgagcgctaccctgtttttctggagaaggtgtttgaaatggcggatagtcaagaccccaccatgattggtgtcgctgtcgacacagttggaatcctgggatccagtgttgaaggaaaacaagttttacagaagacaggttggtgtgacttgacttggcttttgtaagacatattttgggccaggatttcatgttcaggttcatctgctggtgggataactgttctagaaactacttttgcaggcgacagtcttcttatccctaacatgaacttgcctcccagagtcttgtgattagtactgaaagctgtggcttttgctccttactatatgtaggctttcatccaacaagaaccatgtggtttgctgctaacattttccttaattttatggcattgctcatgttgtgttcgagtttctacactgacggaagctgtatgaatttcatttacataacttctctggtcacgttcctcatttatcaaaatagcacagcagcagcttcttcagggttttgagtatttcagaagcacagagagagtcagaaggaacactttgtgtcgagacccttccgagcctgtgcaggttggaacctttgactgcactcctc

SEQ ID NO: 26604 - DNA, 1151 bp, Mus musculus
cactggcggcggcatgttcctctggaggctgcctgcagccctggcctgcgggccctctatctttaaagtctgcatcaccttcccatccctgcagatgcttgtttccttctcacaaggcccctgtggttattctatgtgcacccaggtagttgagggcactctccccgcctcaggagccttcgtgtctacagggtctttgactcccatgattgttcctgccaggtccatgcgtgatgtataaagcatttgaggttgagaggaagaaaatgccaccaggctatgaagcagggcataggagaacagctttgccatatgatttatgttcaggtagcttctttgccttgagccttgatatattgcctatcaataaatcaatgggactgtcaggatgccactggcttgccaagattatagatgcaaactgtccactttaggagtgtgaggatggggagttcacactggtcatcacacttcagaggacactgatacagagacaaggaagaaatgcaggagatctacacacacagggaccctgggaacagaagactgactggccatccttaaatgaagcctgctgcagcccagtacaaataaaaaagaagtcggtgctgtggccagaacccaatatatgagtgtttgtgggggtcacttgatagtgccacatatgattcatagacataaccccatgtggcaggagcccactgtatatatacacactggaagttcgactcgactgcttaaacccctgtcatttggggctcaagaaaaagccatggcattatcgtgagccacaaatcaatctgcttgactgaacctcagaggggagaaagtgagagaaacagtttcctgtttgggggtggggtgggaggtgtgtgtgtgtgggtctcagtaaactgaatcaaatgttattttctagctcctggtgtgtgtgtgtgtgtgtgtgtgtgtgtgtgtgtgtgtgtgtgtgtgtgctgtatgtgtgcacccaggtgcacatggggagcagaagaggacatcagatacctgtcgagacagggtctttcactgaacctagagctaggctggtagaccaactccagcgatcctgtctccaccttccacagtgctggtgttataggtatgcatggctaagcccaggtgctggggatttg

SEQ ID NO: 26605 - DNA, 1199 bp, Mus musculus
cctacctgagaaaccttttaaaagtataattaaatgctatttctttcaaattaaaaagactttagttatttactataaaactcccaacctaaaatttttgtaaattttaaaaactataagtaaaatctcttagagtccttatacataaatataatgcctatttatactttgaaattatctttggatgttccctgtaaatatgctgtcagtgtaaccagtgttctgaaaaccttttttaaaaaagacatattttaatgctatgcataaaacactgaaatttctatattgtgcccttgaaaaatggcttatcctccctgatcggctctgtgttctcatctcatctcggatcaccctaaggttaaacaagaaccatctatatgaaagttctaaagggcctaactcagagcagatgaaattgtcacactttattttcaatactggtttttaaaatgttgctaagagttattattttcaatagtgttaaaattttgggttgtattgatgatttttttccctgaaattcagtcccacatgaaagcccagaagaggggcaaagaacagcagcttgacattatgaacagacagtacacacagctcgaaagccgcctggacgagatactttgtagaattgccaaagagactgaagagatcaaggaccttgaacagcagcttacagatggtgagaactcaagtgtgatttagggtaaatagcttcagggcacacagaagatgctcacacggacaatccaagacttggctggatacagttcagctctttttactagtgttcgatggggaattttggctgaacatacccaaaaacatttagtgaaatttaaagtattttgtattattatggtttgttacgttgatgaccagtgaatcaggcttcagtagggaagaaatcaagctgatcaggaaaagcttggtcagtgattgccttctgtggcatacagtcctttcaggagcccgttgacgttaggaaactcattgtgagttatagaaggtgtatagaaagaaggcaaatttaaatagcattttcagagtagaggaagagggaagtaaatcaggtgtgtgacggagcctgagctccaggtaaggaaaggttccatccgttgatcgtcaccttcagtttgtctctgccttgataaatagttgttgagagaggctttttaaagttttcataaaagtatcctgta

SEQ ID NO: 26606 - DNA, 1194 bp, Mus musculus
gagaaggctgtctcagggtactagggagtcagtctacagatgagacctctaaatgccataggcccttaaaaatgggtgtgcccttgtaggtgctgcactggatgtgcaggagagtgaccctgaggtcgttagggacgttcaggggagtagcattcatcacttaggatatataaacgtttttctttatactgtggggatgttttagcaattctttgtatttgaaggaggcatcatatgagtttcattctgtagccaagatatgtttatgcatttgttagtaatgaattcatttgctggcagataacacatcctttccattttccctctacacaggatgacaacagcctgttaaagaagcagctgaaagagtttcagaatcaccttaaccatgtggttgatggtctgattcacccagaggaagtagcagctcgtgtagacgagctaaggaaaaggttgaaactaggagctggggaaatgaggtaaggggaaacaggaccccgagttagcattaactttccctcttcagagctgtggctgggaccagccatgagcctgtcctgctcgggctctgtaatactgactatgtttctgaaaggctgtgatgcaagattgcttaattctaataatggtgttaaagtatctaagagtctcttgaaagtacatggtgtgtgatcagaaagaagggccacattatagactttgggcagagaaccagtacaaagcaggatagtgtcaagcttatggacactcatccttagcctgtgtctgcagaatggcccagtggttcactacaatggtttccactgataccagtcccttcacacagtgctccctcctcttaatgttagcatgagcatgtttgcgtcaaacttataccttcttgttttttttccatagaatccatagtccttcagatgtcttagggaaaagtcttgctgacctacagaaacagttcagtgaaatccttgcacgatcccagtgggaaaaagaggaagcccaagttagagagaggaagctccatgaagaaatggctctccagcaagagaaactggcgaatggtcaagaggagttcaggcaggcctgcgaaagagcacttgaagccagagtaagaaagggcagagactgcgcggagggaggccttcagcaaatgtttacagcgtgtaaattagcacacccgttattattttccctcac

SEQ ID NO: 26607 - DNA, 1201 bp, Mus musculus
atgtgaggaagacccagacctggccaccccaggaggaggcaggagagccaaagcaggaaggaaggcaacagccctgggaaggatggccaaggacgcagggaggtagggcgaatgtatctttatggtgaagtttgaccctgagactggccaatgtgtctcttcgtgcccttgaaccgtgcacaggaaagcaggacattacagtgggatgttagagtctctgaaggacaagttatttgggagtagtgacctcagctattgggaaacacagtgtcagcagccgaaggttgaatgcatgagctaagctagagttggatttactttggagtcagtttgctctcccttggcgaaactttcttgagcctgtggagtaggccgcagacttgtgcgagccagtactagagggaaacagcagagtagggaacattccactcactaacaggcagcctgcactaaggagcacagggctctgcccacagctggcccagggccacggccaaccctactaagtgtgcacactcacattccagaacagcagctttcagaacgggagcagcagctaatggccaagtcaggtgagctgctggccctgcagaaagaggctgacgatatgagggccgacttcagcctcctgaggaaccagttcttaacagaaaggaagaaggcagagaagcaggtggccgggctaaaggaagcactgaagatccagcgcagtcagctggagaaaaacctcctggtgagtgtttgctgccctgggagtgtagggaaatcaatacgtttacccgacttgacacatgcatttttcttatacacagcttcattatgaagaaaataaatcatccatcaacccaggccctaccccagtggttattattggtgtattttgtcataattgattgttgaagcacacagtgagtcttggctgccagcagccatcctgtggacagcacagcacagtagggagctctgccctctgctcagcccactgcaggctctaggcattgggttggtaggcacctttgcagagcctcaggcagcctgtttgtggcaatctgccctttttgttcagcattaatttttatcaagcgttaaaaccaggaagcctggtctaccatgcttttacccatgacctaaggggtggggtggtgatgacatcagtcagagcagtgtgcacagtgtttccaggagtggctgtttccagcgc

SEQ ID NO: 26608 - DNA, 2833 bp, Mus musculus
cagttgactaaaggtttagcaggtcagtgtaaatgccttacattttctagaaagctgtgctttgtaaataaagttgttgattgtctcttaggggagagaatgtagaagatgcttttcttgaggctgccaagaaaatctatcagaacattcaggatggaagcctggatctgaatgctgccgagtctggtgtacaacacaaaccctcagccccgcagggaggacggctaaccagtgaaccccaaccccagagagaaggctgtggctgctagtgacctctttgctctggcccctcatttgacctttcacctctgtctgttggaagcagtactttttactgcctccttgtcttctgtacatcttactgggtttaattaaaaaaagaaaaaagaaaaaacaactcttgtaaaaacagtttaacaatactaaactgctaaacatctagatgtaatcaggttatcaaaggcaagtagagtaataaatctctcctgcatggtaaatctagactttccccctttgattgtccttgtgataggtttgtcaccaatatatgatttaaactgagcactgctgctggacctgatttttaccttcccttttggcaaggctttgtctcgctgtacggtttaaatttgatcttttcagccttcctcccatctttaaactgttgagtatgtctgttgtagccagtaagttcattgctgtgaaatgactttggatggtagagaaaaggggtctgcaactgcttttgtttttgttggataaattccctgttgtaggggtggcatttttcttgatgaggtttgcttctgtcttagccttgcacagggaaaaatacccatttatcttttcttgtgcttaattaatagctttatcttttttttttaatttttacactattttatccttttctctttaacagaaagtaaatatgtataaaatttgaaggaacctaactaacaataccttctgtgtatattattttaatgaagaaaataaattgattactggcattggaacagtataaaataccagtttgtacagtgtgacctatatgtgaccatgttactcttccatttcacacacggaaataagacacaacagcagctcacaagtaatactggctccactccttggtgctggcagtgtttggggacagacataatgctggaaagagctcctggcatcagcggaaacactagcggattctactccatctttgcactgtggcatacctgctgattttcttaactgttcttgtgtaatcaacgcgctcacctgcttttctttttgtaaacattttgtgttataggctgcattcttgccttactgtataggaaaaggaagaaggctgggtttaatattgcacattttaagcttttatacctttatcttggaatggtcaacttctggaccagatagccagaaccacaggtctgctgttaagggattttaaattgtgcgtttttaacactacagtgagataatttagtattatcctttgtgttcatagtatgaggggctatcttatgtcatgttggcataaattattttgtaaaagggaaggtgtttctaaatgtgtatgctgacatcatgtaagttgctactttgcactgggtggtctggccacggaaagaacgccttgcaagagaaacagatctctaggcagcatctgcttcactcagttcttcccttctcttggttggtttctagctgagtttaaagtggctgggaattgagaggtcattggaagtgcacgtaggtaagccccagcacattatataaaatgctctctgctcattgctgtgttaaaatacacattttaaatccctctttaccagacactaatgtaaaagtacatcttctggattataaacatgtggtagttccagagttttgtatagtcaatgttaaataaaagccaaaactggaatgtgcagaaaataggattcggttttcttgtggattcacctttttgtccttgtttaacttaaaggaatcttggagtagactgatctattctgttaaagatgtagagtgatccatttgcttacactgttgcatcacaggggattcgcccagggaccatgacctgctggtgtgtgtatatatttacaaaacaaaacaaatcacccatcgggacataaggtagcaatcacagagtgaagaccttcggcttgtttaggtgcaataccccatttcccaaagtgacagtgggtcctaattgtttttgtgacagaaggatttattcagactgctgtactcttcatttgatgtaacaaaatgctattatctaaatatttgtaaataaagtacctgtatctagattaaattgaacatagttgcattatttttgatctgtaagacttttcagatgaatatttgaactatcagtttttactacagcattgcacttagtgtatggtgaggtctgagtagcagtaaagctaccaattgagctggagtttcatccatgtatgttgcatctttgaggccagcacattgctagctaatagtgttctcccttttctgtatatggggccaaattctatttgtttgtgtaaccagcgtgtaataaatttgggagcttaaagataagcagattgtcatagtgcagcatctgtgagccagtggatctgggcagagtggatttctgttcatttttaacccacaaaagcttgtcattgtgcagatgcctcctctggctttctcactctgcttttgctgtggaggaacccctctggtggtaactagtactccaacacaatgtggagttgatttttggtgttttgttttgtttttgaagtaataacgtgttcaatgaaatgatggctgg

SEQ ID NO: 26609 - DNA, 1169 bp, Mus musculus
acatcacggggcagggcccaagagagggcgccccaaagtcgggtgtctgaggcgcgggtgagtgcccggggtccccggggctccccgagtaattgtctattgtaagttcttgcagatacagcgctaggaaaaggggagtaattcaggtgtagaatggaaaaactgttttgttgctttgtaagtatgtcttgctgcttcggggctcctgggggcggggttcgggggccggggccaaagctctttccttcctgcaggctaacctcaccttggccggatctttccccactactgatttggatcccatctcctttatcatgtctaactactgcccttcttgctggtctttctcagagtcctctgcgtttgctgtttgctgtttgtctgtcccctcccgttcggtttcccctttgaaagcctctggacaggactgttattttattctcttctctctaccctgattgtggtctcctcccctgcccgacccctcccacttgtctgccctttctgttctctactctccactacctgagtttttctccccaatcgcttctgacttctgcctgctttttgttccaaccagaccttcctctgtctgaggtgacctgctgacatccctccttgggcgcaaacctaaccgtctgtcccattggcacctacagagcatgtctggcagcctttcccaccctcaaaccttctcctaacaggttccccctgcagacttcaggctccattccttccccctttcccaagatgtggaaatttggtgggtgggatgctgggggcggggcaggagggaggaggcagacagctcaggaggccacttgggcccactaagccagtccttagtgggctgtgatgatccttccccttccaaggagcaaaaccaaccacgggacctaggatcgggccccttgccctttggtcctgtttccccatttgcagagtaggggtggataatgcgtcctaagccacaaaggttctggaagagagcatgcagagtcactggggactgagagatttgccactgctatctgggagtgtctatccataggggcagagagtgcctttggagtccagggctatccctctatgttgtctcccaaatgggggcccctgaaagacagcctgcctctttgtgccttagctatctccccaaaagggagggagct

SEQ ID NO: 26610 - DNA, 1145 bp, Mus musculus
gccaacagagaggcccacgctgacccttccgaggccgaaggtcactcctgccatagtccttttgaaaatagtaggtgcacttttaaaaaaaccttcttgggcctcccctccctgacttgatgacccctctgtgtgtggcctttaaagcagctaattcctgtcacagaagtgctctttctcacttgtgcctattctcatggatcaggtttttacatcatcttgatttttaaaaataacttggagttctatcaataaatttttatgtccatttgattagcttaagtactgaagtacctttaaattttttaaagaaagcatcatactttgctctgtacatactattaactgttgtatactgtggtatgttttaattactaaccctacctaagtagcataaggaatccctaacacaagagcttgtgattgacctgtgcagacgcccctgctgagccctccgtgcacagggagaatgcttatgtttgattcattttgtggggttttctttctcatataaaaccagtagaggatcacagttccttattgtgacatccttcccttggcctggaaagcttggtggtggcttttgcaacagcttgaggggggggggggattcttgactcagctggaggagcctggaagaatggttccctgtcacagtagtactgttgacacctgccctgagctgttcactgccaggcccacgtggagcccatgacagacactctgtccctaagccttgagcccagcagggttttctagaggtgtatagagcacttccacctggactcaagttgcatttacattttgagtttaaaaagatgtttttttttaatctgtttatagaagtagctcaccttccactgaggaccaggaaaccctgtgtcctggtaaaacaccttggagacaggaaacaatgcccctggttttctaaatttcctgtccagacaccaactggcctttgcttctgtgccttgtgaattagtaatccagtaggctaaaactcagtcacagggaggggaggagaagagcaagcctagaggaaggggtgctggtgggagggtttccacgcattccccccttcagctgtgtacaataaagtgcgtgccctgtgacccgactctgtgagtcttgtttctgtctgcatg

SEQ ID NO: 26611 - DNA, 1192 bp, Mus musculus
ccagcactcgggaggcagaggcaggcagatttctgagttcgaggccagcctggtctacagagtgagttccaggacagccagggctacacagagaaaccctgtctcgaaaaaccacaaaaaaaaaaaaaaaaaaaaaaaggggggccttgcggagcgtgtggtccgctggcctgtttgctactagggcaggttggtgattctccagggcagccatggcagaaccacagccggcgtccagtggcctcactgatgagaccgctttcagctgctgctccgatccagaccccagcaccaaggattttctactgcagcaaacgatgctaagaattaaggatcctaagaagtccctggatttttatacgagggttcttggactgaccctcctgcagaagcttgacttccctgctatgaagttctcgctctacttcttagcttacgaggataagaacgatatccccaaggacaagtccgagaagacagcatggacgttttccagaaaagccacccttgagctcacgcacaactggggcactgaagatgacgagactcagagttaccacaacggcaactcggaccctcgtggatttggtcacattgggattgccgttcctgatgtctacagtgcctgtaagagatttgaagaactaggtgtcaagtttgtgaagaagcctgatgacgggaaaatgaaaggactggcgttcattcaagaccctgacggctactggattgagattctgaatcctaacaaaatagcaacgattatttagtttcgggagaatgtgcctttgaggtatgggggacagcgggaacaaaacggcgtggaaaagaaacagcgtgattcaagatgctgcggcgaccagaagcgttggggactgatgggtctctctgctccagttcaaatcctcctgaaacccttttcattgtcctgattcagtgggtttttaaaaatctcccctctgttttgccaacctaattttcaagtagcaatttatcttatgaccttgacaaagttgtgtgactttacatttaagataataattagaacagctccctttagagatcacagttgctactgcctgtctcttaaagactgctcaagtctgtttctgattcatcatttagaattttgtttcaaatgtttctttttggggtctgttaccttctggggtttcagttcctcagaaataacttt

SEQ ID NO: 26612 - DNA, 1162 bp, Mus musculus
aggccccactaggctattgtttctgtcctgggcataaaggaggcagagagtgccaataggtactttggtggcacatgttcagagtccaggaaaaatggcagggtgaccacttagagggacataggacttggggttggtgattgaactgagttacaaacacagacagctttcttcaggatgactaacagcaggaattgaatggaaagtgtgttcattttgttttgcccaaattgtattcatgctgttagctttgtgtgttgagccctgtggagagggtgtgactgtatcagggaaggagagtacctcagcggactgaggaccagcaccctattatatcagaagacaatctctcatcatcgggtcctacctacaacctgctctgaacctccgagttcctcagcccatcgtgttccagtgtgggggcctgtatggagcaggtgactgaagacaaagccccctgtcacatgacctcatttcccctgctctagtactatgcaagtgtgacagccagccagccagatgtactggacaacataggaactgactttatggcaatgggagccgcagtcactacaacggagctgctgaaggttctgttccccgctctgagagcctgcaggagcccctgtataggtggttctcaacctgtgggtcgcgacccctttgggggaagtgttaaatgaccttttcacaggtgtcccctaagacggttaaaaaacatagatatttccactctgactggtaacagtagcagaattacagttatgaaatagcaagggaaataattctggggttcgtgtcatccataccatgaggagctacattaggtcacatcattagggaagttgagaagcatagctctacttgggtatttaagcaaattattgcaaagggggttgtcgctctgtgtttctgtgtatgcatatatttatattttgcttgtcttccagtttaggtcatctgtttcttcctttaagcagtttatttaaaaggccattgcaccatcttggtgaacagcatgaggggtttcaataaaaaataggatcttacctttgtccacagggctctacctcttacttttcaattgtgaacaaaaaaggtcgcacacccagaggcaacaaaacccacagaattcctgaaccaatgggagatgccaatggaa

SEQ ID NO: 26613 - DNA, 1135 bp, Mus musculus
gagggggaaactgaggctcgtggagtaagtcatcactcaagctcagactgatgaatgggacccaggtgtgtctggccccagggcttgagtgtggcttcctaggactgggagtgtgactgtcgtgtgtcctgccagttcctctatttgtggctccagcgtgcacaccgtcataccttcgtgctactataatccgtggcttggtaattgccagctgggattggtggttttcctgctgtattttcactgtttccccaggcagaagccacctgagggtggaaatcagtgccagcctgtgagcctgcagctcccaggaatgcactcaggctgctgcgctcaggtggttggcagggtgcagggcacattcctgagccatttgtctacctaccctctggccactctgtgccgtgtcactaagtgttgccatttcacatactgaggaaggcagggttcagggtcgttatctctgtcacatagcccttgacttatcaggtactgatagggcggttggccaggtcagggtcttgcccttaggcactttggtcctttggctctgtgtagccattaaagacagggctgtgagtggagactctcttggcctggggctggatgaactgaagtgtttggatacaagatctggattcaaatcctagcacttctgagctatgatgtgacctggttagccacccagccttttagaatctctatcagtaaagcgtgaaacaacaacctggccctgcagcaggtacttagctgatgggatgcactctgaccaaccacatccatccattggatccacagtcccaactgggtttctctttccgactctggattagtactagggcacagaagatacggcatttggggtatcgggaggagagccacctcaccccattcctgaacacttattttctccggccgtggcatcctcagctccagcttgcagctgctccctgtaggccctgagggagcctgggaacatggttttgcctgggggaggcaggtgagataccacaggctgtaatgaacctgccactgttgctgccattgcaaacctgggtgacaggatgtcaccatctttcacagaaggtgccctgtgggagattgtgtgtcagagtagatggtctcaaggactagc

SEQ ID NO: 26614 - DNA, 1304 bp, Mus musculus
gggtcagagacctcaggaaggaaggaggtggggctgagggcctgccactgcctcttcctgccccactcctgtccacacccctgctcccatgcatttcagcaggggtggcctcttgggcagggcctggcctggcctggcctggcctgggtcttgcccttccactgcccagggagccctgttttcctcctcacccacactctcgcccatgcctcgtaaagtgacctctgtctgagcgcctcctagcaatatggggaggtccccaggcctggacaggagagcgcagggccagatgcaatggccccctctggtggggttgttagctctcaggccgagagccttatttacctagtgcaaaaactgtaaaagtgtacagactctccacagatttttatcttaattgcaagtctgcaatattttttttgtaaattttttttttgtaaatgttcttggtgtttgactgtaatggaactatttcacccaagggatgtacatagtcctttagtcctggtgctgcgagggctggccaggacactgctctcacggttgatattagagcctggagaacggtgctgggcaggacaaagagctttgcagtctaggtgtctgtctgtctgtttcctgcccggggcattgattcgttggctttcaagcatgctgtttgggtggaaggttgatgggggcaaatgccccagtggggccagtaaagcatcctcctgcccacagcaacggcttggggcgtctgagctctgcttacagcaagggctggagttgccagaggccctgctctgggaagaccctggccactgacacccaagatctgatggagagagcggccccacccttgccaacacagacacctgacctttttgttcaacttgtgtgttagggtgaaggaaactgccaaacttcctctgagtgaagacctctgactgcccaggagtaggggtggggaccagggccagagctcaacgtgtaccccagcacctgcccgagggacactcctccctcatactcataggtctgggagccagactgtccagggaaccagcccctcttttctatatactcggccacaaggctacccgatcccccactgtgcccagctcccccttttgtaagtatgtgaaaaggaaaaatgcaaaggttggatcggccggagcccttccctccagtcgagacttttaaccctgtaataatgtacagagaagttgttggtgttcgaagactccgtgtggctgtgcaatttctgtacatttgcaattagaaatattaaagatttatttagctattttaagcctgacttg

SEQ ID NO: 26615 - DNA, 1915 bp, Mus musculus
tctctcctttccccagcatttgtcttcttagtaacttaatgggtatgaagtgcataaaaataagactacagacttttctcatgttaaagttctccattttttaaaagtccagttcagtagtgtgttgatgtatggtagtctgacaggctgggttttaacaaacctgctaatgttctctgttacctttctcggttggtcaggaatctgaaagttccctagtggagaaaacagcaattgcaaagaaaaagcatactagatcagaaagatgcaccctaaacaggactgtcagacagcccatgcccagatgccagcagtaaataccccatcctgccttttaaagaagttgccagtggcagagctggtcatcggtgtccacctgcagtctgtactagagcagaaagatagaaacattagaagagaaacagagtagccagaatgagtgagactaaagatgagttctcccagatatcagagtgctctgtccctttctggtaattgaaacattgttgctttggcatagacttagactgtagagcagggagctgggccctggactctgcagttccttgtggtccagctacctacaactgctctgtgatgcttctcaaagtgctggacggtgagcaagggagtctgacatggtcacagtgctgaggtagcatcactatgggcagattctaggaccttattcttagtagtaatttgccaggttatgaactcctccagccttcctgactctgtgattccctagcctcctggagtttcaggtggccttgtgtgattcatttcattcctggagaggagcgttagcaacatgacacttgttttaagcaaaactctgtaggctctctgtcttcatctctaagaggaaagggggatgtttctggaagacacatgggagagctgtgatagttaagcactcagttgtaaagaatcctaacaacccacgtctcactgtctgaggagagcctctgcgtgtggccttagtgtgtgactgcctctcaccttgctttcccaggtgaaagtcagctcagctgtgcttaaagctgccgcccatcactatggggctcagtgcgataaaaccaataaggagtttatgctgtgccgctgggaagagaaggacccaaggcgctgcctgaaggagggcaagctggtcaacggctgtgcgctgaacttcttcaggtaagagtcagtcgcctgaaggcagtgcttgcatgagttaacatcaaggtatcctgaaatattctaaatgcatattctaaaatgaggaagtgacttccggctaattaagtagaattataagtgtgcaggttttgaaatcagatagaccaagttcagtaacctccacgaatgtcagttttcagctgcggatggtgtctgtcctctgcagtattgcagtagatattttggaaaggtgtgtacagctgtctcagcccagagcttgttgacagacagtggacggtcgtgacgattaagaaagcattgagtctggttttcagttgggccactgtgctcactgcttaagtataagcccaggtgtgtaattagctgcccagtgttgatgggacatggggtaattgtaacaggtcttgtgatcctggtgctcaggtggcggagacaagaggctcagcaagggcagccatggctaggcacagggagtttgaagccagtttgggctccatgagatgctgtctcaaaaagtgtttggtttgattcagccagcctagaactcactgtgcaggcctggaaccacagctctgcttcagctcacaagtgccggacctacagtgtgcaccaccccatcagcctcagaaaaatggttttagacctctgttataatcaaaagggcagaactcaactcagcgttaactgaagtccagaattagtgatggtgtcaggtagggctggattcaag

SEQ ID NO: 26616 - DNA, 2140 bp, Mus musculus
tctgtgtctcaggactgactatgtaagggtgtatgacatatgcacaactctgcctgggcttatattataaaaacataactgattttcaggcttcgttttcatgtttataattttatgtcgtgttgtcctaaaacacatcagcataagaaggggagagatgcaagtgttttctgggtgtctgtatctctgcccactctgaccctctgctgtgctttttccagtgtcactgcaaagataaaagccattgaagcaaagctgaaaatgatggcagaaaatcctgatgcagagtacccagcagcgcctgtttattcctactttaaaccacctgataaaaaaaggactactccttactctagaacagcctggaagtctcgaagatgatggtcgtgaattaccagagcagcagaagcaaatggtctccacgtctgaagtccttcgcctctgtactgtgtagatgtgaatggtactaccaacagagcacagtctcttgttagggccggtgacatagcgtgtttgggtgttcatatggatgtgtcttccctgaactatgtgtgaattgagcatcatccagaataaataggaatgtgtccagactgtgatgtgaacactgagatgcgctagttggctgctttgtttggatttgtaactccagaaacacaatgtgccagagagaaaaacaagcatacaacgttgttatttaaatcaggaaactaaatgtattaacatccaccaaaaacttttagcatttttatgtgtacacttctcttcaacataaacaaaaaataagggtgagggtggaaagtgagagacgtttacagtcatttttagaactgtttgggaatgtactgtagaaatccttcagttgaattcaaaagagaattcttggcaaaaagcagctgatcccttgagtgaatgttgtagcagtctgtttaagaattatgcttattatttccaaatctcagttaggaaaatgtggtatacgtcttaaaattgtttatgtcgtcaaagtgtagagacacatttaacattttataccacaacagatactctatttggaaatccagcttttattctttggcaatcatggttttgaatctgaatgaccttgccttctataataccaaatgttattactaacccgggttttaatacacttactgcatgagattgttttatagcatggggttgttgcagttagaactgtatcatgatcaatctaaatagaaaagcagaatttctttgaaaacctaaagtttgctgtattggttactgtcaagcattactttgtcacagttgtatggggctgtaagaagcagctgagtgaccttgttgcagctgagagagaaagtgcagtgagcagcaggagtcagcagccggtgctcaggcatcaagaccgtaacaaccacactcgttctgtccttttggaagaccgcacggcctaaaactgaacgttaccctgaaagcatgcttctctccagatatctctgtctccttggagatatgaacatggtagtatagagacacacatagacagacagccttgggaatgtgtttcttcagctcagtgctgattgaattggtgccgggcctgacagactgttcattagcaacaccgttcttcactgagcaggtcactgtcgctcaccacaggtgccacccatgatgacttgggttgtagagacacttgacttaacttctggggtttcagaatccacagaactgtttcagaggaattcttactgcttttcccaagtcggttttttagctatctttagatactgaatatgtcccagatttatcagttgtgtgtatctgtgatgtgggaaactctccttccacttgggagctcattcagggaagtgggaacaccggctcccatttgtctggtgacttattagaatatagaattcaccatttcatccttaagttctcaaagggttgtggtggagtagaatttgatgccaatagccttctatttttaataggaacctagagaatacttaggattatctagagttgtttctttagaatctagaactatttatttgtatttaaacaatgtctatgatttgtaccaattcttacccctctatgtgaataaacgcaagacgacagtatctatgtggtcttattgtctttc

SEQ ID NO: 26617 - DNA, 1196 bp, Mus musculus
tttgaatttaaacatgtggaaacttctaaattactgcgagacctagactataagcgtagaccattacctttaaatttcaccaatactttcatcagggaagtcaaaaagttagtatcttagatgttgattggcattctgtacttagtgccagctttcttattcagatattaaaagtgctctataaaataagaaagttacgtttgcattgtatgtgagcgcgagagagaacattagtagaaatgctcataatgctttctaagcagagggaagccatgaatgtatgtaaatcagggttaagaaagaaggctccatgtaaacagattcaaaagggccgtttggcttaaggcaaggatgagtactaagtggtgacaaaggcagctggataggtagaatactgtcaggtgaagacaggctctttaaattgtattcagacaagtggaagctcatgtagaacgtccagaggattttaacaagaacctgataccaaggcagtagtaatgttttagtgagggattcaagactgagagtgcaggttagttggcagatactcacctgttgccactgccacaccggtaggacagtgaacttggagattggtgggtgagtctgagatgtgagaaacaggagtagagaagagtggagaggcaagatgattctgaagggtggtggtgctatttttgttttctaacactagggctcaggctcggcctcagtcccagagaggtcttgcctggggaatgtaaacaactcaagagcctactaaccatagaatagtgatgatgaagtcattgtacagtaaaagccaagaggtggagagccaccaggtgcaagtgtccttttggtgctgactttcggaggattagctgggtaaaccaggactccctggaaatagatgcataagcctgtgtcagcaatgtgtttaccttttctctcagcccatttcacattcttccttcatagtccgtggtttgcatgaaatgatgtttactgtttgcttgcttaagtctgaaacaataaagcatttactaaggtgtatagaacaggacaaaaagattctcctcatagtaatttctataggctataaaggaaatgttctctaaaaacactatatagtatagtaaatttaaaaaaaaaaatcctgaaggtcatctcgttggctctctgttgcctctctggtgactgtaaccacaaaacaa

SEQ ID NO: 26618 - DNA, 1138 bp, Mus musculus
ggctgcacagaaaaacactatcttgaaaaaaaccaaaccaaactaaactaaacaaaacaaaaaaacaaacaacaacaacaaaaaaggagtagtcttacctaccttgcaggagtgttgttaagaatctgtaacaatatcaacatacatttcttagtgcagagagtggataacctcagttagtgtgaactttgtcactctcagtttttcccagtaacctttgcatgtttcagaaacatttgtccctaccccagtcatcaaacttcaattgttcttacagatcagccaaatggcagacgacacggtggcagagctggaccagcatctggcagcaaagaccaaagaactccttggatgaaagtcagcagtcacagccggacaccgagtcctgtgtctgctcatgccgtgggtggcaagctcgtgtctacactgccctgaccatgcacccgaggctgatactgctgcgcctccatcgtctgctcagtctcctgttgggatgctcagatttatggaatctcttccttgttcccgtgcacaggcttgttctgctctgaatctccccttgtgaatgtctctgttggcagaggacctttactctggcagtgaccttgactgtggtgtcaccacagcactagggccgctgtcaggcttagcagctcctctcatcaacacaggagcctcctttcaaactgtgaatcataccctgcccttgtgttaaactcatttggattaatgtgggccttcagtctgactgctgatgatcaagcctaaataaattggaaaataacaaccacagaagaaagatagagtggtttggatggaagaaccccagaacttgtttataaagcaaccaagggcagtttttgcctctgggttgtcctcccacatgctgttcatgtgggccaagcttccgctcctaactagccctgtttactgtgccatcagttgcccgctctgggcagtctctctgcctccagagctaggccccggttttggctgggctcctcttatttcatcctctgtttttcttttctgttagtctatatcttgagaaaaattaccagagagaatgacacagagtaccgcttgaagttgtccatgtatttatgttgtaaaaattggtagctgctcaccaaatgct

SEQ ID NO: 26619 - DNA, 1512 bp, Mus musculus
ctctccttatatctattcaatatagtactcaaagtaaacaatagagtgctctagaacaataagagaacaaaagaagattaagtgggtacaaattggcaaagcagaaataaaggtctcactattagctatactatatactatatgatagtattcataagaaaccctcaaaactaccagagaacttcaccagcagataaacaacttcagcaaagtggccagatacaaaattaactcaaatgaatcaatagccttcctttatacaaaggataaacaggctgagaaagaaattagggaaacaactcccttcacaatagccacaaatataaaatatcatggggtaactctaaccaaacaagtggatgatccatatgaaaataacttcaagtttctcaagaaagaaatagggtctttccggacctggccgagcagaaggcgccatcatgggtgttgacattcgccacaacaaggaccgaaaggttcggcgcaaggagcccaagagccaggacatctacctgcggctgcttgtcaagttgtacaggtttctggccagacggaccaactccaccttcaatcaggttgtgctgaagaggttgttcatgagccgaaccaaccggccacctctgtccctgtcccgcatgatccgaaagatgaagcttcctggccgcgagaacaagactgcagttgttgtggggacggtcacagatgatgtgcggattctggaagttcccaagctgaaggtgtgtgcactgcgggtgagcagccgggccgggagtcgcatcctcaaggctgggggtaagatcctcacctttgaccagctggccctggagtctcccaagggccggggcactgtgctcctgtctggtcctcggaagggccgagaggtgtaccgacattttggcaaggccccaggaaccccacacagccataccaaaccctatgtccgttccaagggccggaagtttgagcgcgccagaggccgaagggccagcagaggctacaaaaactaaccctggatcttaactgttaataaaaaaaagcattggaaaaaaaaagaaaagaaatagaaaaagatctcagacaatggagagatcacccatgctcatggattggcagaattaacatagtaaaactgtccatccttccaaaggcaatctatagattcaatgaaatcttcatcaaaatcccaacacaactcttcaaagacatgggaaaaagcaattctcaaattcatctggtaaggcaaaaatccaagaatagtgaaacaattcttaacaacaaaagaacagctgggagaattaccatccctgatctcaagctatgctacagaacagtagtgataaaaactgcatggtattggtacaaagacagacatattgatcagtggaatagaaatgaagacccagaaatgaaaccatacacttacagacacttaatcctagacaaaaaagccaaaaacatacaatggaaaaaagaaaacatctgtaataactggttctggtctaactagctgtc

SEQ ID NO: 26620 - DNA, 1539 bp, Mus musculus
ccacagagtaccccgccgtcaaattctgtcgggtgaggagctcagttattggggccagtagtcgttttacccggaatgcccttcctgctctgctcatctacaaggcgggtgaattgattggcaattttgttcgagtcactgaccagctgggggaagatttctttgctgtagaccttgaagctttcctgcaggaatttggattgctcccagaaaaggaagtcttggtgctgacatctgtgcgaaactctgccacctgtcacagtgaagacagcgatctggaaatagattgaactgataatctagttccgtagctatctcattgtttgggctggaggacacatgtctgtatttatttctgtccttcctgtgtcttctggctttacagctgttctttgtagtctcatttagtatgtgaaaagtcaagaaattcttagattaaatcagaatgctgactcactttgtagctagcagtaaagtgacttcaaattatataagcaggaaactaggttcttgagctgtttacttctctagcgtgacatctctgatactgtttccagtcaatattgacatggcacccttgcaggcaatgtcttgaaaattgtcttctgatgacctcagaattctaccagttctgagagtagaattccctagtgagtgtgttctgtgcaatgtaaacagtgcatttccataatcacttgattgcaaatcatgtttacttgcaatcagatgcatagctgtactttttttctctagatctgtctctaccagggtccatacaaggttgggaatgtagctcggtggtgaactcttactatgcacatggccccaagatacctgattcctagcactgtcaagactaaaggttccagatggtgcctggtgctgtagttagcagtggcctctgctgtggcggtcagtggtccagtccagcataatgaacaggaaaggatggtttttgctgactgctgtcatgttgggaggcaagcatcttattgactgacattggtgtgtgtggagcttgaaaacctcagtgggaggatctttctgtactcctgctcatcagtatctcttcctgttattaacaaggcgacttcttgtttaacctcagctttttttaaatgcttttttgcctattaggaaaaaaaaatcatatttagtagaggaaaattggccaaaataaagatgtaaaaatggtttaaaaatgtaattctgccacctaaatactatatgttttggtatagttcatatataggttttttttttttaatgtattcattggcttttgtttgtctttaaatgacactgggataattctgagcatagtgtctgatattatggtcagctactaacatcagatgtttttcatgttattaaatactcttctgtaacattttaatagctgttgatatttccactgatagatatactgtaatatgcttggtggttggtttttagaaagatggcaaacttttttattatgaaccttttattatgaaatgtgtccctcatagaacatacaataaaaattaagctaaaaag

SEQ ID NO: 26621 - DNA, 1145 bp, Mus musculus
tttacactagctatttctttgtatccctttgctggcaagggagtacaaggagtcaaaccacagatcagaacaccccacatttgagtggagacttatttttactctaaggggagttattcccccaagtctgaaactggcaattatttttttttctcttacataaaaatttaaaaatatcccccaaaccagtggaaaacagacactggctgcacttagtactgccaagagccaaggtcatttgcacatattccatcaacctgtcaaaaattaggcctcactttataacccaaggcatggaagtgcatgcattctcttagctgggcaagcaattatactgtagttgtgatacaacacatgtggcttttatttgtactgcacatacccactgtacagccacttgggagtatcgtggttagcttgcagcaactgccgtctgcatttatactgtttattgcatattcttttccctggaagtgaaagagaaatgtttttcttgttgcattgattacattttataaatttgcttagctggaaagtttgggaaaagaggcctgtttgtcaattgtacaaccgattgtgaagcttagtgtgaatatttttacgtctgtattagacattttctttgcaaatctattgttcgattgaaatgtaaatgaaattaaagatggtgtacacccatcatgtaaaacgcaggcaccatctctaagatggatttaatgctcatttttaaggcatatactcagcttctatttaaaactataaaataattctgtacaatgaaatggggaatatatatgggaataaattctattccatttatttcaatttgaatttccaaattgtaatgtttccctttgtgctataggaataggattaaatgggggaaggctaggacttataaggcctgtatatggggggagggcagagatggaacaatgagggttgtgatgatagtgaatagcaaagagtgaattctgtgtgtttttgctgtagcactgaagtgaagagatattagctttggctgttcacaaaatagagcatcatgattttcagtgtttgagagaaaattgatggaaaaagtttgcagtacttgacatgtatttgcatgcacaaaataaaattatttgtccaccttaaaagttgtt

SEQ ID NO: 26622 - DNA, 3674 bp, Mus musculus
tttatttattagcttttatgtgtatgggtgttttgactgcatatatgtctatgtgtgtgcaagctttgtgcccaaagaggcccggaaggacattgcttcctctgagattggagttacagactgctgtgtggttttggctgttgaacccccaggtcctctggagtagcagttgtgctttaacttctgagccttctctttagcccctacttaatacattttttaataaagaagataggcttttctgtgggcttagagtttgaagtagctttcagagagcaaatgtgataactcttaaattgtacataagttaatttgctttcactgtcattttctctcagggaggagcaaaaaccaattctgccggtaacatcttgctttagccagccacgtccaatgtctattagcagtgcaagctgcctccccatcaccacatctgtcagtgttggcaacctcattctgaaaactcacgttatgtctgaagataaaaacgactttttaaaacctattgcaaatgggaagatggttaacagctgaaaggaggctcagctttcaaatctgtgaccacaccatggaagcatttacactagctttttatatatataatatatattatataatgtatattttttttaaaaaaaaagatattactgggggcatccatttcctgtggactctttgatacttcaagccctcttgcattagcattatgaaaaaaaagaaaatttactttactagggtaatgttcactttccagaaattattggaatttggacaacatttaacttaagcttcaagcagctttttatgagtttgtagcaatccggtgcagtaactgagccatttcctattttaaatggcttctacagtaaattaacaactcagttattaaactagcaggatcctacaatgatacatctagtgaaagtagagttaattaacttatttctattttatgtttcactgagagaaatttccatctcattccagctgctttatttatctttttcattggactttgcatggatttttctttctttctttttttgttttgttttgttttgtttttccttttcttttctgtcttttttttttttttttgagagtggagttagatgttcttaccatagagttttacagggttataatagctttctttactgcattatatgtagaagtgtagtgcagtgcttttatctgtagcatttaattttttaattttccatttttcaagaatagtttctgctttgttaatatttatacacaggctacttgttgaagtaattaattaaaaatataaccaagtgcctaagtctttcagctgatgtactagatattaaattctcctaagttatgcagaatcgtttttacaattttgataaattatgcactaatgtaatggcaattttttaaaatgcagatttaagcctgtacattattgaatctgatgacttggcaaaagaatcaggtgctttcagctttcttgagaaaaccctgtatgtagcgtttgcactgactaacaagatggtattgctgggtctttaatttaaagaaattaatttgggtgttcattgcattatttagttagatattgtttattgttacttcatgttgggtttaattttcttgttttctgactgttaggttgataagactttgaaccatgtagtagtagaacattggctaacattacccatacttaaaaacatgaataatttctgccctgccataatgtgactgaaattttcacttggcatctgaaagtatgcagtatgttcaaccagctctgccccagatttgtgggtagtagtttattgaagcttaaatttcagtcaatatttaaaaacaaaagcagggcatgcctttctggtagtaatctaatagtttatctttttgtttttcttccatttctttaagattagtttgacttttattattttttaattaacttctgtgaagttgtttactctgaaaattgtactggaatattttaagccaagctgatctttcaccaggtgtactgtatgtaagggcttctcctgctagcaagatgcttaaacaggatcatgttattggtcgtctgagctatttagttattttacaaaaaccacagcattgtatcagagaagattttgataaaagttttgtgcacatttccaggggtgggagggttaacatttccctgaaatttcttgattggaatgagtaaatactggtgtttgatacctgtcttaatgaacatgctcataaggtgactgatacgttgtaaataatacctgagaaacaaaggggtagttttgatattctggtgtcagtatggaagatcttacacatttatttaatactcaagtgtatgaagatgtttgtttataacataacagcacagtagccttgacttagttttatttggttagtactgtacctttttgccatggccagtgctccccatccctacaaagacattttatttattttactctgtaacctgaaatgaagaggaacaagagttttaaaccatgttacattaacttatttctgacattataaattagcctaggatattacaggaacatgattgttatataatttatatcagaacctttctataaatatgagcttattacatttgaaatgtttccaatgtatttttcttttccttctcttctcttctcttctcttctctcttctctcttctctcttctctcttctctcttcttttcttttcttttcttttcttttcttttcttttcttttcttttcttttcttttctttctgtttgtaattccaaaaaggttatgtaaaccagtctgtctatttcatggatatttaatagtgagatcttccatgttgaaggtaatgtatttttttttaagattttaaaattgctattttgttacaaaatagagacctattaacagttgagagctccttatgtgccctcagggaaagaaccctctgtgcagcagagctacacgaacatcttcagcactttctgagggtgattatatactacataaattgatcttgtgtatttaaccttatctttttaattttaaagttgaaattttgaaacgtggttgtgctcttctggaggggttgggatgcttaggtgtttgcctacttgttcagtaaactgcatttcatcagtgtatgtgtacacctgccaaccttattggtgtgtctcaaacatttataggaaaatagtgcttgtcttgcagcagatgatcccataaaacaataacttctaattcttaaatgtttactctttctcactaacaacacaggaattgtttctgtgttcacattattctgtattgcattttttatgtggtgacagcttactgtatgttttagtgggtataatttgaaataaggctattggatctctgccacttaagaagaaagaacagttcatctgacctttcttcaaaatgatacctgctgatgtcacagaggaaaatagtacaaacagacctagaatgtgtttttttttaattggggcaatcatcactttgaccctttatcaagatgacatgatgaacacatttggaatcagaggctacaaaacaatagaagagaaactttgtaatgtcggtatctaaaatgcttgtaaagcctatgggtctaatcaggaatcagtagtatgaagtctgaaaaaaagcagggaaatggtgta

SEQ ID NO: 26623 - DNA, 1202 bp, Mus musculus
gttctaagaatgttgaatgttcttattagtataattgtatcttgacagtaatacagtttgtataccaagataaagatcaatgctgattatattttcccacattcagggctgccttaaatttaaaccattttaaaatgttggtttttactaaggtattacattgaatattcttcttttcaattttcaaggatactacccaccacctccaacggtaccagctggtgtgactccctgtgttcctcgctttgtgaggtccagtaatgttccagagtcctccctcccacctgcttccatgccatatgctgatcattacagtacattctcccctcgagatcgaatgaattcttctccttaccaacctcctcctccgcagcagtatggaccagttcctccagtaccctctggaatgtatgctccggtgtatgacagcaggcgcatctggcgcccagctatgtaccaacgagatgacattattagaagcaattctttacctccaatggatgtgatgcactcatctgtctatcagacatctttacgggaaagatacaactcattagatggatattattcagtggcttgtcagccaccgaatgacccaaggacaactgtgcctttaccaagggtgagtaatgttgaaaatagaaatgttgctgtcatgccgggcagtggtagcgcacacctttaattccagcacttggaaggcagaggcagggtatttctgagttcgaggccagcctggtctacaaagtgagttccaggacagccagggctacacagagaaaccctgtctcgaaaaaccaaggggaaaaaaaatgttgctatcatgtgttagttgagatccttgtgtcttgaatcaaaccagacagactcttactgtgtgatttagagaagttacttgccctttgcatggcacagggttttttgttttttcatgtttgatggaaataagaatagtacttattaataaggctgttgtgagaattaaattcaaaaacaataaagctcctagaacaagacttgatacataccagtgttcaatgttatgttcaattaggaactgatatagaaattttaaaacaaggcctcttttcagtagcttcacatttacacacacacacaacttctaacctagaaaaatgagttctcacatttgacttgacatcagctgagtatgttacccttttttattgaatatatggaga

SEQ ID NO: 26624 - DNA, 1379 bp, Mus musculus
tttatatgaaatccaagatcaaacagttttgtatattataatttatataaatgtaatatcagaaaaatctgtgatctttataaacataaacttatttaggaatataaaatttctacattttgataaagtttaagtatgagtttgagttttttttaattataatctgcttgtataatttaataacaataaagaatgctttcatctcttgaatcctatcctgtttattctgtgttacttttaggatttggtgcttttttttttttgtatcacataaaataaaatttcaaaccccactcttttcagaaagcttcaagtgcatgtgtacttggcttgctatattagttatgtgcctgcatttgtatgtgacatgtatatgtaacatgtagagtttttgatatttagctgaagaaagttctcagagctgtttcctttttaaaacacattttcatattaaaattgagagcagtattacaaacatgctgattatttttaaacaggtaccgattaaggaacaaaaagatgagcgcgactgtaagaacatttcctcttctgaataaagttggtgtaaacagcactgtcacaaccacagccggaaatgtcatttctgtcataggaagtactgaaacaactgggaaaattgttgcaagtacaaatggaatttcaaatacagaaagcagtgtttctcagctaatcccacgaggcactgacagtgcagtaaggactttggagactgtgaagaaagtcgggaaggttggcactaatgctcagaatgctgggccctctgcagagtccgtgtctgaaaagtaggtatggggtgaaaatgatggagttccttatcccttttagaaatgaccttcttttttcattctgagataccgtagtaaattgaaatttttatgcaattattcatgtaatagaagaaaacactaaataccacaaaatttgagttctaatcctcacaaggcagccaactagttctataaacttgaaagctcctactcttgagttttgttttttcaaatatattaagtttggatcagaattaggctttccataagttattttctagcgtttcagtattaattccatagagacgttaaaaaggaactaagtagaaacctaaacaggtgagaagtttgaatgtctagccccattttagtcagcttctatggctttctctgtcgtggtgtgtgtgtgtgtgtgtgtgtgtgtgtgtgtgtgtgtgtgtgtgtctatggggctctttgggctcaaattgtggctcggtttttttctactatttgatattgaccagtctacctgcctccaagtattaaaaaattacttcatatattgattgtgaaacttaaacgagttaatatcgtactaaattttgaaca

SEQ ID NO: 26625 - DNA, 1100 bp, Mus musculus
tttgattttcctctttttcctaaagaaattctatttttagagatgtagctcacatagtcgtgagccaagagaaaacattttctgaaaattttccttctatttacttgtcgtatttatttggctttgtttatgttgctgtagaccctataactacacccttactataattttttgtttctaaatctttctttcctgccaaatgctgatgaactcaatgaagaaaaggattgcgtacataattatatactttctgttttgttctgaaaaggagtttctattggcattttgtactttttgtggtgtctggtatataaccccttcagcccaatccccacacccacagtaaatgaactggataagagaaaaaggcagaccaattctaatgagtttgattttttttttccttcccatttttaggttactaaaagggatgaagactcttccctgatgcagctaaaggaggaatttcggagttacgaggcactacgcagagaacatgatgcccagattgttcatattgccatggaagcaggactccgtatttcacctgagcagtggtcttcactgctgtatggggacttggctcataaatcacacatgcagtctatcattgataaggtttgtaaggttagattttgtacccttcctgtctcagaaaatactgtagcatagatccttccttctctgttaataacctaatatgcctgcctgagtagaaaatacacgtatctaacctagtgaacttgatgacttagaacattgtccacgctggtctttgtggagtattagctacttatgtgctcactgagagctgtaggtcagtgccattgtctcatgacagtgtgactactgtacttcacatcactccccttgatgaaattaaatgtaaaatgtggaacactctctactgaatatattttgcctttgtagcattgtaaagttgaaaacttttatcaacattctcaccccagagagctaatatagctgataaataatgtttttaagtgtctagtgatgaatttcatagggcagattctgaggtgaaaatttagttcatcattgattgtcctattatgaaatctgaagacacttgaaaacta

SEQ ID NO: 26626 - DNA, 1100 bp, Mus musculus; identical to SEQ ID NO: 26625

SEQ ID NO: 26627 - DNA, 1195 bp, Mus musculus
aaccttgacctgacaaagatccacctacctctgcctcccaagtgctggggttaaaggcatgtgtgccaccatgaacacattgttggtgttcttaagtagagagtgggaggtaggggctgtgagatgtaaagatgctgccaagctagatgatctgtgtgtcctcagaccccacgttagaaggagagaactaactagcatgcacacatggcacacatgggcccacatacatacacataaacccacacacaaaataaaaacattaagcaataaaaaatagaatgtattagtcactaagaaaaatacaccaaagttttgattactattgcatgaacaagcagtagagtttagttgaaaggaatagtattaataaattgtctctgggtaaatgtgcaaaatgtaattcaacttacagttttgttatttattgtttgttatagagacatctaaatcctatatttagaaatgttttagattctggagtggtggtagttgattttaacagttaagtgaatgactaataaatatattgttaatgcttgcttttgtccatttgcagcttaaaaaacactacacatcaaaataatgatctgctagactgctaacccgagcatcagcttccacaatgcctgtgcaggcagctcaatggacagagtttctgtcctgtccaatctgctataatgaatttgatgagaatgtgcacaaacccatcagtttaggttgttcacacacagtttgcaagacctgcttgaataaacttcaccgaaaagcgtgtccttttgaccagactgccataaacacagacattgatgtgctccctgtcaactttgcacttcttcagttagttggagcccaggtaagtgtccagtatttttactggtttattatatcagttgtcaaaattagttctttagctggtacagagcatgttgaaaggtagtcgaaacctaaaaggtgtatttactttttgtgatgtgttcctacaaagatttttctcactgctataaattcttaagcaaaataatgaatcccattacagttatatatttctttgttctggcttcaataccaaagccagaatttagatatctaagtcctttggtagttgagaaactgtgtgactatatcagtatttatttgttaagtcatgaaaagaagtaaaatcagaggtttagttagaaaaaaaactatctaaagc

SEQ ID NO: 26628 - DNA, 1234 bp, Mus musculus
ataaaaatgcagcacatgtagtgttgccccccacccaatctgtatcatttatttttgttcttacatgttattcattctgaacttctaataattccaaagttggtggtgtgattaagtttatgagattctacattgtctcaaacattatgtattagtcctctgttcaggagtaattgcagattctgatttgtagtttttagataagtgatttattgttgacctatatagaattttaaggaagtaagatggcaagaaaatagatttgaaagcatagtgttgcacatcgctattaatattgaaagcagataggactagcagttttttttttttttaatttaaccagtgttcttgatttataaccagaacaccaaggtactgtcttaaaactaaaggagcacaattcaaattcacatggggccagcaaaatgtctttagaaatacattacttaaatgtccaaaagaatatgtgattagacccttttcctgattatatatattgtagcctccctcagccttgaagcaggctgatccagactttgaccttgctgccactaagaaggagaggctagagccttctgaccttgatggctctatttgctcttctccaagactgcttcctgctgaaaggtctttgagaccgtccgacctgtagatcacctactggctggctccaggcaccaagaatgggctggcagggaatgggcctaccctctttataagcatggactctcagtaaacttcagaggctttgaacagaaaggtttgtcttggcctagttcttttcttgcctctggtctctttcagccccagcacgcctttcaggggaacccagttctcgttcagcaggcggctacaatatataacatggttggattaagaactctggccaatgcaagtattttcttaaattgacaattttcttagattggcaagttacttttcttaaatagtccactttcatcaaagacattgttacactgtttacttagggtttcttttggtgtttgttttggtttacatgcactaaaattgacctctgtggaattacatttctacgaatttagtacatatctaattgtctgcaattgggacacagaatagttccaccagcttccaaaattcccttatgctgctcttttgtagtccaccctttctaactctaaattctactaagagttcttcattaatataatttgttctaatctgaggtgataataaaactggaatcttatgt

SEQ ID NO: 26629 - DNA, 1099 bp, Mus musculus
ttaaacatgtactccagcactgagctactcccacagcctcaagaagtattagtaaccaactggaatttccaggtactgtgttatattctgaggataggaaggtaagattgatatatatggtccctgtccttatagggcaagcgattttagtgagatgatgtctcaaatttatatcctaacaagaataaaattgcctcgttttctttaatcacttaaagcagtggttttctacctgtggaatcaagtgattttttttttcacagaggttgcctaagaccatagaaattgtttttgtttatattacaatttaattacattataattcaaaacagcagaaatgcagttatgaaataatgaaaatatttttatggttgggctcaccacagcatgaggaactgtattaaaggatctcacaatattaggaaggttgagaaccctgacttaaagtccactttcttaggggtttctgttagtaaaatttttggttctgtttgtaagtgtaaaccatttgcataatttgtgatctcttccatttcttggctggagaggtcttatttttgtgtgagatatttaattttggtggaacttggtttctttgcttacgtgtttctcagattttaaagcaaagagaagaggcatatattttattgtggaagaaggcttttcacactagtaattatatgaggcagaggtgagccttagttactcagcatttggtttaatttggctttttgtttttgtttttgtttttttgaggcaggatcttactatgtggccctggctgcctctgcctctgctgggatcacaggtataggccacgatgccagcctcagtgtttgtgttgtatggattcctaggaaaacctcaaaagaaagaggaccctctttactgtagtttgttttttttaaaattactgttatttatttattatttaatatgaaaacaatctccaaactgaagtggctctgaggtaaatcaggtgtgattttgcattagtttagaagatgtgtaagtgaaaggtgactaatgtcactatttctaaaatattgtcctaaacaacttagaacattttatttcagctcatgaatggctgttctaa

SEQ ID NO: 26630 - DNA, 1139 bp, Mus musculus
gctttctctgtcttgaatttatctcttatatattaatgtgaaatacagtttgctataccatcctagtattttaaattttagtattaataatgctagggaaccgtagttattacactttcacaataaccaagtgttttaacttcatttatgtgtaaagcaatacaaattaaagtccagaatactgttgagttcatctttgcttctgtaagccaagacctgagttgcaatatgtgccaaaggcagccctataagtaggtggtgttattgtaagaggagtgttttaattatatggaatctgaaatatcttgacctacatagcacagaatatccttatcagaatgaatgaaaagcttttttttttaaagaatagagcataactaaatatatggcagacattttatatgaatctttatggtttttgtttttcaggcattaaaaaaatatttaaccattcatgagttgagcctcattcttgagttatggatgacaaggcctctgttggaaaaatcagtgtctcatcagactcagtgtctactcttaatagtgaagattttgtcttggtttccaggcaaggagatgagacaccatctacaaataatgggagtgatgatgagaagacgggactcaaggtaaagtttgacagccaaagtgtgccttgctaaaccctgtgcacaacttggagctaataaataaaagagtaagctacggagaacacaggattgatagatatacttttcaatggtgttgagttttgcatatacttaatgagttactcttattttaaggatttttattttgattagcttcttaaattttttaaagctcctaccaaaactcttatggtataaactttttaaactttaggattgctcccttttcccagtactcaggaggcagaagcaggcagatctcttgtttgaggacagcctggtctacaaagtgatttctatggtagtcaaggctgttacacagagaaaccctgtttggggagggggggggggaagagagagagaaggagagggtaggagaaggggagagagagagagagagagagagagagagagagagagagagagagagagagcgggaacatgtggaagcatgagttcgagcattcaggggagggggagtggtaacaa

SEQ ID NO: 26631 - DNA, 1226 bp, Mus musculus
gtactgatcttgtctttatttagttagtaggctataagaattatatatttgctgccccagcagtggcagcttaatcccagtagttggaaagcagaggccagcctggtctacagcttaatttccaggattgccaggactgcacagagaaactgtcacaaaaacaaaaacccaaaaccaaacaaaaagaaccagatttgctgatatttatacctttctacatgtgtgtcccaaacataaaactgtctagatttagtatcatagaattatgtgatacaacctcaacatccacatatgaattatgtatcacaattcaacatcaacatggctagtatactagaagtagcttatataatcatctctctggacaaataccctaatgtaaacataacaaataataatatatagtatatatataacataataaaaataataaaaataaattaagtcctgttataaatacaagttgctcattattaatctcttgcctttttgtctggatagacttttagatcctcaaacaaacactgaaatagcaaactaccctatctacaaaatcctcttctgtgtcagaggacatgatgggactcctgagagtgactgttttgcattcactgaaagtcactacaacgcagagctcttcaggatacatgtctttcgctgtgaaatacaagaagctgtaagtgttttgttttgttttgagacgtgattccctgtatacctctggatgtcctgtcactgatttcatagaccaggcaggcctcagaagagagaaatgcaaatgagatttcaccactatctctgttgctacaagtgccacagacgggcagatggttcagtgagtaagatgcttgctgcacaaacatgaggacctgaaaaccatccccagcacccacactaacaagctagtcatggtacatgtcagtaaccccagcataggcagatcctggggcttgctggccagccattgtagcctaaacagagggttctaggttcagtaagagacgctgcctcaaaaaatagaaaataggtgaagacacccaattgcaacttctggcctccatgtacatacacaccagtgagcacacttgtgcacttgcacatacagtgctgcagtaggtgtggtctgttggttgaatagattcacaaccttatccaaacagtgagacatttgcaagttgttttgttattagtaggtcctaaacttgttagagccacatgtggttatt

SEQ ID NO: 26632 - DNA, 1234 bp, Mus musculus
aaggacagccaaagcaaaatggagaaaccctatctgggggttgggggagtggatctaaggttactatgctataggtaggtaacctttgggtcatcctttctatccgacagaaattatttgcatatctcctagacacaaacctgcaggccacttggtaactgcacagagccagagtccttaactaataataagcagctgggttagagacaaatatatttgtctagcaaccctaaaaacagttgctaaactaaatagatatcctgtggtctgacttggcaaggttttgttgtacttattcttttggttgtgcttggcctctactggcagagacgcttaatgcagcagggattcctggccttcagtctaagactcctattttaaatagcactttgaaaggacacattgctataatcttggccttaatcctaaggttggagtaatgattttaatgaaaagccaggtagaggctaggatggtagaatctactctggtgttcctgtaccctgtagatgtccttgtcctccaccgtccatctactatgctttgcacctttctgtgctttcagcatcctttgttgtgctttttacagccttcatctcccccatgatccttatttcaagttaactttctcttcttcaactggcaataataggaatattaaggtgctcaaaatatgtattatgttgatagaatatctaatttttttaaactttttttaagatttatttatttactttatatatgtgagtaccctgtagctgtcttcagacataccaaaagagggcaatgggtccccattacagatggttgtgagccaccatgtggttgctgggagttgaactcaggacctctggaagagcagtcagtgctcttaactactgagccctctctccagcccgtgtctaattattttttaattaggcccatataaattgtttatgatgcttgcctaaaagtaaaaaccagagtgtaggttggaagttgcttggcacaaattgttaggaattttattgatgtcttgcctgctgttcatctccacctactgtcctcctacccagctaagaaaaacgtttgtctactgtttgaactaagcaaaagaaggaaagggatttcttcgtgctaaacttttagaatttatcaatggttttgatatgtggttttaagtaggaaacctgaaaagacaccttaaatttgttggaaagacacaggacagttgactttcacattgactttt

SEQ ID NO: 26633 - DNA, 1143 bp, Mus musculus
tcatatttacttagcttggtgatatacactgtagtatcagcacttgggaggccaaaaggcaagagaatcattagtttcaggcttgcctgggctacatatgagcaccaagcaaacctgatccacatagcaactctaactcacaaaaccaaaataaacaaaatggtgacaattctgagaacatgcagtatctcccattatcagattatggaattatatcccataataagtatgttgtgttgtatacctttgtacctttctggtttcaaaacaccttcatatatactttgacttttttgtatctgtgcatttcctgtttatgggttcaatcaattgtgaattgaagatatttggagaaaaatacacatgtgcattttttttcttcattgtcaatattccctaaatattttatctgggtatttattaccaaccagtctagaggttgtctctgtgaggtagtatgcacacaggttctacacaaatacttcatgacataatataaggaactgcgcatgctctgatttcagtatctaagggcttcgtagacccagctgtctgtgaacccttaggggtgactgtatcttaacatttttgagttgttgaacctcattggcccttaccatctacgctatagaaagagtgttactgtccagtttaaagacagactgaaacagaagctctttagactttgacctggtcaaggacagaatttcattttcttgatttccactctactgtcttcaccctttgacacatttattgtgatcagaaattctctaaaaagaactaaaatatggagaagcctcataatcttataatttcacatggctttatcatttttacaggttttttatggtcaaaaaataaatgatcccaatgtactaatgttcttataagtttgtattttcaaagagaaaatacattcaagatgctttaattaggaattcaaggtagagacagtgtcagaacaaagattgtatttaggctcatataaagtacagtgcagagtttcatgttgccctgtgctaagttctgtgtcactgtagagcagacactggactgactagaggatgcagctagggtttggaatggccttcttgtctcttaaaggaatgataaaataattcctattagcataagaaaagt

SEQ ID NO: 26634 - DNA, 1183 bp, Mus musculus
ttatgctcaggctgcctggtgccatcacgtagcaattactcctcacaagaaatctaaagagatgaagcgctgttttcctcctaactcatttcacatgacagctttttagtgacaggccaccctgtagtctttactgatgggcttatctacccttattcctgtttctggaaaggatacttagttgtagaaactgccagactggggcagagcatcctcagcctgtctagggtccttgctctatatcccaggaattgggagtagcactgggctcatgaagcacaccaaggctcaaaacaagtactttgttcaggtccaggaggtgaaaacctatgttttgcaaagatacaggtggcatttttctccaggctttagcttactcggttctgatgttggccaagttagtgcttagaagtctgtttaaaatacccatttgtatttactgttttcccaagtacacagtgtaaatagtataatttgcagtgcaaagtctttggcaataattttatgatgtatatactatgttaaacattggaaaccacaagcaccatggactgccccatgtcttctgggcctgtggtgacatgtagactttggactttccaagtatcagcgtgcttgaagcagcagcctgcatgtgtggactatcatcagtgcctcgcccagagatgcctggccttcatccaaagggaccctgctgctccgagcccagcgagcagcacccacactgcggctcctttgtgttgaatatgttggactctgccatagactccttgtttggctgctgcactttgtaatgccttgacatgttgcatttcttttccatttggatgaataaaaataaacgctgtgtcaaataggaatggcctggactgttctgtacaggactcactttactgaaaagttacagtgctagctgcagagatgcttcagcagttaaaagggctcactgttcttttagagggcctgagttcagtctcatcacttacccagtagatccaatgctctcttctggcctctacacatacatacttacccaagcacatacagacataccaataaaattgaatcaaatgcaagcttcactccctttcctcaaactcatttcatctcagaggtttttcacttcatacagagggagtaggtgcatgcatcctgacatggtcagtgatttggagcctgtgta

SEQ ID NO: 26635 - DNA, 2998 bp, Mus musculus
tgtggtgagaaaattgtgaaagaacatccagacagccaagaaccttgttgtgactgatgagaaaggggctgttgccatgcccagataaggatgaagggatttgcttgagttgtagtagagatggggtagcagtctcttcataagcagatctgatagatctctctcctatcggagagagtggtgctgcctctgaccaggaaggcaatggtagtgtttatagccactggggtggagcaagggctcaaaatggactgggtagtttgatgccagccagttgatatctttactctttttttttttttttttttttttttaaataaggctaattctgcccatcacaacatgataggtattgaatattcctttatactggggtctgtctttttgctttcatatagattttttttttttttaattttaaagatttagcctgtaaaagggctagtgccttttgggaatcagcatctgtagagtatagtctttagccattggaaaggtacattttctttacagagtttcttacagaggaaaaaggtatgtggttactgaaagatttactctgggctttagctgtgagttaatatccatctagccatgtctcctgggtgttatggacaggaaaccaggtgggaatcacaaggaggtgtatttttttcagtgctgggaatgagagagtgtcacgcttcaaaactagggccttgtacatagtaggctgttacttcaccagtgaatgaatcaggatagatttctgcactattgaatttatgtacctctgctggggactagactgctattatttggaggccttaggtcagatctttggaaaggttaaaggtatttgggacaccaagtctgtcagtttttgagcagtgagaactccagggacatacagatatcaccttctcattggttacagtgaaaatcttttggcagccctcctcctatcctatgccgatagccttttcctttccagaatccttccataatttactcaccacactggagaatggtaaacagctggatggatggatgggagtgagcatgtagggcacatagttgctgtcacattctaaactctgccactgtagcatgaaagcacctcagaatggtataggcattggtgagtgtggctgtgttcaatcacatattacttacataccaaagtgagtagggctcaggaaggtccatgatgagctccaaatggagggaagacatttgagtggggaaagcccaagggaggcagcagctatgttgttagacctagagggactatgtggttcctcccagaaagaacagctctagatggtagagaggttgtgtcccagctacaagtttttgttttcagaggcacttgggctagattggggctgcttgggtgacaggctgaggggcacagattattctctaggtggtgggtaacgtgaccacagacacattacattcaataatgtcgttctgattatggtagaccaatgcctggaactacaaattacacttttctgcttagtatggactagatgtgtaagggctgaggtgctcttagaattctgatgaaaagtgcagttggaatgttggaaggttttcttgccaggatgacttagtgatgaatgagtgctgttacatgacaatttcactaacagtgtttcattgccttgctctttttttgtatccaggccaatttgggttttgggccttggtgtgcaaaggaaaaattgtgaatgtacccctgtgtccccccccccccccccacaccctttagaaccaaatcacagagcaagaaagctgtatgtaatgcaaactcacttaaagccaggccttgcagctttctactgaaagttgagtgctgccctggtgcatcctggaccttgagggcaccctgctctcctctaggtaatttcctcagggcagtttttagccaggttgagaagcatctttcatttagaaagttccaacaacaactgcttgctttcagtgagcttttgtgatctgcagccatccttcaaggtgatgtgcctaggagacatgttggccttgcttagcttcctctagtgcaatggttctcaaccttcctaatactgctgtctctttaatgcagttcctcacattgaggtgacccccagccaggagatcatttttgttactacttcataattataattttgctactgttaagaatcatgccagagcgggctcgacccacaggttgagaatcaatgttcttatacagatatgctgccttggattttgctgcctcgtaagatatgggatagctctgatgctgatagtagtattcttcaaaattttctagagaagtttctgagttcatggaagggaatatgatttgagtatggaatagatggaaactggctcagtcttggcagtgtgcagtctgtccttagctgatagcaggaatatattttctttctctctggcttttcaagacagggtttctctgtgtatctctggctgtcctggaactcgatctatatagacctggctgctctcaaactcatagagatctgcctgcccctgcctcccatgtgctgggattacagggtgtgcaccaccacattcggctcaggaatattctcttatttggtagccaagttctgaaaagtgctctagcttatagggtggttcctgtcacttggcatggtcagtcaatgatagaactttgcctgttgactgtgtcatagccttcagttaatgccatgatgatgatcaaaattaaaaaataagtgaaaaactacgtcccttagctatttatgctgtagtaggagccagaaaaaatgtttttgtaccttgtcaatcggtcaaggaaatgaatcaagagtaaggataggagtctttagaaagactgccttcgtttcttcctgtaatttagaaagttgcatttctagtttctggcttcttgcctttggctgagtggttgatatgctctacccttccttgctgagcatacctttccactctggccaaggaacttggttcttgttga

SEQ ID NO: 26636 - DNA, 11239 bp, Mus musculus
tcctcttcacacatcagctttaccatttttattttgatgacaattataggtccttaagacattgctatactgaagtgtagaatttgaatagtttggcaaggttcaaatgtgttcaagaagttttgtttgggcaaaatgcagagcccagatttaagtcctttgcctggttgtatccctcgcccactcatgtgacccaggcttctccatattctgaactataggaatcacagatgtgggagttcaggattagtatttgtttttatctatatttccttctgaattcagactggctctttttgttttgaccattggcatttgccctttctccagcttcttaatgtcctgaacacctcatcctgacaaattggggccagctgattaacctaggcgtagcacacttgacttacttgctatacctgagtctgtgtgccagtcacaaaataacaagatgaattctactaaagcattgctagagactttctttaaaaaatttgggttttagactcttcagttacatccatgttttcctcaagtctttttaatttttcttttctggtccttccttaacattctttcaccctgtggcttctgagcctcagaaggcgcctctcttccatgtgccatatactgacttccaaagctggtgtaatttgatgccccatttttcacataaaagattgggtttttaaatgttactgtgatgcaaatctactaaaacaatgctttattttggctgtaaggtaaatatgtcttttggcctttgtaaagctgttgcatgtggggttatctccctctgatcatctggtgctcttgaatacctgctgttgctgctttgtgatttctcctagggtaaacatcagcataaaggcaggggcagatttcaaatcctccttagtatgcaggagtttgtgaggccacaagaacgtattaattacaaattaagtaaacaattaatctttccagatttgccatgccaaattaatggtagccactgagatgacaaatacctggtggtgccttgattgaagctgtctttctgggagttgaggcccacacagaaaaccttatatcttgacatattttttcctttaaaatgtcatgtgccatatgtatttcttgagtcactttaggacaaaaatgttaatcactaccattgctttacatctttagaattcatgcctgctcactcagatgtcattctgagtgtcattctataatacaggctttttattttagagcagaaaacattatgtatcaagatagaagagcaattgatttgtgagagatttgtgggcctcttccaaaatggtatgaagtggactgactaatctggaaatggttaatgataattactgtaagaatttttaacctgaaatttttattggagtcctctccgtttcttttctctgtaggtttgcccaagagaatggttctgttacccgttatgaaattcccaacatatcctgttccccactactcattcttttagtaaatgacagaagctcattcctattgaacaacaatacagtacaatgcagaatgttagagaaaaagcctttttatcctgctttctttgaacacatacttacttgatcaaaattatttgtaaagaacatctttcctactttttgattttaacaaatgcaaattcagttctctaaaacttgaaaacaaacaaaagaaaccagttctgtgaaacggtacctcattcctggaaataatttataccagccccttcgttgtagggaagtctagcagctcaaagttgacgttttaagagagtatcagattatgtaaagttaaatttgtgaaggatgtatagagtctcaacactgattacaaataaactgctttgttgtaacacagagtactgcctggttcctgatgcagtcactgattggtagctgagtgatatgtgcttactccagggcacttgaatttgggctgtagttattttttttttaaatacagtagaaacttttcatttaaactttaactttgtaaataacgaagtgtgtaattaaagccaataaaatatgggtttgaatattgttttatcttattatttttgatatgttttggtatcaaatttcaaggaattgaaaactagtaataacttggccctagaaacccatttatttgtaagcaagctgctaaaacaaagcaaagatgatttctcaatctattcattttgtaagctctttgtactccatttgtacaagagcatccccatgataaggttacattctgttattccagcattgcttattaaaatgatggcaccatccaaagatggggaaggaggattgtgattattttagtttacgaatttccaagttaaaaaaataaattaatcaatcaccctcttttgttcttgtggccttcttcactctgtaagactctgtgttcactccttgactttttccatgtagatagatgattagcaggtttttttttttttttggaattccttgaagagtctcctttcctcttctttgatatcagaatctaaagcagcaacaggatccccataaaaactcgctctctgattgtcccagttcttgttgagtgctgctgtgaaaagtgacagatttcagccatgggtcagcatttacttttaagacacctgattatactggtagaaactgggagccagtaacattgtgctggtctgtgaagggtgcagacccaagtccttccttgcattctcaccatgtttggaaagctgatgatgttactagaaggtaatggtttcattaaggtactcacccccattcaggcacaagtgtagtcctctgcagacacaagtcactattcttaaaaatgatttaggaagtaactacttttctgttaaattccttttcaaaacttcaagcagtgcccatcacttgaaagtggtcttactaaacttaatgtaccaggctcctttggaagggaatgcgagatgagcctgcgggcacaaatactgctcagatgtgtatcacacagtcatttgttcctttccttgacctttgttttctaatagtggtgggtgatactttaataaaaccttgtcacttgctgaaaatagctttaacttgtcattctcatcatgtgtgttagtggcaagacataatggagcagggcccttttcagctgggaattttcatgttcattggtttgttttgctgacctatggatgaaacagagccatcactgagaagaaaaagcatggctgctagtatctagtttttaattaattaaatatttacaatggttctgtttttgaaatactattaattggcagttgcagttgtattgttatttgaaattgaccatcaaatttggactctaggctggaatctgccttgagatttctctttagaaaagacttttgcagtctctgactctgcctcataactcaccccctctctgatggaggaggaagctgtgctgttctccaacatgatggccgtcatttcaaatggttcctaccaagtcttccctctttcttcttaattttgttgtttgttggaagttactaaccatgttgtaaacctgcccagttgctgcaaacttttacatttctctgctttacttaaaacaatggagctgttgaccctatgttagaagtggtaaccatgcaagttcaattgtttaaattctgtaatgaattaagtgtcctcccaccttttgcccgtcccacccttcattttgtaatgaaaattccacttacagttgaaagagcagagaaatataaatgaagctcttagcttcgtccaattgtatgagattaacataaagttctgcttctctgctcttttctccactgtaggtggttttttcattgacagcccctattgccagcctctgagcgtcgcaccatttattattcacttgggccctcaagatttcttctctgacttctagaaccatcaggttgtctggcttgaatggcaattttatatcttggtcttaagagcaatgtgacccctaaggctttccagctttcagatccactctaaccctttttgaaatcaatgactaagaattttaaaaaagagcaatactttgtccaaagccacgatgtctgttttaaagctctccttttggacatgtagcaatatctagatgtaaacccttcagtgtgtagctcttgtcagggagtttacagaccaatgtagaatttagaatctatgtgagcagtgctatatcctctgacactttttaatcgtttttagtacataacttgagcttttacttttctgactttgccagctagcagtattataattaatccgagacaggtgtcctccttaagccatatcttttggtgggggccgacgcttcaccagaggtgtggctggcaacctgtgccccttaaggctgcaggagcgccacatctcttgtgcctcataatggctccatagatttccaacatacctcatgctgatgaggtttggtgcatagtatggcaaagtaaggggttgggttaagtagctcctgagattgtttgtaatccctcaaactgttaccctctgggaatgaaatacttaatggttttgcttggattagcattttcttttttcttcttcttctcctttttttttcttttttttttaaatgggtgaatgtttgaaaatcatgaatcagtcaccgtaattaattgaagagctgggaataccttgttaatgtatttttaaaactggtgttggaccctctgtgtatttcaggttaatacttttaagcagttttcagcacgtttatctcactttattctcgttctcctcggacctccgtagccatatcacttgtataaaataggctgagatatagtgactgtaagctgtgatctcagtattcaaaggtaagctcttttattttctgattaaagaaaacaataaccaattaacacaacctgcatatatgacaatcatatgatgtatttgatctcttaggtcttatgtcactgcattaactttaaatttttatggtctaaatgtaaaatagtaatttccagcatttgttttaatactcttgtaaacgctttatattcaagagaaacattacacattcactgagtccagtgtatgtgggtagaattgtaggatttaatgtatatgtaatttatacataacagaggcacctgcttgaatataacaattcagttgtaggaacactatctaaggagagtcaaaatgacagggcactgtcttgttcaaggagctaggatatcagaatcagtaatgctggtgacatgctgtagaattcatgtgcatttgctgcacaggctgagggatacaagtgccaatctcaagaagatcacctcctctgacctgtgttgcatgctccaatacagcaacagcaagaagccatttaaaaaagcaatagagaatcaaagacaaaactataaactgtgggaaatatatgtaattggctgagttaagctaattatttgcagaatcaacttcagcaagttactgagtctgcagaaaccaaatctgcttaaggaatcggataatctgtctgtccgtctgactgtctgtctcaagttaggaagctagaatattatttctcactgtattcagtcatgaacagagttcatttataggatatcagtattaggccaaaccttaatccacaaatacaccttattatgttagctgttaagtgctaaagctgtatgtgtgtgtgtgtatgtataaatgaattttatgctttacatttctttctatagcagtttctgttcatctctagcattaaggctgctgaaactttgttctcacacagaacctgcagttcatgaggtcggcttctgttaaaggctgtacaaagcagagcagagaagtgcagtgcactgtaatcctgttcctgctgatgccaggtcctttttctgggaccagggaacagaggctatgatcagtgcaagtatcttaagttttctgatggaattcctgatggaattggccttgttgtaaataaataccctactttggaagatagtgtattaacagtggcaaaagttattaattcatttagtagtgtaattataaaatactgaatatttgtaggtttttcaacaccacaaaattggtgttacttgaggatttcctcaagtagcatattttctctggcattcgtgatggactgaacttcgctctggttatgctactcatgttctgtccaagtgggtgttgagaagatgagaagctcagcaccactgcagccctgcttttggcatctctatgtatagtcctgcaaagaactcaatgggaaatgtaaaccctgactacattctttcaatggcaggtgaatgttactgttataagaaatcacttgctgtaattgtcctggtttttatttttcactaatgataggcgtcgagaagaagagtcagtactaagtttttcttcccaagctgtttggagcctgtaaccagggacattgtaaacagagtgacatgtgaaagcagcctactctgaatggtctgcctttcatttccactctttgaatgccccctcaagtcacctagagatagaaagatgccatgttatttagctttgttctctgcaacatctggtatcatacagctaggcatcatgattccttagtgtgactaggaggcttgtggaaggaaatgggtggagtgtcaatgagaacagcaggcccaagtacctgctgtcatgatgaacttcagcacgggtgtgtgtttctgtaccacctaacttacagagcacagtacagctgatttaagatgagttcccccttttacaaaatagtattttgcaaaaagacttttttaagtaaagaattcatgttgggttaattatataaataagtatccttttccacataccactatttcagttaggagctaacagcttccattaatgtttgaagtttttaaaaatagaattataatataaatttgtcttatgtaagatttacagcacagctagagatacagaatagaaaacatatgagaatctgggccaaagcatttctctcactccagctcatttctgtggaactcggatatctcatgactttatatattcaaagcttttaatggtacctgttacacagcaagtactctgtgaatgctgactctgctgttctgatcgaggtgggggaaggatgtgagggaagtgagactatgctggttaagcaacaggtgcatggcctgcttagggcagagttgtgcttactcctttgctcacagacttggcagaacagatttgcccatatttgtgctgcagcagttaaatcagccaacttgcagcccagggtttgtaaatacttgtttaggatttatgggtgcttagaatttcacaagggctgaccttagaccatctacctgccaattcaagtttcctacccatactttagtaataaaaaaatctacaacagccagaatcaagttttcaaggcttgtgtgtttgttggtaaagaacaagttattataggaagcatgcttaggatgctgttgactcattttctttgaggagttcttgtaccttgtgttatgctggggcattcgatttcttgtaccttatttcatgctgggacattcggtggaacacatgtacactcatcagcatatgatgccttccttctatctgatactcttagggcattactattctatttctatctctatctgtttatctacctatttggatacaattgggaagtttctttttattacaaggacaagtgtgttgatggtgaagttactgctgctcaactgagtaaagggcttgtatctaccatggaagtgctggctcacacatgcttgcaaagacttgatcacagaagagggtggacaggttgagtcccaggctggtaggaggtgagttatgtggaaacatagattgaattccaagatgctgtagttttagaaaaaactctggacaaggattaactttaaggaggccagctgaaactgttggtaggttcttcatctcacttatccaacatttgaagcaaggttcttaatgtaggtatgcatgcatacacatcaaaaaacaacccctgccaataataacaacaatcttaaaaaaaaacaaaaaacaaacaaacaaacaaaaaaaaacaacaaactacaacaaaaaaagccctgaccagttatcagaggaggatcatggcctttcttcttagaactttaccatttgtgtaagtggctttgttgcctcacaaaggggtgtcgtaaagattgcccccattgcagtgaagaggaatggttcacatcttctctttgctgctgcatggccatcagtggcacatcgcctcagcacagttgcaattgggatgttgctggccctcttcttcattcgatattctccttcctagtttcctttatacaacaactaactattccaagtagttcagttagtggcagtctttgtgtaggacttaggcttggccaacattttgacatcataacatattgtcatctacagtgttcatgtgacaactgtataaaataacactgaaattgacaggaactattttggggtcaggaagagctattttggagtgtgagtagcagatttaagaagccagattgggaatgaggaaggaacattgctagaattggtattgtgggcatatgtggcactggggcagtcttaattctcaggcagccctcctggaggtgctgttatttctgatctagacatgaatctaatattcagggttaactgctagagacaggaatgaatcccatctgttttttgtaccaaagctcctctctgctcagcaggctacaaattagaaggcagcagcgaaagctggcctgatttctaggcctcctgtattaaacatatttctgagcagaacagaatacagggatttttgcttcttgggagtggggtggggtcactgatgataaaaggatatctaacaaacagagaatgaagagaaagtggactgttgaacagaggaagcttttgtgtcgaaagcttgttttgtttggatgaagtatcaagagactgggatacctattttctaataagttcttcttcctgggaatttattctctgcttgagaaaggtaatgatggagtttgagggatttgctcctgggatctggtataaagaggtagacctggtcaggtgtagttaaggtaggtagcccatcaaaagacccatgctgagcacttgacagtttggaatgtgagtctttcctccatcttgggcctaaggttcagtgaacattacttgagagctgcaggctctgtggatatatttgcttctcaccatgttgtttacaggccacttcccaatttcataaccaattgcttaggggcaggaagatgtggggatcccaccttgccagagctcttaccatctttgccaactgacactttttctgcaaagcatgctgtgctccattgggaaataggaagaaagaatcttattctaaccaagttctagagcatcaaagtgtgaaggaatgagaggtctggatggcacgcagagcactgcagagccctctcactttctgtggtccatttctagctctaaagaaatagtgatgcaaggaatattgtttttcatggaactaaaaccccagaggtctttgcaaaccaccctgcttgtttgtggcaaaacactgtggcttctaattagtgagtattgaaccacacagaggaaattacatctctgtgctgctcttagggttaacagaaactctactaggaattggctttgaatcctgtaactgaaggacttagaagtttgctcttactaggaaagggccttaagtaaagtgactttactcaattacatagtgcttggtggcagagtcctcatgctcttgaatatgttctgcttacctggtcctgtgcattcctcactaccctgcttccttctcaaaggccatttaactcttcttctagactttgagactatacagtgtgtgccttacaaaatggaataaacagaaaccaatgcagctcttcttttccctttcctgtcctagctcatgctctccctggttcctgtggaaatggcacagtggaatatttatagtcttgtgctgttaccaaaactgtatataatgaagtgcaacttagtggatgctgcttgagagatcctgggcttttagaaatgtggtctttggggggaagttggctagtctgcatgtgcttatttaaccaaaggatcatcctcacagtggtactttctggagcagtctcacacagggatctgctttttttttttttttttcgagacaggggttctctgtgtagccctggctgtcctggaactcactttgtagaccaggctgcccttgaactcagaaattcgcctgcctttgcctcccgagtgctgggattaaaggcgggcaccaccacgcccagctagggctctgctttgtaggatctgtcatacgtactttagtctacattaagaaaaatcatggatatcctcctttgagatgttaaaacaaaagtatggagaatgtcacttgaggaacttagaaaggcttacatcacttggaaacaagatcaaaggaccaggatgtcaaggctagtgaaggggtggccttaggcaaacctgaataagtcttaccggttattttaaaggattttatttacttgtatgtggttccagaagggtgaagacaactatgagtagacaagtgggcattttgatgtgaaggtgccacatgagggcaggtgaggtgctttggaagaacagaaggtaagaagtgtactgtgggatgtgatagcatatgctgaagctatgagctgcctttggtggtgcatgaggaagactgagttcatgccagccttagctatgcaatgagaagctgtcaaaagccacaggatgtccattgtgatcacctgtgacaggactgggagacagtgctgggagtagcttctctttctttttctttttccttttccttttccttttcctttttttttttttttttttttttttttgagacagggtttctctgtgtagccctggctgtcctggaactcagaaatccacctgcctctgcctcccgagtgctgggattaaaggtgggagccaccactgcctggcttcattctactttgtaaccctctatttggctctgctcagtgttgggaatgtcacaagtttttcagcttaggaggatggccatgtatgtgtaaggtgcaggaaagggagagagtgcatggcaagaggtgtgagcagaatcagagctgtagtggaattgctaaagccagctgttctgctcttccgctcatagagatgctagt

SEQ ID NO: 26637 - DNA, 1105 bp, Mus musculus
tgttattattctagtgactaggttgtctagaagcaaatttatattttagctacacacatatatttaacacatctaattttactattgtataagagttacgacttttttagaccctgctcagttatccaatttttttctattaaaaaaagtttttattgctattgttcccagatgtccttctttgtagcttgccaaaagaaacagtgcttgtatttattttgttaatctatgatggtgtacatgttcattaataagatctgagattgattatgagaagcagtagtcactgattactttgctgaatgaattcctttacttttgcacagaatctgatgactattgatgttaaataatgttttcttaattttaaaaagaagcaacaaaattattataaaattttctgtcttataagtacactcaaatgctgctttctttttgttgttattgataattttttaagaacaccctttcaaactgtttgttttcctttatcccatttactattagaaaatgttatgatgaaagaccctccggacttattggacaggcaaaaatgcctgaatgccttggcttctcttcgacatgccaaatggttccaggttggcgctctattatttctttactgtttctgtatagccatgtgtagattatatgtggaccacttttcacttagtgtgatgtgtgtgctatatgaaatgggaagtttgtagctcattgagttattgtcagggtgaatcggttcctttggatacagtgcctagaatagctttcagtgtgtgtgtgtgtgtgtgtgtctctgtgtgtgtgtgtgtctgtgtgtgtgtgtgtgtgtgtgtgtgtgtgtgtctgtgtgtgtctggcattgtacaccacaggtcaacttcaaatgtcatttctcaggagttatacatgttgccatttttgggatagggtctctcatggggttctgcaactcaacacacaggctagtctgactggtcagcaagcccatggatcctcctatttctgcttcttcagtactgatagtctaagtggcttttaaaacacaggttctgaaggttggactcaagcctgcatacttgcataggaaacactttatacactt

SEQ ID NO: 26638 - DNA, 1138 bp, Mus musculus
ggagctgcaggcacaggcagcgatgccctgctcgctctcctggatccacttaacacagcctggtcaggcagcaccatcccatcacatcctgctacccccagtgcagccaccccattcatccctcagctcagcttccccccaacagtgacacccaccccttttgtacagacaccactcaatccctttgtcccatctgtgccagtagtaccaccctccatgcccctgagctctacaccagccaggccttttgggacccctccagcatccctagggccagcatatgcacctagcattctattgtctagttctggcttctatgcccctcacaggtctcagcccaacctctctgctctctccatgcccaacctctttggccagatcccaatgggtgcccacactagtcccctgcagccacttggccccccagccgttgccccctccaggatccgaacattgcctctggcccgctcaagtgccagggctgctgaggccaagcaggggttggccctgaggcctggtgaatccccactgttgcctcccagaccgccccagagcctacagccaaccccgcagccctctgttcctacacaggccagagacccctttgaggatttgctgcgaaaaaccaagcaagatgtgagcccaagcccagccccggccctggccccagcctccacctccgtggagcagctccgcagacagtgggagacctttgagtgagcaggcctgtgccactgtctaatactgtgcctccccaacgtcccatttctagccaggcttcatggggcaaagggactctgccccctcctccacagcccatctctgaggcctggccctgggaatggccatcccagaagagctgcctgccgccacccttggcaccctgtgtgggttttgcactatatgtcaactggaccagctgtatcctatcctcccatagcccaagaggagtcaagaagctcaaggctgctttcaagcccagctctcctcctttgctgggccccaccccacagggcagatgtcagtaacaacctgtgtaagcacagctttgggggacatgggtgtttggggggctgaaatgaggcccactcctaggctggcatttctccctggtggtcatctccaaacctctctagca

SEQ ID NO: 26639 - DNA, 1174 bp, Mus musculus
attggagcccacactgctgagtggcagcagtgcatttgtctcaagtgtgctttgtggcccctgtaccaaagcctcagaaggtgaaaacggattggaagccattgccagaagcattttgtgaggaccgtgacccaagtctgcatctcagaacacttcctcttgtgtcgctgtacagaagacaagctaccctagcactatggacgtgcttcacatccgtcagtgtcagatgtcaaaggagccaagccctttacctcctgtatagcccagcactaccccaatgctagagttggtcatttggacagaggcctggtgcacaggtggacttccccatgctcaaggtggcatcccagtctgccacctttgaggtgccaaggcttcacttcctgacagtatccagagaagccacagtcacatcctaaatagggggacacatgacctaccattcctcctcacctcttcaacaatggccagtcagcccccaacaccctgacggttacatcacatcacagactttctccctgtgcccgagcccagagtgtgagcctacactgataaatttcctctggatacacacttgaaggcatttgtttgtagaagcatacatgtagacagacacacaaacacacacactcacacttatgcgcacacgcacatggacatgcatatacacatacctgtgctccaagcttctccagggagaagttatatacctcaaccttgactttgactgccaagccagtgcttatccagacttctgctcaaaggtgtctcccgaatggagggatgtaggaattggtgaaggcagatgcctgccactcatagtccactaaccctggagatcaaccaggtgccagtaaacaaccacaaacacctaatgaacatttactgtgtgccaggtgtgcgtggaatgtaactgtgaggctgctagcacctcgcctcctctgaccctgcaagagctggaagctgccaccagcccagcagcaagtctctaggatgccagctgggcctgggccccagggggcaggggcagctgtcttggtgctaccccctggcaggctgccaattcccactgcctgagcagccagaagtccaaacacctcacagaaggtcacaaacccaattagcagagtgagaggcccctgacctgactcactgccctccccagtggattctg

SEQ ID NO: 26640 - DNA, 1179 bp, Mus musculus
tggctcatcagataagagcactggctgctcttcagaagactctggttctatttccagcatctacatggtggctcactactgtctataactccaggtccagaaaatctgacatccacttctagactctgtgggtacagacatccatgcaagaaaaaaacacccacacatatacatacatacatacatacatacatacatacatacatacaatagaaaaattgaggtaaattttaaaaagtgactttacacaatgaaaattatcatcgagggcatacagggtctggaggggagagaagctggcattttttggcccagcaaatagctgtccatctgctctctgtcagaatatgttaggagtgcatctggattgctgccccagagcctcagctccgggcgggtcatgtggtcgtctccacgacaactccaggagtgctggaaactgctgtacttggagccagatgctgctctgcacatgtggtctaattagccggggttccctgcctcctctgcctctcacccctccctgcatacactaccttttcttttccctgcctccctcctttcctagccttccttgcatcctctggctggctgtgtactctgtttgccttctcttccagcatccctgttatcctatgcaggaagctagtgatactccagacacctctgcccctgagaaagacacctctggagtgggaactgacaggtgactaggcaaggcaatgactagccccaaatgctcttgcagtggaaagcttgggtgctcaagacctacagaaggttcagcaaagaccatgacaagtgtcccatcccaagtctgctagatttttgagttaggttttataagacatgaaaaattccccaggagaagatgtggcacgtgaaaaagcagaggtcaatggaaccttctggagaactggttactggaaccaaggtatttggagaatgagaagctgaggtggggtatcaggcttctctccacctctgaactttacttggttctacaggcactaggagccagtaaatgggggtgacatggcagctgttgtgggtgagccaagccccttcagaaatgtgctgcaaagcctccgtaggactctttcattgctggatgggaaatgcttgggaaagaatagtcagaatgtgctgagaagtgaatttttgtgtcttctgcagagc

SEQ ID NO: 26641 - DNA, 1128 bp, Mus musculus
ttattttagagtgtgtcccttttactattgaaaaagttcactataaagcattctgctgtggtgcactggcagcagcctcctacatctcacttttacctcatcatccctttaaagaatattattagtacaaatgtgtgcatgtgcacaatgggaggggcacatggcacagtatgtgtgtggaggtcagaaaacaagtttattgctctctcttttcatctttcagtgggttccagagagtgaactcagactaccaggcttacgcagcacgtgccttcacccactgagtcatttcaccatctcctactccctctcttggttgacttatttttttcttgtgtttcatttagattagtgttgttttgtaccatgacacacactccacataccattgtaaagggtttggcatttgtaatagttactttttgttgctgtgattaaaacatcataaacaaaagcaagttatggacaatagagttcatatgggcttacatttccagagggaatgcccatgatggtgagcaaggcatggcagtgggtggctgtagcaagaagctgagatcataaagcagaaagagcaaactggaagtggggcaggatgtgacagatccagcctgcccccagtgatggactcccataagggctccacagcatccccaaacagcaccactaacctgcggtcaaatgaaccctatgcaggacatttttaaaatttaaaccaccatagtatgcacagcatgggctatgtcatcaatgattttccacatagaatcacatacaatgtgctcctcagcacaaaccctgttgttatatggaatatgcctatattgaacttaaacccatacatctcaaacttactgaccatgaactcttctgaagcagaggacctgttagagatgggggagaatcccataaacattttagagctatcttcctggcctgtgggaaacactgggactagataggagtagcagaagggttgtggcagtatcagaaagccagacatctaagtgcacttgcagttgtccaagatctaacccttgggaacctgctctgaagagaatctgtaccttctctgtgctgttgttaaggggaatttccacaggtcccaaagatcaagatagtgaaagt

SEQ ID NO: 26642 - DNA, 1200 bp, Mus musculus
atgtcctctaccatcatcatgagatatgcttttaaatccaggtctagcttttcaggtgtgttggggtgctctggactgggcaaagtgggagtgcttggttctgatgatggtgagtggtcttggtttctgttagtaagattcttaagtttacctttcgtcatctggtaatttctggagtgagttgttatagttgtccctgtttagagattgttcctctggtgattctgttaccctctatcagcagacctggtagacaagctctctcctctgagtttcagtggtcagagcagtctctgcaggtaagctctcctcttacagggaaggtgcacagttatctggagtttggacctcctcctggcctaagatgaaggcccaaaagaggacctttcacagaagctgtgtttctttggcctgtcacagaaggtgttagtttcagtagtccacactctcacctgtgcagactactttctgcggagtcccggaaccaagatatctcccgtggattctgaggctaaagcctcctgtgccgggtggacacctgtcttctggccgggaaggtggccagatgtctggagcctgaaaatggcgctgcctcagaagctctgtggctctcgcctgtcccagaaactgttagcttctgtagtccacactcacacctgtgcagactactttctgtggagtcccagcaactttgaccatcttactgttaattttttttatcttttctgtgagactataattcccagatttaaaaaacattttctttttcctcctctccctcctgtacacaccagcaaccatccaagttcacaaccctcccagttcacaaccctccctgctcacaaccttcccaacacagccctccctgctcacagccctccctgctcacagccttcccagctcacagccctcccaactcacaaccctcccaatgcagccctcccagcttacagtcctcccagttcacaaccctccctgctcacaactctcccagctcaccctcctgagaagctggtgctacacaatctgcatcaccacaccagctccttcaccattctcacaccacagtcctagctcctgtcttgtgaatctcttgttgagctctggctgacatgtgccttgtcacattttaaagtaggtactgaacatctcgcccaaagtaatatgctcatcagcagagcttgacagagtacagaggtg

SEQ ID NO: 26643 - DNA, 1179 bp, Mus musculus
atttcttgtccctgcttcattttactcactgtcagctgggcatactgtgttctgtgttccatctatctagattctcttctgggtaactaactgtatgactctctcctccacctggctctgctcaaatatgaactggttaggaaagccttccagaccactctacttagaatcaaccctagtctcccttgtctggtttattttttaatatgccattttcccagtgttgttacctataattcctgtcatcatttcatttgctcccctttacataggaaatttgatgtcagtattagcatcaacgaaccatagctcaacaattattttcttagtctttcaaggtctttatggaggaaaaattatgtgcaattaagtatcttttaccccaacctactatttttattgattctttgggaatttcatatcatctaccccatttcactcacttcccaggaaaaagaaaacacacacacacacacacacacacacacacacacacacacacacaaatcaaccaaacaaaaataaaacaagcccaatttgtattgcctttatactcactggagcatggtcaaactctcagtgactttcctcttcaatagatctgagtccttccctcccacactaatgccagaagccaaaagttttggagagctaactttaacatctatcacactttttgagttgtcttcaatggcttcctgtttaggctattacttgttgtggggtgaggttgaggggggagtagggatcatcacagaagccttccatgtccctctttctcatctgtgtacctgcagtcatcaatatcactgcaaaagtagcttccttgcactttatagttagtgggatcatggatcatggacttccacatggtttctggtgacagcacaaaccagaacatggcctctggcttcagtaggcccatagatccagacaagacccttggaggcagcttagaccatggatatcaacatggcctcaggtgacagcctaggctactcatataaatatggccctcagtgcagcaaagctagagaacatcacaaagcttcagtcagtggcacagactgagtatgtccacatggatcttgggctacagcatggactacagataccaacatgttctcctgtagctttacgaaccacagtggtcctttataaggaggtctaatcctctgt

SEQ ID NO: 26644 - DNA, 1359 bp, Mus musculus
gaaactccagaagctttgctcgcacactgttcttgacaagttcggggtctggatcttcctagtgacttgtcaaagtttgttggcctttgtgtccttgcctgcaaatgggacattataataaggtgtctgtcttccaggtggctgacaggatttaaaacaaaagttgttagccatggcagcctaagcttgctatcccagcacttgagaggtagaggcaggaggatcaagaatccaaggttgccctgagcaatacaggaagtttgagacaggaacggactacataagaccctgtctcaaaaacaaaacaaacaaaacccaaaccaatagagatgcaaatcagctagcagtggcaggtgatccaaaaatacagcctgcctgtcaccccttcagaaaactcaagtcatggactatgcgagtcaagaattaaaatacaactgtattatgtgcaggaaaagcagaaatatgttcatttactttttgttcctaataggattaactgtgaagactaacttataaatgtgaatttaaggaaatctaagtgctggaggaaacagtctgaattttgttcttctattccagtgggtctcactttgtatatcaagaccccctttacaaacctgtctccaaagatatttatattacgattcataaccgtagcaaaattacagttatgaggtagcaaagaaaataattttatagctgggagtcaccacaacataaggaactgtattgaagggtcccagcattgggaaggttgagaaccgctggtctatgcagtattcaaggagcacccacttggtgacaggccagtgctcctgtcttgtcaggtgatgtttaccagggctctgcacaaataagctctctggctagccaccaccctcttgagcagggcctgtactccagatacagcctctgcccggatcaagtgctccatattttagacaaattgggaagagagacggctgagcagctcaggggtggccctgactgcgtgtccgtgttttatcttggactgcagtccacacccagcacacagcagcagcataacttcttgaggtgcctttagaagcaacctgtcaggcccaaaccgtccaagtaacaccagaatattcttaagttccccaaataattctgacactcatcagccaagctgctgccctcaataaatccactgtaccctttcaagcagtttgcacaagggaatctgtcctccagtgtcctgcccagaatactgactctgagaaaggatcagagtcgctgtctcctgcccagcactaactcctgaaagttttcctgggtctttgtaagaactgtttctgttcttagaggctctgttctatctgcccttggtacaagcag

SEQ ID NO: 26645 - DNA, 1132 bp, Mus musculus
tctagagatgaggggcagaaggcgaattacatcactcatatttaatgcccaggatgtgagttttacggaagtggaagcctcaagtcacatgaccaagtagcttctagctctactgagaatggtgggatgtggaaggaaaattgaaaaacagtgctttttctattatctcttaagtattgtctcatgcacatgcgagtgcatgcatgcacacacacacacatgcacgcacgcacgcacacacccctttcaagtgtaccatttggaagtaaagggaggttgactccttgaagccccagaggtggagttctcagagtctagtcaagcctgttgctgtctggccaaaatgtctctgtcctgacctccgttgggcacttgagcagaagtctaattgcttttatttttctcattaggcttggccggtacagatgtgagaaaggcactaccgctgtcctcaccgagaaagttacccctctggagattgaggtgctagaagagactgttcagacaatggatacttcgtgaatggtgctgtgggtggttggataactctagatgactcggggtgcataccacccctaccccaaccccattctaccccaaccagaaaacatgcctttggcaattgctcaattaaaataaataaataaaaagacaaaaaacttagtgagtggttgtaatgttggaactgtgcgtttgggctcctactgacccgactttcctttctatgttccagatctttctggcgtgttagtggtgtggtcctctgaaactgattagttctttgtggcaaaaacaaaaaacaaaaacaaaaaaacagattgggtttttggttctaaagaatatgacctaggcctatatttgtttactttatcttcacttgggggtaaccccaggcacctgtcctaacagagtgaatcagtgcaaagcagtggcaaggaagtctcaggctgagtggatggcttccctacataaacaagaccctagttccccctccccaggacagatatcttcagtttgaattctcagcctaaacatgctcaggtctagagaaagatagatggaaactgggtatttgtgtggctgtatgagactggtgagctgcactctagccattctcgtgacaactaaagga

SEQ ID NO: 26646 - DNA, 3330 bp, Mus musculus
gtagtgcctccatttgtcagtttttctctttagtgaaatgatacaggtaccagcaaagtgacaatatgtcctttgatgtccaaagttcagaacattatttcttctcattcttattccccagccacttgagagagaaaaagttccagatagaatgtttttcacgtttgtgggaagatatatgtattgatgtgtctgtttctgagctcacaatattttcatgtttgcctgaatttttatatttaaccaaccagatcatgttatttggctctgggtcagattctcagctgctttcctcaagctagaaatcagagacacagttcagagacagcacctctgtgcacacagcagccttctttgcttagacttccatttatcaaattggtacttttttaaattgcttttcaaattagcattttacctgttgtgttgaatgtcaaagctctgatgagacaagaacatatctttccaataatgtagtattaaacagagcaagttgttaatttgtagagtgggggaaaggttctgcaagttgccattgtacaaatccatttttacaaatgtttgcagcagattccacagaacaaagagcccattcattgccaagagccctgcagaatctctgagccaagtggctgtgtgttccgagctggagcctgacctgtggaccgcctttaatgtcttctgcacccagtccttttatgacatgggcttcttttaaacagggtaaagtaaatgggctgctttgcaaactcaggtattatgaggagaaggtaggagtgtagctagcagcgtggagacattaggtcagccactagatgtatttgtgattttggtttgaaggacacagagaaaggttggaggaggaggtttggtatgcttgttttttgccttttttcctataatgtttgattaacaggcagccttttagctagtggaagaaggaaaaacttgtgcatgctatatctcattcccccctctctctctcctgtcctctctgatccagaccaccaaaaatactcactttgagtgagaatttttcaaccataaaaacatatagcccccaaagccatgtggagaaggagagcccacctccttgcactgtgctgaaacatagaggtttccccctgccttttcttatgtatgctttcttgacccaaggcagaagtgtggagtcttagagctttgtaattcctgttctctggctccctttaaaggccatttttgtcctttgcaaggtttggtagtctcacccttagttcgatgaaattccctacaactcctctcaaagcactctacctgggtccggacacccagtccccagggccaacctacaagtgaaggagacaggtctctagggtagagggaagcaggcaggaacctccctgtcctgatcttagaacagtggaagtgaagaacaccccacactctctagctttagaatactggggttttggttttggttttttaaattgcagttgttttaagaaattcaacctttcagaccagcccttccactaaactttgattctttttctttactgcttttttaaacctaaaaaaaaaaaaaaaagaaaaaaaaaggaaagaaagcaagcgcactcagtgactcccccaccttggtctgtgggaatgcccgcccgcactctgccgtccatcctcctcccttctcctcatgcagtgtctgtgaagtagttttatctgtttcttaggatgaaaaacggcaatcatcccaccaggtgctggaaactggtcagccttgaagcaggcacttctgggaccacagctcagggatgtgtatttaattacagggtccccagaaagcctctcttggctgccacaagtagcatctttcctggacttggagtcagaccctgacaacttcctctgagtgagcagccccaggccactgaactgaacgcaagcttgcctatgggtctgggcttcctcaagacttttgaccgtcttacacgtgagcttctctagtgctcatgagaagcctagaccctttgcccagggtcttatctggcagtcctaagtacacccagctcgcttgggtatcagctgtaggctcaaatggaagctgtgggaaaggctaaggcctgctccaaacccaagaaaaatgtgctactggtggaagctagtcttctaacctggaagccagccaaagggttctcttgctctttgctgacctttttcttagccgaaatataataggtgataatgttttttactcaaatttccatgggggaaaaaagactacctcttgagtgacatcctggtcgattcctctctgaggagtcctgtgggaaaagaatactgtagctcccgtgctgtttacatgtttctgtcgggaatgaaaccctggactgttgtgtttttgtctgtgttgccatcccaggcctgtgataggagcttgtggctgtattgtaatgtctgggcagtgtctggggagtccttttcacctgcccaaatagggacaagccatcgctagaagaggcctccacccccttcctatgctccatagcttggatttcagggactctgatggcaagtgcatcatgaacctacctcaggctacctcccagtcctcccacagtcctatgtaggaatcgaatgaatggatgtctctgagcccttgttcccaaagggccggccaagggctgcctgccagcctggctccatcaaccctgcatgaccaaatgatagttggcgggctctgcaggctgctcaggccctctgctacctcccacacttgcctgctggcaaggggtgggccctgttctgtgaattgactacctgtggaaatgtgaccaattagtatgaaatgcatgtttagcaagtattaggtactgtatttgaaccaataaatgtgaatcctctgcacatgccatctgtctgtgaagcttatcttgggctgggggagggatggcctggtgtcctgaggcatggactcctgctcatagtcaacaccactcccatctctgttactgagggcttgtaggaaatggtctgctcctgaacctcgggagccagtgcatgcctgcagccggctgagcactgtgctaatttttcataaacccagaccaccatgagttttgaggactattgactctttgtaaacaaagaaaccaaggatgagaatgatgaaaaggcttgcacaagtttctcagccagaaaaaggcacaaccagggggttctagatgggagatacacagaccttagaagtgctgtgaggagagtattgggacttgggattggtacaggtagtgaggaggggcttcccagatgagaaagtctccaagctgagaactatccatgagggtagagtca

SEQ ID NO: 26647 - DNA, 1727 bp, Mus musculus
acccttgtggccgtctcagtacttctgatacacttgccctcatcctggaccaaggtgatcagcagcctgagtggagacaaagcaggctttccttccctcctggccgctgctaactgtctcttccctttacctaggcaagatggtgaatgtgcccctggagcagctgcccctcctctttaaggtggtgctgcactcctgcaagacaagtacggtgaaggagtgacctgtgccctgcacctccttgggccacccacagtgccttgggtaggcagcacaggctccagaggaaagagccagagaccaagatggagactgtggagcagctacctccatcacaagaagaatttgtttgtttgtctgtttttaacctcatttttctatatatttatttcacgacagagttgaatgtatggccttcaacatgatgcacatgcttttgtgtgaatgcagcagatgcatttccttgcagtttacagaatgtgaagatgtttaatgttaccgtgttgtcattgtttagagataggtttttttgtattttgagggagagggtaggatggactagatgagtatttccataatgttgacaaagacaactacctcaatggaaacaggtgtatgaccatccctaccttttccacattttctcagcagatacacacttgtctgttagagagcaaactgccttttttatagccacagacttctaagtaaaagaagcaaacaaaggagcgaagtggtatagggagatttactaatggccagtgggacatctgagaggcaatttgattttgatcatctcatcccacaagcctgaagggcagaaactctgccttaccttctgctgcacccctcccccacacgctgttgtctgttgatgctgctgtcaagttttcatccaggtagagtcctaacaataagccagtatgtaggacttgcctcccagcgcccttgtagctcatagctgcctagtttgctgttctagatctaccaaggcctaccttcttcagaccccatccctacctcttatgaatttgacttcctgtcagtcctttagaaagggacaggaaaatgccatgttctgaattctgatgccatttctgatttgttttttacattgtttccctcaaaaggtagaggggcaaagaccaggctgctgaaagaataaagacttctttggaagtcgctgttctcacccaaccttatcctctgaaccaaatccaaaatccaaaactgccacttttaaacagtagaaaggaccagaaactttgctgcaaatttttgttgtaagttctcccattagtcccaaaatgagatttgtttgccagggtctagaacagaaagtcaagacccagagaagcccagctcttccttcaagtattatcagggatctaacctaccaaggtttggagggatggagccagaaagacctagaaaggaaaggggcattaaactacctcatgtttctaagggctaggctgctgctctgcagctgcagcctgggcccctgtgctttactgcctaccccatctagttctaggaagagtttttaccctccagactttggccagaccaactaggtttgtcttagagctgtttcagctgcttttccctttctttgtaccaggctctcctaccactagtaccccagacacatgctccactggctggtatctcgtgctgggtctgcctcacccacagtatcttttttagcctgttttgtcaggaac

SEQ ID NO: 26648 - DNA, 1135 bp, Mus musculus
ggtcaccattacagtcactaagcagtaactgaagcaaatgctggccaggtccatggccctccctctgtagctacttctagtccccatgttccttgcacattttgcagcagatgagaaggtataggcagctcagctctggcaatgtggggtgctagcctcagctcccctgtcctcctgtactagaagccctcgccttggccatccactaggttactgctccttccttagcccttctcaaagccttgggcctggggtattttctgggccttcaacgctattctgttcacactcagggattgctaggagtaaggcctttgtcctcagagtgggtggccccaagatggaacaggctctgtctcctttgttgatcttaatctgatcatttggtgggctgattcagcagcctgagaatctgagggagacaggacaggagttcagaagagacttctcagcttccaggataaaacccggaggcagaggcaggggagggtagactgggctctcggcaccaggattttctttgagatgggattgtggacacacaagtgaacatatataagctaccttaaaataggattggcagctcgatgatctggtaccgcttgtgaccttcagacccagatagccctaagaacatgacctttcaagccagccttatggcagctttggacattctttttaaagctggagagaagttcttttgcccatctctttgttttaccaaagaaaatacaggtcccagcagttctagggtatgggcggagccatatggggtggggtacagctgatctcctttggtaaagccctatactgagacagttctgcctgcaaaagcaactgatccccagtacccttgaaggtgtctactgctgacccctaccctgctcctggaccctggagacttccttgtgccctgaaatgaaatcccactaaggccgctatgccgtgctgggaagggagatgcaggttccgtgcagacttcctttcttccaggcattgttgggtgatgttttacttaaggaataactcactcctgaaataaagagggacagtgacagccagcccagccaggtctgactcacagtggtagccacatccagcttcccccacccagctgaccaccacgggctcctct

SEQ ID NO: 26649 - DNA, 1379 bp, Mus musculus
gtcccaagctagttctattacttcaagagctggaagcttttgggaaccttgactctaggacagggctctctctagaacttgatctctttcagcaagcctgtgacatagtgggattgaggtctgggaatatgtgtcctcatctctaggtgagtaaagctccccgctggccagtcaggtaccatttgacatgtttccttttcctgtctccacaggccttagctgtaggaggactaggctccattataagagttcttacagcaagaaagactgtttaaaaaaaaatcctgttaccttgagaagaattttggatgcccaggctggtgaagaagggactgacaatggaccatcttcctagaactcccaactaaatacttcaggacacatcttctggaatgtattttacttttgaggtggagggagaaattgtcttattgattcctaaattctttgcaggatcagaatgtctgcctttgtctacagagttaacacagaaccaacacttgactatcaggctgactggccagattatgtcaggtgtacctgtgagcactgtctgtttgaaatggggagggactgtttgggcaggtgcagatccacaggctgtggtgaaaaggagagcttgggttctgaagcggaaaaacctgagagtttgtacagacatcctgtcttctcagagaagacaggctctcttgggttcattgtaaagtgcctgctgcatcaataaagctcttggcttattagtctattcatcgcggtgtgttctctgtatgttaagtgggaaaagaaagggttagtaatgaatgatgatagttgggtttggaaagctgatgtagaaggagtacaggtgtccctgtcctgccatccctgggggagggggaaagcaagcagggcgacgacacagctgtgccatatttcaactacagaggtgctggatgctaccgagagaccttttgctgagtgtttatttttcttactcttttgatttgtatgtaattttggagcttatttaataaagtgccaaacctttaatgattgaggcttcaaaagtcatccatttgtgtgattacaggtgtagtcttgggcaagttctggtcactgtctcctaatgtagggtctgttttaaaccccagtaatagcagtcagctcttagtcataagcaagtgctcctgagtacataattgcagcttaaatggtggcagaggcccccagtcatattcctgcagctctgtggccaaaacaccactggccctgcccttcctagatcctctgtagaaccgctgatgcttgagaggtaagattagcccatggatcattaaatcacatatttattcacctttaatctgaggaacttgctttcttttgaaagacaaaaaaatctg

SEQ ID NO: 26650 - DNA, 1171 bp, Mus musculus
tggtacctgctctctaaagcagtagtttctccagctttgctctgaattctctcatattaccactgagcaaatgccagtcacacttctacttaagaataacctgctgaattcaatggaagcaggctgtccctctcctaccctcgttatttctgatgacactacattgatatatagcactcaggcagcccagctgacttccacacttgatagcacacatgcctccgttttagctgatagaaacttacattcatttttacacttgatctggataagccacatcagatcccaagggaagccatttgattgagtttgatgaaagtgtttcactagcgagtaagccaataattggagcttttaaagttaccatgtatctaggtaaatttatgttcttcagcttaaaggcaacatatgcatgtacatgcatataatgtgtcatacagaaatcgaagttttgtagcatttgccttctaagtctaaatcaggatggcattgctttggctgtggctcttcttacaggagtttccctttagggtgccacttcccatttagtggggacatgaaactagagccccactgttatgtgattttacagaggaagatgtagcttctccaagtaggattccttcccttcctcctgtcccaggtaagaaaccccagaggactgaacagtccacagccctccagaagcagctgcagttccagctttggaagccctttctacaccttaggtttctcaggcctttgagctggtatgtccgtctgtctatctgtctctctcacactcgagcacacagacacccctgcctgcaggttgtgttgtggctgtggggcccactcgtttagaatggctttcctgctgcatgttgagctcctccagcactaggagagtgcagtagctattccaagtggcttcatgcactttacttccataaactttataagagacagtgtgtagccctttatagatgagcactggactgtgatcttactaccaatgtaaatagggatagtattatctaaaaactgctgtagcagaattatttgtggtgcaatactttttgattaaagctcttcaagatgcaactacagtgagttttacttgataaagctcaaggtatgtttattttgatgtgtcaaatgtaatccttcggggttttgttttggttgttgg

SEQ ID NO: 26651 - DNA, 1143 bp, Mus musculus
agacagagagtgtagtgattgttgggtgtggatgatttcacctcttgattttgagcatatcaagaacagttctttgcaggaaatccaccagtattcctgccttctctatataatggcattgcctctttgtggctgatttgacctctagtggtgcaagatcagcttccctggtgctgggattacagggatgtatcatcatgcccagcttattcgttttttaatcagtaaaaatgaaaattgttacctactcttattataattaaatccttccttgttctccccctcgatttctttccctctcccctctgcccctccctccctttctttctgttgctcactcttccccctccctccctccctccctccctactctctctctcctctgacccctaaggtctcaatatatatatatatgtatatgtatatatatatatatatatatatatggtcgctcattatgtaaccatttatcagttatcagccatttatcagttgagagcaacaccacttgttgtcttggtgacttttcaattgctgtgataaacaccaaggaaacttataaaagaaagtattaaattaagcttaaagtttcagagggttagagttcagcgttcatgatggacagtgaaggcatggcagaaagaacagctgagagatcacatatccttaaaattaaacaaacaaacaaacaaacagacaagccaggaggcagagaatggtggttgctggagctggaacatgcatggcctctttgttcaattgcatcttcaccctttctgttttcaatggtttccttcactgcctaagcttggctgtcttagaacttgctctgtagacaggctgcccttgaactcaaatatctgcctgcctctgtctcctgagtgctgggattaaaggtaggtaccaaaacacctagacacacgctgtgcccttcatttctcataaaattgaagtttaactgggtggtcctgccctgaggacaccattcccattatttcatttaacaccaggctttcctttcatctgcttagctccattccacttcctggtacccctttctcctcaattcttactttttacttgctcagcttgctccttttcattatagatcttcttaagagtgaacataataacaacataaca

SEQ ID NO: 26652 - DNA, 2608 bp, Mus musculus
tttttctttcttactttttcttttctttctttttttttttttctttttcattttctttgttgagtttttgaccctttggttgagttaaatttcaattgaaattcaatatttttttaaaaaaatcactaaattgtgcctaaagaacataactgccatattaatgtttttatttctatagtattagaaaaacatttaatacttgtagcattgatgtgttgatttgataccagttgagtagaatgtgctcagtccagtttacactctgtcatgagtatcatcaagtaaacacatgtacttttcaatagcaagcattctctcactgtaacccttgaccttaacttttacaaagtattcagtttttaactgcaattttaaaggctgaacaatcagaacccttgtgtttgtgaagtataatctgaagcagattatttaaagtttaagaagaaacagactgttctcttgtgaaggtctgtcataccatatttcagctttgtgtttgtaacttgactatctaaagggttgtgatgatcagttcttgatatataattgtccattaataaggacaagtatatcattatctcttatgactgtactcatagatgattttgggatataccatcttatgaaattgttggtatccctttataatttcttgtcatcctaggaaatccatgtgaagtcgattgataaagcactttagcatctgttcaggtagttttcaaagcaacttttccccttcaggataagaacttccaggttatctaaaaatgcaataaagatcttaatagtctaagcttcttggcaaataatctttcatcagggtttcttttactcaatgagcacaatattattttgattttatttgtccccaaccacccacctccttgtacagtttttaattgtgtagctctgtgaaaaaagtggctgagacatttgatacacacacttgaactaatagtggatcggtagctttgtgctactgtcctaaccccagtgtaattcaggtggaaaggtatttttatctcacaggaatatgtagctatgtattttactaattgtgaaacactggaattaatgatgcagacaacttggtgtggtttttgaacagctctgcagtattttcttgatcatgttaccatgaattgtatttaagtgcttgccctcctgcttttaagttgtaccagttaaaccagtaactctcaatcccctttccacttcacactccttagcttagttgatgtagttgttttcattctccttgtaatgtgacttattttcaagtcatggtgtactgcatttgtttgtcactagctgggcatgtgccaataatattctgtccattccttaactgccatctctgttttgcctgactattcttccactgataatggctttggggcatggaaaaagtagtttttgctattagacttgtgaaggaaagagagagtgaatgaatgtattggactttgtaagcctgaaaaagaatatttggatccctctactaaacaagggctatgtattatacagagtaatcttgtgggagatacttgcaagccagagatctgtaggcgagggaatctgctactccctgtatctaggccgaatgtaaaatcccttatgttgtatcaatggagctaagaactatttttatttgcctgtgatattcttggtttctaataaagtgttctaggctccagtgagaactgtctactttgaattgccatctcctccctttcttcattggctgatagactcttggctagctttccataggtcaatgcttctccctgaagaatctcatttctttaaatgtgttcactcgtgcgtgatcctaaaaagccttgactacatctaatatacagcctgtaccagctcctgttctatctggatatctagaactgttggaagattttgacatcttaaatgctgagttttgcttttgaaataaggttcaaaatgttcgttgcatttaagatctgtgtgtgtttgctctgtaaccccagctccgggtgttggaaaatgcctgtactgtgaaagcctgccattgtcagaagtagaatcacttttgtcagattccagaaaattatgtacagagttaaagagatttaactacaagatttatctacaagaatccaaatctttcaatgtcactgttttctaaatgctaatgtttgtaaagcaccttcagttctttgaatgaaaggtgctgcattccctcggtgtcaattaataaaaagattataggaagtttgtgaaaaataattttatctcatgcagtatacagaattccctgagaagaaggtagcatttcatgtaatttatgtgttcaaagaaatgctagctttttcacttggttgcctgactggtaaatagaactaaccttttttctcctgcatttgcctatgggctaagtgttccagtttcttaaaagaagtatttactgttcaagcccagatcctgtgctcagtaccatgcttcatgaagtcgtcacaactattttaattgtatatttagagttgtggtaatgaaatgaaagtaagttaatcaaaaccaataagaaacatttgaaaagtccctagaacaatgcaagtttccttcattgcatgaa

SEQ ID NO: 26653 - DNA, 1220 bp, Mus musculus
tgtttcaaaacatttcttaagtgataacttgttttattacagaaaggattatgggtattttccaaagatgtgttcaatcgagtagtaaaaagaataaataaggaaaaacaagtcagaaaataagttaagttggaaccagcagtgaaaacatggaataaatgctgcaatggccgggactctttctaaaaattagacacttaggcattctagaagctgactggctaatattagaccatgagttttttgttttttttttaagacaatgtaagccaggggctactcaaggaaagcactgtccctgatagagggaacagaggcattccttcttaggtcttccctacaggtttggtcaatctcttgtgtgtcatgtttatcgtccacacagtaatacactccatggaggctttattcagtagtgagaacatgttactacagattggttgaatgacattaaagtataattcagaagaaaagaacaggtggaaaaggaaaattacttttaaaattactttaaagcaagtccttggaagccatgtgtggtaacacacacccagcactcaggagtcagaggctggcagatccctgagttcgaggccagcctggtctacagagagaattctggtctacagagtgagttctgaaaccctgtgttaaacaactgtcatcagaagaaaatgagaaggagaaagaggagtaggaaaggaaggaaagagggagaagtagtagtggtggttgttgttgttgccaccattcttggtgttcatgtaattttatcagttattaaagtggaagaaaatttgcatactaataaaatactaataaaatgaatgtacttgtttataagtctagagagaatattggatattgtaagacatcttcagctttttcagagttgatggatattttgatgttataatgataagaacaccactatataaatacatagaattacagaactttttgagaaactgttagaaattctggttctgtcttaattccaaaccaaagttaacttatttaagaaatgaaactaaagccagacatggtgttgtatgcttttctgcagtgtgcttatactgactgccttgcccaaatgtttccttatggagactgtttttattacccttcattttccctgaaaagcttgaggctaactgtaagctaactgtaagcctaggatacttgttaattcagcagtgcggccaagatctgaccacagt

SEQ ID NO: 26654 - DNA, 1180 bp, Mus musculus
tgtgcaggaatagaaaccctgactaagacaaagggagaagaaagtgggtcaaagcccaaatggttatatttagatgatacctcagataataaccattgctttgcatacagttttatttaccagtgccatgccaatagcagataagttcttacacgaaacatctagtcttttagatatctgaaagtgcttgatacagttaaaggtacaggtagtagaataatattttgtgtatatagttttttaaactggaaaaatgctgtgtgtagaaatagaattgttagcccatctctgagaacagtgtacaggctgtgcttgttcagtggatcaaggaggtgggagggaaggaactgcaaaaaaattccatttgtatgctagacatttctagcttacccatccccctgtgtgttgtgcgcatctcatgtaactttgctatgctgtatatattgtacatactggacaaatgagtcctatgatatctagtctctaggtatgaaagaggttgcccatgtatgacaaaagtagttagtaaactcacacattctgtttactctgttagttcatagcaaggttgtcttctgaagagttgtgaaagtatatcatccaagtgattgtcacaggacacaagatgggctgaaggggaagaaagggcagagaccagaatgtcctcaccagaagacacattgaaatctaactagttacatgcgtgtggtttcagcactactacgtatataggggacaaattcatgtcctcatctgaaacatcttagtccttctaggtgtttagaagtgcacaaagtatgttaaaagtagacatagtaaataatacatgttgtagattctgtttaaactcatggtgaagtgctgtcttttggaactagaaagagaaaccgcttctgagcaatgcagccttgcttgcgtaggtctaggagggaggaagaaagaaaatgaatgaagagcctaatgctgatgcaagtttggtaatgcaaggttatccattgttccttttatctgtgcatcttactttgcaatgtataggaaacataggtccaaatttgcagcacccagtcttcctagactgtaaagaggtgccagcgtgtgacaaagtagagttagtgaaaagacatatttataaattatgttaaaatttgtaggaaaaaaacttaaaaccacttaggaagtg

SEQ ID NO: 26655 - DNA, 1129 bp, Mus musculus
tggataacctcttggcctttgtgtgtgacatccggccggaaatccatgaaaactaccgcataaacggataggaggtggaagtgcctgctctgtgggttggcatgagatctgcccccatagaataggaaaccttcacagagctggagttctgttctggaaggcattaaattatttctctatgctgttgtaggacccttcactttttgagagtatcaaatctagctttttgtacagacttcttatgtacctgaagtttcatcttcttatcttgtgtgtctttaaggagtgtatgtcacctgttttcctgtgtcttcatgcaagtaatcgatatcaatgttgacttttttttttttttaattagcctagtaggaaaaattctttgaaggaagaaggggagtaaactgttcccttctcctttcttacaggtcaggggcgttatctatgaaaaagtagaagtagctattagtaactcctgtgaagaagcagccagccttagagtactctagcctggataatttaggacagtcaatacgatatgcttgttccggctgctgttagtgtaacctaacccaaatcactagatgctaggacttaacttgttacatgtttttggtgtgcttataatcatttaaaagtaaaaatttgtcttgcttttcaaaaaaaaaaatgggtgtagagctaaacaaagaatactcaactagggaatacctaatggctgggaagcacctaaagaaacgttcaaaatccttaatcatcagggaaatgcaaatcgaaacagccctgagatttcccctatatcagtcatgatggctaagatcaaaaactcacgtgacagcagatgctggcaaggatatggagaaagaggagcactcctccattgctgaagggattgcaagctgctacaagcactctggaaatgggtttggcagttcctcagaaagttggacatagttctaccagaggacccagctatactactcccaggcatatacccagaagatgcaccaacatgtaataaggactccattgtgttcatagcaggcttatttataatagccagcagctggaaagaacccagatgtcccttaacagaggaatggatagagaaaatatggtacatatatacaat

SEQ ID NO: 26656 - DNA, 2179 bp, Mus musculus
tcctaaacctgataaacagcttcagtgcagtagctggatataaaattaactcaaacaaatcagtggcccttctcaacacaaaggataaacaggatgagaaagaaattagggaaacaacacccttcacaatagtcacaaacaatataaaataccttgacgtgactctaactaaggaagtgaaagatctgtatgacaagaacttcaagtctcttaagaaagaaattgaagctttttcgcaacgggtttgcggtcagaacgcaggtgttgtgaaaaccaccgctaattcaaagcaaaaatgggaaaggaaaagactcacatcaacatcatcgtaatcggacacgtagccagctgatctacaaatgtggtggaatcgacaagcgaaccatcgaaaagtttgagaaggaggctgctgagatgggaaagggctccttcaagtacgccggggtcttagacaaactgaaagctgagcgtgagcgtggtatcactattgacatctccctgtggaaatttgagaccagcaaatactatgtgaccatcattgatgccccaggacacagagacttcatcaaaaacatgattacaggcacatcccaggctgactgtgctgtcctgattgttgctgctggtgttggtgaatttgaagctggtatctccaagaaccggcagacccgcgagcatgctcttctggcttacaccctgggtgtgaaacagctgattgttggtgtcaacaaaatggattccaccgagccaccatacagtcagaagagatacgaggaaatcgttaaggaagtcagcacctacattaagaaaattggctacaaccctgacacagtagcatttgtgccaatttctggttggaatggtgacaacatgctggagccaagtgctaatatgccttggttcaagggatggaaagtcacccgcaaagatggcagtgccagtggcaccacgctgctggaagcgttggattgtatcctaccaccaactcgtccaactgacaagcctctgcgactgcccctccaggatgtctataaaattggaggcattggcactgtccctgtgggccgagtggagactagtgttctcaaacctggcatggtggttacctttgctccagtcaatgtaacaactgaagtcaagtctgttgaaattcaccatgaagctttgagtgaagctcttcctggggacaatgtgggcttcaatgtaacgaacgtgttggtctaagatgttagacgaggcaatgttgctggtgacagcaaaaacgacccaccaatggaagcagctggcttcactgctcaggtgattatcctgaaccatccaggccaaatcagtgctggctatgctcctgttctggactgtcacacagcgcacatagcatgcaagtttgctgagcttaaagaaaagatcgatcgtcgttctggtaagaagctggaagatgggccccaaattcctgaagtctggcgatgctgccattgttgatatggtccctggcaagcccatgtgtgttgagagcttctctgactatcctccacttggtcgttttgctgttcgtgacatgaggcagacagttgctgtgggtgtcatcaaagctgtggacaagaaggctgctggagctggcaaagtcaccaagtctgcccagaaagctcagaaggctaaatgaatattacccctaacacctgccaccccagtcttaatcagtggtggaagaacggtctcagaactgtttgtctcaattggccatttaagtttaatagtaaaagactggttaatgataacaatgcatcgtaaaaccttcagaaggaaagaatgttttgtggaccatttttgtgtgtgtgtgtgtgtgtgtgtgtgtgtgtgtgtgtgtgtgtggcagttttaagttattagttttcaaaatcagtactttttaatggaaacaacttgaccaaaaatctgtcacagaattttgagaccattaaaacaagtttaatgagaaaaaaaaaaaaaaaagaaagaaattgaagaagatcgcagaagatggaaagatctcccatgctcatggattgccaggattaatatagtaaaaatggctattttgccaaaagcaatctacagattcaatgtaatcctcatcaaaattccaactcaactcttcactgagttagaaagggcaatttgcaaattcatctggaataacaaa

SEQ ID NO: 26657 - DNA, 1197 bp, Mus musculus
aggagaactgtattaataggcaataggagccattaatctactttatctttaaacgtcttgttgctctaacatgactgttttaactgtgactttgttaggtggggtgcaataacatgagagatagttaccaatttccacagaaaactgagcatattttatttatctgcagtgaccaaagtgtcagttctaagtaacatgttttattttaatattataaactatttaaaatgtgtttaatcatgcttggttctgttcagtgtatgaaacattaaatatgtacattttataattgaatatagacatgcagtttgaatatacttgttaaatgagtaaaattatatcaattttagtttttcttctttctaactgcttaaaatatattcatcccataggtttggaattatggttaaaatggccagctttaacttaatatctgccatttatctagataaatgccaagcacctccaacatatatcacattttatgccttttaaaaataatgtgtagcctagacaagcttggactcctgttcctcatgccctcatgtcatcagcatgtgcaccaatacagccagcttcttttatactggttgttgttgttgttgttgttgttgttcttgttcttgttcttattgttgttcttgttgttcttgttcttttgtagttgagaactgtctgcctgctgtgagagggttcacttaatttctacctttgagaatattagaattctaagtgacacggggaaattattttcagcttacaaaaacttcaaaagcctaaactggtgacatgagagcaagtgtgacccaccgtactgggtgttttatagaatgcagcagttgccattgcttttgatttctctcacatttaggttctgcacataatctttgagagatagttgtggtgcacagctctcttcctcatagttttgactagtgtcttagagtaaaagtatagtttaataattattgaatacatataaatgagtaaatgaaggaataaaagtgtaaaggcaccctttatccattgttggtgcacaactatttactgccttcaaaccagctatctaaactagtatattttatgggtcatcgtaacaaagccttgctttagcaaactaaaatcctcacttgtcttattaaaactttccaacccaagaattgatatgtgtctatgtcttctctagcatcagctcaa

SEQ ID NO: 26658 - DNA, 1193 bp, Mus musculus
aaagaaaatttcggaaataacagagaataagcagtatcaaaatttccttaatccaacaaaacacacactagagttacactctgcatcttctagcaagcattctgatgacatggggatttcatgtgaaggagtcgagtgacgcaagggtgtgtaagaggaagtggtaatttttagtactgataataaagtattttgtatgcgaatcgagaggattgcctatatcgtgtacaatatttggaagatattaattaaaaaggagccaggaaaagatcccttttttttcaaaaactaaataaatttgggttacagggagattgatgaatgtagaagctaaactagaatggtaattgagtatttcagaaaaatgtacatatatatatatatatatatatatatatatatatatatatatatatatattcaatttatatatacatgtatattcaacatgcacttatatgtgaattgtttcagaaatggtctcatgaggtctaagctggcctagaattactatgcagattgtttatgaaattttggggggctggtggtggcacacgccggtaggatttgctgaaggaggcagaggcaggaggatcacgagttcgaggccagcctgggctacacattttgggctggtgagatggctcagtgggtaagagcacccgactgctcttccgaaggtctggagttcaaatcccagcaaccacatggtggctctcaaccatctgtaatgagatctgactccctcctctggagtgtctgaagacagctacagtgtacttacatataataaataaatctttaaaaaaaagaaaaaagaaattctgatcctccttgtcgtacccgtttgttttaaatacattacattttgaagtcagaagcagtaataatagataaaaagcatagagagaagtttaagaaattgactaaacaatatttgcaaagtagataaaagaagtacccagcaatccaatattgaagtggagcatataggaattgcagaaaagagtagagggagaccatgagttttacttatgtcaagtttcaggggtctgaggaattagtcttcaaggaatgttcaaaaagaaatgggaaaaaagaggggggggggatgaaactaattcttggaagttggaagcctatgaatttgagacattaaaagaaaagctaaagtggctatttccctcaatgaa

SEQ ID NO: 26659 - DNA, 2309 bp, Mus musculus
caagattttatcgaaaggacccagatgtagctgtctcttgtgagactatgccggggcctagcaaacacagaagtggatgctcacagtcagctaatggatggatcacagggctcccaatggaggagctagagaaagtacccaaggagctaaagggatctgcaaccctataggtggatcaacattatgaactaaccagtaccccggagctcttgactctagctgcatatgtatcaaaagatggcctagtcggccatcactggaaagagaggcccattggacacgcaaactttatatgccccagaacaggggaacgcaagggccaaaaagggggagtgggcgggtaggggagtgggggtgggtgggtatgggggacttttggtatagcattggaaatgtaaatgagctaaatacctaataaaaaaaattaaaaaaaaattaaagataaaaaaaaaaaagtatgtagccaccctgggcgtggaggtacacccgctcctcttccatactaacagaggacccatcaagttcaacgtgtgggacacagccggccaggagaagttcgggggcctgcgcgatggctactacatccaagcccagtgtgccattataatgtttgatgtaacctcaagagttacttacaagaatgtacctaactggcatagagatctggtacaagtgtgtgaaaacatccccattgtattgtgtggcaacaaagtggatattaaagacaggaaagtgaaggcaaaatctattgtcttccaccggaagaagaatcttcagtactatgacatttctgccaaaagtaactacaactttgaaaagcctttcctctggcttgccagaaagctcattggagatcctaacttggagtttgttgccatgcctgctcttgccccacctgaggtggtcatggacccagctttggcagcacagtacgagcatgatttagaggttgctcagacgactgctctcccagatgaggatgatgacctgtgagaaagtgaagctggagccctgcgtcagaagtctagttttataggcaactgtcctgtgatgtcagcggtgcagcgcgtgtgccaccttatttagctaagcagatcgtgtacttcattgggatgctgaaggagatgaatgggcttcgagtgaatgtggcagttaaacataccttcattttttggacttgcatatttagctgtttgaacagagttgtttcctttctgaatttcaaagataagactgctgcagtcccatcgcaatatccagtggggaaatcttgtttgttactgtcattcccattcttttcgtttagaatcagaataaagttgtatttcaaataatctaaacaagtgaatcatcccttgcttattaaagccactaacacgagggagcttgtgccatattatagtttaaaatgcttctgctattacctgaggtctattcagtttatgttctccttgtgcctaccttcataaacatttagattgtctgtgactcagctaggatgatatctgccctacctgcatttagccaggtagtttaacctacgagaagactttgtgtaaaactaaagatttaagtatgtacgcatcagatgtttaaggattgcagttgacaatttctgtaacctaggccttcagaagttagaactgcagttgacagacagaagcttgatggttttctgagatggactacatttcttcatttccatgtctaatgttggttctctaagatgtcctctgctttcaaatattggctcctatattgagtggtagtctcaggaggtagaggcaggaggatctcttgagtttgcccccaaccttagtctacagagcaagttccaggactgagagacccgtctcaaaaaattcatggtaggctgttacaatattacagcagctgatcttttttttctcccatagggtttatataggttgtgcaggagaggaaatgctagggctactgccgctgaggagtagggtgggcttctctgatgtgatagtgttagttgagacttaggtgtgtgatcccggcacaactgtgttgctcagatgtatttacagcaagccattctgtgtgctctgctggtccagtctaacaaagttcctagaagggtggataccttcacatagttgttggtgtttgttttgtttttttttttctccccaaagaaggtagatgacttaaatacagtggggaaggtggaaggaactcatactgtgcactagcttcagcagactgattgcaagactcaaatttgatgtatgtgctatgctatgatcaggtgaagaccctctcccctgactgggatgaaa

SEQ ID NO: 26660 - DNA, 1124 bp, Mus musculus
tcccttggtaccctccacccaccatgactactatagtctttcctccttttcgtcctcagggttccccaatctccaagaagacagatcaggtggagatttccaatttagaccctctctccacataatgtctggctatgggtctctggaccgaagcctctctgatgactggacaagtcaccattctatgtgtatagcagaatatcaataggaatcaattcaatgtttttttttttttaaatttttatgttttgcaagctgtgtttgtctgatctatccaatctgctggttcctatccttccaggcagtataaggcatggactccctctataggcatggacttcaagttaaacagaagattatttggccactcctacaaattctgtaccacaattgcctcttctgatcttgttggcaggacagactttaggtctattgttttgtgtctgagttggtgtccaggttttttttctcctcatcctgcagagtaacttttaccacaaaatagagtggaacagaagggtgaaggctacattcaagtaccagctgggcctttctatgttcaatgatctgtgtggatgtgcaaagagtggtggtatatctgagtcttaaggtcaatttatgtccaatgctctgaagaactggtatgtagggaaaccctgctaattaaggttaccatgatcggatagttcttcagagctccacataaaatggaagattctctttagtagcagagattcattttctctaaccttgtttggggatcctgactctctatgcccttacatgggaaaggttgaatagtccttgtcagacctacaaacttccttttctccccataagcaccaccctctacccccagctcctgccccaggaagtacctgggattcctggaatgtctttccacacaaatgaggcattcaaggaaagtaaaattctaaccaatgattttcatttattcatttaccctgaaaactcttccaactctctaaagtccatatatatcaatggttcacaccaaataaagtgtgaacatataagcccaccgtgaataaacttatacatataagctaagataatataagaccgctgtttcactaaagatgggtggagaagcccttcatcta

SEQ ID NO: 26661 - DNA, 1099 bp, Mus musculus
aattaatgtactaaaattgtccatcttgctgaaagcaatctacagattctatgcaattcccagcaaaattacaactcaattctccatagagttagaaaaggcaatttgcaaattcatttggaataacaaaaaacctaggatagtgaaaactattctcaacaataaaagaccttctgggggaatcatcatccctgacctcaagctgtactgcagagcaatagtgataaaaactgtatggtatttgtacagagacaagcaggaagatcaatggaatagaattgaagaccaggaaatgaacccacacacctatgctcacttgatctttgacaaaggagctaaaaccaaccagtggaaaaaggacaatattttcagcaaacgataccagttcaacatgtggatcatttagaagaatgcaaattgatccaaatttatcaaatctcaagtccaggtggatcatggactgccacataaaaccggatacactgaaactaatagaaaagaaagtgggaaagagccttgaatacatgaacagtgtgggggggggggattcctgaactgaataccagtggattttgctttaagatcgagaatccacaaatgggaccttacaaaattgcaaagctcctgtaaggcaaaggacactgtcaataggacaaaatggcaaccaacacattgggaaaagactttaccaattgtacatatgatagagtgctaatatccaatatatacaaagaactcaagaaattatactccatacaatcaaataaccctattaagagctaaacaaagaattttcaactgaggaaacctgaatagttgagaagcacctacagaaatgttcaacattcttagtcatcagggaaatgcaaatcaaaacaaccctgagattccacctcacaccaggcaaaatggctaagataaaattttaggtgacagcaaatgctgttgagaatgtggagaaagaagaacattcctctattgttagtggaatttcaagctggtgcaaccactctggaaatcagtctgctggttcctcaaaaaaaaaatggacatattattatctgaggacccagctataccattcctgggcatatatcca

SEQ ID NO: 26662 - DNA, 1114 bp, Mus musculus
acaaaatccacataaagatggaaggagagaactgaccacctcagcatagccctctgacctccacacatgcacacacacacacaccatacacatatgtacaaatgcacactagaagaacttaaaaacttttaaaagaactagatttttatcacaactttatttactgtataaaataaacaatagataagaacacacatgtggcttcctgtcctggccgccatcggagagcctcagccatggccctgtgctacctcatggccgtgggactcagcaagggccacaaggtgacgaagaacgtcagcaagtgagacacagctggcattgcaggcgcctcactaagcacaccaagttcatacgggacatgatccaggaagtgtgcagctttgcactctatgagcggcgcaccttggagttgctcaaagtgtccaaggacaagagcacaatcaagttcatcaagaagagggtgggcatgcacatccatgccaagagaaagcaggagaagctgagcaacgtgctggcagccatgaggaaggcggtggccaagaaggattgatgaacactcccccaataaaagatcattcctacaaaaatgaagcagcagcagcacacatgtgggtaaagaataatttgattaataattgtatatgtaataaatatgaaaattactgttttgacatagtactgaatacctggaaaactcatacactgctggatataaagtgactatgaaactatatatatatgtgtgtgtgtgtttgtgtgtgtgtgtgtgtgtgtgtgtgtgtgtgtgtgtgtacatacatgtgtatatatgatccagttattaaataaacataaaaacgcatgacaaatattaatggcagttaccttcagaagctatgatcagacaatttgtcactcttcgtactttgcaatattttaatcaaaatcaaaataataaacatcattttcaaaagatccatgaaacacagaccagcagaacactttcttctttctaagaactctactctgtccttcaggtagcacatcattattcataataatgcttattgagcaggaataatctcttttcagcataaaacattttgtattcaagcaaaaataattgtaatac

SEQ ID NO: 26663 - DNA, 1099 bp, Mus musculus
tatgcaatgacattaagaggtaaccagtgctggtctaaggaacacaacccagcttcctccccaaattacttttacagctaattttagatagttcatgccttatccttacgaagaaagtggaattgatggcatgtaggtaccagagtgctttaaaaaacattattacattagaatataattggatctttcctaaagcttgcacgggcccaagtaaaaaattaattccctgaattttaaattaccaacaaatagccagtattatgttatatacatttttgttgagtcactttaacatccatacattaactttataaacttctacgttactatcaggagctcactgtgaatgcattatcttcagatggttaagacatcagacactacattttacatataatgtgcactaatctctggggagaataattacaaacaatacataggtcaacagactttaagtggggaggataatagcattcttgtttgtatgccacacaccatagagaactgtgcgttgtctctgtacccaaggtctcactgtattcgtaaggttgccaagttcagtgttcattgttttgatttctacatatttggcccctcaaactcttgatataggtttgcttgcacttgtaagctaatcaaggaaaaccataagaaaatatgcatataaggaaattattcctctccataagcaaactactactggttttaaacattcaacctcctttaaaagctgataaatgagggataatacgactgttcggcttaagaaagcactacagataaattttaccaagactggttcatgatataagatgctttgtctttatgctaaaatttttttttaaggaaatcttgggtattgtatgtaaatctagcttatcaattttaaaacttgtattctcttaagaactacattaacagaaagccttttttataagcagtaacgttaagaatgttccagtgactacctgcccttatacctagtcttgttaaaactttcttttgcagggcattttagtgtttggtttacagtaagtgcagaatgggcagataaaaagattgagttagggacattgaaaaagaaagatcaaagaatgaa

SEQ ID NO: 26664 - DNA, 2988 bp, Mus musculus
ttaataagatacgctactacattgctttgtttataaatagtttatgggaaatttgcacttagtatgttttgaataatgaccacgcatggacacagtttcattaatttaaattgcaccacacaagtagcagttcataagaataaaatgtgcttattttacgcatggtccataaaatgatttgatactcttttaaagtgtatgtggtccattagaaaggttaattccaacaaagcatttagtttacagatcataatcctaagcagtcaggagagaaatacgaacagaaattacatgaggaatattccggctagattaggcgcctgtggatattggagttgggttgattttcctgaattggttcctataggatcctccaattttggatcttctacagatcccccagtgttctagtttagtaaactggcccatttgggctgaagaacttgtgtggaaagagtccaaacaactcatcattttcttctctgcatatctcaccacaattgtaggatttttttttccatgtacattctttgtatatgttcagaagggatcaaaattgccatctaacaggtaccttaaaggattcctgggcatctacttccacaactaatacgtattccacagtgttggctgttggcttcaaaaaaaggaattctcttaacatgctatgttggtcagcgtccacctcctaagctcataggcaaaactcacaggttaaaatggaatttaatctcagagatcctttgttcaagaatatttgattgcatatttagttgtagtaagattttataaaatacataatcctttgtatgtgcagtttgtaaagtatctgcagaattaaatgctcttatttacagatcagaaaactaacaccagtgtcaggatcacagtatgggaatgactgatgtgaccttgaatgcagcttggtttgactgacattaaagccagtgttaaaaactaaagcttagcaacaaatgttttactatttttacaggatactgtaaggaataatttgacttttaagaaatcttaaatataaattttctgtgcattaatgtagtacctcatagttaaaactttcttcattcacagcctttccctttcacagtaaaacatgcttagctttctgtgtctttcttttagtcatgataaaaatgaagctgtaatatcaaggtcatacaagtataaacatatatgtccaatttttaaactacttccaccttacaagttgttcaaaatacattattagataattctaaagtgagaaaaattagattctaaaacacaaatcacaagaacgtttgatattgaagtgtctggctttaacatgtgattccacaagagtagaagcaagaaaggtatatacttttaggagcctaaaaaacatttccaaactagcccaagctatctcaactacaggagcggagggggacgaatgattgtgaacacaaagtctgacttgaagattctctgcaatgaagagaattcattcattcactctgctcaagactccactgggccaagagatggaagaacaaacaaaaaggactttccatgtagccttcctccatgtggcctagtgaaacatggatcttgtttaaaaggcatctgattttatgcagacacgtgtctgaaaaattaaaatccattgtccaaacttccatacattaggtaacgtcttataatgtaaggacatggtatccactgccctaaagatttagacatccatcacagactctgcagtggtgtttctactccagtgaggtactttctaccatggtgtgccttttgctgtgagtgacttaacagtgcaggttcttgttgccttcactgttaaccctgagagcacataatctgatgcatgtgtgactaagaataagcctatggtcatgggcaagaagggccaacatagacacttgggtagaaatacagtctgatcaagcaacggtgtaaggaaaagtccctaattcacaacctccttgatcttatgacccttgaaaacctcaagaccgaagcctgaccataagttggaaagctctcattaccctctttaacaacataaattcatagctaaagaaaaactgcatgtgcaaataataccatattcattttttatttaacatggggatggaatggggatagcatacattttatttgtacaatatttaacaatcacttattcaaggtgggattttatggggatttttttcatttttagctttctgttaaatacttgcagaaaaaaaaaatagcaagtacaatatgacagtagtacaacaacctgtgcccaaaacactgacaagaaatacagagtaaagctaaaataattgtttaccaatattttgagaggtaacaaatagggagatacgggttgagactgcataaaaaacgtactgctggttgaatatctgaggtaaatgatgtttaatcaagatgctacttgtatctttgtccataaattgtaaataattttatgcacattataccaaatcttcctaaaaagtaatttttcaaaaaagtaaaaaagagaaactggaaaatatctgatgaagcatttttttttaaaaaacagtaatcattctattccactaaactaccatctatctggtgaggagtttggttttgttttgttttgttttgtttttcccaaccatttgaattttacttaaatgtgacttaattattaaggataagaaaaagggtcagaagcgatgttttcataattgtgtgtgatacataattctgtctttaagtccaaaggtgtttgttttttgtttttcctggttatatttttagaatattaccatgaaagatagtgcaagttcatgggaccaataattgtgaggcacagtctctgttctggaattcacaaggtacctgtaataaacatccaaacaagagtcacaaatcacatgctaaaactcctagcatctaaaatacatacaagatctgtgcagggcatagatagacttcaaataaattcaaaca

SEQ ID NO: 26665 - DNA, 1227 bp, Mus musculus
ctttgttaaattcactcttttcatctctattccttaccttccattaaatcccatttctctagaattgtctctctatccattggcattttcttaatgtaccttgtaaagttttaaaaattactttgtattatatcgttgattatctcttccctcttgaagcttcttcgcttgtgtgatgattaatcttcatgtcattgtgactagtttagatggccatggaaacacatttctgcatgcatgtatttccagaaaaaaattaactacagagagaagacctatcctaaatgtgggtgtcaccattccaatgtgctagagttccatactgaatggaaaggaaaacatgagctaagaactagcattcatttttgcctccttcctgacagtgcatatacactggcacatgctgccttaagctcctgtaatggtaccttcccctccatgctggattgtacccttcaaaagtaggaccaaaataaacactcccttaagctgctttattgtgaggaatgtttaatgtatacagcttgttttctagattgttgtggtatcttgtacattcttacaggctttagtgtgtcatttttcactgctcctttttctgtctaccactctataacttcttgaccacagcttactctgcacagatactctgcccacccccatagttcatcattctcagttgttgtttccttttcaatgaaggcttcatcaggcaagtcttctgtgaatgtctgaattctctccacagttgtaatggcctctagttgggctttcttttttcttccttttcaatccctttgcagatagctgtgcttaaggtatatgatgacaccgttttgttgtcactgtgacatgatcttgtttcagctcatgttcttatagctcttcataatttccccactatattcttgtaactccactgttttctcaaatattagaactcttattctctgttgtgatttgtgctacattcttttcatccatctcactagttttgactatatagtttccccattatagattgggaatttgggatcaagctatgttttcgttgattttgttgtttttgttttttagtgtctctctgaagattcaactgtgcttgaagtcctacagaaacatttcagtgtcaacaaaaacttgcagtcattacacatgctattggtttgtacttttacctaatctatgaaaataacttatacatattatggatgatttttttatgta

SEQ ID NO: 26666 - DNA, 1194 bp, Mus musculus
tacaatcataataaagagttttatcaatctgtaccatggaaagaactaatagcataatggctccagtaactttataagtaagataatggaaaaattttcagtgtataaggatagaaaaaaaattttaaaaagcttcactctctcatacagaacagtgtgccacttaaaccataaagccagtcttctctttacatagcaaaatatcattacagaattcttcatattcaacttcctgttacatgcatggaattacatgcagtgttttgctaaatgaagttaagttggaggctacaatagtatgtacaaagatatttcttctaacagtttttatacatatgttttgttggtagaataccacaaaacaacaggatattgaagagcatcttcactagttaaaagattttaaatttaaccagtaagagttgatttttcttttgtttggcttttttgcttctgttgctttctttaatgaaaaagaataatttttttttgttgttcattaatctttatgttccttcttagtaaatgcattttcatacaatatactcaggttgactgtcatcaaatgggcactattccattctttgaaaacatttaatgctaaggaactctgtttctgttggagctcagaatagataattacaaatgctatctgacatatgagaaaactttttttttaagtccacatatttttattagatattttcttcatttacatttccagtgctatcccaaaagtctcccataccctccccaacatatgagaaaactttttaaacttgttagagaataagtctgtggtccaaaattctttcttttttttttttttttagaaaacctaaaaataagttaaaagtaagaattctaattcttttatcagttttatttgagatataagtatattacataataatttaatgtttaaataactataagtcttcaaagagaaaaaggtgacatatttatagattaacacacatctatattttctaacgtaagttggcatacaggaaataaaaattgctaatgatgtcaaagcagctacaaagcttgtacttcattcaaagttgggtatgacaaattttgatgtagcataattggcttgtaaagctttgtcttagagaaattttcattaaattccatagcattaaacaaattattagaatatattattacctacaaggaataaaatga

SEQ ID NO: 26667 - DNA, 1142 bp, Mus musculus
attcaatctgtgaattttattgtatactttaatatatatgaatgtgatcgaaaatctggttttgtttttatcttttattgaaagtagatttattttttcttcatgtagtatattctaattatgctttctgctctctctactctttcagtttatccctaattcccctccctggatccctttcagtcactcaatagaagacaaacaggcttctaaaggatagtaataaaataacattatgataaaacaaaaactgatgcattagaattggacaaaaaaaaaaaaaaaaaaaacagaagaaagagcctaagagaaggcacaggaaaactcacccacttatttgcatgctcaggaattccataaaagcactaaacagaagccataatctataaacaaaggacctgctgcagacccatgtcggccttgtgcttgctgacttgtctttgagttcctatgcactttgatcatactgacttagaaggcttgtattcttggcatcctcttgtctctctggcttggaccctttctctgcacccctttcacaggcttctcgagtcctgagaggagagatttgatggcgatacttcatttagagctgatcattcaaaagtctgtcactgtaatgtcaggctgtgcttctctgtatgtgttcccttcagctgcaggaggagagtgggccttaagtcaaatcagatattggttgtttactccccacaagcttttggtcagcatttcactagcatatcttgctggcaggacaccattgttaaaccaagagtttgtggctggtttggtatttacatctctcttggtagcatgcaaagtaccttcctatgaccaagatgctggagtgtagcaaggaaggctccaggtaccagctggacttctttaatttcagtgagtttttcaggtgttgttttcatcaataggaccttactggtcagtttgtggatagcaacttgaagtcttggcaacaggttggattgtttgggggctcacttgggacccttttggccaacaactcaattatctataagcagtcccggtattggcagctttatttggtgacaagagttggtcagctggactctgtgtcccccattatttggcaattttatttaactcatcttcatatgtgtatatat

SEQ ID NO: 26668 - DNA, 1455 bp, Mus musculus
atcgtggaagcattaaagaaaatgctcaaaatgtaacatgatttcagacttgtaggaaccgacaaggaggaaataaaagagggcagggacactagcattcatatttaaaatgagcaggatttaaaaactaaaccatcagaggttggggttagctcagtggaagagcccttgtccagtgtacacaagaccttgaggtcaatcccagcaccacgaaataaataaaaaccagatcactagtcatgatgagaaaactgctgacacctttgctagtatgttaccgtgtagatgtgtaggctgcatataccactgtgtgggaaatgttaccatccacatgtctgttaaaggtaaagtcaagggtttcctgctgttcccaccttacactgccatctttcaccgtttgtgttttgtgttgtttggatgtcagtattctatgaagaactgcacaatgatctcctgtgtttaaaaaaaaaaaaaagaatgcaggcttgaaatgatttgaagtaactagtgccttgttaatattcttagtttgaggaccctcgtgaaactttatgtgtttaaaggtgcataatgggcttccaacttctcgctgactcatgctgttttagctaatactgtacaaataaaagttttaatatatgcacttagaaattaaaacaacagtaagtccgtaagtgttttaagatgtactatatttattgagcatgccttcagtcatttgagtaaagcattgttagcctcacttattactcagtttttataccccttatcatggtttgcttcatgtcaggtctacgttcatatgtgcaaatgtatgtgtttcaataatgatgtatttttatgtttatattatgggaaagacatttatttatattcttgtttcttctgattgtcaagtttagacctattttatatagccttggtcatttattttcttgtttcatttatccatataaacatataacctagattgataatggggtatcaaggcacatgggctgaaagtttattaaaataaggaaagctttagcatatgaatacccaaaagaataataacaaatgttgagcagtgtggcgcatatggctgagcacgtgtaggctgacattttacacttagtaaaaatctaggtcacttaaaactttgaaaatgttagatctaataaacttaaatactaattgttgtacagagatcagctgattatgaatatgggttgatttactgatgaattcttttggtaaggtaaattctaaaaaagattcttaccccataattttttatgttatgaagtgaattatgtcaactgaatgtactatcataattgcctggcataaatacctgtttacactgctatttgttctttcattaatactcattgaacagtgatgttgggcatttagaatgaagcaacagaggacagtccaactttctttgtaagagtagagaaatgcaacttt

SEQ ID NO: 26669 - DNA, 1120 bp, Mus musculus
atttctgctggtgttggagtttgagactgtgggataaattgggagcaggaaggttggaggagaagggctttgtgatacattgggggtggggttagagagtaaagggagaccatacagattgtctgctgcagagctgggcatgagtgttgtcacgttgaatctggaggaacaaaaggcccaattattttatcatttcttttcatcttttcatcttttcttttctctctctttctttctttcttcctttctttctttgttttttatgatattaagatcctattttatgtttaatcagtggtttttgcctacatgtgtgtatttgtaccacatgagtatcatctggtgcctatggaggtctaaacaagacattgtattccctggaactggagttataactggttttaagcaaccacatgggtgttgcaaattcaacctgggtcctctgcaagtgcagcaaatgcccttaaccactcagccatctctccagcaccaagttttgctggatcaagtagattttctttagtttggtaactagttggtctgaatacaactttttcaaatgtcttccatttttgactttatctctgccccatcatttcctctatacgccacccacataaccttcctgctaacttttctatccttagtattctctcttctgtttccatattcttagctctaccttcaccctctcttatacacgcctctccccatggcttctttctagcttcctggcttctgcagtactccaagttaaacatgcaaatttagagattggaaaactaagatccacaagtgaagaacacatgacatttgttttcctggactcactcggcataattttttcaagctctatctatttactttcaggtttcttttgtttatttttatttgtgactaaataaaaattccattgtgcatgtgtacctcattttcaatatccattccttagttgatggacatgtatgctggtctgatttcctagttatttgtgagtagagactgaaaatggattgaatttgcatttcctttttctaatgatgttgaacaattgttaacatatttattaaccatccatatttgttttgaaaagtctttattccgatatattagtccattt

SEQ ID NO: 26670 - DNA, 1162 bp, Mus musculus
tacaagatgtgtgatgtaatggctgcttactttggcaaaatcagcgaggagaacatcaagaacaattttgtgctcatatacgagctgctggatgagattctggactttggctacccacggaactcagagataggtgcactgaaaaccttcatcacccagcagggtatcaagagtcagcatcagacgaaggaagaacagtcccagatcaccagccaggtgaccgggcagattggctggcggcaagaaggcatcaagtatcgccggaatgaactcttcctagatgttctggagagtgtgaacctgcttatgtccccacaggggcaggtgctgagtgcccatgtgtcaggccgggtggtgatgaagagttacctgagtggcatgcctgagtgcaagtttggaatgaatgacaagattgtcatagaaaagcagggcaaaggcacagctgatgaaacaagcaagagtggtaagcagtcgatcgccattgatgactgcaccttccaccagtgtgtgcgactcagcaagtttgactctgagcggagcatcagcttcatccctcccgatggagagtttgaactcatgagataccgtactaccaaggacatcatccttcctttccgggtgatcccattggtgcgggaggtggggcgcaccaaactggaggtcaaggtggtcatcaagtccaacttcaagccctcacttctggcccagaagattgaggtgaggatcccgactccattgaacacaagcggggtacaggtgatctgcatgaaggggaaggccaagtacaaggccagcgagaacgccattgtatggaagatcaagcgcatggcaggcatgaaggaatcccagatcagcgcagagattgagctcctgcccaccaacgataagaagaaatgggctcggccccccatttccatgaactttgaggtgccattcgcgccttctggcctcaaggtgcgctacttgaaggtattcgaaccgaagctgaactacagcgaccatgatgtcatcaaatgggtgcgatacattggccgcagtggcatttatgaaacccgctgctagctgcctagttgcagctggcccacctccctacccacccttcccacaggtccaagtacccctagtgaccactcaccagtgtcgttcctccgtcctgctctgc

SEQ ID NO: 26671 - DNA, 1130 bp, Mus musculus
tgagtgattacatatataggggatatttggtatatatgatttttccaattcttttctcattttagtatcagagaaatactgttccatagaatgaatcggggacagtcccttctcttcataattttgcaaagtttggatagagttgctgttgttttgagttagctatttatttgaagacatcctccagtaaagcctttgcccatgagttttctttttgtgggttttaaaagtatagttcaaacatgccagtgctcgcaaggctactcaggttatctgtgcctttctgagtaagctttagcagtttgtttctttcaagaaatctgtccctgaactaacacagagatccacagcttggcagtgtgcagagtgaaagacttaggagcactcagtcctaaatgagaggtcttcatcacaccccttccctcagggctctgggggctctgtgaagaataggtgggtagattataagagccagagggtatgtatgacaccgagagaactcgtccagacactgtaggatggatgcacatatgaactcattcagactgtgggagaatgcacagggcatgcacaggctcatgacagaccaggtcccatctcagagaggagaagtggacatgggctcctagccctaacctataaactatctccagttgactcttacaaggggaaaaattagttttgaccagtggactttcactgggtatattaatcacacttaagagtagacctcacatttaacagtagatggccagcacaagacaaacaatgctatttttgtggtttttttgtgtttcttagttgttgtaatgtgtatttctagtgggtcccccccccccaattttaatcatgtttgtctgcctgttttctaaagagagagggggaagggggtgaagttatgtaggtggggagaatctggaaggagctgggggagaggaaattgatcagaatgtattatataatctgaggtgggaggaaccagaagtggggagaagaaatgtgtccccgttagctgattgcccagtttcttggcagtaaattgattggaatgtttgctgatactgatagtttgtatctaattttttctgtgacctgtattatcagttttgtgaatttttaaaaaattatct

SEQ ID NO: 26672 - DNA, 1202 bp, Mus musculus
cattgtgggagtggcatgacctggcttgctgtctaaaaggtaaagctgctctaaggggactaagtacaggacatttcagaggctgttgatgaaaggtgaccagaacctacatgttttataggaactttttgtttaatatttattaaatatttcctgccatggttgttatatgattgttgtactcatctttattttaattattcaatttcaagtgtagaagatacttaaaatttataacacagacttatttcctgtgacttgaatattttcttcttaatgtggtagtggtgatgaatacctcaatttatttagcacccaaggtctatactgactataaacatgtatatatggtctttaagaattctacttttaaaaattgttataaagttatgatgctgattataagctgcaggaattaagggagacggatggtaatgctttcttggctatgcagaaaaaacctgtggtttagcgaaggagaactattccaaatcgatttttgcatttatcagttaacaaagtaacgtttaaatagaattatgcacggagttaatattactaacacaacttacattacctactttacattttccaggaacatcacctacagcgagctatttcagcgcagcaagtatttagagaaaaaaaagagagcatggtcattccagttcctgaggcagagagcaacgtcaactattacaatcgcttgtacaaaggggagttcaaacagcccaagcagttcattcatattcagcgtaagtttgctaatggattgttttctctttgtaattttaaattatcagccactgaaaatattctgtattgtctgagattttaagcttttagttcatattctttggtgaatagaatgttaaacatgagatatttaaatctgtttgtattttcatttgagcttggagatcactttgagttttaataatatttggacttgtaatatttatataatataagatttttttagaacacagtttattataccgctaaaaagaggatggtttgccatactcaaataaaatttatttttaatgttcacaagtagggctatatctttagaaaaattcaaaacatcttgcacttaagtttaataaaattctaattgtaattttttttactgctcttttactatagaattcctcccaatgttggtacataagtggtcaccacctccagttttagcagta

SEQ ID NO: 26673 - DNA, 1445 bp, Mus musculus
tatatgatgtatattttgtaaaattgggaaaatcactaccttgtaaaatagtttatttgtatcatcaatattatttctgttacttgaatagtagatattcatcatcatgcttttgcacttgaatttgcaactgaatggattttaaaaataattctttaatgggatcatgagcatgaaatgggatcctgcatcacttgttttaactatttattttgccatgtttacattttgtatcttgtaaaaaaaataaatccaactttgtgtctaaaaagttaaagattcatagctaggaaatgaaattcttgtaatttttttctaaaggaactgtaaagttttcacttggttcattttgtttcacaatttgactagatggactttttggtaaatactttagtggcatttcactgtcaaatacgacttcaaggcaaaatagtattttctattactgtgcaggggaagggatggatcgatacatgcaaatttaatgtagtaactcacttttccatatattttgaatgtatatttctatttataataccagtttataaaaaataattacacagaaaaagtggactaggaaattatgcatctagcacatttaaactgtgcagatatgaaaatttttcatggattacattttatctgaagactgcatattttaactggctttaaaactgtaacacaccacataaaagatatttaccaggtatgtattgcatcatatcattgcaataattattggaagtctatatatcgagccatcccaggttttgggaggggggagggttgtggcgagattgtcttttcaattttggagagttttcctgtggctacaaggcaagtaacgggttggaaaccgtctgactgtaagtgttggacaccttcatagcgtagtgtttagtgacttttttatacggttcttgtaaattagatacgtgtagtggtgtttcagaatgtttgtttatgcactagttcagacaactttccctgttacttgttcttgataagtgaaaactgcagggaaataaaaaatacatatcaaaacacggccatgctgcatatgtgtttatttcaccatgtgcacacagcgcaagtgagggaggacaggagggacaggccagcccgcacagcacttgtcgcccaggccttcaggcatggaggagaaggtcgaaggctcgcctctgggctccattgggtttcagataatccaatataaactacctttgctatgaaagttcttaaaatattttacagaatgtaagtaatttgcagtatagcagtcattgaaatctcataaatgagcctcattttataaatatatagagtatagtgtagaattatattgcaagggggttttggaagtcctgggaaatgtaaatatttttaatgaatacaattaaaaaccatttcaaactgaacataattttataccttttttatatctg

SEQ ID NO: 26674 - DNA, 1150 bp, Mus musculus
ccaatctctaactcctgcaggttaaactaaagcgtgcctgttcacctcccaccttcttctttcccacagtttcactgcttctctgtgtggattcacacaggaggggagatggcctccccactccaaccaggacagacccccctccccacagccaggacagtactctgctggcaacagatgggagctccccgggaagccaacagcatgtgtgtgtgtgtgtgtgtgtgtgtgtgtgtgtgtgtgtgtatgtgtgtgtgtgtgcgtgtgtgtgtgtgcgtgtgtgcgtgcgtgtgctttctgttttgtaagttttgtttaacaagccctgggttgagccaggacttatgcccatttctagccttccctaccaatcgttctagaaacttctgtttgttgtgcaggaacaaacaaaacatgactcacacactcaacttggagttttacagattaaacgacattgtttgaaaaaggcagagccccgtttgctcctctcccgtgcttcccagcacttcctgactgttctgtgtctttcgctcataggggaagttacatgatcctcagcttatgggtatcattccaaggattgcacatgatatttttgatcacatctattccatggacgagaacctggagtttcatatcaaggtaagtgcttttattaagaacaagacaggccactaggccccaagtcatattacacagtctttctcctcctatataaataaatgtacaggatggttcttttcatcaagtgtcattctgtgggaaatagacactatttattaatttcagtcaataccaaacatttgggatgcttgcagtaggaacataaaaacatagaagccccctttaggatggaatcgttatacccattgcctggattctccccttttctcaatgcatttctgaggatagtccaggaatatgtatgtgtgggggtcaggacaccgttccccatgtgagttccctggaacataatctcttatgttaccaatagggaagctgccagagaaaagcattgtatggacaaataaacttggaaaatacttttttgaccagggctaaacttaccacaagttcaaatgctgtcatgaatagtgtggttctcagaaggaatgcaccctggataatgacacattcatgtcacctt

SEQ ID NO: 26675 - DNA, 1192 bp, Mus musculus
actgacttttggaagagactaccgtgactgggtcaggacaaaatacttagatgcaggatggaggaagctctgttatccatcatgttagccgagtctcaactgagaagcagtgagggcgagcaggagacatcaggctgagcacacgcacggtggagtatgtgccagtcccgcagtggcaacactgttgtgaagaatagcagcattcgtacatattgaagtcgtattttaatactgaactacaaaaacgtatccttgagattaggttttcccttcagttttaccttttaatgcagattctgaaagaaataaaataagaggctcgagttgtacttgtattggacagctctactcaaaatgtctagactgaaacagacgtctgaggagtgaatctgctgaccactaatgcctgtgttctctctttcatttctcaacagatatgactccacgtagcatgaaaaggactgtagtagtcaccagttcctttctgtcccctcctatacagtttccgtttctttttacacttgcttgcccagccgtctgtagtacaccagattcaggtgtttgcgctgtgtagaatttgtgtgcacagatacgtgcttggatccttctcctaagaagttggaaggagggggttacgcaatacccacttcctgctcagacctcgccacttctcagcctccggggttgtgtggtctctggaggcccctgcagtgcactggccccttggaatggaacgccctgctgtgccatcctagagggacaatcaagtgcagtggaaccagtgaccacgctctgcctcgacttctggtttcctgtaaaataaacacattactttatatttttagggaacaaaaaaaaagtgctgctatagggttcaaaattttcattctgaacacttttccaaaaccaaccccagagagcattttaaatatcctggtcatatctttggatctgtaaaatagaccttttagtatggcacctgttaaaatgcaaagcagattccttcaaggcagaaaaacagtttgacaatagcagtgtagaatttgctcattcagacacatctatgaaaatgcgaagagtcacagaattcacctccaagctgctcgctggtgaacctgcagtgactagtcctggccagcccagttgtttgaacatcattcctatacaagagttgaaaatgctgcagaattgg

SEQ ID NO: 26676 - DNA, 1126 bp, Mus musculus
agatccagcgtcagtacagtagttggaaaagaattccctcaggggaaagtcattggtgagatttatgccttgtctgtttttattgtaacctatcattgcaaactgctgatttgaattctttctttggcaccagataggctttttcttctttgaggcacagttaggggggaaaaatcagtataactggattggggtttgtttgtttgtttgtttgttttggggttttttatttgttttttgtatatttaattattactttattcagatccatgaatcgaaaggtgactacgttcagttgggcatactaaaaggatcagttgccaagtagtcaagcgtttcaagagaaactggcaggcttcagtgagtcgctactatgtgctgctatttgttttcatgaatttgtggtttagatagtaacatccccattcatctcagagaaatgacccatcctgtcatcttatgtgcccaagaagtgtgagctcacaccttcttctgaagctggtacccctggagtaaggggagactctaggctttctcaaggctgtgagggtggggtagaaaaagttaatgtgtgtgcttatgcacatgcgtgtgtgaaatgttgatggctgtgtatattacctccaggattctgttgtatagtcctttcctaacactgatttgacttaatttatttgttagatgttgccctttataacagtgttttgtttttaattaggtgtgaaaagaagacaacttctattgaagtatttattttacaaagatgattttgtgtttacctgtgttcactttgtttcatgttgttgccactgttggctgctattggagtctgatggaggggtcctttgcagggcaagtctgcaaaccccgtcagtaccaactgatgccaggttagaagcttgctgtctatgtttgcttctgactcggaaactgaaacgttggcctttaagagggctaccaatgggatgcgtcttgtctagaggacctgctattgtcttttagacttgtgtttagaaactgggtacgggtcagtaataccccattcttggctttcattagcagccattataaaatggatgattttagattctttctaaagcacttttccccctaggttcccattttc

SEQ ID NO: 26677 - DNA, 1745 bp, Mus musculus
ttaattcctttatcagaacagtgtgctctcgggccgcttttttaaaaggccatgtttataaagttttcattgtttgacaggctgttacattctatattctagctgtaaaaatcccacttctgaacagccaagtggatggctccatttcgtcacatgtttcacattgctggaatgtatgccagtgtatgttctctgaataatttactatctcatgcctacttcttgaaagtttactctgagatgccgtaggagtgcagccagatggtttagacaaataacctctgcctgccagccgttggggtgatgattagaatgttattgaagatagtggttatggttggggcttataatgccgactgcatttgatcagtccttagagaatcctgaatgtaggtctcatctcttcaaatgctgagcagtttgctttagtgggcatcaggtaaaacagtcagaggtgttagccttttaaaagacggagaatcacatggtgaagaattcatagaagtgttgtaataaatgaagggctaaaaatgtttgactagaatgtagatccagtgacaccttgaagcctccaagtccatatagagatgtgagcttgagggaatggggtttgtgtcagcttctctttcctagaatagctaaaggatcgtaaagcttcagtcaccccttcctttgtagggcaggcgccacggggactctgggtagaagacattgggggacacttgtcattagcagaagtttgtcattgggcaggttttacttcattgtcccatgctggctatcttgagcaagctaaagaaccatcactgtttaaaactgcttcctaacagggttttgagttttaaacaactgttgagtaaggaccagataactgccaaaggaaacactggtctgtgaagtctgcttatttactgagaactgtgtatcaacttttaaacacttcccatgtgtgcagataaaaggggaatagggctttctgtagaattctatctgtctagtttgtaaagtgtcatgtgtactgcagatgtctgttctctgggctttatgttctgtacagtagatttcattaagaaaaattgtggacaaacttgtttctgtggtttgatgggggagaatggcgatgtgtatttaaatagctatcctgtgagatagaaatgtccccaaagatctggaagtaaccctccctggccctcggaaaactctggctatctcctaggttctaaaatgaagatgtatggatactctggcagactgcatgttgtataatttgaaaatactcaaaactggacaataaaactgagttaaactttgactggtctggtgtccttatttgagccccagcagggtatcttgacaagaagtcaggaagtgtgtgttggaatgaagcatgttttgaaagaagtcactccaacatgaaccacctaagtcaaagctttgttcttttttgttgctggctttttgttgttgaggtttttttatttcccctctaggtatgtgcttaatttttttttttttttcatgcctggcagtggtggtgcacacctttaatcccagtccagcactctggagtcagaggcaggttgatctctgagtttgaggtcagcttgaactacagtgagttctaggaaagccaaggctacacagagaaaccctgcctttaaaaaaccaaaccaaaccaaccaaccaaccaaacaaacaaacaaaaaattgctttcacagtgaaactaaaattatagtaattctat

SEQ ID NO: 26678 - DNA, 1181 bp, Mus musculus
acatcacccatctctagccccgggctggaggcgatacacaccccccgaggtgctccgggggcgggggcgggggcgggggcgggcagcaggccatcgagcagcccggcgcgccaccgcccgttggattggctcgagcctctcccgccaggcctgcccggctcccgcgcgccgctgggcccgccccccgccgccatcttggtcgtggaggagcgggctgcacgcgtgagtaaataagcgcgagccgggagcggacggcgggccccggggcggcgagctgcggagcggacttcccgcgtggggggtgaggagcgggaggctcggctcggcccggccggcgccgcctctgccccctcgcggccgtgctgcctgggaagcggcggcgggagccgggcaggcgggaggccggcctgcgagcgcgcggcccggcgtgcaggtgagggcgccgcgcgggccgtgccaccggttactgggtgtcttccggcctcgctgcagggtggcggccgacatgacggccccaggtcgcagccccctggagccgcttctggagacttgggaagacccctcggtgcctccgggagagcagacggacgcctacctaactctgaccaggtgaggcgggccggggggacgagcccggggcgggagccggggcagccgtggggacccggcggacgcgggtagttcggggtgcaccgggccattgcctgccgagtgacgttgcggggcgcagcggcggcgtccgagggcttcttcggggacgagcggttctgtatttttttgtctggcccgcagacgggaaagcctttaaagaaaagtttggagtcgagaggcgtttggagagcagggctttgccctgcgaacctcggacgccgtgggaaagttggcgatccggagttagtgggtttagttagggtctttggctcaggctcgctccagtgctcatcccccgaccccggcctcgaacttgtggttctgccggagtggttgagattacaggtgcgcgagtcagcaaaccggccccagaattggcttaaaaaaaaaaaaaaaaaaagcagagccaggaaccccgttttgacttatttgaaaggctttagaaaaatttctgaattttgttaaactttcgtattttctgagttagaaaacatgattagggaaagggattcccactttcttttctcatg

SEQ ID NO: 26679 - DNA, 1307 bp, Mus musculus
tatatgatattaataagtgttattttggaagtggtagtaaagtatagtagtgctactaagtactgttaactagtactattgttctgtagtttgcaattgtaaaagaaacctacaagatcactattagaggaactgaggggtaggtagtaaggggatatcataaagttgttactctttccttccctcagtagagttgcagttttttcttttttgtataaaagtctccataatatcctaagatgacaatagttaattgagtatgattaaaaaaagggtttgcagtttgcaactgtttccccttcggtcaggattgtttactttttgcaagaagtgatattgatcagcatctctgtaggttttgtgatcatctgcacgttctgaacagctccatctacctttgttacttttattttacttttgtagttgacattttaaagattttaactatactacataaatgaaattaaaatgcttgtttttcagaggcaaatattcaagaactgcttttaaccttgaatggtatcattaagagttcagacaaaaatgtgtgtaccagggcactgtgggtaatatccaaacagacgtttcctgctgaacttgttagcaaaatggtgagtctagttttgggacatctgaattatatgcccaaaagacagttgtggctcacctgattggtatgcgtttttgtcatttaggtatccagtattattgattcattggaagtgatactaagtaaaggagagatacattctgctgttgttgattttgaagcattaaatgttattataaggtatgcagttggttcttgtatacattagaataatcaagctttggaactttggggttcatgtatttaatgatgagatagatgttaagcaacagggctggcatttgcttctaagcctgacaacctgagttgaattcctaaagtccgtatgaataggaaagacacttcctgctagttctctgacctaaacaccatgagtgtgtagatagtcacactggtatgcatgcatacacacacaaatgtttaaaacagtaatatttaaaaaaccagaagtgagggctcagcagttaagaactttgaacctgagttcaattcccagcaaccacatggtggctcacaaccatctataatgagatctgatgccctcttctggtgtgtctgaagacagctacagtgtactcatataaataaataaaaaaaaaaacaacagatgtgattatcctttagaccaagttaagcaagagaaaggtaacaagatggaacactatctgagttggttctaaaaactgtaggttaagac

SEQ ID NO: 26680 - DNA, 1202 bp, Mus musculus
tgacctgacttgatgggcatctggatggtcagttgagcgttaaacttactggtagagctaagtgctttctttttcatgtatgaaaaggtcttagacttggagagtggatgttttgccttttaaagtatttgataaatgttttacttttgttcccagaaattaatctcagaactccaaaaactatttaagaataaaaatgagacttatgtgttaaaactatggcctttgtttgtcaaacttcttggaaaggtaagtgaattactaccttaccttgttgaattatcttggaaaggagagtgaattagttggtattttcataatttgaacatgccagaatatttactttttagtgtgtcctgcgtaaggttctgtggaacttaccactcagcacatagctcaagcacagccctgcaatttgcatcaatcctcctgtatctgcctaccaaattctgggatcgtagatgtgaaccactaggcctagtttatgcatgcttacatgctcatatgtacatgcatgtggaggccacctcaggtgttgctcattaggtgccatctgccctttcatttctttactacatttatttgtatgactatgtgtgagatgtgatatccatcaggactccttggtgtgggggtggggttcactcttccactgtggggttccctgcagttgacccaggttgaggatccaccagtgtctgtgctgggagtaaagcatctgccactgtctgcccagcttagacctttgaggtagagtccttacagtcctgtgttcactgagtaggcagccgttactgccattttagcactgcgatcacaagtgcttgcctctatttctgcccttaaaaatatatgagtgtgtttatttttaaaaacttatctgcttattcacttgcacataggtatgtagatgtgtgtacagaggtcatggcaactttgtgaagttttttcaaataccactagagatcaaactcaggttttcaggctttttttgggtgtgtgtgtgtgtgttgttttttgttatttatttatttaattaattttgtacagagtttctctgtaacagccctggctatactggaactccctctgtagatcaggcctgtctttgcctctgcctcctgagttctgggattaaagtggtacacagtaactgctcagccatgttttaggctttttgtatggctaagcaaaaccttttg

SEQ ID NO: 26681 - DNA, 1146 bp, Mus musculus
cactgatttctgaagtgatcacactgtttttatttgattacattaaattagtctgtattagaaatcagttgatttcttatcagttacattataaaatttctgttttaagttgtcattctcacaaaatttatctcatagttattgagtagaattatattttttctactagagttatagaaaataaattccaatgtgacaactcatgaattttctttcttttttattttccatacaaatccttctgtttatttttatatcttttcctgtgtgtgggggtggggtggggtgggggggtggggagatttgtagtatatgcgagtatgggcttcacagaaaggtccatgtctggtgccttcctctattacagtggttttcaacctgtgggttctgataccattccattggcaaacctctgtctccaaaaatatttacattacattccataacagcaaaatgacagctatgctgaagtaacaaagatgattttatggttgggggtatgaagagtcagaacattaggaaggttgtgagccatgactttgtttcttttcttttttttttttaagatttgtttatgtattatgggtgtactgtaactatcttcagacatactagaagagggcaccaaacccattcattgtagatggctgtgaaccaccatgtggttgatggtaattgaactcaggacctcaggaagagcagtcagtgctcctaactgctaagccatctctccatgactatttcttactgccaattttttttgagacaggatttcagtaactcttgattccactgattggctagtctaggcaccaggaaccccaccctcatagtcttgtttttcccccagcattgggattctataacatgctcagcctcttctgcccccctttatttgtttgtttctttgttttgctctttggttgatgctgaggatacagatttaggtcttcatgcttgtatagtaagtagtctgttctaaattctttcttcgtttgcactagggtatacaaccaagtgcctttacttgttaagaatgcaccttagcaagccgggcgtggtggcgcacacctttaatcccagcacttgggaggcagaggcgcagaggggcagagaggcagaggcaggtagatttctgagttcaag

SEQ ID NO: 26682 - DNA, 1161 bp, Mus musculus
gataaatagtccagtctagaaaagaggcactagagtttttctgaacttttttctcattatttgcagggattaaggaactgtgtatgagctaggaatatacatttctaatgaaaacatttatttcttactttggtcatgtattttcgtaattataaacacgttattgaaattctgaggtatagaagaaattgagatgtattttataattttttaagaaattcttatttattttgatttcttaattgagatctgccagctcctttctattgaatttggattttatttatactctattgatatttattccttaatgctgtatcatttgaaggtttatatgaagtttcagttagcagcaagaacatgtatatttgatatatttagcatttaaatgcaaagcataaaagtaatagtgacatatcaaagtacttaagtttttaatcaacccaattatgtcttagcaccgcagagatcttcagattggtccagaaagaagaaggagcctctagggaaattggcttctttatttaagctaattgtgaaagtcatcgatactttccacactctaagcctcaaggaaacattctctgatacactgcttgctattggtaactctatcattagcatgctttccaatgtatttggacatatttccttgccctctatgatccgagaaatatttgcaacttttacaagacctctggctttactgtatgaaaactcaaagtaagtattttcagctcattaatgttgaattaactacatcgattttttttatgtgttttatatgtgtatatgtccataaatatattcacgtatatgcatatacatgtaggagtcacagactgctatcttttattaactttgtaccttgcttcttcctttttgtttttttgtttttgtttgtttttcaaaacagggtttttctctgtagctctaactgtccaggctggcctcaaactcaggcctctgaatctgcctttgcctcctgagtgccagcattgaaaagatgggtgccgccaccaaccggctctaccttgcttttttgagatacaggcttcttgctaacttggagctccccagttccagctccaggctctagaagcaggggctgcagatccacgctcatgcccccatgttcttatgaccagcagtgaactgtac

SEQ ID NO: 26683 - DNA, 1116 bp, Mus musculus
aaagcaagttgcaagtgttgctatccacagaaacctccctagccccatttccaccccccacccccaccccagacacagtttctctgtgtagccctggctgtcctaatggatataaaagaatggggtataggtgcattcttaagtggctgtgtttttttaaaattcatgttttctcagatctcacccctttttatgtgtagataattattaattactgttgcaattaataagaaaccctttttcctgttaacaagaaagctgtgaatcaaattacagcactagtacttaatgtaagtttacctgatagtttgttcatgtgtaaacaggagtgcatatttatgatgaccatggtgttgtaaagatggttcagatttcaatgaaaatagtaacctagtctacagatttgttatttacagtacccggatgttttccccactctttcctagttagaaaagctattgggagaaattgttgcatgcctacagttcagctatcttggagcctatgacagtgaacttcttgaacatctttctccactcctgtgcgtaatatttcttcacaagaataaacagattcggaaacagagtgctctgttgtggaatgccacatttgctaaagcgacagctctggtttatcctgaggaattaaagtaagttagcatcacaacttcctgcaactgcttgttctatttgttcatgtaaatttgaatttgggtacaaataaaatgcacagagaatttaattctatcattagagtatgtggaagccattaaacttgggttaattgctgttagacttactgattttagggaaatagtatatgccatagaaaatccttgaaaataaacaagggcacaaaatcgaaggttattaataaagccagacatgggtaggaatatttaacttttggttttgtttctgtcttgtattttctttatcctctcctctcctctcctctcccctcccctcccctcccctcccctcccctcccctcccctcccctccttatgtagtggggactactggaactccttatgtagtggggactagccttcaactcacagagattcacttgtctctgtctcctgagagctgggatcaatggcatgtgccacaa

SEQ ID NO: 26684 - DNA, 1099 bp, Mus musculus
cttcagggtctttacaatcattcttctattagattgtgtaaattagaaggttgtaaattataaatacagatctttatttcattaattgtttaaatgtgtacgagtctcctaactctgaaccatacactagcagaattgtacataagtatgcatttaaaatacattgtaaataagattttgcactgggaagctttaaagcagtgtctgaggtagcccaggatgtctttgcgctggtatggagctaaagttccccttagctaacgtgacctcccacgtcttccatcatttttggcctcagtgaggctttaactgcatcatcagtttaaagtatggtaaccgttctttactggtacttttggaagattcacagttagtacctgtaccagagtttattcttaagtttcccaagaaaattttaattatcacagcattatatttaaattttccaagtaagtggtgttacttatgtaatctatgtgcttttatttaggaagagcaaatggaaagtactattttcatccatcaagatgccccggagaactgtggaatagatgaacattctgagaatgcttctttaccaaattgtggtggctctgttgctgaaaccaatccagaaacattgatcactggttttgatgctagaaaagaagtattaatttcatcaaagatattgtctgctgaaagttcatctagtacagaaacttcggtggtcagcagtagttcagtttctaatgccactttttctggaactcctccacagcctacaagtcggagacaaacctttattactttggagaaatttgatggctcagaaactagaccttttagtccatcccccttgaataacatatcttccactgttacagtgagaaataaccaggataacacaactaacactgacatgccaccaaaagcaaggaaaagagaagtgacgaactcaaaatctgattcagaaaatttagcgaatgcaggtaagaaatcaagtcggagatggagtaaagctgagcagtcagttactaaaaagtctaagccatcactgacatctgaacaggaagagcactcatccgaaaataactctcctgatctgctcagcccaaca

SEQ ID NO: 26685 - DNA, 6242 bp, Mus musculus
aaaatcttgtggcacaaattagtgctcttgctcttcaactggactcagaagatctctacagttacactggaagccagctatttgaaatgcatgaaaaacttggtaccatggcaaactctataataagaaatctacagtcacgttggagatcaccagcccatgaaaattcttagtattttaagagaaatgtaaagttttttcaccatcagattttattttttggcttttagaaatattcacaccatttaaagaggacactttgtaaaattgataaaataatcaaatcctgaaaggtaatgaattactaggtcatttttataagttcattagatcttccctactgtattttcttggccagtacacatagttttttaagaagtttaaatgttactgaaacttgaaagcaaaagagatatacataccttttttttttcatgctttaattcatgcatattttggtatagctcatgtaaaagattttaattaagatagaagaaaagttttatttacactttattgagttgacagagatgtttatactctttcaaaatatttatatttgttgtgcctggtggaacacctgtactgagatgcaaaagaatgagaacatttcctgaagattacagctgtagaaaatctttgaaatatcaagtttcaacttgtgtgttaaaataataatgcttaattcactaagattctgttcattttgcattgacaaatacttgtgcagcagcctttgtgaaaatgtgttcttatgaaggtatagtgttcaaccttaaatgcatgactctgtatattatgtatagaagacaatgttttttaatttataaagttcagccttcattaatcgcatgggtttttctgcagctttttgtgaatactattgttttgtgtaatagaaacatttgtatatatttaatatcaaaatatccatgtggatagtaaaagtacttcattggacctactgtggatatttgtaggagtctttatctacaaataaagcaacagatagttttgtatttagttaaaacatgagtttattttctcaaatgtccagaataattaaaattattggaaccagcaaatgttacataccactgccttttttcttatggtttggaagaggatcccagccactagaaaatgtgcctccctcatatttcttcttaatggagagttaccctggatattttcattgcaagtgtactataaactgtctgtagagataattggtttttcacatattttgaagactaaacgtggaagaaattggaaactgccatttttttatatgtacgtttttgttgagttaaaaaattaggatatataattaaaccatttgtaaatttcaccaagtagttagtgcctgccttcacatatttgtttcatgggttttgtttgttttgtttttcgttcttgagatacagtctctgtacgtagcccaggctagctttacttccgtgatcctcctgcctctgctgtcagagatctggagttgccgttgtttgccactatgcttggctatgtctccccaagggtatattttgcttgttttctgagtaaaattagtgagtgagcttagtttcaaacttaacctctgcttagaaagacactgccattttaaaataaataaagccggtgccattttttagtttaaggtctccctttttccagcagagacccccccccccgcccttcgtaaataaagttggtgtcactttgcataagcataaatcattacagatattttggaaataagtgtgttcacctacaaagagggccataaagaatctgggattgttgcaccaaggacctaggagaccgtaacaaacaagaaaaagcctagtgtttaaaacaattgataatggtggtttgcattgtcaggccactgtatttaagtactgaggtgtgcgtgaacacctcagaatatagtgaatgggagtgattagcaaggagaatgtggatggatggatggctcattgcacaaactgcattcttttaactctggtttactcacttgtaggcatagcaaagttcttagggagttcaaagttcagcaggaagggtggcaaataaatgatttgcttaaattcctgaatttaataacagcatatatctgagtgaagccatagctcagtgagatggtgttttaccatcagtttattgaatctttgttatttttaaggttgagtcgccttcttttcagtattcttggctttgcttttttttcttctgtctgttaattcctaaaataacaaagaacattaatatttctgagttgacaccaaagaattgttttactattacatggaaccccttcagttcttttctaatggttactttttgttgttgttgttttgttttttctttcttttttttttttgttttttgtttgtttgtttttgtttgtttgtttgttttttgtttgtttgttttttgagatagggtttctctgtgtatccctggctctcctggaactcactttgtagaccaggctggcctggaactcaaaaatccgcctgcctctgcctcccaagtactaggattttaggcgtgcaccactacgcccggcttctaatggttaattttttaaaaacgttgaaatattggctttcagctgtgatgccctattatatatatttaagcaataaatctagggctggctagatggccccgtggatgcagtgctttcctcccatcctggttatgtctttgagtgccattcttgatacatgcacatggtggaacgatagtggtcctttgacctctgtatgtacttggtgcacatgtatatgcacacacaaatatgtaatttaaatttttaagatttttattttctgtgcatgattattttgcatgtatggatatgtaccatgtacaagcctggtgcctgtgacagtcagaagaagccacctaatccctagaaaccagagttatagataagcatgagctaccttgtaggttctgggaatcaaacttgggttttctgaaagaacagcaagtgttgttaattgctgagcaatcttaatccttttttaaaagactctgtaaagtgtataattttttatgtctttgaatatagttgattttcatgttcaaactgagttcattagtaaagatgccatctgtttcagcaagttaaactactactgagtactgcagggtcttaacgctgcatttcaaatagtggtgatggatctaattaatagggctaatacagtttgtaaatagaatttaaatctaaagattaaaagcatggttgttgaatgacgttcttggactcttagtacaacttaaaggtagccagaaactcccatatttaagggtcactagaatgtcaataatttaaaatcttaattgaaggctgaggcatatgacatctttgtgctgaggtcaacctggtctacagaaaagaacctgtttaaaacccaattaatctggggggaaaatagggtcttagaaacacatttaagttaatgttctattccgcaaataatagctgaagagttttatttggtctaagatacacatattaaaatgataaagtattgtttctgaagtcagtggaaatatttaacatgcttccagacttgactgattaagagtcaggtttcatttgattatttgtagttgatttcataggtagtttgtcaggtccacgggctgtagaacaattgtgggcattgttgtggtgacatttgactggggcagaagcctgtttttattaccaaaactctagctcaggctggcctgcaactcagtctcaaaccctcttgtttcagcctcccaaatgttttttcaacatttcataggtatcttaattttgtggtgtctgataacttagttctggttatgtttttgttgtccctggctttatatattgctctttggtagtatccattaaagtccatgtcctttaagtttaagatctgtaattccttttaacagtgctcttactagctatggaacttcactgaggtcttagaatagatgatgttataattttgtcacaacatttcttcctgaggataaaaacctttcttcaatgaaaagaaatgacctgacctaagatgctaaaaagaacaacctctgtcatgtagcttttatgcttcagttatagcagagtggatgttgtctttgttaatttgtaattgggtagagaactaactttttaacattaaacacatatgcttattagtgcacagggaagtgatagagtgagggggaatcaggtgggctgaatttgattttgaggcaatctcacattacccccagctgtcatcaaacttaggacaaattaggctggctgacctcttgcagagatctgtttgcctccaacttccctatgtaggcattaacagtgtgtactaccatatgacactcccttagccaaaaatttgatgataaaaccttttggtggaagaacaagcaatcctgtagttagaaaatagtggttggcttggaatgcttctctgtcatgtataacactaccttttcccaattaatatgattagtttaaaatatatagtcaggtgtgtggtaagcaacttatctaattctagccttgtggggtagagagcaagagttcaaggctgggaaaactattttgtacatagtttaataagaaatgtctaaagcattttagtttttatagaataagacttttcaaaaaaactggaattgagtatagaaaccaaagtatagtaggagaacttagtcactacagcacaatgcaaacgatgccttaccttttgtgtttttgtgtttgtgtgtttgttttgcctgtgtgcaccatgtgcatgatgtgcccacagacgtcagaaaaagggcatatcttctggaatcttctggaacttaacagttccagaaggttgtggtggtaggaattgaacctgggtcctctagaagggcagccagtgctcttagttactccggccccactttctcttattttaaaccattgggaagaattttttataagtattttgaagcaaaggaagaaatagttctatattcttagtatccagaattagttgtattgtggcagtcaggctgtgtttggctgctttcctaatttggtgacagttaagtaatctgaaattagcctaccgtcctcaagtatttatttgtctcttaatttaaaagtttgtcagtccttttaacaggataattttattcatgtttggtatgtggtcaatttagttactgctagactggtctgaacgcctttcctattagccataaaagtttgcctttataagatagtcatggttgtgattgctttactggtgttctaatacacatatagtatgaaacaactacttatttttggtgagttagttgctttcagtccattttaaacactgttctgctaatagccttaacaaaatatgaactagtcatttgttaatattttgctgcccttggtgaaagtttagtttatactgaaagtatatttgatgagattctctaattttaagttacaatttaacagaaatatctgttaattatattaataacactagtacctgagaaataagggcaccattctaaggggttgtattattaacagtcttgggaacaagcagcttccttagtatgtcgggcacatgattgttgagaacgtttgcttcagagtaaaatttctcatgtgtaattgggagttggctgtagtcatttgccatttgagactgattatttttaaatgtacttttatttaaaataaaagtataacttatttctggtgtttatttttgttccttgattttgaaatctgttttgtattaattgagacttgaggggactaaggatgacatgattgagtgccagtatttacaagcatcatggataccaacaaatagtaaccctcttaccccgcatttacctgggtggctctggaaagtttctggtgtgttgtattttgttttgttggtttctaaattcatagttattaaatacgagagaaagtgttatacggcatttatttatgtgctagtttttgtgggcacaaactagggtcatttgaaactatggtcatttggaaagtggtaacctttattgtctgtagacaagtctctgggggcattttcttggttaatgattgaggtgggagaggccagcctactgtggatggtgccacccttggacaggtagtcccagattgtatgaaagacaggctgatcaaatcaaagtagagtttctccatggtccctgctccattcctgtctcccaagttctgctct

SEQ ID NO: 26686 - DNA, 1151 bp, Mus musculus
acaagccgtatgcgcaagtgcaagagtgaactcttgcactttgcacttgagtcactgcccatcttcggcgtagtaatggggtgatgggcgagcaacgaatcaggagttgtcatgccacatcaggtgctgaaacatcacgctgcgggctctataagcagcgccattttcctgattcagcgtcttcctcctgataagtaagcaataaaagctttgccgcagaagattcccgttgtcctgagtgtgttcttgccggtggggacaaaagctcgggataggaaacgttgtattcaaattatcactgcatgtaatttgactgttacaataaacgtctaccccacccctcaaaaaaagccagggggtatggcagatacctttaatcccagcactcaggaggcagaggcagaaggatctcttaaacttgaggacaactagagctgcacagagaaaagcctgtattaagtaaaagaatctgactagtatagaaattgctaacagaagcttgggatattgctgtgacagacctggacatgtttggaagtattgaatgggaaagcctttgagtattgagcattctgtgggtacttggaagataggaatggtcatagtaatttttttttggtgaggtttcagaaggaagtttgagtccctcaaataatattcatttgagtggtgttttatattaaaaatctggcttctgatcatctaagattgaagaatctgtaatgctttagagctccagagaccaggaccactgaagtgaaactttggttttactggtaattgatgttggttagtggggttgagaactctaaagaaaaaggccagcattattgaggtgaaatctggtaagtattccttgtgttcagcaaccagaagttgtcctgaaggcaccaaggagtcatttcaagctgtcagttaagtctcccacatagtactagtcttggcttcatggaagcaacaagattgaagctactgagagagacatttctatactggagagtccaggactgtggcaggtgtgaagtggagccagcctgagactacaaagggagcttcttgtattgcaagtggcagagctgaagaggatcttcctaaggaagccctttggagccagaacatggtgagttctagaaaatagacaagaactattt

SEQ ID NO: 26687 - DNA, 1095 bp, Mus musculus
ggcatgcgtagttgcctttaaagacagctcagacttttatattgaagtgttgactgtaaagttatactttttttttctcttaaattattgatttggatgttgatgttgagatttgggtacagggaaatgttatggttaaacagagatgattttttttatgtcagattgacaaggggtcagttgggctggttagtttttcttgttacaaatgagctatttggaaagagcaaacctcaactaaaaatgcctctgtcagattggcctataagacaaatttgatttattttctttttaaaagaaatacttgtttttttccccaaagattcattgtatgtatgtgagtacactgtcaatctcttcagacacaccagaagagggcatcagatcccattatgaatggttgtgaaccaccatgtggttgctgggagtttaacttgggacctctggaagagcagtcactgctctaaaccactgagatgtctctccagcccaagttactttcttgattgatgattggtatgggacggaccagcccagatgctcccggggtgtataataggccaaacaagccatgggagtcaaaccaaataaggctcattccaccatagcctttgacttaattcttgcttcttcctgccttgggttcttgccttggcttcaagttgccgaggcacgccaatgatcacagtagaaagcaaattgtaatagcacccagcaactctacttggagtctgtttcaaagatgtcagcttgggttgaagacaaagttctgggcctctttccaggtttcctggccacatgggagaagagcagagcttgggaggaggggtggggagaggcttacagaagcatcactccagtctttgtatttagcatctcctcctgtgtgcctttttgcccacatttactttgcttgaaaggacagcagacctatttatttggctaatctcatctaaacaagaatggggcagggtggggcatgatacaatccaaaacatgcttaggcatgagtgttaatttttccctctttgttacagttagaaggtaaagcaaataactggtcttgaggcctctgcagcttgatagtcatgtttg

SEQ ID NO: 26688 - DNA, 1193 bp, Mus musculus
gggtttttggttttttttttgtttttttttgggtttttttggtgacattttctcttaagaaagtgctttagcaccgctggctggcatctttaatgcaggtggtaaacctaattccataagcatggcctgcccgagccagaaggaagaagagcttgctccctggcctgaggaagtgcctcgtaggtagtcatggaagtcacaggtaagtgcaggagcttgaagacaggcaagaggtctctaaggtgttcctttcctttgtctgagtgtatagtattaagatgcctagaagagagatggttttgttccactcttacaggcactttatatttcttgctgtaactacagcaatcacatacagtacagacaacctcaaaaatctgtttatattagtgtaaatagaaaaatggtagaccgctgtctagttttctccgcaggcatttttgggagtgtatctatagcctgttctactttgttaatgggggataacagcacatcctagatcatgtgtgaactttggggtttttaattgcccttggtatcctgatattctcattttcaaggtgaggtaaagacagggtttccttacttaacggatttgagcgcttctgttctccaaacacaatggaatttcttgttcaagagcagcttccagagttgagccagccctcgctgccttgggtgcttgcttaccaccagtcaaggttgctctgaactttcccataaccattatcccccaagaccaccaggctctgagtgacctctctaattctgtcttcccacccaccagtgacttgactgctctgcacctttgcatcttcagagctgctgcgtctatcaggagagcaggatcagattatggtatccagataccagtagaagaattggatgttatactatacttagcaccttaattctacttaacatttacttcttaagctgacaactagattcagaaatacaagaaaaatagactatgtcaggtcctcaagttatgagttaggaccaacgactattaacttgcattcacattatcctcacagaaccaagagtggcaatgctttggagaatagcagtccagcctagttaacatggggaaagatgacaacattgtatgtagtgttgaacctgaagacatcctacaatgatttcccacactctatttttccttatgtttgcttaaatagcaaaaatca

SEQ ID NO: 26689 - DNA, 2144 bp, Mus musculus
tattttctcatgatgaatcctctcaggacatggcagagcttggcgagtacaaagggagaggaagacatttgaactttagaactttgtttcagcgtgactctcccaccctgccccaagttgaatgttcccttcacattgaatcaaatacaaatcagcacagatactgtttccagtttttaaaaatgtaatattatggaaagtattttgcttcaagttgaatatgtattgtgtatatacctcaagttcaggttaatggctttgatttgtgctctaaagcaaagcaaataacacaggttaatggtaacttgttgttctcctgatctaactgagtaccacctttggtgttaagtgtcattgtttagtttaccctctgttctctatgttgtcctaacaagccaaccccaaccaacaattgttaagctgctccttaaaaatgaaacaggagaaagcctggcattgtatacctgtttttgttgctcagtaattcaggtggaaatatataacgcaagtgggtagagcgtctgccagactcctggcctggtgtgcctgggtagaattacacgataagcaatggtcagactttccttctgtggatccttatgccaattcagctactaatcggtcattcataaatggtgattaaaatgatcaggtaatttttaattgaaaatcatggtgtgaaatatatctacccaaagaggtaacatcctataaatagtagtaattaatttagctgcaacctttttaggtattaaattacatgacaaacagttaaaatgaatttaagaataaacataaggcatcgttttcaatgaacagtaataatttcccaatttacagattagtgtctacaaaggttttcttacatcttcttccattgcataatatgccttgtgtaatagttaagaaatcattttttctgaatgacttaaaaaatttgattgaaaatttggcaaattacattatttgtactagaatttgacctaaaacactttttatgtttgttaaaaatatttgctttttaaaatttagttaaaaattgaagtatttctgtcatagacaaaattactctgttttaacatattcctggtggactatatcaaccttttgtgccctgaaaacttgaaggttaacccaaactgtcaagatttaggatagtcaagaaaaggtttaactagttttagtatcagactttaaaatttcttaaagattttggtaagaaatagaagtccacatacaagcattgaggaaactgaaaaatctttgtaagacccttaatggctaaagccattggctgtaatgagtgttactgtgtgaggctttgtgtatgagatctgtgctgtaaggctcccagtgttccttcagcattaatgctttcccacctgctccaagagaactagccctcaaccagtgctgcggcctgttcatatgctctcatactttttcaaatcatgatgagaatttttctcctatatactaaatcctcttaaagactcaactctttgtagttttgtcaaagacaaatactctgtaaagtcccccacctaccccagatctacagctttttagcttttaatttgaatcatctgcatagttgcttggatcattgttacatcagttcagcgcatagtagcaattctggtgtggccaaggtgttggctgaagtttattcttcattggatgtttaaagcatttactccattgttaaggttggcatcatatagtcagttactgacatggcataagacagcatgaaactttaccacatttataaatatgagggattttttcttttgttggtttttaacccttttagactaagcctcaaaaatattatcatacctgtgtacttgtacattaaaaacaaaattattgctgagtaagaagatatttaatatatgaaactctcataactgtcattaacagtattaattaggtctaaataccgtggagcagccctgatatcatgctgacagcttacgtgtcagagggcagaactcagccagtcctgtggtttcaggtgttaatatgtaaacaagcatctcatttaacttcactgtgctcagctttgaaaagaacaaagatttatacctctgtacatgtggatagatagaagtgtcctgttttgatactaattttgaaag

SEQ ID NO: 26690 - DNA, 1183 bp, Mus musculus
aatctaggggattctaatctgaaatattaaaagtttcccctctcagtcaaaaagaaccatgaataaataaagcacaaaaccccaccttaccctgaaggccataaaaggtttttttttccagtccagttggcttgaagttgaccttttggtcaaaggcagcttggatgttctaagttagtcgggctgaactttctgggcccttactgagtagccttacgacactacatgatatgaggtaggagtgtggaattttctctttaaagaacccgttgtttcctcttaagatgtgatttttgaggagcactgaagaccttgaaacattttttgtctgcacttcccccaccccttgaatttcccacaccctgttattttaaaaggcgagcatcttttagtgcaagcctttagcttgccagcatatttcctgttggctccttaaattacagttgtgtttgcagtactgtcaggtttgctctcagtgtaatgctgagtagtaattagcagatacttgtctacagaagcaagaacaatttggaaggtacaaaaatggtttctgtcattaccagtgaaaaccatgtaaatgcaaatattgtggagcagttagccagtcctctgacagacgagggccagggactgccccaggagatgttagccttccccagaaagggcatcctctcatactcgtgtccctggtatttagaattgttttctagtgtcttttggtggatgtctaatgaaggtgctgtcctttggatttcctgcctgctacatatgcagacactgcacttccttcttagggattctcagtgaatctgagccaggagacactccccataacctgatgtgataggaaccatcatgggtatcagtgtgaggtgggcgttcctttcttacagaaagctgtcatcgtgtgccattgggaagggattgtgtgtcccctagaagtagttgtgagcctttgcaggagcagcaggcagcggtgtggtggccacaggctgacaggacagcagtcagctgcttgtctgaagctcctgtcttacgttaggtcttagtacagttccacatactgtaagagttggtggcaaacccaagggaattttctcttacagctttgcacactactttattatatcagctttttacacaacataaactagaaaacatagatgcacaggactcggatcca

SEQ ID NO: 26691 - DNA, 1156 bp, Mus musculus
acccaccctacagtcactctacagtcagacggtggatgctcagggtggaggctgtggaaagagtttaccactttaactgttctggcagctgtgttttctaggcacaattctgcttgttgttaagtctgtgtgatttgtaaactcatgatcatttcaggtttgtcagtgttctagactgatgaagatgacaggctagggagtggagtactggctagtgtgagttactgtcctgcatgaaggctgaggcttggaatagtgtagtttgtctctttgaagctgcatgtgggcctgggcattccaggtagaaattatattattgctgtaagtagccctgattcttcccctgttgatttttaaaagttttcttcaaaaaaaaaaaaaaaaaaaaaaaaaaaccactaatatattttgaggaccatacagaaagtttatacagatttttgattctgaagttgaaagtaaaaattgtgtatatttaaaattatccttacaatcttctaagttgaccattaatgtacagtatatatgtatgtatgtatgtgtgtgtatatatattcctcattgaaataattccagaatgtaattttgtgcatgttaaagttgaacctttgagattggctaaaggagaggctttaagagaaagtatatgtatgtatgtatgtatgtatgtatgcatgcatacatgtatgtatgtatgccagagaagccctgacactcagctgtagagcctgggcctcacctgtgactgaggaatatgggtggaaaatttggacacacttttacatagaaagctctgctctcaaggtacggtgttgccttctaatcacaaagattatacggaacaacaatgtaacaatgcttaacaggaaatcagactccctatgatggttcagcatcttttcagcctctgtttatcttgttgtatgtcctgaagcgatggtaactatatgtcctctataaataattaaagataaaataagaaccggatgaatgggccacagcccactgttcaaatagtaagaggctggaaaacttgtgctcaaatcagctttctttccagcaacagttgtcctccgaggcattctgcaggctctctcagacaactgtctcagaaccttgtttttgtccctggttaaatggctgtgtttgttcgctt

SEQ ID NO: 26692 - DNA, 1177 bp, Mus musculus
attgacatttcttttttttcctttttaaaaaattctctcagccgggcatggtgcctcacgcctttaatcccagcactcgggaggcagaggcaggcggatttctgagttcgaggccagcctggtctacaaagtgagttccaggccagccaggtctacaaagtgagttccaggacagccagggctatacagagaaaccctgtctcaaaaaaccaaaaccaaaacaaaacaaaacaaaacaaaacaaaaacaaaaaccattctctcatatattccacctggaccacagtttcacctccccccttcttcctcccctctccctcacatccaacccacttcatctctcctcagaaaagatcacgccttccaggggcatcaagcaaaatggcataataggctacagtgagaccgggtacataccatcacatcaaggctggacaaggctaacccattaggaggaaaagggcccacaaatagggaaaagagtcaggggcagctcccgttctctctgttgggattcccaccagaacagcaagctgctcatctataacatacatgcagaggatctacaccagacctctacagtctccctgatctctgtgatctcccatgagtccccatctgttgattctgtgggattgtattctcacggtgtccctgacccttctgattcctcagatccttcctcctcctctgcagggctccccaaaccctaatgcttggctgtgggactctgtatcttctcccatcaattgctggatgaagtctctctagtctctttgaggatgcttctcctaggctccgttctcagcactctctgcagggaggacagactattggtaggaggttttgtggatgggttggtgtcctgatcccttcacttgaggccttgcctggttacagaagatggctggttcaggctacatgttggccattactaggggtctgtgctaaggttacctttgtagattccatggagtttccattgcactaggttttcaccttagccctgaaatgcaccccctcaactccaggcgtttctctctgtattttctcccccactgcatcaattcaccctcaaaaatctattctatttttccttcccaggaagatgcttgtgtccttttgtatgctatctctgttaattaacctctctgggtctgtggattatagcatgatag

SEQ ID NO: 26693 - DNA, 1189 bp, Mus musculus
gtttgttatagattaaaaggtctgggttaacacagagaagtgtggtcttcactcctcttcaaggaaacttctctaacagatggagaacattacagagtcaatcaatatgtggagcccagttccagtggagacatgtatagaacactcctataccaaggctcagaaaatgggtgtgtggggtgtgtgtgtgtgtgtgtgtgtgcagaaggagtctaagagccagaagatcaagaagtttgctgtaaggttatatcttctagtaacatcataagctatatccataaaggaccactcaacatgtgagctaagcaaggatgacgccagtgagcatgccaaactgggcggggaagaacatacggattcgtggtccagggccaaaacataccacaagtaacgttatacagacttggctggttatatttggaatatatgcaaatacacagatctgtatagtaacacttatggaaaaaagagactatgattttgaaggagagtggaaagggggtatatgggaaggtgtggaaggaggaaagggaaaagtgttgtaattaaattatattcttaaaagaattgaagaaaaaaggtgtgttgaaccctaaaatcctgagctctgcagtctgtgttgttggacgtgcagatattctgctctaacaacccacactgtgcctgagagtggtttatcttgttcttgctggatgagctgcccctcctagacacgtttgtaatgagaggtactagcccatgctcttgctttgtagtagggctttgatagatgtttgttaagtttaattgcttgagggcttcggaggtagtgaggtagggttgtattgagcctcctttggtgtagtggagagctactgtttgcttccagaatacaaagtttttatttcttctagaaaatttcatggaagtataaaagagatttatgaaacacacctatgggaggaagattgtgacttacaaaaggcaacctgagttttctctttttatcacattcagtagctgaaacttgggctttaaactccgtggggttactttaacattgtttaatggaagccatcaagtggagacatggttaacagagcagtatgccacataactaaaactgttccattgctctgggaaggagtgtggtgtaactcaggaaggacatggggttcagtctcagtttcccctccccccaggcccc

SEQ ID NO: 26694 - DNA, 1153 bp, Mus musculus
aatgcatcacatatggttggaaaaggacttgctaacacactaggagaaaacgctcagtgaaaaaaactgatgggtaggaatgaattagtataagcctaacatatctgcttgttaaagcaaaatgaagacagctgtgagagctctttctatcttccagcatagcagcccagtaattggtaagccagcaaggaagatgcaaacaatatacagtgacccaatgtaagctgtttgttgctaatgattcttttgccagacccagtgtttgtaatcctcacattctcgaaactaacactgagaccgcagaaattgttatgcgtttcctttggctgcaaacacctctcgtgttatggtgaaggatgcggtggaggaaaagcaggttgtgtttgtctacgtctgtgtctggaagttagtgtctcggttttgagtagcattccttttttgttttagttttgactttgaaagtgtggaaagtaccatggagagtacggtggacaaatcaaagccctggagcaggtccatcgaggacctgcacagagggagcaacctgccctcacctgtgggcaacagtgtgtcccgctctggaagacattctgcacttcggtaagtgccttaatcagatgctttggagtggcaggatcatctgtcctcttctcatcctgagtggacatccgtgtgtctttccaacatggccctttcttctccggttgttgaatctaaccgacagtttcgtaggtgttcatggcctgctcccttggttctattctctcactttatgtaacccttcttagaaacgccatcttgtgattcagcatagaaggtaagaagtgtgtgccaattaacacagtgaagtagtctctggcaggtaagttcccatggatgtggacaaagtgacccccaaaaccgctttcagggctgaggctacgcattacaatatgagcttttaaggagcccctgtcgctcctcatctgtttgtgctgccctctctttccacaggtagctcaggtgtgtgctgtgtagggcgtggttatgcttgttcgtcacagtgttaagaagacatatttttataatgaagggctactagtcatgttcctttggtcaggtatgcttcatgtcaacctgacatcttctactaatgattgcatcttacagctcc

SEQ ID NO: 26695 - DNA, 1151 bp, Mus musculus
ttcattatttgccattttgattgtccattgtggcccaccctgatttcctggtaatctgtaaataacggatgtgtgtgctatgggtatcctttgctgagaggtcttctaagaaattttgtgttcgagccatattcaccaactcctaacaagggactggaaacgggagatggaagctggcatacaattacatccttctttagtctcagcaaagtacaagcaggatgcaactgcagtgccactccaagtcattcgattttatcctatttcatgttgtttctgtgcaaggctgccatgcacaaaggcattcacttgtatgacttcaagatggcataaaacattgaagacttatttgcagaactgtgttaagctagaggcagcttttaataacgcaaaggtttcttaattagcactaaaattaatgtctcagtattctgatttttgaggaccattatgggtgaatccttaaaatagaaattggtgccttgttagtcagggagatttttaccacaagctctatcagtaagcattcaaaaattacatgtattaatgtaatgttgggaacctggccttattctcttctgacaatcgaagggtccttttttttttttcttccctttgtaaattatactgatacagttgacattaagttatcagggctgaattgctttatgcatttcttacttatgggaaattcccattaaattaacattgagattaagtttaaattatccgcgatagggttaaatggttgactaagtcactcacctttacttcctcactgacaaggcatttccatctttcccaaagtcaaagactggactgaagctaaatttgtacttttcataatatatattctgcttctggcttaccttgttggtacatcagtatattaattgtaaaaattattgtatagtatttaaccaccaaatctgtgttcatgtgaaccccttggtgaaggcccccttttcatggatgtgtagttatatgatctttaaaatgtacagatattttgctataagattggtgcagttttttatggtttttacacttctctttaattcctacctaagcctttaggtactactgtaaatattgttttaaaatgcatcagcctatgctacacaatctgaatgttactttaacttatagtt

SEQ ID NO: 26696 - DNA, 1246 bp, Mus musculus
tttgtgtgactgaattccacatctactttagaatctttttacagtgtcagttttcaggattaactttaattgtaattgtgttgaatgtctttgcagggtaactgggatacttctggcagtgaactgagtgaaggggaattggaaaagcgcagaagaacccttttggagcaactggatgatgatcaataaattataccaaatatatgtttatagtatgatttaaagtctaattcagaccagggattattttaagtccaatttacataacactgggttttaattgtgtcacaggaaaaagtgcatttatgtattgttattgtggactttataaaagcaaaggaattgaaaataacttgattctgtatcaagaatcatattttcctatggtaataactgtctttctgtgaccctttcacagggcactacaggatggattaaaagtggcaatttcatgatagctgcagacgtctctactttgttctaagtcatgaggtgatttgatttcctttatagaagttggattttgaagatacaatgaaaatttttgataatgtagtacaaaaaaagcaccagcaacctatgagaagactgcttttttgtgcactactgaactggttaaagccaatgtgatcttctgtggtgagctcttaagaaacaggtgtttttgatggagccttggtagacctttaacagcagtggtgctaacgagcactgctgtaaaaaagccaccattattttttatgaaacatctgaacattttaaaaaggcttatgagggcattattttgagcatctattttgaggtgatgttttaaaatagctaacatcaagtcaaattgtaaattagttgaaatatattgccttaaggacctactaaagaatgtgccaccaaacttttgagtaatagttgaaatatccttgtcaggggtgggaaatcaatgttgacttaaacattttcttttaatttttaatccaacctttctcttacactttttttttaattccactgaggaggttgtaaattaccttccttactgagaagtattgacttcatggtacacattctaaagcatttctgatttcaatatttttgtacatttttatctattattaaacttctcttgtagtgtgcactagtctttatttctacataagctgctcagctctaaggaaattgtatgatcattttcaagataataaatccctgaaattttgtttcatcgtacccatggtagctacagtacttt

SEQ ID NO: 26697 - DNA, 1101 bp, Mus musculus
tagtatttactagttttattttagatcttactcgttttctcataccaaattacatgttctttttttcccttttcttaatttgtgctctttccctttttcactaggaaactgactggacattctttccacatgggctacagcatggcaattttgaatggtattgtcgctgctctcactgtggcatggtgcctcatgtaaacctacactagagcaacgttgttggtgaaagtcatgatggtttttgaagtagcagaaacgaaattgctgactcagaagactttgaaatgtgatcagatacttactatcatcattatggaagaccttatagagggcacttcttcaatgtataagatgtttacttcatctttttacttttgtttatgtagtttatcagttacagaaaatatttgaattgaaatcaaacttggaaacttgaatacatgacattgcctacctttctatgtatattccattttttactaacagatactgatatttgtggttgaggtagaaatatttatatactatattaggaaaacagtactgaggccaagtgtgttagcaagaccttcaagcccagcattttggagacagaagcaggttctgtgggtttgaggctagcctgtagctgcacaatgagatcatttcataaaaaagaaaacaattcctattctttgacattttgtagaagctacataaatcagagtttttgataatcagtagaatgcatatgtgcatttatatttttgtggagtgtacctgggtgtcttatagatttttataatactgcatttgtgttttaaatgattacatttatacctatatggctgtaaattttatttcttagctggtgtagacctgtcctttagtattttgtctcttcaaaaagaattaaagtacattgacttgagtttaagattaagtaaatatattttttaacaaaaacatactacaaattcagggtaaactatttgttgttataatgttaagaaatttgagacttttagccatttctattttctacaattgaaagtatttattttgatgtatatattagggtagcaaacttgtactatttcatttttagtaaatgaaaaccta

SEQ ID NO: 26698 - DNA, 4182 bp, Mus musculus
gtatttaaatttgtttagaaagattcccagggatttagatttagaggccttgaattgtcaagtacaataacaccgaaaaatgataattaaatataggaggtcatggtttagcttggctctatccctgagattcctgtttagaatgtaaaaatagaattaaagatccaatatttgatgtaaactttttttttttttaaagtgacccaaaatgtataatgtgggcgaaggagttcattagatttgcttttagggtagcctgatctactgagtagatgcagttgttgtcagcagtgtgaaacatgtctcccttcatctcttcttgaactgttcaagaagtcaagtgtttgctctggagctgatggaagagctctggggctaggaggagcgggtgaaaggagcgggcctggctgctgagtgtgttccttcttttctctttaagctgatgagcgcagttcagaaaggaagggtctctggaagccgacttgccatcctgatgaaaactgccgaggagaacttggaccgcagagttccaatccccgtggaccgtagttgtggaggattgtgagtctgaccagtaaatccgccaccagcaagcataggacagccagcgctatgtacaaccagagatgacttaaactctaaaatagtggatctcgtagctgccttttttaaaacaaacaaacaaggaaaaaaaaaaaaacaaaatcaaagaaaggaaagggataagcaaataaacaacactggaaaacattccaaaacttaagatgttggtgtgtttgccaacttactttgccaatactttatttatatttgccactcagtctggcttctacaaagcgcttttcttattttttagtgcgcactgatgtactgttttgtatccattttgtaccctgtcagacttgacactctgcctgctcattcattcattcaaactagttttagaggcagaccccgtatagattggaatgatgctagaaagactttgtgagcacccaagagctcaggagctcgagcctggagagagcattctttctttttttttctagaaaatcatttgatctcttgacctgttaatattttgggagacttctcagccccgtcttgctacccacccccttccgattaaaactgcacacttttctgtctggagcaactctggctaatctggagagggaagacaaagtttagatctggttgagatttggttacatttctaaaagagaacctccaaaagcttccagatttgcaggcgtaagataaagacagccctgacatttgccgggaggtacggtgatcgctgcttctcagcagttcattttttttcccccaggcactgctggcttcctttgactattatagttgccagaaaaatccttgctttttttactttacaaccagcatttgagtggcaagttggatataatgggatgagaccaaatctctccattcctcctgggagcaatgatgggacacaatttccagtcccacaagttctgaatcttgtagcgtgtagcactgtcaggcctgttcttgtcggggtgggcagtagtgacggtatttgcaaagagataataaaaaagaactgggcagacttccgttaactttaattatgaaattgaaataaggcatgccactttaatattggaggctggtctgtttgccaaaggcccttctctttgtgtactcactggaaaaactctctttctaacaaaaaaaaatacaataaaataaaaatccaagatagacatcagacatatacgtaggaatacacacaaatcaaaccccaaagtcggtgtcctttgaactcagcaaataatgcacagactggagatgcccgccaggtggaatgttttttgttatattctgttggcattataactagtaatcttaatacttaattaattggcttcccttttctgaaactaccagtgatgagatccctgtgcatcataggaggtggaccccttcgttcccacttctctcccggcagcctttcttgcacaggctgtgtctcagctttgtgaactgatccataaagcacccttgtgctgctattctgcctgtgcaaacattgtgtctctctgcctcattcattatgggttatgagtccacatatcataatatgagctgggaggtctcagcccccgtcccactccacccccacccctgaaatatgcagacttcaggaatagacagctcaactcattattaaatgaagtatcgatacttccacttctatttccgggaagcctgacaccggacaagtgatgtcacagcagatgtcactgtgaaatctttttttctttcaaagtgtcaattttttacactggtttttaatctttatattttttaaaatagatggaagcatgtggctttgagatttagtgggtttttttccctatcatgacaataaagttcactttatacctcgtgacagtcaagtcggcagaaaaagctgtcctttaagacatcccagcagatatatcacaacattctacatcactactcctttcccctctctctttctctctctctctctctttctagttagatcaagataacggtggcttgtgtcatcccgattctcttacagtagggaccgggctcagaatgtgacttgcttaggccgatgtgggcttggcaagcacgtctcgtttgtatatgttttgctgtgaatgaagttcctttaaggacaaagggaagtgcactgtgcttcatttgagcatatctgccttggcttagcatctgcttattctaagacacgctccttcacccgtcccagagactcacgttggacatgaaatacttttatcacgttcctgtgagtaaagcaacccgggattttcctgagttcccaattaaacctgtacaggttttcacattttaaatccaatttaagcaaagagggaaaggacacaggggaaagaagcccctttaaaactcattcagagaataaaccatgtttgctttttcatataaacctggtatttgttgattttgtttgggtgtgggagtgggtgcgcagagctcaccttttatcatcgagtgatttatttcctttgacgggattcaggtgaaggaagcccatctgtgccggagagctctatatgccttgaactagcctagcctctgtcccagttgtgatgacagcgataacgctggattactggtttagctacagttgtctgcctctgagtcctcatgctgcatattcctgctttccagtctgttcctactgagtgtgatgtcacatctctgctctcaaatgcatgcttcctaatctgcttcaggttatgcctcgagtttggtctatttcagaatgtggacaacaaaaatgttcattctggttttaactcagtacaaatagaggttgtcattgatttctctttccctcttttccttatttgtaaaaagtctttttgcatatgaatgtaatcacaccaacgtcaccaatgctgtgaacttgcactgcctagggagcggaaaaaagccctactgtgtttaaaaagaacatccgctgttaacccagccctggagcggacacacttgctgcatgttctcttacttcctcagttttaggtgttgtgttgggttatcgttctagactggactgttaaatgccgtctgtgaggctggactgtcacttttataactgtcttcgtattttatcaccattatttattacttttgatatacagaatgagccgcatgcatttatagagccataagaagatgtatttaatgtgccttgtttttaactgagtaagagctgaaagcatgaatcaataaaactgattaaagcgctccatttgttggcattttgatgttactcgcggtccgacaaataactttaattactgctgaagtttttagaagtttgaaaatatttccagaaactatattttacctgacgcacattcattcttttacattagaattttaccacaagtgaattatctgtattgacagatgttattttatgaggccaccaaaattatttgtattaatttgttacttcagcttttagggtatggtttctgttttatgtgaccctagtctacatttatcccattacaactcaataagatttcttccttccttccttccttccttccttccttccttccttccttccttcctttctttctttctttctttctttctttctttctttctttc

SEQ ID NO: 26699 - DNA, 1202 bp, Mus musculus
ctggaagctgcatcgttccccgaatcaaatcatacttgcgcgacttacagtgggttaagtgtgtaatggcattctgttcgaaattcatgagaggaaatgacaactgaagaactatttttttctctcagtttttgtttgggtttcttgctccttatttctctccctgttctagtgttcttcttgctggccttccctctttgttcctccataagctagatttaacttaagaggaatcttatggaagcgtcctgctgttgcagaagaattcttttttcttcttactggattactgaaagaaagtctgtttacacatttggaaggcattcagtactttttgaatgggtcaaatttaaattcaaggaccatggctaagtagctcttattgatctgttgagtgattttatgaaatggtgttgtcttagccaaaaggaaagcatttgttaccctccccctccctccctcactatctcctcccttactttttctttggatgcagggactcatttcgtaggtcacattagcctggaactcacagagatctgactctccctacctgcaggtactaggattaaaggcgtggactgtttgtcacttttttttaacctgggccacctgaagctagctctctctcatgtctgtccatgaggtagttgagtggacctcacataatgaagctttgcattgatttagagaacactaattcttattctgtcagcttaggcagacactaagaacccagagtgatttccatagcagaattccttgaactaacttgatgaacttcatatatctagaaaatatagctctaaaactaccccgtgaaaagagaagaaaatgatgcttaaatttttgttcatttttcaagagccattttgaaaagcctgagaaaccctggaatcccagatctgaagtcttctagaaagaagatatgaaatctaacatctgtgattggtttttcccaaggactgagatttgtagtgtaattataatctttgtgactaacagggccagagattaagaggttctggggaggcaggagagatgactcagtggttgaaagcactcgctgctcctcccaagaggtcctgagctcaattcccagcaacctcatggtggctcacatccatctacaatgagatctggtgccctcttctggcctgcaggcatacatgcaggcggaacgctgtacacataacaaataa

SEQ ID NO: 26700 - DNA, 1190 bp, Mus musculus
ttgttgttttctttggcttatgctttttaaaaatatagacattttagagagtcatattctaatcaccatttccccatgtaacaaagaaagctgctagtagcacggggtttgatataaacttggttagagtgggttcatatgttcaaagtgttaattttggtgatcgggtcacgtagccaccttggggaacactgatgtggatgccgtccttctgtgtccttggacactagaaactgacatcacataggaggagtaaggaccagcttatatggtatggtgttaattttatattaataagtgatttctgcttataacaaggaaactggtactgatttttcaattctattgaaaagaaactcagatcttgaaaaaaaaaaaaaaacccaaatatctttaggttgaagttaaagaaaatatgtttcagaagcatagacttgactggaacacacaaacctagacagaattttgcatactgaatctgatgcaccttgcttttatttgtgtgtgtgtgtgtgtgtgtgtgtgtgtgtgtgtgtgtgtgaaacagcagacattcagctttgatctttgacttttttttttaactgtaaaactcttgaagctttgtggtctgaaagaactctccctgggaagatgccgcacatagcacatctacctgcaccagatagggatcccacaacagatcaaaataaggataccatcaaagttcagcctgctgaactgatggcttttattggtgttacatataggagcatgggtaagaggttactaaatgactcaaagacagctgtgttaccaaggctcaccccagcatgggtgacagctcacagagctcagaatctggagcatactgtacagcctaaaggaacctctacaggttggagagtgtcctttccaagtgactttagtctaaacctcttctaggcagctcagctggcgtttgttttccagccagctggtctggtctcagagtcttctttgcagctccacttgtctggagtctttttttgtagtccagcttccttccgcctgaggggcactctcagcttttattgcttattctgtcagagggcgtctagtgagtctggtcagtttcagggacttcctgaagctctgttgagttctttactttcctacttaaggggcttacctgtgtactggaatgtttcagtcctagaggaaactgttac

SEQ ID NO: 26701 - DNA, 1128 bp, Mus musculus
tcttgacctttaataatgagtgctctactttcattttaaatcattttgtgctagtttgctcgtgctaattatttttgatgagtgatgttcataattagatggtagctattaatctggaacttttacacatgatattgcttcataacatattttaaaaatagtaccactctagcatatagccaccgatgtattcatgtttcttcttttggtggctttgttattttcataatatcctctttagtaaaaagaaaaaaatattatactatctcccttcacaataagggatattaattttccttgttatattttgtggggaaagctgataggaattttacattacaaatattttgttgtgagaagcagattattgtgtatgcaagctctatatatctaatttacattctgaattttaattgggtggcatgttttggcttttatgctataaaatatagcctaagaaatgttaatatggcaacttgcttggaaaatgaatctccttggtacttattgtaaacttgattttaattgacagttccgtgcaggattggactgtagaacaaaatgcatgagcatgtggatgtaccacttaaatattttagaagcaaacattaaggttggaggaaaagatatctcatggcttgtcattaggaaaattgcctgcttttgagtttttcttgtgtttgttgttgttttcttgctattgtgtgtttgttcatcgaatggaaaaagttaaaatgaaaagataagtaagatattttaaatgtatagtcaagataccaataatttgtttgttcttaatttaagtaatactaaatgaatgtaatatttgcctactcaaaggagaaaatgggtctctttttttcgtccttcatagaaggaagggggaaaaaaaacaattttggttttactctaaaaattattttcttttgtatctttctcaaaacgcatatctgtcaaataattttctattgtttttatatgtgcaacctacatgtcatttccattgtcagtgaataaaatgttgctgaaacccatcaagaataatggatgtcccctaactcatttgtcattcagtattactttttacatttagtggagaaatgtttttcttaacttctcctagagagc

SEQ ID NO: 26702 - DNA, 1145 bp, Mus musculus
tatattgttttccagagtgattagagctgcttgtaccttagcaaagtaatttagttgtaattattttgtttcaggcattcctaagaaaaaccatttaaaacaaaggcttttcaaacaatttaagagataaatctgtgtcttaacttgtagaatgtctgaatttatgaatcaaaccttcagggattaggggttgcataaagcagaaacagattgtaaacaaattagatgactcatcaaaacttgaagacattcgtattacacagttatttcttatataatcatactttaataacgatacttcggatatacatatagtttttataagtaggatagaatatctagtattgaaatattttggctttggagagataagttttccttggataatgatgtaatagtttaagtcactttaatgtttaagctagtaagttgaaaatgttttattagaatattaattatacataatgggttttattacagtattttcagacatgtatgcaatatattgttgcatgtagttttctgctactgccttagctctagggggggatcctgctaccaacctctccccagctccccttgaatcctcaggtaaaggacatagactcagtttgttcttttacaacttgccttcttggcacaattactggtcagtacggtctcccgcttggaaaagcatgcccttaccagtttattgtctctgtctctccacctgccctaaactttagtggctagtcccacctagcctagcctctgccaaacatccatgaccacaggcctgtagtggtggccaccaaccccagcttcctcccccactcaagacctcacatgattgctacgttcttcttccaccaaagcatggcagaaaaaattgctctctccttccttgtgtctcctttttcctcctgggactcagaagtcacacctgtaccttccacccagcagttggccccatctttctttactgacaaatcaagaaccagttggggaacgaggtcttaatatcagaattgcccccttcagtatattccaattttattctaccccaacccaccccacctcaccacacacgttccttccttcccttctatacccattttccagcttaaggcatggcctcatccattgggtttcacatgcgcaaa

SEQ ID NO: 26703 - DNA, 1187 bp, Mus musculus
tcagctaaatcacacttgtgtacctgtacattgcatctactgcattcttaagtagaaaggcagaaaattaaagtctggaggaagaacactgaagtggaaaaccacccatattgagaatcccttttgttcccctgaccctttctctgtgtctgtgtactatgatttccttaagatcacaagcatttcagcctctgcaaacattgattggaaaaattactttcaaatagataacattaagatttttgtaacttctcatgcctgcctttgctgaacttttcctcctatcagaaatatggccttcctcctttctgatgctgtgtctcttccacgtagggagtttgcctggcgtgaccctgagctgccagaagtcattcacatgctgcagcaccagttcccatcggtccaggcaaatgccgcagcctacctgcagcatctgtgctttggtgacaacaaagtgaagatggaggtatgctccccaaagccctcatgacctaggcacactgtgccttccacttagcagctggcttgctttctattttaaaatgcctggggagggagtggagactggaaagatggctcggcaggtaagagcattggttgcttatccagaggacccaggtttgatttggaacacctacatggcagctcacaggcatctgttataccagttagcaaggattcagtgccctcttctggtctttgtgggaactgcacacacatgttgcacatacacacacacaggcaaaacatccatacatgtaaaatgtacaaataaaaataattgggctgcaaactctgtagccagtctcacatcacccagaggaagctccattcccaagcactctaacacacccaggatcataggattagaggtgccctgagcagacactgggcactaactctgcagccagtcccacaacaccaagaagaagctccacttccagactctctaacacgcctaggaccacaggagcccaggagcttggtcacaccaggatctcagggtccagaggcagcttgactctcaggatctctgacacacccaggatctcaggatcccaggatcccagaatcacaggatcacagaatcacaggatcacagagacagctgaactctgagaagttctgacacaaccaaggtcacaggaaggacagtcagatataacaagggcaggtagcactagaga

SEQ ID NO: 26704 - DNA, 1102 bp, Mus musculus
tataggaaaacacactgtgctgttggtgactataggaaaatacactgtgctgttggtgacaataggaaaacacactgtgctgttggtgactataggaaaacacactgtgctgttggtgactataggaaaacacactgtgctgttggtgactataggaaaatacactgtgctgttggtgactataggaaaatacactgtgctgttggtgactataggaaaatacactgtgctgttggtgactataggaaaatacactatacaacactcgggcaatggctgaagccggccttcctgctaacagagtgaaaatatgccaggaaaggaaattttgtctaactcatacattctaaaggcagatcgggttgctgtaagttagggctcatgtgttggttcctgtcttaaagatgcaggatctctgataaatcttgcttgaactttctctttcaggggttctttggaatctatcttcgtgtgatgctgtaaagatgacaatcattcgagacgcgctctcaaccttaaccaacactgtgatagttccacattctggttggaataactcttcctttgatgatgatcataaaattaaatttcagacctcactggttcttcggaacacaacaggttgcctgaggtaagtgcttccctcccagttaattacgtgattaaagaatgtgtgtcataagtcagtggactgtggaaggagctgtctggctagcatccccccaaaggtggaggctctccttcatagcttagggttatagactttgttactgtgtgaggagacactgtgagcacagactggtggccccaaggcaactgtcttgcatgtttgtatataactgttgtaaattattcagaaaggcccagttggctgagggcactgtggcagttccaacagtttctcctgtagtggtgttttgtttatttatttgtttgtttgtttgtttgtttgtttttctgattatcacatacttactgcaggtctgatgtagccttgtttttgtttcaactccggttatggtccttgaagttcaggatgtgaagggtcctgtgatttcaacagctgttgcttttgaggtctataaataagtcagcccaatgc

SEQ ID NO: 26705 - DNA, 1135 bp, Mus musculus
accgtgactttagacatcggagttggaatgacagttgtgcccccccccagccccaattaaagatttaaagtatggaaaaacagatgcaaaagacaaaatgtcaacagaaagattagggcattcctcagagaagggagacaggaaatagaggggcagcagaggtaagacctggcgatagggctgcttccgggaagggagaaggaagtactgggatggaggatgggaagtcgtgggaggcctcagcatctccagtgccgtgtggcactgaacaggcctggtggatcttagtgtaaagccagtccacgcttcacagctgcaccctggccctcaagactggagagcagttctcctccccttagacgtcacattctaagtcagcagtatttccttcacgttctccatttacttcctgttggtgtgtgcagtgccgagtcgtctcatgtgatgtttttaattacacactgtgttgggtttcagacagtggagaactgtgtgtgtaccctgaggaacctgtcataccggctggagctggaagtccctcaggcccggctgctcggactgaacgagctagatgacttactaggaaaagagtctcccagcaaagactcggaaccaagctgctggggaaagaagaagaaaaagaaaaagagaacgccacaagaggaccaagttagcatttccttttctctaccgttttacttgttagagagtgaaaagctgtaatttggcagaaaagattatcgctatttagctaaaacccagtccagcaaaatgcatgagtagcagccagagggcttacccgtttcctttcccctcagcctgtgccatctgtctttcagtgggatggagtcgggcctatccctggactgtccaagtcccccaagggagtcgagatgctgtggcatccatcagtggtaaagccgtacctgactctgttagcagaaagttccaaccctgccaccttggaaggctctgccggatccctgcagaacctctctgctggcaactggaaggtgagatgtttcctcctatacacatttctgtctgtctttgtggtcgggtcagccacagtgggaaaaggacacacttgtttatagagtttgtccataaaagggagttatgcggtctggggagg

SEQ ID NO: 26706 - DNA, 1102 bp, Mus musculus
accactgttccgcgctcccagccacctctgctctacccaagctttgcctatgataaagacacagtcaccgctgcacatagaccctgctctgatgggagccctggctagcgcggcctaagaaaatatttactttggccttaatttctgttgtttgtagtacatttatcccacattgtcacttggtaattggaattgaaaaagctagagataacctgtttggagaggagtaggggaagttgggtgtttataaagaattgcttcccttgctgagcctgcctcagccggcacctcactgagcctcctcgagataataaacctgcagtttcagtagaagatttttttccttgtatcttttaaggaaacaatagttaactgctgataacagatcagccaacagaaccttcagctttgttcaagtacgggactgttcataggtgactcgacagactagacccagaaagacttaatgaaaagtatttttgacaaccttggttagtccagattcaaagataagttttgtgaaaagctttgagtggcaattgcattttgatacactggaattaagaagagcatttctgccctaagccttcattacagacatgactgcagagtacggaccgcagccagtccactcctctgagcacttctatacactgatttatatttctttcagcaagtgacagtagtgttttataaaggagtcatgaagttttgttttgtaaaagccttcctattataaggattttcaacaacagtgataaaaagctgatgcctgtgaaacgatgaccctagtcgtgtgcacccggcaggtaaatacgccatgcgagacctggtgaacaggcttccaggtggcaacggccccagcatcctgtccgatgaaaccgtggcagccatctgctgtgctctgcacgaggtcaccagcaaaaacatggagaatgccaaagctctggccgactcgggaggtatagagaagctggtgaacataaccaaaggcagaggagacaggcaagtgtgagggcctggggcctggggtgagagaaggagccatgccggaagcggggatttatttctgtttctcacatgttgtctacaccagctaaga

SEQ ID NO: 26707 - DNA, 1746 bp, Mus musculus
attacggtcatctgaaatatctaaaaccagatcccctgccctcaaatacgtctaggatatgcttaacttccctgagcaaaagctgcctctgccaactctgctgaggacctaaactctcctgaggccccgggacagacttgagcaaacaaagccagcttgcctgtaaacataactgaaagtccacccctgcagtgagcaaacatttgtgcacctgaaacagcttcctcccccctttagcccacaaagtgctttaaattgtgaggcaggaagcccacatcagtgttgttgaaatgtgtgtttttaaattgctctcactcatttgcctttccatcctgccaacagcatcagcagctgtactatcaagatgactccaccaggaagaccttggatgcatacagactgtacctgcagtctcctcgaagctatgaagacccttattgtgatgaccgagttcacttcccagcttctactgattactcaacgcagtacggactgaaatcaaccacgaattatgtagacttttattccactaaacgaccttcttatagagccgaacagtaccctgggtccccggactcctgggtgtagcatcaagacggctgcctgctgaggggcgctttccttctgactctgtttggattgaggggaagtccgtcttgctgatgatggtgaccgtgaaagtgaaatggaagggatgagtgaagaggttttggtttgtttgtttgttttttctttttttgaggaattttcagggaagtgaggaaacccttgggagaggactttgtacgcgctgtgtaggtgttagatctaattacttgtagagtctagtggtgaaggtgtgggtgacgtgctgggaggcttgagacgtgggtgagatgagatgggtatgtgtaggtcaaatcaaatgacagatgatttttttaatgtgaataaagttatgttcagatagtttgtacagaaaaaataataataaaatggatgcccttcatgttttattgctattactaaatgtcaagattgtatgctattatgtcttgtaaaaattccttctgttggtgtaaatatggaaatgccacattggttaagtgccatcaattgtaatgcagtgtgtcatttgaaaagagatttgaagaactgacagcttaaagcccaagcgggaaacccgcccgggaactgttcgcagttgacaacaaactctgacgccctctgttttcagtgagtagtgaactccggaagcacaaaggccagcgtgacagcagcgccatgctcatccccctcacaggacacttcactgccattttctatgcacatggaagaataataaatgtggaaatttcatcctggagaatgtgttcttgcagttcttctgggtgcgatcatggaaacagatttagtaagtcccttgtgaggtgggccacactggaccaggaagccagagtggctcttctacataccttagcatgtgtagttcttggttgcttttttattatcatcatttcatttggtacatgggacaattttagcaggttttgccttgtctcagtcatctcttttcacctaagggaaatcacatctggcatgctggccgtatcgtattggcaagggccacttacttttagaactcggtaattacatatgaacagttgggcattcgcttgcttggcatcagtgctataaagcaaaactgattctaaataattattgtgcggaatacattctggattgcaggcagccttgggggatccc

SEQ ID NO: 26708 - DNA, 1184 bp, Mus musculus
caaagtggtacattatgccacatacagttttaacacatgaaagacatcatgcaaatgaagatgcatatattacatttgtgcagtttagagtcagtatatgctcatgtgacacactttgtcttgtgtcccatgtcagacatgccttccctgtgtttattctttggctctgttttaatgactggttaccaaatccattgcatatgtgttaccattaccaaatgattgatttttggcctttgacatctttggacagacagatatcagaggcctttgattcagatgggcacacatattattaagtcactgtggccttacacaacttctggctccttgtagctccaaaacctccatcatcaagaagctgcctcttggctgttagcaccaacctgagagaaatgtggaaagaacccagattggccaaagaagagttccaggtgacggaccccattaaacccacaagatgggtctgtgggccacagtgtcccacagaggaggctattgtggatggaagagacagggagtaagaaaacacaaagagctggccagcatagcaaagatctctaggagtggtattggctggccttaaaagcatacctaatggcatagggtgtgaacattcctaatgtcttcatgccatatatatatgctcctgtagtctgggaagcctagacgtagccacattctacagggatttagtcactgtgtgtatagccatttgtgtaaggggtggggtattgaattacatctaaaaatttggagctggtcatgactcccatgtagtctgttaggatcctctcttactgccagactttgctctaaattactcgagattcacaacatcaattattaatgtttattgagtacttgctgatgtggaactagatgtgtgaattttaaattatccatggaaataaaagaagagtagctcttctctcattgacctaaacaagcaacgacagttatacacagagccacctcctgggtcctggcttcccttgctttttgtgacatagaccaaccacagtttatttcattggaatgaaactggcctcatttggatggcaccgccgtacaaagctcaaaacattacttcctacccttcctaccacgattctggcatttatttatttgtttatttgagttggggggtggtcatggggaaggggaggttttctctgtgtagc

SEQ ID NO: 26709 - DNA, 1149 bp, Mus musculus
aagggttggtgatggcagagtggaggcatggtagctggagaagaatgctaagagcttccatctgcaaactgaaagctcaagccagagacagccactggaaagggttttggggcctaaagtttagactcaacctcctgtagatgttgcttctatttcctcagatgatgggatgagatgagctgggctgagcccagagcacttatttctcttaactatctctaggcctagtcctgcaaagcttctagcctccatacaatccaatctttcaagctgtacagatggttgtgagccttcatgtagttgttgggaattgaaatttaggacctctgctcactctggtcaaccctgctagctctgttcggccttactcgctcagtccctgcttgctccggcccaatttatttattattatacataagtacactgtagctgccttccgacacaccagaagaaggtgtcagatctcattacagttggttgtgaggcatcatgtggttgctgggatttgaactcaggacctttaggaagagcagtcagtgcttttacctgctgagccagttctccagccccaggccgattgattcaatctggcttttctctgtttctgactgaattgctctgcttggcctcatactaacttaggctatatgttctactcttctggctcattctcattctctggcttgttctatcttcacctgtgtcgagtttgctctttttctgcaatctgtctctgtaaaactgtcttggtaaaactgccacacacaccccacatactacactatcccccctcctccccactcttaagtagcttccctttcctgtgcagttctccgaagagttgggtatatcctatctctgagtcattctgtcaactctttctctgattcatcactttgtctgcccctcgattagatgccactttcaaacatggctgctttcttctacaaagtaaccttactttcattgttagggattaaaggtgtgcactaagggtgtgtctatactccagccagatcatactgtaatccagggtgtgtctgcatcccagctggatcacatagacctagaaggttttaggatataatcccttgccagagcagccatgttgctggattaaaatcctctgtaaccttcagtgatatactt

SEQ ID NO: 26710 - DNA, 1150 bp, Mus musculus
gtgtcagcagtggcgggtcaaacacaatgcatttggtttgaaaatgtcatcatcaggtgaggttaaaaggacccccacatagcacctttgacctcagagagatgctgtcagcaaagagaaagtctacccatccaagcctccaagcttatatcatgcatgttggtgtgaagatgctgacgaagggggaggagagttcatattttcaaggtaataaggaaatcggggagtgagccacagttagccagaaagcaaattctctagagaacacatgatggtccttatgaaaaacttattcttcactgcacactgttacatgatgtcccgcatgcctacgtttactaatgtaatagatagttcataaatagggaggctaaggaactactgtaagggctggggtattgtagtggtagagggcttgctaaacatgctcaaggtcccgggtttgattcccagatccacagagggaaatccattctgaaatacagaaagatggcccagttcttaagctggagagcttaaccctgtttctctgtccctaaagttagtgattgggtgcttgggtttggttcccagcataagctgttgagcctctttctgatttgtgtcttgaaatacatacacacacatgtatgtgtatatatatgtgtgtgtgtgtgtgtgtgtgtatcaggaaaaagctacatgaacattgaccacaaacagacttctgcctcgtatttcctaaataatacagcatgccctccaatttacatagcatttccattgtattaggtattgcctaacatctggctgtgatttacagtaaacaagaggatgtatgtgggctttatgcaaatattgcgcgctttcccaaaagggacttgatcatcccaagatctgatggggatattggaaccaatctcccaccaataccaagggcaggtattctctgtacatggttgattcttggaagagtacgtcagttaaaagtccttataacaacgtctttaccagagtaagcatgttagaaatatttgcccttatcattgatggcatgttcgataccgtcctgcgttctttgcttttctgtctcttgacactcttccttcaaactttggtaactagcggcactttggacacattgttagctcacttgcctgcgtggtcaacc

SEQ ID NO: 26711 - DNA, 1215 bp, Mus musculus
gcatgcatatgccacagcttgtccatttgccagttggaagtcacttgggtagtttccagtttggggtgacgataaatgaaattgctttaactgtgagcacactgtcttttgtataagcacaagtgtcctttcccttggggagggacttaggggacttaggagtggaattggcaggatcatatagtatgtacgatataatttgtatgaaagcatcaactattttcgaaagcagttaaacgttttgtagtctcgccagcagaacgggagctaggtggttccgcatcgtctgcagctgcgccttttgtgtggtcgaaggtgttcgctgttctgtaaggtctgcgcactgtctgagaggggcttaggtaatctttgatggtctctgtatccagctcagctgagagggctttgttaactgtaattgatgccaccatctttacactggattttctgtagcccagacaaaccttgagcccactgtgtagccagggatgaccttgaacgctccagcctcctgcatctaccatcaaagtgctaggagtacagacttgggccactgcatctcactttatgtggtgatggggattgaattcaggatgttgtgaacactagccaggcactttgccaattgagatacttccccagctctcacactgttaaaaaaaaaaaaacccaaaaccctataattcatcttcattctaacctaattatacctgtaagtctttccacttaacactccttcatagatacgtctctgtaagagtgattggagtctgcatctctcaggccctcttctccctgatgtcagtgcccagaggttgggtggatttgacacagatgagacacagatgattctgagggtgaagaataatatgtgtgtttctttggtgtggccatttctctgtggtgtgggataggaaggctcctatacatgctgagaggtggtggggtacctgtgcacacatgcacatcaaaggtaaagccaagggcgatgggctactcctaccttacactggggactgagagtgaggctcaggagtgttctgctctgacccgttcctggatgctggggaggaagaatgaagcaggaactcagcaccttcccacggggaggggtccttaggtgggtgagacacctgctcttcatctgcctcttcatgtctcttagctgacataagggcagagggtttaaactaggtgtgctgtagccattgtact

SEQ ID NO: 26712 - DNA, 1100 bp, Mus musculus
tccaggaagactggagggctctgtgccatggccctgccccccaactctgaatctctcccagatgatgtgtcagctccgtgcaccacacacacacacccacacccacccccatcccgtttttcctctggaccacagggtctgccgcctgcctccccccaggccgtgcagttgcaggtggtgaatgccaatcttagctctttgtctgtttctcttcctttgccttcctggggtgctgatatttgtcccccttccctcgctcatttagagatggggagcaaatataagctttgatgggaacaccttcatggaaacatttctctcgcaagaatggctcctgctaagctgtggggccctcaggccatcccttgctgccgcctggtgagatgtgctaacattggcttccatgaccagttgcttagaacatttaagtcatgttcttatcttctgttgattctctctgcctcctcccgacttatgaaatgaaagtggttctggaagtggccctaagtctgttcgtttctgtgactttgtgtctctaggaaggtgatcagatgtggtaatttaattgtactttcttttcattttagaatcgtaagtcccactctttcgattttatacttctgctgccctgctgccacctgtatcgccatctcccctcccaaattagaatgctttgaaattgatttggtaataactatttagaacgtttcaaatctgggttaatagtcattttgctacattgcctgcaatttaaaaatcatccttaattatagaagccttctaaaatctcttgggtaaaggaggggagtttctctttacatttatgatctggtaacacagtaaacatggggaaaaagccttggtggtcccagccggcagcatctgcaccgactgcagccactgcgggtgtttgggttttaaaggctgttctattggaacaggcaagcatgtgtgggtacctgctgtgtgctaggacacacttgttcagtattgagacaataaaaagtaaggcacagtatctgttttcaaaattgtctccttatgggactatgaaatcatttgtcctgacactggcttaagtggacctctcccatggaagg

SEQ ID NO: 26713 - DNA, 1207 bp, Mus musculus
cttttctgcggtagctcttgtgttaccagtgtcttttcccagcaagtgtttggtgggattgggtatttaaagattcagaggaatttaatgagatatgagcaattcatcttagtggttaaagggaatattcattatctccaaattacatagattcactgttaaatctcagatatcttgacagctttttcattatcttcctatcagtttttttcctttcccatagaagtgatttagcagtttatttcccctgataagcaacattcttttaatttaccaaaatacattgtatgaaatatactttgataaaaatctctgtagaccagaaaactttccattggtgctggggaggggtgtgtgtgtgtgtgtgtgtgtgtgtgtgtgtgtaactctcagcagtcccagctgtgcctagactccttcaaagtattttcaaagtatttcgatctctcatttcagccacaatcacaagttcatcggaaaatgatgaccggagtggctccagtctggaatggaacagagacggaagcctaaggttaggggttcagaagggagtgcttcatgaccgaagggcagataactgttccccagtggcagaagaggagactactgggtccgcggagagcgtgctgcccaaggcggaaccctcagccggagatggtccggtgccctatcctcagagctctggctcgctcataatgccacggcccaactcagttgcaggtaagaccatgcctctccccaagcctcaggtcccggttccgtttacttaatccagacccaagccaggagtgcgatcttctcccataggcctcagtgcactcactgtacgctcccacggtctgttagtggtccttttactctgtattgctttggtaatgttggctctttgtagccgaggcggggagaagttccctgaggctgcccttcctgtttctcttaagcatgtgtgaattacggcttcttaatatctcttgacatagcggccgttatttaaggtgaagttgatgacgagatcaaaggatttctgattcaactgtaaaactttgttttgtgtagtggaagcccgtcacagctgggaggtcaaatatttctgtaaaattcagctgtcattgggaaagcgtgtgtggtagtgggagcgagagcaagctgcggcagctagacacacacacacacacacgcgcacacacacacacacacacacacacac

SEQ ID NO: 26714 - DNA, 1098 bp, Mus musculus
ttccacctcttgggtggatctgatgccattgacatattaaaactgtaggataaaactataattagtagctagaaatcagccataaacagaagtactaaacagcattgaacactgttgtcagcttatatctggcgatttaaaggctgccaagaagacatcaactgatgccgttctcttaggagattatttggcttgctctgtgtaaaagcacacgtacttagagaaggaaaaaaaaatccactggtaaaagttaactcctgacataatatctggaaaattctggaaaagatggggagggagggtgtttaagttacagatccctaagtcaaacctgtccttacatgtgtgtaaaaatcgcaacctgagtgatttctagctggatataaatgtgacttttatctgcaaaatacaagcgcagccaagtatcttgttggttcctcgagaggatcaaacacctacttccatgatatggtgaattgaagagtatttttatagccccctttttggaactatacttaggtttcaccgtgttgctgataagacgagaacaggctagctagaatttggattggtgtccaggtcagagttgtgcaaaagtaccaagagaagcactcttagtgacggccacaaattagctctaactggttccgaaagtgttctggacagtgacggtccccaaaacaagcctctaatgtcctctagggaaagtgttcagacaggacccttgaggtctgggtggcagttttgatttccttacacagcccgttgtttcatagtcatgtgtcatatatatatataaatagctagcccattttattcagacttgtaaataactcaaaggaagttaatctaaagacaaataacagaaccccgccatctctctgcatgttctctgtacgctccatcatgctggttgccgcactgaacgatgcgttatcacggcttgtaacagtatacccgcaatggcactttatctcctgtgtatggacacctctgaggtgctacttaaatccgagtgacatatttttcacctgtaaagataaggtacagggatgaaccttggcttaaggtatttttatatgaaaatggtgttattgg

SEQ ID NO: 26715 - DNA, 1206 bp, Mus musculus
gcggtatttttaaggcttttaggcagttggccagcccatctttaacttatctggcagataaattgcacacacttcacatgtttaaaaatgttggttattataaaattgtttcaacctagtttttcagagtatatcatttaaaataagctgtcattggcagcgctgatgggatttaatgggttataagaaaaaaattattgtaggagcatgtttgtgttgaacatagggctacatacccagcttttactgaatttttaaaaattttctcaaaaaactatattttattattatctgcttatctgaatggatatcaaagctgcatgaagagttttatgcttttatttttgtgttactcacattattaagtgtattaatgaaatagtattgacttaaactgtaggcataatcagcttgctaatttctctcaccttgttaattacaggctttgaattaaaatataaaagcacactaagtgggcactgcgcccctgttctggcctgtgctttttcacatgatggaaagatgcttgcatcggggtaagctatctataattaacgccttagtgctcctagagaccttctctgttgtcggtgccatagtgtgtatgcggaggtcagagcacaacttgtagggatttttcctctccttccgctctatgagttctaggccggggctcagatcatcaagcgtggtggcaatcaccttttcctgctgagccattccacaagcccactgtttcttatcctttcctatacttcatatttgggtcttctaaatgctacccattgagaggtatagtgctactttagcatggttagcttgtatccactcccccaaacaataatggtagaaattcattttgatttttttttttaacttaatggtttttcaagatagggtttctgtgtgtagccctggctgacctggaactcattctgtagaccaggctggcctcaaactcagatccaccagcctctgcctggtgagagctgggatcaaaggtgtgcaccaccaccagcagccagcttgttgtgatgtattttagcaacacattttctccctgtgcttcttgtaagatgaccacaggtaaatcacacctatttccaaggtaaaccagccttgcttgcagcagacgggctggggcatatttaaatggtctgttgctgtagagaaagttacctttcggtctcattgcttgggatatga

SEQ ID NO: 26716 - DNA, 1265 bp, Mus musculus
ttatatgggccctaaacatttatgtaaagtaatcttcatatttattgcatagaataagaagaatcttgagaactgttttcctggaatgcatatttttttaaccattacactgtattatttggcttaaagttgtgtgtcagtatccgtttcccattaatgcatttcacttgtgtcatcagctctgtttttgaatttgcagtactctactttgagtttgtactctactcaggagtacttcagaagtaaattttttcttataatagttaaactgtttgttataagatagatagcatttcatttcaaaccctagtctttcagtttggcaggagtcaataaatgtgcattcaataatgcttaaattatttcataattggttaccttcccttctttcaaaaatagatgttcaagaaagagttccttcttcatattcacagggagcaagaccaaaagagaatgcagtgagcactttacagttgaattcatcatccaccaatcaccaattgccttctgaccatcagacagtaccaagttctagggactccagtagaagttctttcagatcacatttttctccaagacaatcagaatcttttcgcaacagttcacatcctgcattttcatatttttcaagtagaaatgaaactccaactataagcaattcagaaaggggttcatctcagagaccatatcgagaatcttctgacaatgaaggtaggcgtacaactaggagattgctgtcacggatagcttctagcatgtcatctacttttttctcacgaagatctagtcaagattccttgaatacaagatctttgagttctgaaaattatatttctccgagaaccctgacttcacagtctcggaataatggaacctcctcgtcctctgacgtcagtgagggcagggcagctgaagcatctcagggatttagatttcttaggcgaagatgggggttgtcgtcgctcagccaaaatcatagctctgaaccagaggcagaaaattttaaccaagaatcagaaggtagaaattcaggaccatggttgtcttcttcacttagaaatagatgcacacctttgttctcgagaaggaggcgagagggaagggatgagtcttcaagaatgtctacgtcagatgtaccacctagatctcatattttcagaagagattcaaatgaagtagttcatcttgaagcacagggtgactcccttggggctgctgccaaccgaccacaagcatctggagcgtcaagcagtgctgctgcaggt

SEQ ID NO: 26717 - DNA, 1123 bp, Mus musculus
ataaaatgtccttttgaaataaaatgccaatggcacctaattagtttttcctctttaaatgccttaagttacagccacattttgataatcatttacttccagtgtttaaaatttttttaaaagaatgggaagtttgaagagcattattgtattaggtttccaaatttaatttgaattctaaatccacttagcaataaaacctaatttttaaggaaaaaaagtatgtaaaagatgtagtaatgatggataacttttgtattgatttgcaaaaaatgcagattatatttgataggccatggtatgtaggtattcctttcaggaatattacagctgtaaattatatcagaattgccagtcaaatgatacttggttaaaaattactgaaaatctcaagttaacagaatatttttttaaaacccacattcaaagtttaaaacactggttttcaatgtgtttttagtattgtcacttctttatagagaaatataatataaataacctatttggatcctggtcatttttaggtgttccttgataattctgagcatttatttgatgattgttaatatttttcactacctttgcaaaacagataaattacttattcaacattaatgagtttgcactatggtcttgagctgtgtaaacttgcgtaatgatttccactgtcagcacccttaggatatatattacaatttcgggtggtttcagattagtccaatgttgtggcaacaactcactttcaaaacctaaatagaaaccatgtacgttgtcaaatgtgaatggacagtttgcctacatttagtttgttggtgttaatgtaaaacctggcttgaaataaagtgatactgattgatttattttagtttgaactttttccttttaaactggtcctcaatgagaaactaggaaagaatttaattaaaatttcaacttttatttcatacaatggttctattttctcaagtttattgtatgtctgagtgttttgtctgcatatatgactctgagccatgcccatgctgtgtcttcggaggctaaagaaggctttggatctcagggaactgtagtaagagttgtttgggagctgacatgttaaaagtagtttgtaatggagcccaga

SEQ ID NO: 26718 - DNA, 1312 bp, Mus musculus
caactataaataagatcaatgatgcttcaaaatagccttttaaggcactggggaaaaaatacaaaataaggcatattttttatacagaaaacagagccccttggaagatgtttcttatactatttcaaagatatgtatactggtattaattaattgttacatttctgtttttcattgcttatattcagtgagttggtttttgtctttaacttaaagttaatgtttcctaaagttgggaacgttgctgttaagttgcctgggcgtgctgtatcagcatgtctgcgtttgatgattttcttttttacaaggacccaattacagctgagacttcagcttttacagttcctgtctttcacataggagatcagctttctgttggtggtggctggggtttttggttttgttttgttgtttttgtttttgttttgttttgttttttgaaacatggtttctttgtgcatcatagccctggctgtcctggactgactttgtagaccaggctagccactaattcagagatcccccgcctctgccttgggagtgctgggatcaaagactgtgctggcaccaccccagcaagcaggcagggtatcaccttttgatgaatgtattatgttgttgcctttttacttgagcgaaacataaaagtgatctttgaataatgttgtttgctacttctgtatttgtaaacaatcaccgtccctaagacaatgaaactcagaactctgtgattcctgtggaaatatttaaaactgaaatgattagtgacacactattttgttgatgtaatttccatttgaacatctggaatatacttttactagtagtgtcaaaataaatatggtgactgttttattcagtgtttcatatttatactttagagtatttttgtacaagatccagatttattttgcttgaggtgtttatgctatcataaagttgtaaataattttctaagactgttttaatgcaatctacagttttcctaaaatatttttcttgaggcctcttttaactatcactaggagtttcttcaaaaaactaaatcaataccatgtgaccacagttgtgatcatggctgcttccgtggctgatccttgcatgtgaaagcatctctaaattaggtttgattgtatcccatgtgtagtatgaagagaaggtgtccagctattgcgagttaaggtattttaagactttgtgagcactttttaaagaataaatctttgtatgtctaaattattttaatctccttggctcagtgtttctcttttgtgtgtggtgtacgtgcgctctctcaagtgctctctctctc

SEQ ID NO: 26719 - DNA, 1177 bp, Mus musculus
tggtaaaaactatccaaaatgaagagagctgtctcaaagaggaaaactgagcatacttgatatatgtaggcagtgctctgaggaaaacccaatgctttgggtcccaagaccacatgaatttagggccgacacatttaccctatgcgctctaagattaagcaaagtacgtatttatttgaaatcagtgtggctgcagctggattgaaatggggtgggaagccactggagttctgtgagaaccaatgcccaggtgcctcttaggtgtgatcctcacagtctttgtgagtagagactctctttcacagagtagaaactggaggctctggtgtcagggatctgatccagggtatgacagaggcaaagcgtgtgtggacatctggccacccaatgccaaagcccagaatttactgagcatgccgtctttcccatttcaattcagaactcccgagtgactttcttattttcctctcagctttgtttagtcttcattaagaagtcactactatgccattgtacgtttcccagctccatcttggcaactggtgaaaatccattccacttttataggctagagtctcaggctcctttcgatgtaattttgctccttgctggagttcccttggtgcgtgtgtgtgacggctacagaatctcactatttttgcttcccatctgatggctatattttgtgtgtgtgtgtgcgacttccttaatacaaactaaaagtcaaaaagtttttctttctgttctcatcgtggggattgaacccatggccttgcatattcaaggctagtgctttaccattgaactgcgtacccagactactagcaatacttaattaacatttaataggtatgcctttttaaaaggtcagtactaaagcaagcattagtataaaccctgagaaatcccactttggtgttttcaactggacatgaaccagtttgatccaaaatgaacgagcctcctcgccatcacctaagtttctccatttataggatgcttggtttgtgatccaggactaaccataagccactgctctcttctcgcctaggtagcactccccagatgccagactggtataatccaggtaagctgagcatcaaaatgtagccatctcagtttggacctttttggataatgcatgtcatttgctgttaattgctactttcttctcgtg

SEQ ID NO: 26720 - DNA, 1889 bp, Mus musculus
tgtgaagtgtcttatccttttctatgaattccaatttgccttaactcttttgatgctgtagctgtttcagtaaagttagttcaacctaatgatgtagaatgctttgaccaaatgggctggtctagtgcaccttgtaagcagcagcctagggcttttaaaaggtagtcaataaaagttgctgaaattttggcttttttaaatatgtagtaggtgtttttaatgatttttcacatagcgtgtaaggtagtgaagtgcaaggagggaaaactgttttgtgtgaaacacattttctgactggggggacttttaatagggtaaattgtttataaggctgtacactaacagtttcccctaatagtgtgactgatttaggatatctgctgtatgatgcaatgtaaagtcttttttgcctttttttcaggaagaaaaaaaaataaaacttaacgatgttctaggtttagtgtaggtagctgcggggatggggcgggggcggggggcgggggaggggagtcaccgaatgttttgtcctttatactaacatagtgctttagaaagagaaccacgcttgagatctgagaaaccgatggcgggggggaaaatggggttgctgttgaaactagatggtgaaagctaaaagtaaggatttctcttcaaacctaagctgagatatgaccagaaggaaaacgattggctacgagctctctctctctctctccttctccccacccccctctctctcttccccccacccctctctcactctcattctctattaggtaaatttgaaaaactaaacaaacaaacaaacaaatgacttggcacttttaaaggtaacttcaccaaagaccgacgagccagtagccagcagctccacctatctcagcgtcacatcctgtctgtcctttcttttttgccggaccagtttgcggttaggagaatgtgccttttttgtaccttcgcattaggttttataattttaactgatgtatggactcacagagacaaaatttaaaaaatttaaaaattaaaaaaaaaaaaaaaaaaaagcaagcatgaaggaagatttgaatccaggcagtgccgccctctgacgtcatcactacaggtgtttgcgtggaaagaaaaccaactttgaaactatgaaattcctgattcataaatacagttatttctactttagtacatacaagataactcactgttattaacactcttttttattaaggcagttgcatacgttttcaaaagcaatggtgaattaagttgtcttccaaaactgtgtacttgtctggtcagctgtacgtgatcagttatctacctcagaggctatttttcttttgtgctgggacaggttgctggccctccctgtttccaccgaccaaatcctcctagctcaggagctagggctaagcagttacttcttttgagtattttttagttcttaaattttattgcttgtatttgatgatagatgtcagcgacatttcatagtttcaaaaatccttgctgctctgaaagtgtagattctagtgaaaattacatagtcataagagaaatgtggggttttttgtttttgttcttgttcttggttttggttttgtttctgtttttgttttttttaagttgtggtattattggttttatgctccctaaaacttgtgctttgtgaagtccagactgaaggcagcacaccctccgtggatcgagtatgttgatcagcccaagactctcactacttgatatttttttccattagttaagacagaaagttgatagctcagtcagtaggggaggggagatctgctgctaggtatgtctgaactaagtgccatactcgtctgggtcagatttgggaaacaacctctgtacatataaaagaaaaaaaatgt

SEQ ID NO: 26721 - DNA, 1194 bp, Mus musculus
tttttgtttgtttgtttgtttttaatctttttcaagattaggggttgaaaaatgtgacacatattacaaaggcctgaaatgcacattttcagttgcttagaaccaggtacccttgcctattctaacactcctcagtttttgtttttgtttttgtttttggactgcattagcgatccacccaaaatgtagtcctttgttttccctctctacatatagttcataatcttgattttgaaaggtttttttttttttacctattcggatagcttcctcttttccttaaattattgaagattagcacagcaggcagaggaaaaatggcagtatacattctaaagggaatgtggtttgaatgagaatagcctttagtcaccagcttggtgaactgtctaggaacaattctgatgtgtggctgtgttggaagaggtgtgtcagcgaggatgggctttgaggtttcaaaaggcctattctctctccacactatttctctaccttgctgagaatgatgacttaaagttctcaggtactgtctccaaatgccatgatggtcatgaactaacctccgaaactgtaagcaagccccaattaaatgtttccttttctaagtttccttggtcatgatgtctcttcacagcgatagaatagtgactaagaagataaaaacacaaacttcacttgacataactgaacataaatgagttaaaatcacccagtaatatttgtatctttaaaatgttagaggaaaaaagataattaactataatcatacgaatagaggtttcctattagcagaccatttttattttccactgaccttaatataagtatgttttttaaaaaattatatggtatcatgtcaatattttttcaaattcatttcatgtgtgtgcatatatgtgagggagggagcatgaagtaagcatgtgtatgccatggtacacgtgtggaagtcagaagcaactgccttcacaattctattttcaccttctcccttgttaaagtggggtcttgtttctgtggagctgtgtatactccagtctaggtgacccagcttccggtcatttattacatttcaccattggaatgctatttcacctggctttttatgtggattaagcactgagccatcttaccagccccaaaattattcttaccatagaaaatgtagtcataaattaaaataaccattcacta

SEQ ID NO: 26722 - DNA, 1178 bp, Mus musculus
caaaattaatgttagcaaaaggctcagcagctgagcagagcagtgcaaattggtttttgactgagttcctagttctactgctggtttaattgatatttaatcctttcacaacagttgatcctggtgtccattgttaaaaaatgtgctcggtgcctggaaaacccagctcccagagctaaggagttaaagagtagatatttacttgaatgctgaaagggtaaaaactggctctgagaaagtgtggtaacaaggtgaaaaactgaaagccttatctaccactgctaatgtgcgtgtcttaatgatagccctcctttgtcacacttactcatttccatgtttgctggagaatatggtgtccggtttcagagtttctaatggtgctttttcacacctgtgtgctttcatcttttcttaatttataccctgttagtgtgttgtttctctcctctcatcatgcattgctgtgttctgagtctgagtgccctttgtttcaggcccgagatggttgttggttggtatcacagtcaccctggctttggctgttggctttctggtgtggatatcaacactcagcagagctttgaagccttgtcggagagagctgtggcagtggttgtggatcccattcagagtgtaaaaggaaaggtagagtcagttctaacttcattgccgtctactgccattttatacacatgcatgtaataaaaatctttatttgaaagtgttcttaattaaacacacacacacacacatgcacacacatacacacacacagaggaatgctttttattgaaattattcaaggccttaaatgtttgtcatagtattagcaattttaaaaaattacgtaggggttttacttttaatttacaatcatgaatgaatgtttatccttaatgtttaaaattttcataaatttgaatgttaaatcatactgaaagcttcatacattctactaatatctaataaatatatctttaaaatgttatttttaaagggctttgtttttcagacattatgcaggatatattctggatattctaaatattttagacaatgaaaacttgtcccaaagacttggtaatcaaccattcatgtatttggagtgaggacccagaagaatgattaaaaatgctgactgactctgaaaagaggttagcttgcagagcacattgggt

SEQ ID NO: 26723 - DNA, 1158 bp, Mus musculus
ctctcatgacatacacatatcagtatacataccgatatataacaaaatagttctttggctggtcatggtggcacatttaatacacttttacatttttttatttaatcagtacttactgaaaatcttctgtgtgccaaactaaaacgctaaaacgtgagacataaaagtccctattgcccagagagcttactttctgtaaaagaacacaaacagatagcatagtacattgtagctaatgccgtggacaagagtggtgactagggagacaatggctttatatggggccagtaaaaatttgtcttatcaaaaaaataattttttgcaatctcctaaaaatatttataattatatatatatattgagcattataaatatgaatgtttataatgctcaactatatgtgggttattgggctggagagttggctcagtatgtaaaggtctgagttacatctgcagcccatgtaaagagcttggtatgatgtctagtgctgaagaggaaagatagccttgctgaccaatattcataattgccaaggcagaatccacgagtatccagcaacaggtggatgtgtagggtttttctctctgtgtgtgtgtgtgtgtgtgtgtgtgtgtgtgtgtgtgtgtgtgtgttcacaatgcaatactgttttttctttaaaaagaaagaaatccttccattgtaacatgatgatcctggaagacatggttaaatggaataaactagacacataaagacaaatcttcacatgtgaagtccaaattcaggagtaaaaaatataaaatcatggcttttagagtcttgaagctggtgttaggagagactgggaaaaaagaaaagacctgggatatgtttaggaagtggtaaacgtggctagagtgcaaatgaggaggagtagaagatagttacagagttatttctgatcagaggcacgatacacctggatcctgactttaggaacaggagaggagatttgaatgggagttacactgagtggctgtgttgtgtagtgacagtagtaatggaggcattgataggaaaagaggaaaattgaaaagttccttcttactaaactattgatagcaataaccttttcaatgtaggcagaagaggatgaagatattgattattgtttttgtttcctaattgatactc

SEQ ID NO: 26724 - DNA, 1101 bp, Mus musculus
acaagtacatcaggaacatctcaaagcaaggagggatatatggaaatgtttggaggaaggaggggagaggggaaatgtaatggtattataattattgttattatattgtaattatattttaattacattgtaatttcaaaaatctttaaaaactaaaaaagaagggaaagtaattatcaattgcttgaaatttgtttcaatgctttttagtctctttctatacatatatatatatatatatatatacatttgaaaagacattaataatttcacattcatatcttcaaaatatactaataatttctattttaatttttaccaatttatagaattgttgaaatagaatgtgttggaagagtaattagaatctgtcagcaagtatcttttgagtacttactatattgtaaaccatgatagactaaaatgaaagaaaggctttgaagtttgtttgcacgtccaaaggactcctttttcccctgtctctctgtctcttcatttctttgactctatctctgactctgtttctatcccaaacccctctcactctgtgtgtgtgtgggggggggggggtatatgttggacatgtagatagtataaagctgaaaataaatgttgaattctgtagttactttttacctacagaatttactttttagaatcagagccccacccttgtttccttgaaaaacaagaaataataatactttacagtttgctttgagttgagatagctagccttggcattggcggttatagataggcagttgaataatcttttcttgcatctggcttcttaggagtagagcatctgacccacctacatccaaagaattcatagaagcctttcagacatgcacaaaagactgcaggtgctcacaaatcactatgtgctgtgtgggactcccacttcctctgcttagacatcctggtgcacgtaacactgcttagcaattgttccaagcatttctaaatgcacacaaaaagagactggaaatgtcaaagattttttttcaaaatttatttattaagtttaagaaggaaaattaaagctataaataaggctaagaggtttattattattattattatcattattattat

SEQ ID NO: 26725 - DNA, 1079 bp, Mus musculus
tcctccttcttgttccataggcagtgtttttggtgaaattttctatagagatttcagtggttaccgggttctttgcattaagttgtctgatctaagatgtcagagttaatttggtttctgaattttcgtatattttaactgaatatattctagctgaattctgatgcaaatagatataattttagtgtagctggtgaccaaattaaatatttaagaaagaactccatgatttttaaaaatatttttaaaagaaaactccacaaaagtgcaagctctttttataaatacagaaaacttaaaatcagcttttacttcaaaagatcctgaaaaggaaatgatgtctaatcattttgatattgattactatgtaacttgccatcaatctggatacttggttattgtgtaagaatagatcaatgaataatgcatacacattgtcctctgacaatttgttcatgaccacatagtcagtagcctgaaggaatattaagggaaccattgaaggtacagaatctgaagctgtcatagaaaacagaagccacaccatgatgttgtaagtcattgagcagtgtacactcttaatgtataagtgcttttatttatacagtaaacatgtttccatgtcattttgagaattttttaataaacattcaaatagcttgctgtaaagttttgtatcatacaaaatttgttacatatatactgcaatgagatgcctcagttcaaacaacggtgcattaattcagctattatctaaaagattgccaaatggttaaatgccaggtattgcacttctagtgtgagtggcagtttacacactttaaattacatcaagggaaaatcaatactatgagaatcttgatttggtccactttaaatgtatttttaaggactgtgctcattaacctattttaggcatgcattcagaaaaaagaaagttaacaaatatatattcaagttatatatttatttccagaaaaagcatttagcctggaagaaagtagaatttatcaaggtagtttaaactctgtgcaattaaaaaaataagaaaatcaatttgtgatagttctttaattaaa

SEQ ID NO: 26726 - DNA, 1121 bp, Mus musculus
agtttaacttgatgcattgtaaaggaatgtacaaatgtgctttgttactaaaatgataatcaagttaattggaactattttcttctgtgcctgttatttgcagttatttatatatatatatatatatatatatatatatatatatatatatatatatatatatgtatgtgtatatatatatacacatatacatacattgtgtgtgtttaaatctgtaattatacctgctaatactatgactctaagtagctacagtcagtgataatgttgtcatgggtaattctcaacgttgcaagcttttatcatagtagatacattatcaaggattgggaggggaattgaaaaggagattggcagagacattttcctttctgtttggacattggcagatgggatctgagactggcaattgctatagacgttttcctttctgtttgtttctctttgcttatacatacatatccattgttggttcttttgtaatgttaaattgggaagaatgctcaataagattcacaatgttagtctctagttatttaggacatctcactgactactctttcctctgaatcccatgaaagtattccttctttctcttctgctcaaccttactcagtatttagcctttgtttaggtattattttaacataggtattgtatataaaaccacagtactggctttatttatgtaaacttgagtaggctggagtagtcatttaggaagagagtacatcaattgataaaatgcttacattatacatcaaaatgctatgggggcatattcttgatgactgatatggcaggggggaggtctacatcactgtgagcagtggtacttctgggttagcaatcctaggcgctataagaaaattgactgagccaaccacgaggaacagatcagtaagcagcacgactcatggtttctgtttcaattcctgcctccaggtcactgccttgagttcctgcccagacatctttcaatgatagaatgacatgtggaactgtacattgaaataccttgttccccactcttaaagttgattttggtcatggaattttatcacagcaatcagaacacaaacgaagacctccaccgttatagatttctgttgcaactaaca

SEQ ID NO: 26727 - DNA, 1129 bp, Mus musculus
ctttggtttgggggggttggggtttgtgttttgaggttttaggtttggtgtttcacagtttgagtttggggtcttggttttttttggtttttcaagacaggctttctttgtatagccctgactgtcctggaactcactttgtagaataggttggcctgaagctcagagatctactttcgtgtgtctcccaagtgctgagattaaaggaacgcatcaacacacccagcttggttctttcttcacttcaaccatgcagatctcatttgaaaacttttccagagttatctctgacttatctgcatcaggaaagggaaattctggagagccaagttcaagattcactctgttgacacagcacaatgcctcttcctatgctcttcatcacattaatgatcagaaatgacatggaactccccagcccctgcctgcaagagctaagtaggaccttactgtaagttgaagggagctccaccctaactcatggattgtgaagaatggactgctgttgggtctgattgactgttgatggatgatggtgtggtgtatccacaggctattgaatgcaacttacaatgcttaatttaaaaaaaaaatctattctttaagtataaaaaaataaagcaaaagaaattttaacttgtgggactgcaagagtccccatgtgcccagagcctcaggaatgtcatactgagctgacatcagagcctaactaccactttgaaggaagtctacttccaaacaaaggagtgtcttcacttccagagagaggattcttttacaggtatcaataccaagaagactgcaaggatacaaaacctgccagtgaaatattccattttgagcattcacacttacagatttctggacagtaggaaagatcttgttgatccccatgagtatagttaactcttgggaaacaatgcttcttccccaagcctccaaaggaaaggccaagatgtcatggcacggattacagtctctatatcctcctggaaatgcagcctcctgttttcccctgatgagattagctagtggcaagaaagcagattttaaaagaagctcagatataacatttaatgtcaatgtaatgttgttgatattttcatacacttggagctaacctctttta

SEQ ID NO: 26728 - DNA, 1197 bp, Mus musculus
tgggatggatcacaagtttgggtggtcactggactgcctttccctcagtcacttctccatatttgtccctgcagttcttttagacaggaacaattctgggtcagaggttttgactgtctgatggcattcccaccagttcacttgatgccctttctattggagtagactctacaacttccctttccccactgttgtgcatttaatctaagatccctccctttaagtcctgagagtttctcacttcccatgtttctggtactttctagagggtctccccacctcccacccctcaagattgcatatttctattcattctgctggccctcagggtttctctcctgtctccccaccccataccagatcatgttcccccctactcttccttgtcccctcttccacctaggtgcctccctctgcctcccttgattgttttcttctctctcccaagtgggattgaagcatcctcacttgagctcttctgtttggtaaccttcttgagctctttggattgtatgctgggtattctgtactttttggagctgccggtccttggctcggagctcgcggaatcgcggacaggcgtcctcagcgcgaagaggcaggactcggagtcgtcgccttgagccttgcatctgagaagttccaggtactttgtacaactgcatcccagaacctgtgtgttttcagcacctttataagtgacggctgccatcaggaagaaactggtgattgttggtgatggagcttgtggtaagacatgcttgctcatagtcttcagcaaggaccagttcccagaggtctatgtgcccatggtgtttgaaaactatgtggcagataggatatcgaggtggatgggaagcaggtagagttggctttatgggacacagctggacaagaagattatgaccgcctgaggcctctctcctatccagacactgatgttattctgatgtgtttttccaataacagccctgatagtttagaaaacatcccagaaaaatggactccagaagtcaagcatttctgtccaaatgtgcccatcgtcttggttgggagcaagaaggaccttcggcatgatgagcacacaagacggtgttagccaaaatgaagcaggagccggtaaaacctgaagaaggcagagagatggcaaacagaattggcgcttttgggtacatggagtgttcagcaaagaccaaa

SEQ ID NO: 26729 - DNA, 1196 bp, Mus musculus
tgctcttaaccgttgagccatctctccagcccctaaatacctaaataaggtatctctttggtttagattagttttagattccccatcttcactcactgtgaaaagagggactgggactcaagcagggtcatgatccagttaaacaaagaagacaagaccagggatgctatgagatgtgtccaagtgagaaacatttggaggaaacgtgatgatggacagtaagttggcaaaactagagccagggcaggacaccactgaggatggccgccagtatcttaggatcagaaaatagggtgagcttgccaggctaggatggggtgccacacacagccatctgatggggatgatttcaggtcactgtttccaacacttacatgagatgccttaggatcacccacgctggtaaaatgagtctgcaaacctaaagatcaataaagaagagtatccctggaaaaagcgagttcagactcaccatggcaaccacacaccaaaagctggagagatggacgataactcggggaatttaatgtggatgaaggaaggagatggaaaataaagaccaggtcttcagaactggtaaagagagacggtatgcattcaggaaatgccaattctaaaggaattgtgttggactcaaggtaaaatgcatagcagacagaaaatgacaattctcagaactgtggtatatgaggagcagagaagaggagccatgctgagatgagggtgtgaggagagctttgttttctcttccaataagatgagaggccaacatgtggatacacagatacggtcccctggctgcttccagtgacagctccatcagattgcctggtttgtctattctcactaattagcatcatcttcccggcagtactcagcgtcattgttaaatgttactatatgtcttgggtgattgtagactaagaaagaacagaagaggaaaggttgaccatatggttatgtggcaatcctttaaagcaaggggcagcacatctggtgagtggcaggaacagggtccactgtgtgcttttgtgtggccattagacaaaatgaaatggcttcatcttccaaatgatttttagaacaacaaatgaaattttgatgaaattcaaattttatcatgtacacatgaaggttcactagaagctggccaccagcatatttgtacatttgtttacacatagctactttgatat

SEQ ID NO: 26730 - DNA, 1146 bp, Mus musculus
aatggaagtttcttattacatcattttccaagaattacaagcgtgtggcagagtcatttagatgttacagctttgcgcccacagttctgctcatcagatattttctgtagcatggctgtgtgttactaaacagcacagcatcttcctctttcattgctcgtcagaaacgaaaacctagaagctgagtactgcctgggttttctctagtggtcagtagtagcgttagtcttaactgtatgctgtcttgcctgccttggtatttccattctgagcgctaaatcagaagaaggggagttgggagaggaggaacaaacttcagagcctaaaccatataccttttcagttcattgactgtgggtagatttttttttaatgaccttaatagagaagctggaacgtcagtacatgcagatagttcttatgtatgggaaaagaaatcactccaaagatttatgacctgtgggttactgttttcttttcttgcaattagcttttcactagacaggaccactgctttgtatctgacccttcatgcttgcttacatttcaagaaaagacatttctattgttatttgatttcatctttcacaaaagcaaccaaccttataaagagggatgatcgatgttgttctagacagcatttgtccaaggcagctttgctgtgattcctccatctatctcattagcatactggtagtaaagtcagttcaaattataaacttcgccacatgtgcaaggccatctaagcatctttaaggataatgtatattgattagaaaggactataaggtgagaaatggaatagaaatcagccttgcttttgtcaaaactgatttacatggctttcctgatttttagttgtaactttaaaatatgtccatagttaaatgtcttctttcttctttttaactcttttccaatattttttatctggcttagaataaacctaaaagttatttattgagtacttggaagaaaactcaactttaggaagtctctttacaatgtatctagaaaattctatccggactatgactgctcactctcctgtcatgtgccctggggtagattgttatttctgtgtcatagaaatatcaaaaggcaatttgtagcacattttatccaacattgctttgccctctcttc

SEQ ID NO: 26731 - DNA, 1161 bp, Mus musculus
ccagaagccttttctcctcttactgttgtatttctgtttaagactttaattgtacatctgacaatactgcctcttttatgttgtacttagaaattaatatacttataaaattaagatttattagccaaacttgaattctagttttaaaactgactgtgaattttatttttcatatatttatgctttacacaccgtagctccgagggggaaagttttgattacgcgctttctgcaattgatctcttgttatttaaaccaacggtttcaggtcaatctttggagtatttgtagcttctaatttttgaaatgactgaattaagaatttggatgcttgctcttttggttggtttgcctaaaatccagcccacaatccagtcgtctcttgggagagggaggtgccttgcaaactttcatataacgaatgtgcctgaggctgcttaactctggactagtctcagatctcaaacctgcactacacgaggaggcatacttttgcttcatctggacatttagaatactgtaaccttgctgccgttctgttagattgctaactacgtcccccgtctccaatttggctctccttaggcgataggatttgttgtttttaaggcaataaacttgacaacaccagaatccaagttttacttgaaaagctcggcagaatacacagtggtgtgaaaaaaacaacagaaagggtttttttgtgcaatgacaaacggtaaaaatgctgtaaacgttgaagaataaatatttccaacgcaagaacctcctgcttgactgtgtattatgaacccaggaaaccttagaagtttcaaatttggagtcaagaccttcaagaaggtgggctccggggatggtaccattgctctttcctagctaaccctagatacggcagctctttaatgtactttaaaaagcaaatatatattactaaggaaagaagttatttataattgccttgtcataatcgttaaggtgttctagaaccatttgcatacaatttaatgtaattccattccattctgttgtttacacaattactcaaagatgactgcaaaggtaaacggaaaaataaaagtgtattgcacagtgcactcgagtctcctccatttcgttcctcccccagccgtcaccagcatctccactgcgcaattcaaccct

SEQ ID NO: 26732 - DNA, 1214 bp, Mus musculus
atgccacagcagcacagtgaccaaaggcaagatgctaacactaatctctatgttctgttatgcacttctccgctcttcatcaaagttgttgattttccagtgttgtcagttcccctacaggttctcatctgcaattcctttagctgcttggtttcctttcatatggagcagcgcgtctcttgtagttgctgcacttttgaagaatccaggtcggttattccgtagactgtctccataaagacttagctgatatttcttcgtgagtgcactgaccagcgtgttttgacaggcttcttaggagtgaggctgtattctgggtgtattatattacgaggcacaccttgttgcctccctcccatcctgctgaggtttaatggtgactacctgctttaggcggcacctgtcagcttcttcattaaaaacgcaagtacaggaacctacttatcccccaggtcatgacatctttttttttccaaggccgtatatacgctctgcgtcattatggctgcacgttcataggatgtcaggggtaggaattccttgggatttgtagtggacagggtacatttgcatcagactcaggcagcaagtgaggctggtgctattctctctccatctgtgctgggcacagctgtggccagagtgagcagcctgacctctttgtgccagcatctctgactctgtgctgcccggggctgagccatggaagcacaaggatgtctggcctcgtgctttacagcagcagatgctgagtccacaacgatgtcctgggcattatgtgaataacggggtcacccatggctgtggacagctgggtgttctacaagcacataggcacacagctggggtgggtgacagggatggcttctctagcactgcgtccctggatgggatggacagagagctcttggcgaagctcacagaggaggaaggcggtcccagcctttattctttggaactgtgatttcactgctgttgactgttcagcagtctttatattctctttttctgccccataagagccagagctaacctctgctatcttgaggtaacctctacttcccatgcactagtggagagcatgagagtggggagctgcagtgtgcacggtcctcctcaggagcctccacaccacttttagtcgcttgtttccttctttgtttcaaacagaaaggaagggagagcaggcgttgttgttacatcttgccggatgg

SEQ ID NO: 26733 - DNA, 5994 bp, Mus musculus
tgaagaaatccattatttctatgtaggcatgctgtatgtaactgacacagggaacagtatttgcatttgtcttaggatattatttatttttttatttgtttgtaaatctgtggacaaacgaggattccttcactcctttcattctctgggctcgtgattgacagtaaggatgtcctgtctgtgtgtgccccttttccacgttgtggtccagtgtgccgtgagcatcagctttctttaccccttagagcaaggaacatcccatgccagatcctcacacagttcccagtaggttggctttccttctgttctgcacccattttctatttgcccatacagttggtgaccattgccccacgtgagtctaaacagggtgaaccaggtgttttccttgccactcttggtgatcagatgaaagagagtggctatggggggactttagaattttacaggaaaccgccttggtttgtctcttgtgcacagacatgagacttcttttctgtggtaggttgtcgggggttgactatgttggtaacaaagctattttgccctccagtgaagtcagtgttctgagtatgaaacagtatctcttgcataagttcccagatacaagggccccacatactgggttctgggagtctcgtaaggatagccactgccctcaaccaggtcttgccatgacttctaccctattagtccagtcttctgtcctgacgtataaaaaagaggaagccccgaatattctgaggcaggaaaagaaaaagtcttgtgggagttggcaaagacttccttccctgcaaagcactttattgcaaccagctttcaagagaaagccctatctggtattagactttgtattttgctgagtaaaataaatcgaatgagagaaagacaattaaccccttgccttcctcctcaaatgcatcccataatgactttcttgttgctagaaacatccaccccacaggacaagtctgttccatttactgctctgacgacttgtgagggctcctgtgaatttctcttcaagtggagctatttccagaaaaacagtaaaaaattctactggagaatagcagcaacagctgtggggaaaattgccaaagaatacgtcatgagccctcacccacccccaccccctgcagccagtgttacttttgttcggctacagaaaccacacagatgagccgaggactagacccatctcatcctcagtaaaaaggaaactgaatgggattacaagtactcgtgagtcaaacatctcctaaaacaggactccaaaccagtcagcgctgagtaaccaatagcaaaacattacagtgcatgacggtcctgctcagaaccacccccactccatttggttcttttaaattaaatctgcatacccataccttgaagcctgtgagttaattgttaagagaagactcccgaagaactcactgcaatattaaatcctcctccacctaattacaaaacagtattttctggtatggtccagacaataattttcaaagcttggaagcatgtctagttgttaccacagaagacagtgcaagtgactgtgtgatttgagccttgctgatatattagccaaaacagttatatgtctaggagtgaaacttgattgagtgtttgggtttgtgagaccagtgataagacacgggaggtactgttagtaatcagagcatttgctcaaatacaaatggatgaaaaccaagagcagtgttgagacagtgaaagtttgtcatcagctaagctaaggaacctacccatctctagttaatgtctgggctcatcctcccaggtatgagatggttttgacaaccactgtgtacttgtatttgaaccatgtgacactctttagcacagaagaattttaagatcaatctgtaaattcagaagaggtatataaaaatgaagtaagttgatcctgtccatatcaaaggcagctctaactcatcttctccacggaagttactgtggaagactaggggcacgctttctgactgacacctttaggttggctcagtctgcaacgtgtctgttgatttttctgtttcgtattacctttgtgagaaaataattctgcttggctaattgaaatggagtttgtaggctttttctggaatagaatattaatatctctgtctaatgttctcccaaaaatggacggataagactgagaacagacactgtccgcggaatcgtatccacatatggcaggccatagctctcagaaagtctgacttgtaaatccagctttaggttagttctaagtggtgattttggtaattagcatagcttgtggtgatgtctcctccttcctggttgcatccaaactccccagggtaccaaagtgtgtgtagaaaggactctagaaaaagtaactctcatagcttacctagatttagtgggggggaaagtaggaaatcaagtagactttggcctagagtcagtaattgatatagccgtgtctgatttatgtgtgcatatgtatgtttctccaaaaactggtaaaactaaatgattactgattcatcatcgtcctccatattcctttccttagaaaaaaaacgaacgcattcaaccatgtcctaaacagactttccttctctttagttttgctttgcaccagctgagagtagcaaagccctctcagcctctcagtcacagagctccctgagatagactcaggtcctggagcatctgctgccacacataggacacacccacttcactatcgcagactcggccccgtggatgttgagagcagaggagcaactgcaaggatcagtattgtgggtcattcgagtattcattgtaaaagtgcaagtgattgccatttaaccccatggttctaatgtctgctgaactgccagacagagcatatcccaaattatcattagattgtgtcattggcgtccaatgctgatgaacaaggcagcaaaggcacggaccaagaaagaccagtcatctttagtccatatggtaggtgagtctcaaactggtaaactcctgtctgagtcatacacttagcaaaagcactgcgtgctaccatggtcccaaaaggtgatgacatagcctaggtacagaggcggtactgtctgctgtgtgtaagtacacttattgatgttcgcagagtgacaaaaatgtgtccctgctgtgacatgacataggcctatactttttgagcaaatgtattgcctttccttcactttagatagaaaggtctgaatcttccaccttgcatttaaatctcattgttacttgggctaaggaaaaatgagacttcgttgttataaaggacattggagctcccctgagtctgtgttgaccagttcttctgagagaacgaatgggtgcctttcattgcctccaacccagtttacattactaatcattttggggtaaatcaatgtcagagttgcctggatatttgagtattttccttaatttgaagaagaaaaatagtgtgtagaattagcccaaaggtacggatgtgggccatttatcagtatgggagatgatgtcattaacccagagaggccgcaacacctttggaaataagaagttaagtgctggccctttgtgtaatgtttgtggtactaaggctcctacctgcctttcactttccttgtcttcggcttatttctgcttagtcaataagtcgtcatagccctgcaatggttctaacacccaaaggagaaaaacatcaaacaagaccagagtcgccctgaggggatagtgatcacctggctcttgtgtagcaagaaagaaatgtggagggctctaactactgcaggtgccttcaagtatgctgcccctgtcaggaatgatcataaacgttcttaaagtgaaacaagactgtttccttacatgtatgcttcccactatcagcttctcttccagaggtgagattgtgccattctccaaatgctgtgagctaattagcaatagtctaccaatcacattttagttccatgaactgatgggctaaaggagggccctcctttcacctatgtgtacatagcacccacccacccctaggaggcgccaagcagatgtgggggagccctagccaaagctcttgaaactcctgtaaccaccaatactcaaaagcagccacttttcatggagaaaatcatgttgaagaacgtaagtcaccataagtaatgagatacgtagacacccgaataagaaggttcgcctcctgcaggcttttgtgacttgatgcatcccaaagcctttgacaggaagcatcggcaggtgcgtgcattgagactcccaccaatgccaagtgacaggaatgcatcggcaggtgcgtgcattgagactcccaccaatgccaagtgacaggaatgcatcggcaggtgcgtgcattgagactcccaccaatgccaagtgacaggaatgcatgggcaggtgcgtgcattgagactcccaccaatgccaagtgacaggaatgcatgggcaggtgcgtgcattgagactcccaccaatgccgagaagttgcaaaagcctgggccacagggtgagttactgtgtctgcatggaatcgggcactctcggattgctgggaagcgatgaggaggcgctgttagcctggagctggtctcctttagctcattcactcacggccttttaggcttctggaactctggtaaaagaaagccagatgctaacatttttctgctttcagtttactaatgactgttagatcagctcttcccatcccttcttctctgtctggtgccattttcaggaggtgggagagggtgtgcccatgtacacctgtctccttaacacaggtccacgaatacttagcttcctgggttgtgtgtcttctgagaaccatggtacagcgtcagtcaccatagtttctgtgctcagtggaaaattttgatttcattcatatttttattctctttacctatgataaatgtcataaactgtaaaactctccttaatgtgaaactttttttggttttttgttttgtttgtttgggttttttttgttttttgttttttgttttttgttttttgtttttttttagtgttagctgcaaagctacaaagctctggaatggttacattatgattctggaacgttcgctcaaagcttaattagcataagtgtggaccacactccagcttaattcccctgtgcacacagttctcatcactcctgtgcccaagtcccagtcatttcccttcatggcctgtagctgtcagagaaaggaatggtggttaatttggaggtttgtttctcttttccagctttccctggggactagaataagtgacagaacctcatttgttttctaaagatagttcggtgcgtgagcatctgtcagaagtggaatggtgtgccattagccaattagaatcactctgtactgtcactgtgtttttgctgattttttatatgggaatataattactcgttcttgatctttggaagtaattgttattatgaggatcattttactttggaaacactttcataataaagataaacattaagagtacagcatgagtgtcctttattgtaagcatcgaccagctgaattgggaacacatccaacatctctgggtgggactgtgtcagagctcagccatccggttatttcttaatgattctccaaggcgttgtgaccattgagaaatactgttatatcgtcttgtgatatgctaaagtgtctccttgaaatttagggtgcaaagccttcagtgttaaatctcacggtaacaccccattctggaaacagggtttctagagaaagcaacctaaatggatcagaggatactgatttttcccaaatcgtgaaggagctatcaatagctaatctctaaagcacaatgggaaacagcccgtctctgtgcatgcgcctcagaacagcttgcatcagcttgggatccgggctctgcatttctgggccttttttcctttttttttttttttttttttgcatctgtgcttacatcatgtaggatctc

SEQ ID NO: 26734 - DNA, 1164 bp, Mus musculus
atcttctttgtttttcctctagtgtacgacagttcgcctcatcttgagtgcctagcagaatttcaggagaaagtcaggaagaccaacaatttttcagcttttcttgccaatattcggaaggcttttatagctaaggttcataattgatataggtttgttctttgttactgtatatatccagaggaattctcatctcttgtccctgtcatttttctctctttctgtgtggtattaaagaaactagaatatatcatcccaaaccatgcctctttgaggtaacatttgtgagctgaaaacagttaagcagcagcagagttagaaaacctttgccttcccccagtctacctaaacatgggacctagatgatagaggtatctagctctgtacccacaaagaaagatagaagttagtcgcttaccacagcagacgtggcaccagaggaattgacaagccttgcttcattaatttattcctgtaaatatattcttcacaattccccatctgtggaagtcaaaaggcaaatctgtctgtcttatcatgttgtaaaatcctactgttctctgttgaagatgctgtgtaaacctgactaggccactgtttggagttccttctgttggggttctcctgtattgtaggctctgcttgtgttaataaacttgcttgttgtctcccagtctttgtaactctctcttcagtatgactttatgaggattgaggagaattagtttgcgctctcacagtgaggtgctgagtcctacatggcctctgtggaagggaaggcgtggcccatttcctgtccctggagcagaaccagcagggtgtgggcctccacgagtgttgacggttgccaggcttgaggcttgtttgtataatgatgtacatcatttactttatgttcctccttctggaaatattctccttgccaaggttattggggaatgtcctctctgccaatgttaatgactccatgataatcagagacagagtcctggaggtggcgtgtgtctaatgtccttagcaaaatggtaaatgttatgactttcaggacagccctcaaggctgtgggaaagaactctaaaaacgtgagttcaaaaatatataaacaggatttctcaactatgtaaaatataaggatgcaatatgaattatatgagggattcatgg

SEQ ID NO: 26735 - DNA, 1119 bp, Mus musculus
acttttgcgttgctcaggactgttctggaagatgagtgactgtctcatctcaagtgccaataaccttctttctttcccaaagccttgagaagtgtggcttaattcacaatgctccgtagtgcttacagacaggctgattgcagggtgggagttgcttaatgaaaaactaagcagtgtatgcaagaactccccaaagggagaccaaggctggtgactgactagtagttagatggaaaaggagaaaatatgatataaaagacgatggctttgtctcctcatcccattgcttggcaaagaaaggctacatcccattctgctggcatttatcatggggaagcctatctattactcagacaaatatttaggattttgaagttgagctgaccttcagctgaattctgtgaggatgctgggcaaggtccctaggatatctgttaacagatcccttgcagtaggatctgttaacaattgccatacgaacaaatgttctggatctggccggaggcttttggagggttacaaggtaagacctatctctgctgacagcctgctggggaacatctcattagcctactctctggtccctgctctgcatgagagtctgaggagtctccatggccatggttgggcactagtttaggcttatcttcccagagttttaacatagtcccgaacaggtgaccatgaccactctgccacttacttgatgatgtcccctcccccaccccctttttttgcttgagagagaatctcactatgtagcctaggttggccttctgagtgctggactcatagatgtgcgccatcacttccaacactcctcctgttctctgtccaccacactgtcagaggttccccttgatggaggccttatcactctgccctaatgcatgctaggatctgttgagagtcctaactgggcagttatttttctctttgtggctgtggggaggttggttagtgccgtggaggcttctattaagtaagaatatatccggggctggagagatgactcagtggtgaagagcactgactgctcttccaaaggtcctgaattcaattccctgcaaatctgatgtcctcttctgatgtgtctgaagacagctacaatgtactcat

SEQ ID NO: 26736 - DNA, 2201 bp, Mus musculus
gaagaaattcagaaaaagatgataaatataacaaaaacaaagtgaagaaaaggggcaaatccaagagtaggagcaagagcaaggagagatccaagagtaaggagcgagactcgaagcacagcagacacgaagacaagagggtgaggtcaagaagtaaagaaagggatcatgagactactaaagaaaaagaaaaaccactggatcctaaagggaaagatcaggaaaggagtagaagcaaagagaactccaaacaggtagaatcaaaaagtaatgaacatgatcatagcaaaagtaaagaaaaggatagacgtgcacagtccaggagtagagaacgggatctgactaaaagtaaacacagttacaacagtagaacaagggagcggagcagaagtagggacaggagcagaagagtgcggtccagaagccacgacagagatcgcagcagaagcaaggagtaccatagatacagagaacaggagtataggagaagaggaaggtcacgaagccgggatcgaagaacgccaggacgatcgagaagtaaagataggaggagaagaaggagggattcccggagctcagagagagaagaaagtcaaagtagaaacaaagataaatatagaagccaagaaagtaagagttcacacagaaaagaaaattctgagggtgagaaaagaacgtactctaaaagtcgtgatcataatagctcaagtaataacagggaaaaaaaggctgatagagagcaaagtccagtgtcaaaaacaaagcaaagcagtcaggacaatgaagtgaagtcctccacattaaaaaatcaagaggacgaaaagaccagatccccggtggaaaaagaaaaccaaaaatcaaagggtcaagaaaatgaccatgtacatgacaaaaataaaaaatgtgatcatgaatcaagccctggaacagatgaagacaaaagtggatgagtgagttgtgtactcttaattccttcctgtctcaaattttcagtttttaagacttactgttgaacctcccttttttattgttttcattgttttggagttgtttatgtttgtctccccccaccccctttttttttttaaatgtggacttcattgagttgatcttttgataatctgctacctggataatttgtactgctaaagttttaataaacttgaaatgaaaagaaaaacaacactttggtgtaatactgtgtgctatgttaaattcttatgtattcatttttgtgttgcaaccgtcaatagcagcctactttgcttaatcagccatttggaaacaagcttaactgttggttgcagtacattgttgtataggcttgtgtttcttttgatacaaatccctttagaaaccacttgaagttttgtatagctttttgggctttgatttttcatttataattcatgggcttagagcagtttccttaactaacagaagcaggatccttatgtgatcttaaaccttcatttgattttacagttatttgtactttagttactttttttgtgctttataccttatactttacaattccagctgtagcttgtttcttaatattgtccacgttgctctgcgagctataaaaatgaggtgagtgctgttttcagttcatgtgctgattgagcttgagttgctgttatacagcatttgacagaaattagaccttggaagaccagactgtaattttcaattctttgttgcttttggtgtgaagagctgaaattgttgctttttaagaacatgttattacctttttctacaatttaaaaaatgcatttctcattaaaacatactacttgtgtagatccttcttaagctagacagattctaaaaagcgttagtattggaaataagatttccctattttggctattagcctatatcacattgagtggtaattctgcatgatttgggtttgttttttgtttttttttttttaaacttggactaacttctctgattctcatagctgtgaatatgaaatgtcaagaagatgcatctttctatatatgtaccatgataggctgtgtagcatgtttgtgactctggtttctttctattcagatggctttagaccagtttactgttaacattattttaacttggcatgtataacattgccatataaagtagaatagaaagttgcaaaatatgataccgtgcagagttaaacactaaacatatccaaagtccat

SEQ ID NO: 26737 - DNA, 2121 bp, Mus musculus
attactttttttttcttatctagagcttttacttgttagcatatacattataaacaagaactttccagttctttaggaaagtaaacatgggagaaaattggtaatgtctgtaatatcctccaagagagcagctcagagctgagcatttacgggctcccccaactcctgctttgttagtttgttatttttttcaatatgacagataatggggtaaatagttgagaaaagacaatctagatttttttttcagaataaataattaacagcattaattgtaccccaagattcacagttatcaattgcacaaagcccaaattcttgttctagtagatttttagttatttgtacatcatattcccaaaactatttcccatttcaattttcccatcacattggctttctaagaatatctaaatttacagctaatgaatagtttttaataccccttgaaagtactttcacttgtttttattgcttgactccaaagctgaggaaattatttcagtatgtaagactttgatgattattgtatgaattattgttctggataagttgtttaccacagaaattgacactacaaagagatcgttagagaaagtaaagctactgtattgtactgcattgtagctgatacagaatggttacttgctgtaaagacaagactgtctgggaacagctatccaacgtttaaagtgctctttcacttaaaagttatgctaatctgctagctttctttgccccagtgtgatccagctgctcactggctttgcttgcatccagtggtaggtgtcaaaccaagaacctttatgttctggataggcacatgctggggttctggtattttgggtaatagtattaactactgctcctactttattttctagtgactacttagagcagttagtataattgatcctttgttccatgtgttaatagctttcatcatggaaccttttacagcaaatttctgtaaatttcccagaaaggacttagacttaactgattggtataaaaaactaaatgagcatttttcattcttttgtttctatttactgtaattattccctgtagggtttatgcatttacagttgacaaactctctgtgtagtttgagaaactttaattgtaagaatatatttttaaactaattgtttttaaaaataaagtatcccaaggaaactgagtgttgattgccattactgcctgcagtgggcttctcaatgtcttgaagggattcacctgctgtgtgacaaataaacaacaaatcacattcatttaaaaaaaaaaaaaaggccgcacaggccaaagaggaagaagtgttaaggttttactcatttgctctccctgactcacccctagtactggaggatggaagggcattcattggtttgtatttctgtctggttttggttttcttttatagacaattccatgttactaaaagcacattctctgtatttctgccccaccctctttgtgtgtttatagtatttttgaaagattgacacataaattgggtatttctatggaatcttgaggtgtggctgctctctgtggaaggggaaagcataattaggttaatgcacttcttttcctagctccacagtcactgtgatgtatatttttttaatggaatttagaaaacttgttttctcaattgtaaaattagtttaaagatgctgcttctcttatcattagtctagtaaatgttgaactgttttctgcagatggcattttacaaaatttaaacttcaaaactgtattaacttttatagttaaacattgtattaaataaagtatactacaataaacaatttgggattgtgctttttatttgtcttattaaaaattaggtaaccaataaaatttttgttatataatagaaatgtaaattcatttgtattttgagaaaaataggtagttgacaaaaaatggaccaaagtatttactgactgtggtagcttacactttaaatctagtactatggtgacaaaagctagccaggactgagtagtgagagcctaggaatcccagggttggtaaaatgctgccaagcctggtgattggagctgaatccctgggtgggacccgcatgatgcagagagaactggtcctttgagc

SEQ ID NO: 26738 - DNA, 1196 bp, Mus musculus
gagggcgggactcctcctccgaggattgtgggaggctgcggtaacggcgcgtgcgtggaaagcagagccgggccactgcgtccgcggccacgcccacctgtccgcaagggctgccgggaaagcccccatctttaagcgcgtttggctggcccgccggcgctcggaagtccaggcgcttctgtcgttgttcttgaagctgtggtgaccgtgggatccgaatctttgaggtgagcttcttggaaactgaggagaaggtacgaagggctgtgctatgcgcaggcctcaccttcctctccgcgccgccgcgtgggccgcgcggcccgtggccgtgtgctggaccgcggcccgagggggcgcgggcctcggcgaggccacggagcgggccccggccagagatgcgggcgcctggggctttccacgtggcagggatcccggcgggccggtgtgggaggatgcggctctcgcggggcctttaggcagaggctcgccgcatcctcacggcgtcctttcggtttgttccttgcacccctttcctgactggccagaggcggatgtttcggaccatttaagtctttagggtggtcggtgcgggttaaacgcgacagggttctgtggggactgactggaggccgaagaagtgggggccgctattgggttcccagcgtcgctatctttttttttttttttttttccttcaaagaactgccattgccattctgtcttcagtgtgaaacagtccctaaattgggtaggccgcagaagtcttgcaggggctaactaggtcgttattgacctgtgtctctgtagtaatgagaagtgagattgttggtagtgggagacaaaccagcgcctgtaacagtaaattctgaagtgggacgtgtacttcgtagatttcccattacaggaccagtgtatcgccagcagtctccagcattttgagcaatgtctcaagaaatataccaacagtaactcataactatattcagctgctgcagataaactcttcaagagctggtatacttccgtacaatatggtagggtggtttagtaaggcgctgaaagccagtaagacagaagatccggtttgtgatttctagcaaaccagtatcacagtccctctttattctaggattgttgtcagaccgtgaaacaggaaagtggctatagagttaaccagtgtagtagtgttttaggca

SEQ ID NO: 26739 - DNA, 1145 bp, Mus musculus
ctgtctaagtgatattcttgaattagtaccgtcttccttgcttgtattgtttcacaagtgagaggttggttgaaagataaatttagagatcaaaggaaagactacttaaggaaagcttttctccttgaagggaagatgcatttttttttttaaggaagctattaccaatacttgtaatcgttattactaaaacagtgctaacagtgaatttaacaaaattatttgttgtaataggaccaatgaaaagaggaagagatggaagagacagagaagaacccgcatcaaagcataagaaaagagaaaatggtgctagagacaagtagtttatttagtaagcagtgtttttattccttagttagattttaagctgctttttgtcttcagaagcttttaaaaagaaaagcgaattaggtccacttcgatgtccacctgtataaaaggaaaaaatttttgttttacttgtcttctttttgttgttatccaaatgaaagttttttaaaatgtatagttctgtttgtgtttggatgattaaaatatgagaaggaagattcttcctcttaattgcctttgtaatatgagaatgtattagtacagacttgtaaaatatatactgtataaaaatagccaatagttctttcttctttttatttctcttaaaacgtttcacaaagaacttcaactaaaatattgactcttgcgagtataagcccttcttcccacagctaatttgtctaatctctcaggctgactttatatttacccatttaccttggtaagagtggaaatgaccattacaaaagcttttgaatactggatgtacacagactacaattggaaaacttacagatttctttttatgaaagttgtataatgctggtagatcatatcgaagctctgttaaaaaaaaaagccaaacattcatatttaagatattaaatactgatatgcataacatctgatatttctcactttggacatatccttaaatactgatttgtcttaattggatgtggtgtttctgatgttttgatcatttataccaaaatttgaagtcatggagaatatagttagaaggattaacaagtagggaaaaaaataagttctatgaaaataataggatgtgccaggcagtggtggcgcacgcc

SEQ ID NO: 26740 - DNA, 1099 bp, Mus musculus
gtattcttttcatttatttatttatttttgttagcatttttacatacacttttcaatctagctttttaaactaatttttatctaataataaagaaaaagtaatgtgtattatataggttttttttgtttgtttgtttgttttttgttttgttttttgagacagggtttctctgtgtagccctggttgtcctggaactcactttgtagaataggctggccttgaactcagaaatccgactgcctctgtctccaaagtgctgggattaaagacgtgcgccactactgcctgactctgtttggcttttaaagcatttgtgaatagtaatgtatagaaaaacataagatagaaattgatgcctgtaaattatgttttaaaccataatttatgagtctgccatataaacttgattttttttaaaattatttttacagtttaaaacagagtggaaaattccctggcaatccctggcctccgtataagaaaagaacatcactccatcccagctataaaggtcttatgagacttctgcactgtaaaactttacacatcgtgctcttcactctgctttacaaggtaaggcaggcatttgatgagagtgacttggattacaacgtgtttgcatgattttcaaatcaaagagctaaatgactatatgaaggcaccacttataaagcaaagtatgcttataaattttttaatgtgtgaagataaattataattacatgtctttggattccaaattgaaaaattaggaagcagttgtatttctttgtggagaaatgtttgttcttcagcttcagacaaatacttcagactggagtatttgttatggcttctgtaaagtgaggcgtgctgtggctgtaggagctctgtcaagcaagaataaggaagcaagtagccagtcagtcctgctgcttgacagaagtacacgtcgctgtgtgaacttactttatagtggttttctctgccttttacctcttaggaatttgccaaagaaggatttgaatgtgggatctttagacacttgaaacatcctttattctcctgttacctagaatctgtttcagtttgggagtgttctctcacaaaaccaactta

SEQ ID NO: 26741 - DNA, 1196 bp, Mus musculus
aaagaaactttagggaatctgcaaacattaaggcctttttttttttttttttaaacttcatatgaaatgacttatgccactgtcaggaggctgtttatacacacttttacttgactctttgcaaacatttttcatatggttcaaatttgttgtatttgttgcctgtaaagtatttctgagtcagtgttccctaggccaggcgactacttaggatgagttctcagcagtggaaggtgtgtgtgtgtgtgtgtgtgtgtgtgtgtgtgtgtgtgtgtgtcttttaaagacataactagaataatttaattttgttaataaaatttgaataattttactcaatttaattgtgattccagagttaatctgaatttagaagaaatgaaattcgtgtgtttgagatataattcaattacaattttactacttaaagaatattatttccagtgaggtttcttttgtaatctctcaataccctatgtaaaattaaaattttaatttttcccaggatacatgtgatgcagaaaagtgttacgaagtgctgttgagctttgttataagtgagctgtctaaagggaagttatattatgaagaaggcgctcaggagtgtgcgatggtacgtctgttaactcagatcttattgccacgaggagtgaacatttgaaaagctgcatgtgctgtagcttgacgtcttcacttttctgttttaactttaggtcagtcctattgcttggtctcctgagtccatggaaagatacatacaggatttctgcttgcctttcctcagggtcagcagccttcttcagcaccacctctttggggaagacttacccagttgccaggtataatttggccttggtgttctagtgggcgaatttccaaaccatactgatgcataggagactccttctgtctctttctatgcagactgtgcaacgaggatattctggttttcctcagaggactagatgtcctgaatattaactattttatgttactggcaccccccaccccctttattttttctgataacattgctagtttggaatggttgagcagttttagatcaggttagtgtaaattcaggccaaatgcttgagtaagaatggtatttattctgttgggtacttttatcactggcgtcacatgcttttaatactcgtttaaaaggtgcattgctcagaagggtggctgttaga

SEQ ID NO: 26742 - DNA, 1104 bp, Mus musculus
ctgtttggctctcatgattaatgctttgtgctattcttgtgttgcaggcgaggcaagcctctctacatctgtgaggagcggtacagagttctcgagcagcagtgggtttcccacacgtttgaccacatcaataaaagatggggtccgcactacaatgggctgtgacacacacctcagcattgcatatattatcattttcactgagattgattttcatcaacaataagctttaatttaatttggggggattgatgtctttgctgagggataaaaagaaaacatacattatgcagccttcccaaaattaggtgcttggtaaccacagtaatggtataatattttttctcaagtatccggacaacaaataatttaaatcattctttagtggtcactttttaagtgcacaataataaaagcacaactgtccacagaaatcattgagaaatgattgtccctataacgccctgttggttgttccccgacagagaggatgtggtttatttgaggtttccctgctccttttgtgttctcatttgcatctgctaaacataatgcatcttttcctttgtcacccttgtgttgatttgagattttcgctgtatgtaattagaaacaaatgtaaaacatgatttatgtgaaatattgtatagtaaaaaattggtctaatagtagaactttacatttttttcttattgtgaggaatctgttaaagtttaaggctttgctgaaaacttaattcattctcaggaatttcataaatgctttccgcgggtaaatagttgaactagctgtaagatacagtgcagtgcagtgcagcgcacagagggagggcaaggcgtgtgtgtggttggggaggtccttagaaataagtgtgtgtgggctgagggtggagctcagtggtagaaagcttacctggctaacatttacagaaccccagtttcatcttaagcaccgcacatacacaaaatcaatttgccatttcaactaaatgaaaataagagttgttagtgacgagcatatgttacaataaactcaaaagggttaagaacatatacatggcagagttttgattctgtgcatgcccacctttccttaccaaccaag

SEQ ID NO: 26743 - DNA, 1229 bp, Mus musculus
agtacttgaacagtcacactggttaggccggagaactgaaaaaaaaacatctgtacatattgtcgtcttactgccccagcgcttgtttagtgtgtaacctaggcagcctccctctttccttggcaccatctctgctggcacccacttggatccctaatacacatgaggtgggactggggaaaacagaatgttcctaagctttgcctgcttggtttggccatgagaagtggttctcttcgtctgattccttcagggtctctccctatttcttgctgctttgtccttcactggtcctctgtgagattcattccttttaaatggcagtgaatcttgctttgcctcggagaccccagtgggcacggttccacctcttctgccaagtctgtttatccagccctctgctgatacagcctcgaaagggttggtggctcaagactgttagcctggcagagccaggggagggagacgtttgctccaggaagacctggggcaggtagaccagaccgcccaccactgcttctcgctgcctcttcacctgcccactaccccccgggccagtttgcctcttcgggattgtattttccaagccttgtactgtgtttgtctgatgttaatgtgtgttgctccttgaatcgagtttggaggaagaattgaattgtatgtgtgatggcatgttggtaatgccagacttaatgtcacatgggccctcttggcctagctaattgaatgctgaaagtggcaccgcgtgacagccacagtgctgactcctgaattctcaatagtgttttgactcaagggctggcagcccaggggatggagcctgttgggagcaaagacttccctctgttgatcctccccacgtaacccacccaggccagggcagcttctgcctgtgtttggagttctacattaatgaactacacttagtatagtccttacttgtattctcaaaagggtcctacctagcctgtctttctttccaaaaccataccatatccttcagccccagagcctggctgccatgtccatcctctttgggagaagtacgaatgtgtgtgtctaaattaaaagaaaaaaatatttaaacattttttaacaaaataaaatttatttttgtattaaaaagaaagaaagaaagaaagaaagaaagaaagaaagaaagaaagaaagaaagaaagaaagaaaggaaggaaggaaggaaggaaggaaggaaggaagaaagaaagaaa

SEQ ID NO: 26744 - DNA, 1259 bp, Mus musculus
ttttcaagagacaactggaccagcagcaatgtatctcagaggttcagtagcattgaaagtactgggtttgatccttagcggtaaagaaagtggggaggtggtagacagaaatgtggtctaaagttattcaaaactctgttaaatccaaaaacaggaaaatatcctacttgtcaatatatatcccagagacaggcaactaagtccccactcctcgctgtcaaacaagagtaagttatgagggtactgaaagggggctctggcccagagtccaagctttgtatttaaaatggaatgtttaggaaagacgttctctctttgccccatctactgcgaggatgaagaccattctcagcaatcagactgtggacattccagagaatgtcgacatcactctgaaggggcgcacagtcattgtgaagggccccagggggactctgcggagggacttcaatcacatcaacgtggagctgagtcttcttgggaagaagaagaaaaggctccgggttgacaaatggtggggtaacagaaaggaactggtcaccgtcaggaccatctgcagtcatgttcagaacatgatcaagggtgtcacgctgggcttccgatacaagatgcggtctgtgtacgctcacttccccatcaacgtcgtcatccaggagaatggctctttggttgaaatccgaaatttcttgggtgaaaaatacatccgcagggttcggatgaggacaggtgtggcttgttttgtctctcaagcccagaaggatgagttaatccttgaaggaaatgacattgaacttgtttcaaattcagctgccctgattcagcaagccacaacagttaaaaacaaggatatcaggaagtttttggacggcatctatgtgtctgagaagggaactgtgcagcaggctgacgagtgaggaggcctcagattttacatgtgtgtttgttttacagttcctggccccagaaacgagatcctgaccacaagaacaatttgggctcttttgggagaataagagacttatatattgaaaaaataaataaataaaaaaataaaatggaatgtttaggctaaataaatatttaccacaagatgcttcaggcatgatggagtttctctctagtctcaggagtgacgggaaatgacagacagataccattgcatgattgtagtccaatgtaaacatcagcagaggtgaagtctcttacgggtcttgtgggaggcttccctcatccatgtgaagaaactgaggtggctaact

SEQ ID NO: 26745 - DNA, 1290 bp, Mus musculus
tgacgtctcctgcttccaaggtccccaccactgttgaggacagagtcagcgactgcaccccggccgtcgagaagcctgtgtctgatgcagatgcttcagagccttcttaactgggaaccaatgttcagaaccgacgtggtctgtttagttaaccacggggtcaggtctggaatcgcaaactaccattgatttcatactagtgtgtaccgtatctgtaggtgtcctgtacataattctaaggggaaactacgcaagaggctgagggcttgcctcccaccacgtcggggggttacagccgaggagggcaatctgagaatgtgcttgtattttaaacaaccaaaaaaagttgtcatgggtggcttgctgccaggcatctactgccgttctgggaggttcatctttggaagagagatggcggggtacccactgggttccctgtaccactgctatgccttgtgtaaggaaatgaaatattttatgcctagtgcccacatgcaacatttcttgtactttgtaagtcgtttgcaagaacacagaccacctcactaaactgtacaaggaaacaagaatttactgttggtctctgtgagtcgcatctctattacggtttacacaaaactcccagttgcagatgttttgttccggtccatggcacactattaattgaacatctttttattctgcctgtacacagatcttgttttgaactcagaattattcagacaccattttgtagctgctgctgttgctttagatgcctgtggtaagatggcatttaaagagaaagagaggagctgcgctctgtagctacttaacggtatcgcggcaataaactccagtcgctttacggtctccttgtgttctaagtggcgagcgtgtacttcatgtgtgcctcacatctctcaggtcagcctgtggtgggtgtgcttttctaagtttccaagcgatgctccatcgagtgggactgatgtcctgggtgacggaaaagcatctgacagccccctttggaagtaaggtggaagcagtttgttgactgttgacctggtactagcataaagatacccacaccgcagtggtggccattgctgactctgccagaaacccagcccctctcccaggatgcatttatagagacacaggcctaaagtcagtgatgtagaaatctccacagtcccagcactgggcatccctgaagcagtctggcagctcatgagccaaattggcaagttccacactcagtgagagacctgcaaaaacaggtggttttttctctctctctctctctctctc

SEQ ID NO: 26746 - DNA, 1162 bp, Mus musculus
ctgccacagagagggggctcccagctcagttacagccttatttctctatgtccttcggcagcgtttccaataaggacttagctgcctagtgtggtgtgcaccaacagtagtggtaacagccttatggtttgtggggcttaggggccttcccttgtactggcaatttcctctaagcactttatggctcctggaagttattttcacactcatacagagtgcctgcctttatttaaaccccttcagtctgtcttcactggatttccacaagcttttacaacccagtaagatacccgtggtttgaataggtatgaccccccccccccaatcatgtgtttaaatacttggcccatagggagtgccactattaggaggtatggccttttggagaaagtgtgtcactatgagtgagggctttgaggtctcctatgctcaagttactcccagagtggtacacagtgtcctgctgccttagatcaagatgtagaactcttgcctcctctgggtaccatgcctgcctgcatgctgccatgcttcctgccattgttaaacctactaagcctctgaaactgtaagccagccccagtgaagtgtcttcctttatgagagttgtcatgatcatgtctcttctcagcaatgaaacccctaagacagcactaaagggttatcatgatataaagaagtgctctcccagtgagccagtgacctctttgaaggcacaacactgttctaggttattcttggatggctaaggggatactagaatagaaatgctggcaaggtcaactattgtttgatcaaaagagcagtgctgggtaagaaagaaagcctggatgccaggccccatcccattagccccctccccagcctcattttccacagtcatcttccataaggcgccgatccacctggcctcctgatcctagggcgctgctgccaccctgggattgctgtgcatctctgatgcagggatcacactgtgaaccctgagattgtgttctttattggaaaaacctgttgctagttatggtgtggcttagctttagcacacacctttaagccctctagctgcaatacccttagtatacacctgtaatcccaatggagataaaaatttgtagaaggaaacagccacgtttgaaagtgatgttgtgcccttctcgtg

SEQ ID NO: 26747 - DNA, 1631 bp, Mus musculus
caggaataccatgttacagtagaacaaggggactctgtaaataacgtttataatacttaaatatatttgattgttaccagagagttgtaatatgaagggtagtttttcattatttaagaacacatggaaaaatgaggagacatttgtaacccgggagctacagtgcctggtacagcgtcagcactcggcagctgatctacagaaaccaaagcaagaactgagtgacagcagccgctgtgtttataacagaatgtgagagttagggtctttggacagttggagactttgtcatttgcctattctgacttttaccaagttgtacctcgagatcacgtgtcagtggtccgccgccctacccccgaccccttaaccggttatgttaaaggcaagctgtcgtttctggacactttacacctttaacacaaagagctgcctatttcaaatcagttgaagttactaaatgatagtatttccagggctttcagtgggttagattaacaggcgtttttcttttgttttcaggcctggttcattaaaacagaagacagtgtgtaaccaaaagcaggccagttgtatgcaggataatgatgaattcccttctggctctattgtaaactactgtacagatgtcggattacaattactgagtttcagcagcttattcttgtacaaatgtttaaaaatacggcttttctaattggatattgtattttttttaagtcttcttgaaggcgctttaattgctgctaaatgatattgcttttttgctataaaaaattgaatgaccttgaaggcacaagttgactgtacatcatagagagatattaaaagcaggcactcgttaacaatcaaggcatgtgcagtgatccatgctgggcatattgagttcttcaaatcagttttttaggttctggagctgtggaacacatagaaactagatttataaattgttcatggttattctacatttctagaaagttcttagcatcaaggtgggatgatagtcccatagaatgtttctcgtggtttgtacagatttgttaaaatgtgaacattttctaactaccttgtgtggtagaaaccaatatttttttggggatgctgtatttcattcttgaaaggatttttttttctttattgtcaaattcataatgccgagacttacatgtaagttgtccatggtgcagacaacaggctatccctgccagccgcccctaacatgtacagttacactgtggctcttacctggtgttgcaagccatttcgtttgtttgttttcattgtacatagacacactgtctgtttaagatgctgctggaattatagagaatgtagccaaacagtaataaacaatgacagtaaaaatgtaaagactgtgaaaattacactcaaagaacccttaagattgagggtaataacatagctgctttacttaaaaggcaggtaaattccttatgcatactcaggacaagcaggaagtgtttcaggttgttaaagttaaaaacaaagtttagaaaaaatattaataagagtatcggagataacgtacccatgtcttctaagtttttccaaatgtagatttaaatagcctactaatacttgggctcagtgaaccagtataacctttgtga

SEQ ID NO: 26748 - DNA, 1194 bp, Mus musculus
gggattctgccactataatacagcaggtcagcagaataaatactaaatgttatacttgaaatttgctagtcattgtaattcttacatgtatttgcaactgtttagacagggttttgctttgtttacacaaagtggagaaacttgtagagaaacaaacctgccttgttttgcattcatacccagttaaaagcttcagtgtatatatctgtgcatttcaagagagaataaaacacacatgccacatgtgccacatcccctcacacaaatttctctcttagaaggaagtgaagaatgtacagtgagggaagaggaggacatcagtaacctagcaacgaggttggaggggaggggtctaagctgattaaactcacataggaaagaaagtgttcccctcagtcaaggcggatgtatggattggaaatgaaaatagaaagatgatgtgtataggtagaaaagaaagtagacatggtttccagagctctgtgtctcctttttcctttcccatctacacagccacacttgagtatgacagtcatgacaaattcagacctactatgtattggtaataactgactgttggctcgtatctacataatatggataaagttagagaaaattggtagatttctttctgtctgtatctctctctctctctgtatgtgtgtgtgtgtgtgtgtgtgtgtgagagagagagagagagagagggatgagggagaggaagagggaaagagaagatggacggacacaagagttagagggcaagaaactggagtagacatgatataactcatgaattgggatattatgttgtcagaagagactatgagtaaggcacatttttgtgctgaaaatatgttgagacaaattgttcagtcaggtggtgtggctatgggacttattcatgaattttaaaatattggcaattagtattttgtgggtcatataatcaggcagtatcaatctgcagtttatatgacttgatctttatgatatatatcagaatataaaagtatgttttagttgtggtacatattgttaaattccctgttgctgcattgttgggcttgaatagagaagggatacgtccatttattttgtgtttgatcacctggcctaccactaataaaatctgttcttactaatgttcatcctaccctgtaactgcctatagagaccaattcatttccagaaata

SEQ ID NO: 26749 - DNA, 1211 bp, Mus musculus
aaaggggggtattttgtttttatgaggaaagaaagaatgagacatgactgtgattcttaggatgatggcagatgacgccttacattgctggtgcgtgtgagactcagactgtgatcattatgaccgaggcacatgcataatgctctccttacattgcctgggaactttagtgatcttgttgcccagatatggcccagttcttttgcttttgaaatgatattaaatatatttttttaaaaatcaccaatataagtaaaatcctgaaacagcaggattttggtagcctgactaatcattctagacatttgtagcattgagaacatgttaccttgcttacttagctacctggattaaaaaatcatacttgattttcatataagtgaagattggtttatactttgtattatttttctttaaaatcattcctaattttcacctttaaaaatctttcacaggcttcaacaaataatgaaagttctaatcacagttttggaagcttaggatctctaagtgacaaagaatcagaggtaagtaatttcattttaaatgtggtgctgggaaagtaagaacttgcattgtcttctaaatgagcgtctcttcccccttcccaatcttggtaccaaaggttactattttaaagtttccttttagagtttttatgtagtggtttttatcttcctctggggtagtggtggtagggagtgggggtggccttaatgaagcacaatattgggataaaggaatatatttggcattagaatacagggttgtttgtttttttttttttaattttataacttaatttacacatgaataatgtagaggtgttatcaatgcaaaccagccattcatagttttataagatgaatgtgagttttgaagtatgctgcgtttcagcttttaaattattattttagtatttcccatcttagtttaatctttataagggtttgtgtactttcctagttataaaaatacatctttcttctttgtagaaattcttgtggaatcaagctgatggttttcattttgcatatttttttttaaaaaaatgtgataaattcctcttgcctagtacccatttactgacctcaccaagaaagtaggtggtatttacaagtggatatttgggtccacagtgtggttcattctgtgcatgatatactcgatggcgtcttctaaaaatggtgggcacaaatgtatttgggttt

SEQ ID NO: 26750 - DNA, 1183 bp, Mus musculus
agaaactgccaagttgttttctaactgttctttaccctcttagcagtgtacagggatatggtttctccatccctgtcaggatttggttactatctcttctaatacagcattttggttggtgtacaaagcaacaccaatagtgctctgttttacctttccctgttgaccagggatgctgtactttccccatacacctgcttaccattgatgtatgtcttctctgatggagtatctgctcaaatccttggttttaagtctggttgcttttaaatcttgagttagaaaggttcttgtatgtgatggatgggtaatagacctttgtatgataaataatttacagaggtttctcccattctttgggtattttatctgagaaacttgcatagttgtgtcacagaatgtatactttttgctgagaactgttgaggactgagtgtgttatgcccttcgcaggctcgggtgctgaatgcttggtcccagctggtggtgctgtttgggagatttgaggagatgaggtttacttagctggaggaatgaggtactaaagggtgagcctttgaaagagttaacacttcctctgcccctttccgtctctgctttcctttgtctcttcttcatgttccctctgtgatgctattgccaaatgcatgaaaccatgtgatgaaaccttcaggcaaaccaaataattcttctctttaaagtgttttccctggtcataaaatgaacccagaaagatgtttatagttttagcccctacattcaggtcttggattattttaaacacatatatgcatatgcgtgcacatacatactcacacgcacatgtgtacgcacattcagtgtatgtacctgtgcttatctagttgtttgtaaccagccataaatgtgtgagttggtttctctacacttagttctctgttgatctatacacaataccacacacttcagtgtagctagtgataccttttaaaactggaagtgtgcttttgccaactcagttcttgtttaagattattttgggtatcctgagtctctttatttcagtttgactttcagaaccagtgggtcacctaatagaaacaaaagcaaacaaacaaacaaaaaactaactggagttttagtagaagtcttaggtaaatgtttagaccagtgtaagtatttggagctttaggaagttgtctcg

SEQ ID NO: 26751 - DNA, 1212 bp, Mus musculus
agagggattaaaggtgtgtgctaaggatatgtctgtattccagctagatcacacagacctagaaggtcttcacatgtgatcccttgccagagcagccttgttgctggattaaaattcctctacatgtgtaagtaacccatgctgtctagagctctttgtgtagcctgggctagccttgaacttagggtcttcctgccttagcctccttagggttaggtttgtaagtatgtgctacaacacctggcttgtataggacttcagttctacagtagccaagtgttttgtggaccatcttttatgtatgtgtgcgtgttactgtgcatgcttgcttgtttgtgtgcgtactgaactgcggtcagaagtatcaatctataagatgttttgttaaatggagtgcacattttataaatttgtagtttcttaatctttttagagtgttcatttgtaaattttgtactatagtctcactatatgtaatatatatacatatgtgtatgtgtgcacatatacatgtgtatgtgtttgttgtttgcttctctctctcttcataggtgcaatggatgagcttcacagtctggacccaagaaggcaagaattattggaagcaagatttactggagttgctactgggagtactgggagtactgggagttgcagtgttggagcaaaagtgagtaaaattttaatctcatttaaagtctgtgcttcgtgttaagtggtctagaacatatttggtgttgagatggcttgaccaccagagttcaagccccaggactcatgtttgaagtagagaaccaagtcttacagattgtccattgaccaccataatatgtgcttcggcccccacaatacaaagcactaaaactacagagtatgttttgtgtaggagctatatacatgcttaatggcaaagtgttgctttttatgatttttatattgtgtagaagttagtgtttagaaacctgatttctttttatttgctctgcagaagatctctatataaatggagttttgtttggcaattcttgctattatttcttgactgaccaaaaggtccttgcctatgcctgtttatatggaaggaatataaacctgctttacctgtagcagtttctaagtgtgatgtcttacatggaatccttttctctgttttgaactgagttttgaacagagagagggggacctagtttcccaccaagtttgaatagattg

SEQ ID NO: 26752 - DNA, 1184 bp, Mus musculus
cagccctgataagagtctttcatcttccctctgaaatttcacaagccaggcctccatcttctgcactgttctaaacattatcttccaagctcctacacaacatcccacagagctcttaacaccaaatggatcttctagcccaaagttccaaagtccttccatagttctccccaaaacatggttgtgttttcacaggaataccccactcctggtaccaatttgtgttagggtttcattcctgcacaaacatgaccaagaagcaagttgggggaggaaagggtttattcagcttatacttccacattgctgttgatcaccaaaggaagtcaggactggaactcaggcagctcaggaagcaggagctgatgcagaggccatggaggaatgctgctgcttactggttcaactttctttctttctttctttctttctttctttctttctttctttctttctttctttctttctttctttttttttgggggggggggttcgagacagggcttctctgtataaccctggctgtcctggaactcactctgtagaccaggctggccttgaactcagaaatctgcctgcctctgcttcccaagtgctgggcttaaaggcgtgcaccaccacgccttgctttcttatagtacccaagactaccagcccagggatagctccacccacaaggggccttgccctgttgatcactaattgagaaaatgccttacagctggatctcatggaggcgtttcctcaactgaagctcctttttctgtgataactccagcttgtgtcaagttgacacacaaaaccagccagtacagttttattagattttttttttacctatattcatgaagtagatttgcaactttccttttatataataaatttctttgtcagattttgtgttatagtaacaattcctccataaaaatgaattgagaaatgattttgtgtttaccattatttctaggcgtctaagaacagtattatatttttctttacttttgatagtttattgatcaagccctctaggtctggacattttctggagacatttagaataatggtgttagtttctgttaatgtggttagacttctttgaagttttcatttttgtgtcagttttgacacacaaaatcatagttttagggatttatccctcaccccctttttaaaggaaaattcaa

SEQ ID NO: 26753 - DNA, 1181 bp, Mus musculus
ccacatatggtagaaaggactccatcttatgtaaaagctccctaggatgctgtcccaagagaccaagcattttgaaacatttccattaggtgctaacgtgaatataaaatgctagggaaccgaggacagttatctaggagtcaaagagacatcattgatgcagggataactaattcttaaagactactataaagttttaattagtaaggctgggagagaaaaacaaaaataaaaatactaaatataggagccaggtatggtggaacacacttgtaatatcagtgcatggcgggtagagcagaaagatcaggagttccaagccagtgctatagccagttagcaaattcaaggccagcttggtctccatgagacctgatctaaagacgtcaacaaaacataaagatatactatatactctataccaaactttacttaaggattagaagtaggatttgtaatgtaaaatcatacttttgagccaaaaattaccacagcttctttgtaaacaaaacaaaccaaaagaaaaaaaaaaaaaaacatatcaattctagtttttcaattcatcagttcttatgcggtcttattgactgtagtccgtttgtgtgtgtataaataccagtgcacttgactttgtttctgaggacatatttgcatgtttatgtgtatgtgggtgtgcacatatttgcagatgtgcctgcatgtgtgtgcatgtgcgtttggaggccagatgtcagccaatggtgttctcaagagccacctaccgtgtgttttcagatagggtttcactagggcctgcagcttactgatactgctagcctggttggctggtcagggatgctgctgtctctttcccagcactgggactaaaggcatacttaccatcatgcccagatacatacatgggtgggcatcagactcagactttcatgcttctgtagcaagcattttactgatagagccatctccctagcatatgtgttataaaagattccaggcaagtttcaaatgaaagcttttcttcatttgtaccctgtttagcttttaatacagctaaagatgtctgtcttattttctatctatttgctgagtggctatgtttatttagtgctgttttcatatgtaagcaagaacataaaggggcctctggtaggccccttctgtgcattgctggcccctggtgg

SEQ ID NO: 26754 - DNA, 2190 bp, Mus musculus
ctgtaatccagcactcggggagctgcagcaggaggattgctgcaaacttaaggccaacttgtactatgtagcaaagccttgctttaaagaaaacaaaacccttgatctcaaaggcagaggcaggacaatgaagaattccgtgtcagcttggcatgtaatgagttcagagccagcctggactgcattgagactctgcttaataaagcataggagaagagcaacaggccatacttgattcaagtttaaggttaaaatatggaattttaacttggaagatttgtataaaaatctctccattttgtcctgaccccatgttaagaatggtgtgaattccaggccagtaagtggtggcacacaactttagtcccagcatttagtagacaaagacaggtggatctctgacttcaaggccagcctggtcttcagtgtgagtttcaggacaaccagggctacacagagaaactttgtctggggtaatggtagagaatgccatgaattctccagtcagacttgaaaacctgcaaagatgtttctagctgattatgatcagcaggactaaggagagaggtgttggctgtttaaaaatcaaagaactagtaactagtgtgtctattcagtcaagaaataaaagaaacctaaaatcatctttttatgcaaagaaaaaaattacaggttgactattccttatctaagatgcttagcacgaaagtgttttgtaagtgaagttttccttgattttaggatatttgtgggtacattataaaatcctgagaatgggtccaaggtctaagcatgaagttcgtttaatgtttaatttgtgtcttgtatacataacctgaaggtgcttttatgcagtatcttaactgtacctgtccatgttttaactgtgtcccagcacattagatcaggtgttgaattttgtagtcattacatcatgttagcactagtttcagtttttagagcattttttatttctggattatggatattaatatgcattgatgttttagaacaaagcagaatgtatgtgagctaaaaagaaatccttccaaagctggtcctgttcagaattgtcatctggaacacagacgtaattacctcgtgaacaagatagtaacgtgttaaagtctaatactcacgtctagagactgaagaactcaggcttggtttatgatacttaacatctctatttagtgtctctgaagctcggagagcattttagagacagcatcgtaattacagagcagttaatagttacagcgcccagccctatctgacatttacaccttagtgtttgtttttgctttgttgtttgagtggtttttgtttggatagtttgttttctggggtgtgtgtgtgtgtgtgtgtgtgtgtgtgtgtgtgtgtatttagataaggtcttactctgcagctctgactgccttgctacactatgtagatcaggctagcctcaaactcacagaactctgcctgcttctacctttcattgctgggatgtctaccatacctgacccattgaccaacaggcttgcacaacatgagtgagaaacaaatccaagagcagcagcagagagaagaagggtgatgctgtttagcttggaagttcatttgctctgtactttgagagcatttggaacagtgtgtctttagacttcagtcttagcaaagagtctttctaaggtaggaattgaatttcttctcctttgtcattgctatgtatgtatatacatgtgtgataacagaaactcatattcagaaaggctgttgagacatttcttagatacgtggtaagaaaaaggaatgggctacttctagtctaactataatgtgaccactaagaaattcctagtgtgagctgagcctaatggctcacatctaaaatcctagcaactgggaggctgaagcaggagggttgccacaagttggaggctagcctgggttgcatgcctataagccatactgggctacacagccacttttaaacccagctccatccaagagctctgacacccacttatgacctccacaaacacccatacatacctgtgttcacacattcacacacatacatacaaatatacacaacacacacacagagcaaaagagagagccagctgtgcccagctaacaggatgagatacagctgtttagttttggccagttgtggcagtttatgggaatgtgaaccac

SEQ ID NO: 26755 - DNA, 1607 bp, Mus musculus
gttccaaacaaaccctgggttcaaaaggctgatatgagaggggcacgaattgcagacagcctgggctacacagagagatcctgtctcggaaaagaaaaaataaaataactatttcatactagtagtggtggaaaaaatacaattaaaagttttgaatgcattcctctccttcagcaagacccatagtggtgtcaggaagtctgtctacaaagcatccttgttgtagctttgcactggtggcaacaacagagtcatttctgaggctgccacgacatgttttacaaacaccttttgttttgaaatgttgtaaatcattgttatagtcgctgtaattatggaaaggctctttaggtcagttattacttttcaacagaaagattacttgaaaacaaagtaatagtagataagatgaatttttatttcattgctcagcaaacattgtctttcttttaacagcagatcgctgttccccgaaatgatgaatgggcaagatttggccgaacactcgcagaaattaacgcaaaccgagctgacgcagaggaggaggcagctacccgaatccctgcctagcctgaaaagcggctgtagccttagcaaatttggcaaaaatgattaagtagatctcaaactatttgcatgcttctgattaaatgagtgttaaaagaaaatgccatggataatctgggtttaatacaggaagcaaagcttacaatgcctttttatattatattcactttgttttggattggtgtcatttttaatacagctgacaactttacagaatgcagccttttctgaattctaacacttgggtgtatattgttaattattcttttggattcttttgaacttgtaatactatatataattatttctaaagcacagattaagtaagttctgcatatttctaagtagccacaattccttattccgcactaagtacatacctccgtgtcagtggtgttcttcctgtccaagtgtataggaatattgttccctccccgcatgccgtcgcctacctgttgtaagtttcatgttgatgccatttcccttctcgatagttctatggtagttatctataaataaaaacaaatatatgctaacttctcaaattttcacttttactttttgaaatttgaaattttctcttaaaaattttttgtttttaagttcctaatgcaagcagccaccttaaatagtttttagccttaaatatacaccatgtacggataatgttgctctccctgggcattgcaaactcatgttggagaatttgtcggtggaaatgttctcttaggttagcttctgcctgactctgttacttgtcctgatgtagcttgttctgaagaaaaaatgctcacttcttagtttgcagggaccgagtgcactgtgtatgtacgctctgaagcgtggctgcctggagagagagaagcttgcctgtggtgcagcagccacacaggagctgtgctcagtgtccatactcggctctactcttgggatttgctagcacagttttacaaacactcaaggcagatagcaatgtgtgcattagtgtagaagtcggctgtgtcaggacaggagggaaagactgggatcagaccttacag

SEQ ID NO: 26756 - DNA, 1213 bp, Mus musculus
gcccatgatattcttcatgttttggatactactatgtgtttgtcttacacattttcctactttgtgccatgtctttttatgatggttttgatatactaacattttaattttaatatgtccaaatgtattggtatttttgttagcttgttgagcatctcattaaaaaaattattctttattgttctgggactgttgctgagagacagcatgcttgcctagcggctacaagaccctgggttcactccccagaaccaccagagggtaaacaccagacctctaggtaaaaatgataaagttattttcttgttatacagtttagagtgttgcctttcacattcaggttccatgcagtttggacctctcctcgtgtctctggcaatgtggggcagacctttgtttctctgattggcagccaggcttgccagcactgtttattgaacgcctgtcctttcccagcggctctggagcatcatcgttgttgttcactaagaatcagcctgggcttcactgtctctgggctccttgctgtagggctctcctgtcttagatgcaggttctcgccctactctgttcatttctgtatccagtacaatgcacgctcctgatacacagtgtggtactcgtctctcctgttgtttgagagctatgattcttcctggttcttcgctcttctatgtatattttatcagcttatcaaaaccgttttaaaagcactgataatttaaacagtaatgaatctataagctgctttggaagaatctgtgtcatgatgggggcttctgatccaggaacatactatatctctacttaaatatttttcatgtcttaataaaagtttgtgctcaccaaaggagtcgtgtacatctcttgttatatgtgcttttaggaaactcatgcatttgaatactatagataatctctctgtgtgtgcatgtgcatttgtgtgtgtgcacatgcatgtgcatgcagtgttaggggttcactacaatatctgtgcatggtaggcaagcccttctgcattcagtcacattcctagcccttagtgtttgagacagggtctcactggttaacctgggctggccagagctctcactcttcttgacttaatttctgggaattgttaagtggatgccaccttgcccagaactgtgccatcatgctcaagatacaactcgcattagtgtaccaatcctggtctcatctttcagccttg

SEQ ID NO: 26757 - DNA, 1240 bp, Mus musculus
cagaaatgacttctgtagtccataagggaagctgagaaatgtagtctttcagcaggaaactatcaaataaggcaatttataaaaggatgtgtgtaattggaggcttgcttagttccagagtattagtccatgatgatcatggcaggcagggatggtactggagcagtagctgagagctttatatcttacataaagggagagttagagagagtgaaattgcctggtttaggcttcttcaacctcaaagctcactcccagtgatatacatcttctaacaaggcctcctaattcttcctaaaacagttccaccaactagggaatcaagcattcaagtaaatgatccggggtgaccattctcattcaaaccaccatagttattaaacttgaaaagttgattaaaaatcacattctttaaagatttattttttatgttatgtatatgagtgccctatctgcatgtgcacttgcaggccagaagaggccctcagatcccattatagatggttgtgaaaccaccatgtggttgctgggaattgaactcaagacctctggaagagcagccagtagtactcttaaccgctgaaccatctctccagttccctaaattcacattttgttaattccttagttttagtcttttgagataaggacacatggtagactgtcctgaaactcatgtacccaagtctagccttgaactcttaatcttcttctctgtgttttttctaaaaattacagcaatgttactcaaaaggaagatttattgtaagccatatggtattatagcaatcaggcaccattaaaataatgagtgatacaggtttcatggaaggaaaagttttagtgattttttttccctaagttgagagatagatgagagaaggtgttaggtttttttttcctgttctgttaaactttgagataggtcatgtggtatagcttaggctgacctagagctcattgtgtggctcagcctgtccatggatttgcactacttctgccttagtctcctctgtgctgggagtgtagacatacttgccacactaggcttatttccacatcttttcactcttctgtctattggagtaatatgttctgctaaagttttagaaagggtagaacaaagtgaaagtaaaagttacccatagttcatcactaagtaattccttttgtataataatttaggcattttatcatgcatccactttttgccacggtgctacagctgcatttaaagtct

SEQ ID NO: 26758 - DNA, 1122 bp, Mus musculus
ttttcctctttcattgtgtatgaaatatagaaaagtaaaaactaaatcacatactgagtttctcaaatttagaataagtaggcttttgatgccgaagctttagtgtaaggaaaagaaacattttgagtaaggagaatattggcagtatcctactgtagtgaaattcttgaaatagaaatgtctgtcacctctaatgtctagctatatatttcttcttttgaacagttcgttttcctgaagatcttgagaatgacattagaactttctttcctgaatatacccatcagctctttggggatgagtaagtaacatatttgctaaattaatatggtatgaacaaaacaatactatttttctcttaggatttaaagtcagattttattttttttaactcttgtttttcatgatgatttttaaatgtatattagaaaaatagtttatacattgagcaccactttgtatataatacctattatttatgacaacaggcatgtatatttgaattttgactgcagtattagccattgcatctctattttgtgcatgggtagacttgaacaattgtctaaggacatataagtggctagaattcagattcacacaatctagacttaatagtcattgtaactattttttagttttgcctacctcttgtcatactacttgcaatataaccccctgaaatgtagaaagtttcactcaatgatttaaaaagcaattcaagaaacgtgtgtgcacacacacctgtgtatgtaatagtgcatagaaagcgaggatgttgatgtcctgctccgatattcttcatcttattcctttgagaataagaagggtctctaactaaactggagctaggccagtggcaggaagctccagctagtcagtctcctttctccactccccacagcactggcagtacgggcacatgcacagatagatacctggctttttatgtgtgtgccccaatttaaaatacatttttttaaagacttatttatttaatatatgtgagtgctctgtatgtacacctgcatgccagaagaggacatcagatcacattatagatggttatgagtcaccatgtggttgctgggaattgaacctgtgacttttggaagagcagcc

SEQ ID NO: 26759 - DNA, 1200 bp, Mus musculus
tgtgcatatgtatgtgtgtatatatatatggggtgaggggtgccaaagccagagaaaacttggaagccagagaaaaacttggtgagagttagttctttccttctatggtgtgggtcctgggatttggactccagttggtctgcttggtatttggcatccttacctgctgagccatctcactgctcctattacattaatatttgtttttttttaatacctctgccttttcttggggtaatttcattgctttttaatgaagatgtatataaactaagtttgttcattttcctagttgtattttgggagagatttgattgagagatgcacgggcaagttgtgtgatctgtgaattttcaattagtttattcttgtttcctaatgaagattaaatttgacagatgaaaccataatttttttctggaatctttaacttctttataggaaaataacctctaatccagccctgattgttgagtctagggccatacatgcactggacaagccctcttctactgagcatatatatcctcacgtatttttatttttgtgacagggtcttattaagtgactcaggcttaccttgaattcattatatagactgggctggtcttgatggtgggattcttcctgctgagtaactagggttataggcctatactgctaggcctagctgtaggcaagtctttatagagtactttataaagtaattattgtatacatttgtgtgtataaatatgcacatgcatgtgtgtgtatgtaggtatagatgtgaggtcacagaatagccttaggtggtggtcctcaggctttggcaacctatgttgtttaattttgaggcagagtcttaactggcttgaaactaccaagtaggctagggtggctgtccagcaagcctcagggatctgaatgtctgcctttaccacattgtgcttttaaatacatgccactaagcctggctgttgtatgagtgttagtgattgaacttgtgtccatgtcctctcaaggcaaagctcttcaccacctgatctaccctacctagtccagtgcacccactcacattatcatcaaagctgtaaaattgcaactttgtctgcttatttgagtagtaaaacactaatgcagtctcactaaacataaatgagcataaatagcccagtgaaaagggtcacatgttaatactaataatacttaagatttcac

SEQ ID NO: 26760 - DNA, 1178 bp, Mus musculus
taaaaaaaagaaaatattttcagttaaaaactaaatttattaatttttatcctttgttctctattcctcaggcagatgatgttgaaggcaaaatcagacaaatcattccacctgggttttgcacaaacacaaatgattttctttccttgctggaaaaggaaactaatttcaagccttttggaaccctcctccatacatacacagttcctagtcagacaggaggtgaaacctttactttccagatccacaaggtaaaaagaagtagttccctttgcatggaacctgtatgggattttatattctgcaaatgtagtgtgagataaaaaggttttattgacactaactagatctgttttgactgtctgtttgtatacatatttaatctgagacttctaaccattttcccacaggatagttttgtgttctacagactttcagttacctctgtgatgagtttcacctgacttttcctggctttttccctaggctgacatgacatgtagaggctttcgagaatatcatgaaaggcttcagacctttttgatgtggtttattgaaactgctagctttattgacgtggatgatgaaagatggcactactttctagtgtaagtacagttctaaagcaacagtggaccttattacctccacaaagccagcattttaattgtggcagcccaattattggggcagtataatgatatttttcccaggaaagaaaaactattgtttatggggcttgagtttgccttcattatgctttgggggacttgagaatggaactgaattaaatgctgttgtccgttaaggccctgaatgtaggcttaaacagtaaaatgagctttgcctgtgttttcttttacttgccacctattcatctttataataggcaagtgcactgaagtgatgtaaagaggtctgatttatccaagttgctgcacaccaattaagtgaattgtacattcagaacatagcaggtgtacccattgggccctcacagagtagcttgctgacactgaaaattcagtcagagaatggaaaagaaaatggacactgcatgggagcgcgactgtaattgacctgcttggctttctgttttatctgcagatttgagaagtataataaggatggagctacgctctttgcgaccgtaggctacatgacagtctataattact

SEQ ID NO: 26761 - DNA, 1147 bp, Mus musculus
gtcttccttctattgcttttgttttaaaatgctccagcagtaacaagctgctatgttctatgtgcacatgcaaaaatgtacaggtagtgccttccttcccgtttgtaggataatgtttcttcttagattcagcttaggctggggatatagccagacagaacacttgtctagggtatgttagtccttgggttaggtcttgagctacacacaagcattaatgcgtgcaaaagagggagagagactgagtgagagcagattttacttttcattctcacaagaatcctcttcagccatttctcagtcccaagctatctaacatcgtgtcctataacacttcggtcacttgttactatcttcgaggctactaatttcttgagagcagagactatcttttattttttcctccgctggttttcataattctttgtctattaacagataaattatgtgttcttttagaaaaacttgtttcataacatgaaagtattcacatttttttgtttcatttgtttagcaacatgctagaagggtttatgaaattcttcgactgctggtgactgacatgagcgatgctgagcaatacagaagctacagactggatattaaaagaagactaattagcccttacaaggtcagactttgagacgcttttggtacccgagtgtgcgtgtgacttggaaaattgagtgtatttatgagtcacagcatgtgtgtgtgtgtgtgtgtgtgtactacatgcatgcctggtgtcagtagggacaagaatagggcatcacccggaactggagttacaggcagttgagagctgccatgtggctgctaagtactgaatctgagtcttctggaagagcaagtgctttttgccaccgataatctctccataccgatttctttatatgtgtatgtgttggaggaatatgaacaacatgattgcagatgcctacagaggctagaagtgcagtgctgggtctcctgaacagtagttaacagaagattgtaggctgctcacatggggtctggtcctcaatagcatccagtgcttttaactactgagccatccctccaggcttttaaccattttgttctttggctatattatattcactgtttaagaaaggaaagctaggactggaaaggaaagatataa

SEQ ID NO: 26762 - DNA, 1272 bp, Mus musculus
tccaaccagactgttagtctgagattggatcttagcttcttagctcactgtctcttgaatttctccaagtcccagaactcactctgtagaccagaactcagagatctgcctgcctctgcatcctgggattaaaggcatgtgccaccactgcctggcgtcactaatattcttaattaatttgttttatgtatatgtgtctgggtttatgaactagagctgagctggcatgggtgctcttgaacccaggccctcctctaagcacggttagtgcttttaactactgaaccatttctagcccctactacttaaagatttcaattgtagctatatgagcaaatgcttttttttttccatctaaaaataattgcttcctacttagaaaaagcagagggatcttgccaagatgaagaaatgcctgagaccagaagagctgacaaatcagatgaaccagatagaaataagtgtgcagcatgagcagctggaagagagatttcaggagctggtggaggactaccggcgtgtcattgagcgacttgctcaagagtgaagcccttgttccccagaatacctgcagatttctgtgcatcgtgctgtgaacctctgatgaccctaaagttatctatgttctccttagtggaatatttccttttgagagattgtatattttaaaatactgtctagagtttatgaacatatattgcattaataaaagatggcttgtgaaataccaccgcccactgctttcttcttaaacagtaaaataaatgattggttgtagtatattaagttataatgtggtgcttaaggctttaggataaatattttgagttacactaaaactttgcatttgagttgtatgtggtggtacacacatgtaatcaagtactgaggctgaagcaggaggatttccttgagttcaaggccagcataggtttccatatgacaccttgtctcaaaaacctaaaaataatctggaaagagggctcacagattaaaagagtgcttaccctgcagcgtagacatcagcacctaggcaataaactggatatctagcacactcctgtaaacccagctttgaggggagcagaaacaggatgttgaaggttgctgacttccagcctaaccaataaaccatgagcccctgtctcaaagtattttgagagtgacagaggccacttggcaacttgctttggcctctgtgcatatacccatagataaatatttaaagtccaaaacacattacattttggaagttttaactgttccctatgt

SEQ ID NO: 26763 - DNA, 1295 bp, Mus musculus
gcctgctctcttatagaacccaagactaccagcccagagatggcaccacccacaaggggcctttcccccttgatcactaattgagaaaatgccttacagctggatcttatggaggcatttcctcaagggaagctcctttctctgtgataactccagcttgtgtcaagttgacacacaaaaccagccagtacagtacctggggggggggggggggggggggaggcagcgttggaaacagatgtgtacctactagatagaacatgatggctgcttcccacctagagttgagagagaaaactgttctgtgagtcacatggtctatgcttgttctatgaagagtgtcttccgataccagcattgcgcccagctacctgccagttctgtaagggacaggctcactctcctctgtttgacaccaggtgtcattccgtctcagctgtgagacctgtgccccggaagcctctatctttgttctcttccactcctcagcagctgtgggactcgtgggctgcagggcagagaatgatgcccacagctctggctagactttaaaatatgcaacattcaagtccctaagttctttctgttttgtcaccaggttgcttgtgggggcacctcgggcagaagcactcccgctgcagagggcgaacagaacagggggcctgtacagctgtgacatcacctcccggggaccttgtacacggattgaatttgataatgacggtgtgttctgccctcactgttcgtttggccagcctgtctgtgccatgtgacacttgccaccagataggacaggaaacaaagcatttattcctgcagagaaggcctctcacttttaattttttgtcagtcttgagtgttttatctgtcctgaaaatacttgttgcctcggttcatcccggttaaactagaatggtgtgtttatgttgccacctagtggtctgttgagactgttgcaaaattgagttcatggctgtgaagaaacactagaaggggggaaaaaagtcacgtattgttaaaatgttgggggaggggggcagaagccaggtggtgacagcctacacctttaatcccagcactcaggaggcaaaggcaagcggatctctgtaagtgtgaggccagtctggtttacagaggagtttacacagagaaacttgtctcaaaaacaaaacaaaaaaacaaacaaaaaactggggggaaagacttattttgtttacttttctttattatttaactcatgtatttgtatatgtttgcctgtttttgtggtattagggccttgtgtatcctattca

SEQ ID NO: 26764 - DNA, 1101 bp, Mus musculus
attttatgatgggttgcatctaatattaattattccggtgaacaagccagaagtttggtcattcagatgcccttggggtttataaacaggctactggtagaacatagggagatgtgagccactttgtttgtttgttctcagacccctttgcctccttcagaatgggtttcctcaaaagtatatgtctgagaaagaagtccggtgtacgttgttacgttttgctggtctgtgccgcgaggttctcatttccaaagatgagtgggtgtagggtgtaatgatctgcctgagcctgtggaaggggcactgcttgtcagacacgacgccacggtccggcctcttaccacactgcttaaccgtttttcttcaatctctccatgcacacggacaggcctgctgtttctgaccagcctttcctatacagatcccgatcagtttgtttataaaacacggcctcccagggagcggcctgacgcattccctgatgtgatgatgaatagctacttaggtttgtgacctctgagatgacaaatgaattattgccttgctcatggtcatttcaaaattgttttggtccatacagagcataaatcttcttattttctatttcatttccagtgaaacacatagaaaaagcatgctcagtggccagatggttttcagcactgggtcagccatgtctcccggctctaaacttggggctcatcatattttcaattcacctcacaatttgagaactgcgacagtagtggtgacgctttttataaataaaacccaacaaaaagggtgaagttaatgttattctgcaccagctgcttttatacagagagcgagatggattcatttgaagagttttggcaatggatagttctatctgcttttctagcagaccttagagtcaccccaagtgcattataattggacattccaatgttgtctgccctttgaacaatatgtcactgatccaaatgacagttcactcacctctattgttgatgcgaggttctcaaatgactgaatcaccatgcatggtttgtttgcatgtttgtgcctgagaactgacttggtccaaagtaatgagatgctacttaccgtatgtattag

SEQ ID NO: 26765 - DNA, 1142 bp, Mus musculus
gccacacagctaagcaggtgtgagaggagggcttggaactcagattctctagcttggtgggggctcatgctctgctgcaccccaccgccttgacctggtcaaagtcactttgatagagcaggagccaagtgtttgtcaaaggagggtagaagatcatagggaagtggactgactgtggagacctttgggaactcatctctctgcatttggttccttacaggtccacttcttaaaggaaggatgtggagacgacaatgtctgtaacagcaaccttaagctagagtataaatttggtacccgagaaggaaatcaagacaaattctcttaccttccaatgtaagagtcacaagcagaagtaacagacctctaggctttggttacagaagtaactgaacatgggttgagattgtctttgtctctctttctttcttttttttttaatagtcaaaaaggcatcccagaattagtcctaaaagatcagaaagatatagctctggaaataacggtgaccaacagcccttcggatccaaggaatccccggaaagatggcgacgatgcccatgaagccaaactcatcgccacgtttccagacactctgacatattccgcttacagagaactgagggctttccctgtaagtgtttttgagaaagcagcagggagggaaagaccggtgtcacatagcacgtgaacaaaccgtgaccccaaggccttttctgccgtaggagaagcagctgagctgtgtggccaaccagaatggctcccaagccgactgtgagctcggaaatcctttcaagagaaattccagtgtaggtgatgcctccccactgtcttactgttctgaatgccagtgctgtgcccagaggcctggccattggtaaccgctcttcccatatatttttttcaggttactttctatctgattttaagtacaaccgaggtcacctttgacaccacagatctggatattaatctgaagttggaaacgtaagcgtaacttcaacctctccattcttacttcaggagaacccgagagtcgctgaattagcactgatctaactcataaaagaaatgtaattgtaatgagaaaactgactgttcaaataaaaccccattgtttccccttttcattttcagaacaa

SEQ ID NO: 26766 - DNA, 1099 bp, Mus musculus
agtgttgaaaataaaaaatggacccgagccaagcctagtaatgcaggtgtgttaatagctgaggcaggaggatcactgatttagtctgtctggatttcagagtgaattcagggctggcctgggcaatttagtgggtccctgttccaaaataaaagtttaaaagagtcaatagatagttcgtgcttcctaccaccacccaaggccctcggtccaatcccaggtgctacacacacccccaaaaatagaagcctagagcagagctgtggtcaggatgagaaccgggcagccacacaatggaagaatagcttacagccagtaggtagtgaaggcagcccatccctgagactgcagccatcctaagaatgtctgtgctatgtgtggccaatggaggatcctaaaaaagatatttctctgtacatctggaattgagaagccaatcacagtggctcacttctacaatcctagcacttagaaggccaaagcaggagggttgttgcaagtttgagggagcctaagctatttagtgaatcccaggttaaaatagaccacagtgagaccctacctcaaaacccctgtgaatgaaagattgaatgaatcgatcaatcatcaatcagtcgatcgatctattagtctagaattgacttttgtaaaataagtccctgatgtttcctttggaacaagccttggccatggagcagcctttccaatgacagacagaactgtcctgtttccttggacaccttcagaaggaagattgtctctcccttactgtcctgtgacctgtcagtggggctgagaacgggtctcagttctcagttctagaaggttaccacccaagggcctgatgtcaagtctggttgcctattcacaaaggaaaatccttgtcttgggcatgttattttatccagcctccttgtagagatggagtctctgtatgatcctactttctttctagccttttgtctagaacccatctcttttgaaaatggagacatattttttattgctggtcttctactacctcctattttctgtgatttttgggctacaatagctcaggacccatgctggcacttccttgtatatccgaaggtgcagt

SEQ ID NO: 26767 - DNA, 1150 bp, Mus musculus
gagttacacctggagaaacctaccttgtccacacatactggcatggtaaaaagtcattttaggaaattaaaatgaggatctttagtttgatagcctaaggaaaaaaaagtttaatggctcctctttgttacaaagcttgtcccctgtttcacagtgtctttggaatctgaggtttgtagaataattgcacccaaacttacccgttcctttccacggctgaaaattgactaaacgtctgatccttctcaaaaggatgttggctgaaggctggaggtggagcttggaggtagtgtttactacacatgtgcaaagcttgactccagtacagcaagatttaaacacaacaacagaacaaaaccaagtaattgtggtgaaacacagttagctgctgatagctgttcagacgcaaaagggagtggtgggtacgtcattgtatagttttctctgcttttctttaaaacacacacacacacacacacacacacacacacacacttactttaagacttacattagaaatacaacccaggcctttccagttctggataagattttcagggaaagcccattgaagcaatattctgtggttatgagaaatggctgacaaaggaagcgacttgtctgtcctcccgctttttcattcagaacatgtataggagcagaactgagccgaactgaagccatcggtacctgatgtgagctggcaccgggtttatagtggtgtctcttttgtgccctgcaggttcgagtgacggtgtttccctcaaagactgtagctcagtattcaggagtagcttggtggatcatcctcctggctgttcttgccgggattctgatgctggctctattagtgtttttactgtggaaggtaagttgtgtctgtctcttgagtttgggatgtaaacttcatgtctttatagatgaggattcacactgacacatttgtagttccttctttcattatttctttttcccaacattatatatatatatgtatatatgtgtgtgtgtgtgtgtgtatatatatgtatgtatgtatgtatgtatgtatgtatttaatgtatgtaagtacgctgctatcttcagacacacccgaagagggcatcagatcccttcacagatggttgtgcaccatcatgtggttgctggg

SEQ ID NO: 26768 - DNA, 2695 bp, Mus musculus
aaacacatggataacctcgaaaaaaaacagtggatcaccaagtggaatgaaaacgaaagttactcatagagaggagggcacaggaaagaacacctcacactacccaaagcccccccttattttttccagctcagaaattcaggtggcttcaaagcctgctcagctcccccatatatgatttcagactgacgacacccagtatggacctacagtttcaactgtggatattgttacacctaaggctcctgttttgcacagccaaatttaagactggtagagtggatttttctttaactgccttaatttaactttccggattgcctttgtttttgacgtggctgacttccacacgctggggcagggcctgcccatctgcactgctgggatgctctcccccaggtcacctgtgctaacagagtggctatcccagcctgctcccacaagcattcttctcataagattgaccttggctcaagactgccaatggatagctgtgcctctggtgaaagttctgtcttaaatgtgcaatagaaggtgatgttaccctttggccttctttctccatctcctagaagtgaggacccttgctgacgccaaatgcacacaggttcccgtctcccttgtcactaaagcacagggtcgacagacttgaatgctagttacatttgtttgtatatgatatttatttttttcttcaagccatcttgctgttgactaataggccaaagatgcttctgggtggtttaagcaatgagaatgagaacctgggaggtcttgttgttgttgttgttctgaccttacttatttactgcaaaaaaaaaaaaagatctttataaacatgcaagggtcattttaataacttaaactcacctgtacatgataccgtaattgcctttctggcaggccttccaccaacccagaaagtttgacaaagggggttaactgtaggacatttcgtccttccccggcagtggatgtactgttttgagccctgtgtggaacttctgaacttcgtgctgtaactttcagaactcttagacatgggtgtgctcactgaactctagggtctgtgtgctagatgctgccaacgctgtattcaggacctgaagtgagtacccgtgtggatccagaccaatccagtgtgagactactgaagaacatctgttgccagaacggccacaccaaacagatggagtgccccagcacttagcttcttaaataacatcggaaccattcagccagcgagtctgtgtttgctttttgttcaaattgttcgccgaatctaaattcctccaaaggacttgtgactactcttagctcattgctaaagtgcttgcttaccgtgcctcggcccgccttggttggttgtaaaaatggtaggagggggaaaacaattattttatatatatgttcaacagagattgaatatattatcaaatctttttttaattgtgctttaaaataatttatatggagagcaacaacagcaaacaggtgccaacagcaaacaggtgctaatttgtttggatattagttatataagcagttctctatcttaagactgggtctcaagtaacccaggctggccttgaactccttaggtaacttgggatagttttgaacttccgattcccctgcctccccaccccagggctgtgattgcaggtgtgcgcttgggactgaccccaggctttgtcggtgctagggcagcactctgcgactgaattaggtcccagccacttctctgtcttttaaaagaacaaaacattgctaaatgtgccattgttgctttgagttttaattctttttttttctttctttcataaaacattacagtcttaagatattaaagacctttattctggttctatttctgtcttttcactcaaaactggttttacaaatgatgccttgtttacagaaagctctctaccacagggcctagtcatgtgtaaagtctcagtttctctctggagtatcttggagcctagcacactggctttaaaggacacagctaagaagctgataccttgacagtgtttgtagacctttgttataaaaatgaatgtcctggaaagggttgggagggagttcaacaacaaagaaacaagaatgtcatgtttaaatttaatagttgtctaaaatgtcatctcaagtcaagtcactggtctgtttgcatttgataggtttttatactaactagcattataagattatttcaattagaaaatacctgtggatatttgtataaaagtgtgaaataaattttttacaaaagtgctcatcgcttgttaacacagcatcatgtatgtgaaagcaaactctaagattataaatgacaacctgagttgcctttctttgtatttcatcaagccaaagtaaagctttcaatatttgtttagtgtcccatataatttcagaacagctaaagatacctaaagtgtgatacaatataaatgtgattgaaggtttgtaattttatttattttagtgtgtacgcttttatgtgtgcatgtgtgcccccagagtgcatgctgaggtcagagaacagcttttgggagttctctctctctctctctctttctctctctctctctctctctctctctctctctctctctctctctctctctcagattctctctctctctctcagatttatttcatgcatgtgggtacagtgtcgctgtcttca

SEQ ID NO: 26769 - DNA, 1161 bp, Mus musculus
aggtagaggggagagagttcaggaccagctagagaattccaggtcagaccagctgtggatacagagtaagactgttacaacaacaacaacaacaacaaatcctacaattaaaaacatttttaggcatttaaattttcaatgtttccaaaaagaaaaaaaaaaaaaaagtagacttctggaaccctgaccatctttctgagatgtctcaaagacaaatatatatgcagatatatatttaatgcatataataatctctttagcctgctgtttcttttcctttgtttatggcatgtttctccatgctgacgtttttttaagtttctgtggccctttctgtcattattctgttacggctcagaccttccctcactaaaattgttgaggtatattttcttctgctgagagctgtaagttttcatttgtcggtactgttggcctcttgttgggcaagacggaagtacgtttctttaatgctcctttgttttgtttgcttcacactagatggctatgagaacgctaggcggctttgtgatttgtattatgttaactctcctgaacttgaacttgaagaactaaatggtaagccagcctgggggcgccagttcaagtaacgggtgttctgacagctaaggagcgagctgagatttgcttgaacagtaaaggggctcttccatcaactccgtcaccaagtgtgaaggcagcagagtcatgtgtgcagcgcacagccacatttattgtttagtttgattcctcggtagaacattttgctgttttgttttggctctatttttttaactgataattttaattctttgttattttcttcagagacagaaaaaaaaatactaagaaaagattttttaaaaaaatttttgtatacagctcatagcaaagtttatcttttttctactttctgaattctaagtcagtttttattgttgaaggcagaaggctgggcatgtgaaagacagaggaggcactcacctgtctgagcagctctcatggtctcctccctgccttttggataaagggttcagaggtttggataaagactgataatggtcatttgacaaggaaaacctctcccaggttaagataatcctttgagaaggtgatgggaaaaactatgttttaataggcttgagctaagccatattctga

SEQ ID NO: 26770 - DNA, 1203 bp, Mus musculus
taagggtggaagtaaccgctttgctttgcacctacattaatctttaagtagctaaaaagcagttgttcaaacctaatgtgtttgaactttttttttctccttgaaatttcagttaggtaaagattctaccctgtaatacttaaaactttatggaagctgtgacatatttatctaatgcccatgacagtggctttggtctggaacctagtattgaactaagggaaataagtgtagcctcctctcctcaggtctgctcagtccttagtggccagggggcgctctcagttccccatccagtcccagcttcctctggccttatcgtttctactccagtgtcacaggtcctgtcactagcccgtgcttaggcagtgcaggcctcgtaccttttagaagctagtcaaaccatttcatgtataaatacttttaatttcaaaccaatgagaaaggaaacttaaaagtcatgtaatgcatatatatttcaaaattataagtagttgctttaaaaaaacctatactttaatataatcctaatatatttcagaatgccatgagagcgaccatggagcaccacgcggacaaaggcgtttatcccccgattcaggttcacgtcacgctgggcgaggaggatctgactgtgaaggtaatctcgataagagaaatgggtgtgtaggcatgtaaaaacgatataatatgtctaacggctgtaatgtataatttattctcaagggaaaggatttcagtcaactagataataagcactttgccttgtttatctgacaaattatagaattatctctcgagtctgtttctattctggtccttaatccagatgattcgggttgaaggaacactggaggcagactttgatcagtgaaaagcttaagtatttgggtgcgttcagtgtgatggaggatgttaatcttactgtggtttcagccccttgttctgtctgctctgttccgttttcagcagggcctcttaggactgtaggtacggtatacttgtgggaactgagggtctgtgaggagctcccggtcacactgagagtaaaagctgcagaccttcagacccactgctcggtcttcccatgcacccactgtgataccatgtccttgcttagactacacgtgcttctttgtaaggaatcaggtatagaatgtagaatatacatatagaacatgcaactcagctgtcctttttggc

SEQ ID NO: 26771 - DNA, 4647 bp, Mus musculus
atacattactatatagtgaaaaagattggctttcttctcaataaatctgtgtatgaatattaaggtagtagtagcagactcctggctgggcttgcacttttcaagagatgtctgttctgcttgggtagacttttccaggctggctagcggatacctgaagcatcaaacccaactagtgtgttaccagtgctccagttgtagtaaatagcatttcctaatgtatccaccctgaagatggtgtgtggttagtaactagttgatgagatgccagcagaaccctgtttactttgtggtcgctgtttgccactgtatattatctcagataacgaactctcagaagtgtctgacttcttttcaaccccaggctctgtcgacagaatccgtcgagagactccctgtgtacaataaagccgcctggaagcattacaaagccaaccacgaggctgacgactggtgtgtgcccagccgagagccgaaagacatgaccacattccgaagctcttaaacgcacatgggacgcctggcacatccacatgtggtttctgctaaatttggaagacatgtatttggaaccacactgttccaaatatttcacgtgtgatcttcacaattagtgtttgctgaagctcctaaaggatcggttatgccaactgtattctgatgtgttgggttaattgggcgtggttttgaacacacataattttggtcaactacccttggtatggtatggggtgtgaagttcctggtttctgtaggaagctgagtatttctttcaagttttcacttacttctgctagaagcatctgaagaacgtggagtagctggctagcggcctctctgcttttggagttctatcatctgtgagtggtgacacctagtcagatggtcttcttatctcccacgaagaacaacacagtgatccgttagaacccacacaggttgtcagagtgctgaaatgaattgatcatggcatcatttttttgcagtggattgtaatgactggttccccatggagctaagtccagagcgtggttatcgagtttactgtcagcacaagggattttctttaaaaacaaagtctcactgtgtagccccagctggccttgagcttacaaagccctcggtgtcctgagcgctggaatgagaagggtgtgccaccacatctggcttacaagagaaacgttagtcccaaaacaagccaaatggcagcagagagtaaactgtttgggaagcaccaagtggcccaggccgagctgaccgactgctgaggtgatctgaggatgagcgtgagattctctgggtcccacccagggatccagaggctgaaggccagggaccaggtgaggctcatggctggcctggctggaactatatttgggagtgaatcgtgactactgctgttgtcagagtgacagactagattgggaagcttgtcgggttgctacacattaggggacataatctgaatctcaagcctggtgcaagctaaagcattagcgggaagaccagggtgacagcgagaggtcaggtgaccaaaggctcagccaccttggtttccagtggtgactaagaacatgtatttttctaaaatatccagattttttttttaaatcaaagaaaagtcagcttatattaactacagaattcatttgcagctatgtgttgatttaaagtctgcaacaaacgctttgaagtattgatgttatttgtgttagaatacaaacctatggagcaggtaatgacacctgggttctctctcagtgacccagagtcacacagaattggtgccccagcctgagctgtctctgctgatcactgtccactgtctgggatatttataacctcctctgttaggtgatggggaagtacttggaaaacatgctttgccacttgcctagagggatttgggggtttggtttggaaaatgtagtgagttaaaacatgtcactcttgacatgttttatccagtcttcactctgtgtcctacacatacatacatctgtaatacaaaagccaaatcatgtgacatggcacaaaatagaactttggtgccagtgataggaacatgcagcctgagcatgcgccagggtggtcagcccagatccttagctgagaggtgaggggcctgaaactcaggtcctattggcccagggtttttagctaatactaccaaatgttggaaaatatacaccgtatacctgctgtttctaattgaggactttgtaagaaataatagatcatgctcctgagtggcatttattcagtgtattgcacttactagctttcaattacactttactgcaatgatgaaatattttggaatcttttgtacaactgtcaataaacgtactatttttacttgtgaaatactttgccctctccaaggaattaaaaaaaattatccccctctctgcttaagagctaagaaatgttttcagacaagaagaatttaaaattagtttactttagattctttttaaggtgtagcacctttttgctctgttgtaatggtaatggatggagacaatgtgacaaagctctaggggacgctttccagagttacttttaaagacacctggaaggtttttagattcttaaggtgagccattttgtctgccagcgatagttttatgtggtttaggtatgaaaatagagttgatggttggggaatggacagcaagtgatttttataacctgggcagttagtgagtgtgccagtgtagtgtaggaaaggattgtaagaatatttcaccaggcagtggtggcgcacgcctttaatcccaacacatgggaggcagaggcaggcggatttctgaggctagcctggtctacagaatgagttccagggcagccagggctatacagagaaaccctgtctcgaaaaataaaagactattccacactgtaattccaaatgctggctggttttgatgcctttacatttaataatggtcagtgtcttacactgagatttctacatgaagacatagaagcagaattctaccgcagcgtggtgcattttcggggtgactgaaaactgaaaagatggatcagctttaaaaaaaaatttgagccacttaaggatcttagaaatatactcgtgtcctttagacagcagtctgtttcatcatcaagactcaatatctgtacaggttcaacgaattgtaactagttgccagcactggctcagtgggtaaaagcatggccatcaagcctgggttagggatagggttggagatctttcctcagcacgaatggtggaattagagaaagaaccaaccatcctgtgagttatctgtggttctccacacgtgcactgtgcacatgcgcatcccctacatacaccacactaataactgtagccaggtgtcttgcactctcaaccatctcctagcagtgcttgaggcaggcttgcactgtagatagcctagtgggcaaagcaggtagagttcgtgtgcttagagttatcctagatttcccttttctaatacactgccaatgattgacatgtgctggagaactggtggataattttgaagagctgtataagtaagtcattttccacagtagaaataacagtagggaaaggcttagtgtaactggcactgccttctactcaacactggtggaatctcctttagtcaagacagagtatgtcctattgctcgttgatagcgtgggtccaccacgcctgcctttcaccgttacagcggcatggcggcacacacctgtaagtagatctctgagcttgagccagcctggtcaacatagggagtttcaggttagccaaggctacatgtacggaccctgtgtgctgtattttttttttttttaaatcaatgaggtctaaaacaactacagaggaggaaagagttgtgtggttctatgaaactcagtgagtggctaattagagagggaccccagccagcaaccttctcttatgtcatcaggtttacaaggaagtacaaagcttgaaaggagaggtggccagggttaggtttggttgttttaactgaaggaacttctcatatccgattaacttgtgttctcaatactattaattcttctctcagtcaaacccaagacactataaaaaaaatagaattaatgctttgtgaaggaaaacaacgcattgctattttacacaatcctggcattcttaaatgactgtatcacttgttctaccttttgtgtttgcaaagaattaaacagtgtgctgtccacttttctttgcctgtagtcttcatatttctgtagcacattttttttttctgtagcacattttaatcgtaggctttagtaggaagatacaagactgcctattttgttggcttccaaaagctttgactcagctagggataaagaaggctttataccctagcaccgtggaaaccaagtatgtgttgctaatccaggggcgggagcctgagatctctgggttacagggaagctggaagcaggaagacctaaagttcaaggtcatccttggctgtacagggagcttgggttccacttgggatattatagatcctgtcacatatcggtgaatagtgacaactgtctttttacttcgttaagttacagatttttgagcaaaattttcctagtaagagaaactcagtagttattttctgagattctgaaagt

SEQ ID NO: 26772 - DNA, 1168 bp, Mus musculus
gtcagggttctctggacgtgagaactctgtcacaagtgtatggactgaaaaatctctccaaagacaagaattcccttactccaaatgcagcgatttgtgtgatctgagttttcagcaatagtcagcaataactaagaacgaggtaattattgagaagctgggatatgtgaaccccaaaagatcttgtctatatgttcataataagaaattgctccattggcaaagagaggcaacacatatttataaaaactgcagattgaattccacttacacattttgaaatagaacatactttaaaaatagtatctcccaccttttgtcgaaaacatagtcgccaaagtcctagggcgctgtgtagcatggtgtttgagagcttagggcctgacttcagtcaatggatattcagatcccagctcccgagcttgtttggcacgtagacaggttaagcaagcctcagttttctctgctataaaatgcagataataatggggttggcttcctaaagatgctgtgaggaccagttaaggcaatccatgtgagtacatgctcctggctcctggcacctagtcagcactcatgtatgggacaactgttactgctgttatttcagcagcctgacgtctgaacacacccatcgttcctccgtgacttgttagcacacatcaccgtgggtctttcccttccagggctttaaaataacaagctatttgcatcatcctgttgtatagtcttcctaaactgagaaactccatagtcccagtgatgactcttttgatcgtattctttctttttctctctctctctctctctctttctttctttctttctttctttgtttctttctttgtttctttctgtttgattttaccagcgaacaacattttgtcattgacttgctgcatttcatattacaaaccatggtgctttaaagcgccctcactatacatgtctcttgtcccctggaaattgagtctccttgtacttgagagtcagtcatgtaggacgttctgtggaatagaacgtgtgagctgggcagaagtgtccaagaacagtgtgactcttagagctgcgggggatgacagcacagcccgtgctgaatctcagatggaacccggaagggtgagagactcacagacaaatcaaaagacaatggttcgtgaccaccacc

SEQ ID NO: 26773 - DNA, 1161 bp, Mus musculus
tggagaaaaaagttgtctgtgtttgttaaatagtggaagcaggcaggcctcacccagccggccactagtgttctttctccatggtatccttggccatttgtgttttattgttttcagtaagcaggcccagggattctcaggatgaagcacattgtagagccctggcatcttaaactgacatcccttcagccaaagaaatcccaggttaaggagcctcactgagccactcagtgggcaagagtgtcagccccgtagttcaccctgtgtatatacaacctggtgtcattttcccatccacagtacagaccagtacccatttcttggggctgttttgggagaaaaatggtcgctaggtcgctcttcagtgctttgttaaaatgctctgagttggtttttcccaactaggaaccacctgttggttttgaaggataagaaagagtcccgctgctctggccggttcctggccaatttcaaagcccacaccttagctttgtatctggttagtcctccaatggatccactgagcacccacgggccgggcagtagtggagactcactgaattctctctctctgcaggtgtgaaattgaggcaacccttgagcgactgaagaaactagagcgagatctcagctttaaagagcaggagctcaaagaacgggagagacgtctcaagatgtgggagcagaagctgacggagcaatccaacaccccggtgagtacgccacctagtggcttcccgcagcatgcacgctgagcacgggacagcatgaccacgctcctccccacccccaaccctgccctgccctgccctgccctgccctgccctgccctgccctgccctgctcctgagaactaaaggccttcattggtagtaataagtatgaaacaccaaatgccagagatttaaaaggggggaaaaacctatttaaaagaaaatgcctcctctgtatctttccttagaaactattatttccttaagaactgcatttatttgtatgttaaaattacaagagtaaagtctaatatgtttagaccatccgttaagccctaagaacactgagggaatgaatgcccttagatgctaccagtaattaataactcattgcaaggaatgccttgggtgtgtcagaacttaagcacattttctaagattgaactgg

SEQ ID NO: 26774 - DNA, 1189 bp, Mus musculus
actgttcaccctaggcttagcttgtcccttacacagaagcacatggtcccaaagggacgtgtctagtcatgaaacaggatgagcacaagcctgctctttacatgcaataacaacactctgtttctttgttttccagaggtgcataataacactactagattttaatctatgtataagaaaaaaaccactctaaataggaaagataaattatccttcttagacacaagtgcatcctgaaggggtctttttgttgcgtgtagcctcccggaacacacccagtttcttttctttttactgtcctctgttatgctggttagagaaatagattcaggtaacacttagtgtgaaggccaggcttcccagagacactctaagaaggctagcactagcagccaaaatgtatttaaactataaacgcatataaaattactagataaagttaaaacaaaagtttttatcaatctaactcagaaattggtatcattcatttgacaatgtaagttaaatatttttggtgggctttttttatatagaagctgtaacatgaggtgggcatggtagctcacgttcatagtcctggccctcagaggctgaggcaggacagtagtgggtttagtattagctaagtcgcaagactatgtatgagcaacgttgcaagactctatctcacgaaaggactaggtatagctactattgtttctaagtatgtttggtcatgaagtcttctggaatttgagataggacaggcctttaatcctcggtgaggattgaggggtagcatcaaagatgggaagcatgcactacaactttatctggaaagaaataactagtgggctcttctgggtatctgttccctgtgcagtctcaggtagactatgtaatctctgagcctgtttaccctttgttaccatgacagtacataacaagaaaaaggttcagaaggaaagtatgtaaccacgtagcctagccccaggccatgccaggggccaggtgacaccagctatggctaattgccaagtaaaggagacactgagaagtaagtgggttctataaccttctggaccactacactatctattgcaagtgacactggctcagaagtatgaagttaaaagtagatagctttcatgaaaagtaaagagagcaaaaatgaggaatgtaaaatgcacaaagagtttaattcagttgc

SEQ ID NO: 26775 - DNA, 1211 bp, Mus musculus
tgagcatcacagaatggcaggattcactacgtgtgtgctggaaattgagcaaggaaggaagatggggctagaggaaggagtcttgaaagcatgctcaggaaagaccctctgttgcatgacgatgctacagagcctgagaaggtaaagggacctctgagagtggtgagttctgccctatatgtaagaacataaacctcaccacccactaatcaagagttggttcagaactcatatagagcatggaaataatgtatttcctaaattaatatctaactcatattctatataaaaattgtagtgccagtaagggaaagttactgggctctatacccagcctaggttgagcaccaccccagcacatccctcccatctcctaactgctgccttcttctctaccaacattgcagtcatgttcacaactcagtactgtcatgaagaaatcacaggtcttagcacagagcacagtgagccccagggaagagcttccaaccgctctgtctagaaccacggaatacgccactgggcgctttacttctgctcaaatcaagtgttcgtctagtggcattaaaatgtgcaaacatacctgaaacctgactcatataaacaggacccatagaattctcacaccttctgtaaaaaaaaatactacaaagctttagttaattttataagagatgcctattcgctacatgaagaatttctaatgatgctagtgtagacggtctaattcacttctcagatcagtttttgaaatggccaattatcagtgttagattttgtttcagtgtcctgacttgcaaaagaacacaattcagaagttaaagaaatcctgaaacatgtaaagttcagaatgagaattagagctacaggttgtggtgatgaatgtcagtcggacaccctaaaacatttccctcttcacttgtaaagctaacgtgtagaatttgaggacatctatagtggtactcagctgagaggtaatgcagccttggccagccagcatttactgtagactggtggcatcctgtttgccagggacagacatacacacacacacacacacacacacacacacacaccgagaggtttccatcctcgatctccacagcattgtcctgtccccacggtggtgaagctccttaaacctgacacatctcctggtccatctctacattttccccccaaaacaaaatcacccacaccttttcagaaca

SEQ ID NO: 26776 - DNA, 1184 bp, Mus musculus
gtcaggttcaaagacagaaaggccaggggttggggtggcagagattggcaatattatgtgtattttaatcgcagttaaaactgaattggaagttgatagtttaggctattatttcctaccgtcataggcatttaaaccatgtttatggatgaacttagttatccctagaggatcttttgaaaatagggattatttttaagggaatgagaagggggcaggaatttattaaaaaatcatttagacatgtaggtctcaggacagtaagggtggctcagacactgtcttacaccagtaacagagtattcatttgcaagacttgattttgttacccaccaaccttgctgactggttaagactgattttgctcatgtcctttattccaaaaggattttgtggtgccacttgtctgccactgggcagattttaataacaccttctctctggttaactagagactgcagttgaacagggaaggctgcaggacccgaagtcagtgccggcactccgggcctctcagggtagcaatgaagtttccggcacgaaatacccggagggcggccagcaaaaaagcagcgcccccaaagccctctgagagctctgcaaacgattcccactctgactctgaagaagaagaagaagaagaagaagaagaagatggcatgaactttctggagaagagagccttaaatataaagcagaacaaagcaatggtaggtatttgaatggacccaaacctttccccactttcttctaagcagttcctttcttctctctcctaagaactgtttgtaagctgtgggatttgacgatgtgtttgtttcaaagatttatacttatttacgtggagtagagggtgaaactgtgcagctgctcttggaggccgtaagagggcattttgtatcccctggacctggggtttgggatggttgtgagatctcaggtggctgctgggcactgaccccgggtcctctgcgagggtaacaagggccttttgcagctgcgccagccctccagcccccatccgtccgctctttacatcctgtaagagttagaataagcctagtagggaaatgagaaacctgactatgtggacttactaagcggagagttgaggggcaggctagccttctttctacaaattgcctgttgtcaccggttctaatctctgtttacgctcttcccct

SEQ ID NO: 26777 - DNA, 2075 bp, Mus musculus
gtatctggcaaagtatcatggcttcgggaacgtccatgcttacttgaaaaggtaatggcctcttccttcctttcttccttccttccttccttccttccttccttccttccttccttccttccttccttccttcctttctttctttctttctttctttctttctttctttctttctttctttctttctttctttcacatctgagtcttccattcatttatgtgccttgataaaagatgatagaagtctgagtggctggtctggggcagggaaatgttagtggaaatgcatctttctcagggtggggagtgtatgtaaaattcagtgtgtgtgtctaagatgtccactgacaatatatgttaggggtccataaagacattatttaaaggaagaatttgactttccaaagagaattaatggttgaaaaccgttttgacgtcttcccctttgtctttcacagtctgaagcaggaatttgaaatgcaagcgtagagcctgaagattgtctgcccgccttcggcctctgaaggctctcttgttctcgacgttgtgttgatgggaacccgagtaagaatctcggccatccgtctgccttagaacttggtcgcgttgatctcgtatctcacacttgtttctgaagcatcatgaaaggcatgctactccttacatttcagcgatatgtagtgtctcagagcttgccccggccccaccttgtagcctccctggtcttttgccaccacttagattctgagctatctttaactggcagcttgagaatttgtgtgatcaggacatacccaagcactttggggtacagtagtattgtgaagcaacggttgtgatgaatcacagagaagagccccttaacttgtttacacagaatcaacgcacatagtttagtgtctagtgtttatattggctaatgttttaaatggaaagggccaaggcacaaagggccggaaaccatgaggaagaattaggtagttgttgtaaactggagtatggccacattggatggctttctggaggaatacatctctggggtgctgtgctcagtgtacgtcttgtcacagctgacactgttgctgctgtcatctggcctacccagtcacccaaaggtttgtgggaacttggtaccataattactaaaaattgctgtagaaaaggtgttctgggaaattaaagatgatagctcagcagcgggttgatctgaaaccttggtgttctgcttcaggaacttaaccttaataatgtcactttagatcctggcagtttcctaaagaggtaaccctgggggttgtgtccagggtttctatatatttaggttttaaacacttttggaatgatgggaagtggccttttagagatgggtagctttgaacctctctgccagtgtagtttatgggtgggtgcctgaagtcaccctccctcccctttccctacaggtgggtcattcagtactggtgacgaagtgactgagtccctcacctgtgtagcctgtcagctgtgcctactctgtactctgtctgtggtgctcagttggatcttgaatcattcagtgtaaatacagctttttgctctgtaatgcttttatacaaaggtttttattttaataataaaacattttgttctaacttgtgtgtttatttttgttttttaaaaaagtttcaatattactttcccccctgtgctttgaaagggcatttctgcctcttctaaagcttgctttggattaagtttttgaggcccacagccagctcttttataaagggtctcatttgttgatatgacttttagctggaatctcaaagtggacaagacagccaagttgactgactgtacaacatgagcccggggaagttttatgttatttttcctttattgtttgcagtactttaacactttaatctacttttcaaatacttactgaatgtgtgccatgctctgaggtttcaagaccgaactagaagacaaaaaacaacaaccttttagagccagatgtaacatggactcacagaaccaccatactgaagcaggaggattgcaagcttgaagaaaccctcacaaatgccattttt

SEQ ID NO: 26778 - DNA, 1113 bp, Mus musculus
acgagtatagactggatctccaccagtgttgagccacgtgctagctatcagagcctttttgcatgcagtggtgggctctttggtttatcccaccttccacaggctatgaaaccacagcgctgtatgcctgagaacttgaagggctgtggtcctggcttgtccattgccatacgctctgacaagttgacgctaattgcactcggtggttgcttttctccaatgactgtctctccctggctctcagacatcctcgtttctgttgtctgaatcttctcgtctgcttgctcccttctcaggctattcagtcccatgatggcttctgcatttacccctcgaatttcctttatacaaactgagaagtaggtgactgggttcagtcttttccttctttctaggcactgatccaggtagaaggcttacttggttaaacagctgctctatcttgagcccactctgtaccttttattgtttaaaaaaagatccccccaaagtcttcagggttctcaaaaaacaagggaaatgcttacttatggaaaagtggggtgattgtatcttctatgtagaagtagtagtaattgtatggaaatcactggactaatgagatggttgggtgcaagaaaagatgaatattgaacatgctgctaaaaaaaaaaggttaaatgtttttaactttataaataaactaaataataaaaattgtctgatctaaaataaactttaaacaagatcaattttatgcatttctcttcttttctactatgcccactaaattatcaaaattatagaagtgccttacattacatttctattaaattgccctgttctaaaaaggttggtgactggggagtttttaacattctcgtgacatgctgttcatagttactaatcctgagaagtttccactatttaagaaaattttccagaagtgagagagtcccatattcctagtcttcagtatggagagcccaagaagcaaagggttatctactggaaactgttgctttatttagcaacattagcctagcctcttggtgcctggcccagctatgcaatgcatgtataagggaaaatggaaacccactctcaagcagttcactacaaatctggattagt

SEQ ID NO: 26779 - DNA, 1224 bp, Mus musculus
ataatttaactcacacatatgtccttgcacatctgtctgattgtcttattagtgtatgttgacagaaatagaattgttgggtcaaaaggaattgtctgctaaatagctgtcttgctttctccttaacactagcagtgtcttagttaccatgtgtaaccatttcttactttttactttaaaaaaaaaaaagcttttaaagtttgataggcaagaatagctattttagtctatttttattttattttattttactgtgtgtttgttttattgcttggtgagattgaacatttccagtactttttaaagtttattttgtgagtggtctgtcttgtgggactgttaatttatgtgtactttcacacacagtgtattttctcagttctttctacattgctttctgtcagtgatccatccgcaggctgtgttctgtgaatgagtaatggagcttgcttacaagtaacagacattcttaaacaacaaaacaagttaggtttttttagaggctaaaaattacctatgcccaaaattgtagaaagtaatcctctgatagtgtgcttttttttaaaaactgcattgtcttattagtgtactaattttaagcgataaaaaataccaaggttcttaggatagtagttaagagttgatctgagcagaattcaataagtatcaatgcagtaggcctactgtataaatagatagtgtctaattattagaagcattaacatagtctaagaacattctgcaacttaagatttttatttttaaagacagaatattggcttttttctcaatatatacatttatatacataaatggataagatagtatttttagaaaactaatttcattcatctttagaaaactttcgtttacttttttttgagccaactataaaagaaactattgtctcagtaattaagagcattgactctttcccgaggacccagatttattctcaacacccatatggcagcttacaaacatccataaatagaatcccagggagccaaatacctttttctggcctctgtggtcactgcatgcttgtagtgtacagattacatgcaggaaaaggactcacatagacaaaaataggtttaaataaaagaaattaaagttgtcagttagccagtctttatatagtagaaccagtgtagttgaagaaacagttgtagtaatgaaaaagtgacctaaaggcattattgtttcataggttttgcacga

SEQ ID NO: 26780 - DNA, 1227 bp, Mus musculus
taagttgtcacaaatacatcacaacgttttttgttttcttcatccagacaggtgatttggcttctgcacagttaggaggagcaccaaaccgatgggaggttttgtcagctacacctacaactataaaagatgaagctggtaatctagtacagattccaggtgctgctacttcaagtgggcagtatgtccttccccttcagaatttgcagaatcaacaaatattttcagttgcaccaggatcagattcatcaaatggcacagtgtccaatgttcagtatcaagtaataccacaaattcagtcaacagacgctcagcaggttcagattggcttcacaggctcctcagataatgggggcataaatcaagaaaacagccaaattcagatcattcctggctctaatcaaaccttactcgcctctggaacacctcctgctaatatccagaatctcataccacagactggtcaagtccaggttcagggagttgcaattggtggctcatcatttcctggccaaactcaagtagtcgctaatgtgcctcttggtctgccaggaaatattacctttgtaccaatcaatagtgtcgatctagattctttgggactctcgggaagttctcagacaatgactgcaggcattaatgccgatggacatttgataaacacaggacaagctatggatagttcagacaattcagaaaggactggtgagcgggtttctcctgatgttaatgaaactaatgctgatacagatttatttgtgccaacatcctcttcatcacagttgcctgttacaatagatagtacaggtatattacagcaaaacacaaatagcttgactactactagtgggcaagtccattcttcagatcttcagggaaattatatccagtcgcctgtttctgaagagacacaggctcagaatattcaggtttctacagcacagcctgttgtacaacatctacaacttcaagattctcagcagccaaccagtcaagcccaaattgtgcaaggtattacaccacagacaatccatggcgtgcaagccagtggtcaaaatatatcacaacaggctttgcaaaaccttcagttgcagctgaatcctggaacctttttaattcaggcacagacagtgaccccttctggacagataacttggcaaacatttcaagtacaaggggtccagaacttacagaatttgcaaatacaaaatactgctgcccaacaaa

SEQ ID NO: 26781 - DNA, 1220 bp, Mus musculus
ctctccctaccttgagccatgttgtagtcccaaccggacggagtcaaaggggatcccatgttgatctcattttgtagctgtgtaggctgcccattggctcccgggatattttttctagcctctaacagaattctctcttgctttttggttgtgaagaaagtctgcaacatctgctgacaatcatcccaagtaggctgatgagagaacataagggactccaccaacactatgaggcattggggatcctctgagaaaagggggtggttagtttcccagttataaagatcagcagaggaaaatgaccagtactgaaggggttgaaggttgggcaggtgcactggagtctgtccggactctgtactctctggctcagtgtactcgcagtaggtctgcctcccgccaccctgagaggttcggcgccctgacactgggggggggggggggggtgcggtggcgactctggacgcgagctgggcccttcccatggatggcctcagctgcggtgggtgtcacagccgctcctggggagcctggcgggtgccggcacaggccctgagaccttgccctctcccctccccttcgcccgtcccatgggcatgagctagcagccgacttagaactggtgcggaccaggggcgggtattgaggctgtggataagggggaggtagtggagctaatggattagctggtggctccgatttgggagaagccttcacttcgatttctcttgaaacaccagagcacaaccacaattttgggaaacaaaacccaatttcaccagtgtaaacaatctattttctttaaaaaatcaacaccaaaaacattacttgctacaaagtttgtctgcctgttcctgcacacaaacgcaagaaggtgcagcccccaatacttcaaagagacactgccctaaatcctatcttttataagtctggttctaggataagaattacagagtattacgcaatttaggcgtatctttagaaacctgtttccttgggttgtctcatgccgcatgttatagttctaaattactccaacccagagttaccagttttaagccaactttctaaaaccaatggtacaaatttttaatcataaccaataacttatgagccaataatctataaccaagacatataaaacatatttatacctttaaaactattcagaaacaaaaatgaaatggctgcatatatttgtttatttaacccaaacaaaa

SEQ ID NO: 26782 - DNA, 1606 bp, Mus musculus
cagataccttagaaaggtaccatgagcagcatgtaatgaaatttaatgacattggtatgatttacatctgtgtgtcaacagttagtgagaatgcagtatgattggtacacatatgtggaaacctagtcctgtccaaaccagaaggattttgcttatctttttttctttaggacttgtatgccttcctacacatctcttctttttcattatgcctttaacatgacccaggaactttccttccatttatttctcctgtttctcctgagagtttagatataagtaataagccatttatttctcctgcttgtcctgtgtattttggatataagcaataagccagttcctctctttttcctatgtatttggttataaataataagccatttcctgtttttcctgtttgcaggctgctggaaaatacagacaacaaggcaggaattatattgttgaagatggagatattatcttcttcaaatttaatacacctcagcaaccaaaaaagaaataaattcagttattgctaagatcgacgtacaacttctaaaatgcatatattggggcttggggggatgggtgttttttaaattaaagtttctgaaatctaaagagacaaagttaggaatgggaatcttctacaaacaaattatttttatttgttttaaaattgtaaaatactatgtaccttcaatgaaatgcaagttactaagcgtgaagagctttgctttctcacgtgattaagaccctactgcacactgtagaggcttttcaagccatattactctcctgatgcttcattaatctccatcatgtatgccaggcctgacacgtttgacagtgaagacaatgtggcttgctcctttttgaatctaaagataatgcatgttttacagtactccagatgtctacactcaataaaacatttgacaaaaccagccttggtgtgtttggggatgtctgtattgactgactgtggtgtgttgaatgcgatatggcacctgctggctgctgattacagaattttaaggcgtgtgtgacgcaggacctggcagtgtggggcagctgcagttgtatcttagaagtgagtctttcatgggaattagaagaagaatatgcctgggattgtctcagaaaagttaattaatttgtagatggacatttattgaaagatgacagcaatgatactgcagaggttgaagaacagatgactctggtcagaaaaaaaaccattttgtctccaatgccagtgaattctgattgttgttagttctctaaccaagtggaagccattttttctcacttttctttaaaattattaaattgtaaaaactgaccatttcgtttctaaggggttgcttctttatttcaattctgattcgtatgctgattctaatactgaaaaataattcaactttgatcgtttttaaacttcctttgctgttgaaatatttgcagccagttgaaaatcgggcatgtgtatgagtcaggaacctgtagactcatagcatggcaggtgagcaagtgctggccactcagtgacccctgggtcatctgccatgccactcccccccaagacagagatatcctcaactccttccttcctgagtaa

SEQ ID NO: 26783 - DNA, 2765 bp, Mus musculus
cagagcacggagcctgcactttcacagattgtcatggctcctccctcccaggcacagccctcaggaagttgattaaaacctgcagtgcaacagttttagatactgattagtgacttcaaagggaaatcaaggaaagaccagtttgcatttatgcgaaatctgtggttgtaaatttttttttttttacttgaagttaaatttgtctctggagttggtatagcagcagttgatgatcagactgaatatgtttttagtctctggaagactgattttccttttttatacatattgttaagatttattaattttcctgtgctcaatgtgtaaattgtatcataactcattgtggttgatttcactttgatttagtggcatcttaataaatgggggtgttactgaatcactcttcccacttccatttctttgcccaccccttcaccctgagatgtgatggtagtcttgttatcatttataccaaagttctgcagagtccctattgtctgtgtaagatggacaaagttgtaagacactagggaagagaaagaaagacggaaagttccttttaatctttttgccttttattttgcacattatgcaaaaggaagaatattagaaacacttttttttaagtgagtgaaagtatggtaagacggttagtgctttgtgcacttcttagactaatcaaggtcatccatcgccctgcaatgtttttaagattaagtaaacaaaaattttggaatcttgagcatttcaaaaaatgacttgattttttaagtcttaaattcagtattttaaacctgtgttcttgaggctgaaaactatgaaattatataatgtatgatacagggttatcagatagtaatttttaaaatttgctcttgtcatttgggatttgttttgtttgggattttgttgtgtgtgatttgttttgttttgttttgcagatttcaggtaacaaagtgagacgcttatgcataaagaagtgtgatgtggttgccagaaaagcctaaaattatgacttagaaacgttaagactgtttcccccattgtcgtacttgtacttgcgagctaacttgtacttattcttgtgaaagcactgtcatcttttagtagccaattttgataatgtttctcgtggaaaaaaatcagtatctatctttagaacaatgtaattataacgtgggaatgtgagtgagagaatgagtatgtgtatgtgtgtgtgtgtgtgtgtgtgtgtgtgtgtgtgtgtgtgtgtgtgcgcgcgcgcgcgtgtgtgtgcatcttccactagtttatgccagcgatattgcttgaatgtttaacgatgccttcagtgtgatgctggcaatagatgactgcagtttcagatgccattactgtgcaggcttggataactaacattccatgatgtagcttgttctgatgaaatgattgtagttacactttgctcattctccagtcatctgtggaatactgagttttctaatgtgccattatctatttttattctgcagttacgttaaaaatacagtacaatattttaaatagactaaattgttaaacataaaaattaaaaaaaaagtagtagatgtgtgtaagaaaactttgtaaaatagttatgagtcctacccagtagcaacttctggcgttcaagcaggattccattctgtaaatacctgtaatgtgtttataataagttgtgtagtctgttctgcatccatactacattattgctatggtctcagtgtcatctcttaaagagattgacgtttccaaagccgtatggaatgcccttgagagttcaggggaacacccaccccacctgcctcctaagttccaatctgggaaacatgcaaattatataaatgacatttcacgacttttgagtatgaagataataggaattttattacatggcttattaaaaatgagagcattttggttgctgattctactttgtatctattactttcacctgatctcatatttaatcagtttaaatcacaattttgtcatagttatgctaaggagttgatctcaaaggcacaaaacatgaattccccatgcaagctttttgttgtagatggataaggttggtcagagcctccatgtgtcaccctctgcaccctctcaacatttttctttcatcttctgatttgtgcaagcttcagttctttggtaacagatccttgcaattgtaaagtagaagtgcatagatgtgagaagtcatgtgacggggaatgaccttccacggtggacagcgctcgttttaaatcagtctgtactcagcaaataaaaatcaatattagttgtataaacacacaaaaattacattttgaattccaggatgtcacactacttctgtacctagcattttgagtccttatatttgcaatgttacacaaactgtactattttcttttatgtacagtttgcatgactaaaccatcagagaataaattctatctttaaattatgtttataatttgcttgtttttaatctgtcttttacaaaataatacctgataattttcttcctcacttcagagcatttaatttcctgagaagagcatgagattctttccatttctgtacactccactccttagaaagcccttaaccaccaacaggcattgcttctgttttctgtttactttaggttccattgacatacagtgagtgaccttttcattttatgtgtcctatctgggacaccactcagacgttaaccatgattaccctagaaaatatcttataactcatgt

SEQ ID NO: 26784 - DNA, 1311 bp, Mus musculus
tattcagacagcttatggagaaactcttacttgttctttttttttaagagttatttattatatgtaagtgcactgtagctgtcttcagacacaccagaagagggcatcagatctcattacagatggttgtgagccatcatgtggttgctgggaattgaactcaggacctccggaagagcagtcagtgctcttaaccactgagccatttcttcagcacccacttgtatgttcttaaagaatgaaagcaaaatagggcaaataacaaattagtacttattatgacagtggcttttactgcagacttcagtcagaaaggacatttgggacccatataaattctcgaacaactttatagaaattgatagtacagttttgttttttaaatactgcactctcaaaaaagccagatttttttagacacacactgttaagtaagacagtttcccttgccttgagcatgggaaacccagaggcccacctgtcacaagccacacctaagccatgactacatgtacaagtacatggtagacagatgggaaagacaagtggaacagattgaaaattatgaagaggccgccctctcgcctgtcacgttgaacgcacgttcgtgtggaacctggcgctaacccattcgtagacgacctgcttctgggtcggggtttcgtacgtagcagagcagctccctcgctgcgatctactgaaagtcagccctcgacacaagggtttgttaaaaaaaaaagaattatgagagaggtagaactagagggtggagaggaacagtctgatgtgagtagcctgtcctaccacctgaggccatggtgaagtcccagcccatgctgctgctgagggccatatttgggtctgtggccaggcagcatcaggggtctatgtcaatgtttgtggggtgagtaagctggccaggagggtataagagctagtcttgccacttggctggttgcactaaatgagctagctgggacagtgctgaagagctccccctggtgttatgcgtgcattggttgggggtggggtagcaggagaggtggtggactgaccaactcagctaccactcaggcccagattcagggttagcttactccaggcatctaccccatttatgagctgctagagaatgtgaaagggccagagctgcagatccaaacctagaggatctccacaacagagggcaacaacagaatatctgagaggagttcctgtgaagatccagtattgacagtatagcagaagccagaggcctcgaatcagatcaatgactcattgtggataaacaggtatagtgtatgacacact

SEQ ID NO: 26785 - DNA, 1223 bp, Mus musculus
agagaggacggaagcctgtgggagcccgtggcctttaaagtgcgattcagccctctcctccggggctagtttgtaaacacggccggcctccgggctcgcgggtggctggcaggaccatgaattagtgacctggaaaggtgagtaatggtggaagggccacgggcttggaggttgtagggatgcagaggaagaaggtgctaacatggcgacgtcgctgcctgtagtctccaccccccgcctcccaccccttttgcgcccctgctgtggaccccaaccctacggacggcggtggccgcgttgccgcctctggtctggcggagcgaccggaccgttaggtaacgcgctgcggctccggccggcccctccctcgcgcgctttcccaagcctgagcgagaaggaataacggctcttctccgacccctccctccgacttctcctctggtgtggtcacttgagaggtccccgaggcgcccttcggatccgcccatctgtcggggagacccccgccgctagtccttgatcgcgctgcccagagggcccacgctgggctccccaccggggactcgggcgatcgagggtttgggatggtgcgttgaaggattgggaagcaagggtctctggcctcggtggaacgtgatggagccaatggtaatggagaacctgctggtggtctcggccttttctgtcctttctgccgccctcacactcccgccgccgccacccccccctttccaggtggggcggggctgaggtgtgggtgcaggttgattctgctattcccccccacaccccatttacttcgaccggtgttctgcagagcttttgtaggaaaataatctgtgccttttattaccccagggacaaggaagagaggtagggagagatgtgtgtatgtctccccgggatgctcactcattgaaccagaccttggaggagatgggaactatttttatgcacataggtattataaaattgtctcttctttaatggagactcttaaactgggaaggtcgagtaaaactaccaccagtataattgagtaaaagggatactcatgatagactctaggcccatcgactaatacctagtttaccttgtggaagtcacagtttcttggggattataaactagggacacgttcacaccagatgcaggtaatgctgtttttaacatctgaccaaacacggactgttctgagctcagtttgtcctgtttgaagaaat

SEQ ID NO: 26786 - DNA, 1258 bp, Mus musculus
tgaagactcagtgggaaagtagacgtggaaagagggaaatgatgaaataatggtagcccttttgaatgaagtgtctgctgtgtcttgcattatattctgagctgtgtgtgcactggtcacttaaataagtgaggatagagctaggggctagggaacacgcctataactccaaccagtcaggagagtcaaggagatcacaaatgtcaggacccctcaaggtggtgtaaactgaggatttatatttgcatacgaagatagctccctgactttatgccacatgattaggagtgggtaaaatactctgagagacaaaagcaaagtggtataggagatagcacccccatgagacttgcaaagatccccatactagatatctgactctaccatttacccaatgtgctgacatcaacgttgcttcacagtaacagtcatctgtgttgtgtctcttttagaaacccttcactgaagcagcagctgttctcatatgctatcctgggatttgccttgtctgaagctatgggtctcttttgtttgatggttgcgttcttgatcttgtttgccatgtaacagaaattactgcctgaaatgttggcattcatagtaattacggatgtaattctgtgtatcttgctgtgactccgaagactgtagtactggtgtcatggaaatatatgttatttccacagtcatttcattaaagatgaaaactttaattcttgctgtgatttgtacttatataagtgtggatcatcataaagatgatctgttgaggtaggtggttgtccaagtcagaggaaggtacagcagttaccctggttttgaaaaagtgatgaatatgaaacattgaaaaacacttagtgaagtagaccaagcaaaagacccatagtgtgattttgtttgtataaaataggtaactttgtagagactaggccaattagaagttattgggaactctaggagcatggaactgtgggtgactgactgttagttgtggagtttcattttgggtgattggtgcttgaacaaggttataaatgcacaaaaccatctcattacatggttaccataaaccaggcatggtggcgcacgcctttaatcccagcacttgggaagcagaggcaggcggatttctgagttcgaggccagcctggtctacaaagtctacacagtgagttccaggacagccagggctacatagagaaaccctgtctcgaaaaccaaaaataagaaaaaaaagaaagaaaaccagtaggtgagt

SEQ ID NO: 26787 - DNA, 1099 bp, Mus musculus
gcttagtgtggtctgtttctttgccttcgtagctatgtatttacgcacctactgccatggcatagtgaagtcagtatttctttaaaaaacaaaacaaaacaaaaaacaaaaacccctacttattcaaacttgtgtgtcatttcaccaaataccatcagtattaaaaccagaatttaaaatatattccctctttccctctgactttaaagtattcattcccagtttcttcccccacatccccagtagaatattgcaatatagcccagcctggcttggctttgtgacttgaggcctcagattcctaggtgctggaatcattctatgagttgctgtgccttgctctcctctaaacattttacacttatattatttttctatttcttttgaattatattaatgataaatctgcattgttccaccaaacaaatgctacctgctgtatgtatgtgtgcttacacacaattttgtttttggggggaacagtcctgtggagattttgtatcttgagtatgggaaagaaacaggatgtagaaagactaagcagccttcctagaggtctctattggtgtgtggaaacgtctgagatctgactgtaagcagatcacttgtgatgccgttggcattgaagccacagcctcatacatgctaagccctgctctgagctgaactgtttcttccactcccaaggccttactgttaatcatcattgtattaccttctaattcctgcctctgtcacctcacgggatgaaagctaccttttaaactctgtctgcgatcatgctgctttcctatccattctgtgcagtgggtcctcagacctttgtggctgtcttcagtctttctgtgtttgagagaggacatctgaattactgtattgactgataaagtccggagcagttgtctttccagttggctctcacagcaacttttttgcattacaactactgtcgctgctccctcccctccactgcttacgtcctttcagtatacataggttattgttttcagtgctgcatatatgcaaagtttctcctagttgcctacatttctcaagctcttcctcctgaaatacctcgtttatgtaataaatagcttat

SEQ ID NO: 26788 - DNA, 1391 bp, Mus musculus
acagtcaagtgcagtatttctcttgatgtcttttattttacaactgggccaaaggcacataatgtatatagttaatgtttacatagtaataggaaatacatctgcacttgactgtacttgaattcttggtattatttatatttgtaatataatgatgatatataaatggtttttgtgtgtgtgtgtgtgttttgttaaggaaaataaagatgacctggcagcgtttttctttgttaaatatctagacttcctcacatagtatgttgatggatgacttggctatctgaaaaataccttggtagggaaaactcactgtatgaaaactatatagcaaattatgatgtttttcttttcatttagactttcaaaatcagtgacataagaggtttagtgtttctaatcagaagttaaattttttctgattttgaaacatattatggcataggtagtttttaactttgagagacaaataaatgcatttttaaagataagacagttaaatttaatgaaactcactagactgagtatgtataccaagtatcaggtgggaagatttttgatgtagactagttattcttaaacacaatatgattatttgttctagtttccttttatgtgtcttatgttgaaacaactgaagtgaatttacatcataggggagacatgttacgatagtgtttctggctaatcctttagctatcaaatgtttaaatatacttattatcatttaaaagtttatatttatgagtaatacctcatctgacatatataaaagaacccagtttgttaatattctgaggcattttagtgtagtgcctgtaattgaagcatgtggaactggacttgaatgtcagctttgcaatcgtgggcatttcacctaacctctctgcatttatttaagctgtaaaatgaaaagaataatatgttttccataggtactgggaagttaaaaataagttatatgatgtgcctagctttcttgctagataattaattaataggtattaggttacatggtagaatttattggtattattgaaacccttgtgaaatatggaaggaccgtagatcctttctttggtagataatgaaattaaagaaaactatgagcattcaatttatttgttctgaacagaaattttctgcattaatgtcatatgcacgtgtcaatgatagattaaagaaatggagaactgaaactagaatataatctttttataaaaagatgtgtttatttttattttatgagtataaatgtttgacttgcataaatgtctgtgtccaacatgtcttgacaggtatctgtagaggtcagatacctgggtcatttgaaatgatagttacagatggctgtgagctgccacgtgggtgctagggatcaaacttggctt

SEQ ID NO: 26789 - DNA, 1185 bp, Mus musculus
aaccctaacttcagctgcagggagttgcacatcttctggcctctttgagcatctccacacatacgtacatacagatgcacagactcatgcacataaatacaatagcatggaattaataaagcattctatagtactgttcttaatgctttgggggatttatagaccctttggaaattggcagaagcaatggtttctctagagaaatgaattcgatagttcctgaggaactccagggggcccctgggattcaggttgagaactcacctattggaatgtcagtgatcctctggtattcttaacaaaacagtcagggtttgatttttgatacatacagagaaatgtctaactctaattgaaactttatttttgcctgtagattctgatttatctcttgtaatgatggattttgttttgaactttgcttcctctctagcatctggacattaagaactgtacttattttcttcttttccaagagaacagagagaaatagtaagtttaaatattttttataaatctatattaaggaaacaaacaaactcatcttactgtgtgctattttgtaagccaattatgaaatggtttgagatagtgtggtgtgtcagattgtttgctgtacaacataacaaaggtcatgagtataagaaggttctgtctgtatgtgtcaattcttatttaggattttttttatacaaaacatttttaaataaaagcaaattgtatttgttaaattaatctttgtggacaacattggtacagagtaaaatattgtacatacatacttgttctttttattaatttaatttatgtacatgtgggttctacttgcatgtgtgttcctggtacctatggagtctaggtgaggtcagtggatcccctggatctgtaactagagtcacagatggttatgagtggctgtgtgggtgctgggaattaaacctgggtcctcttcaagagcagagagtgcttttaaccaccaagccatctctctagctttttcttttaactgtattactctcattaacgtcacagccctttagcttggttttagttgaaatatacaaatacaaaaatctgcttctatatatgttttatatatgtgcaagttgtaaagatttttttcaggtcttaaaaagtatcttgctgggtggtggtacctttaatcctggcactcaggaggcagag

SEQ ID NO: 26790 - DNA, 1164 bp, Mus musculus
aacaacataaacttcctaatgatcagcgctagatgattgaatataaaatgctttattaatcaaacaagtgcacttgaacattttaaatctttatggtgagtaaattaaaagaagtttattaataatgtttttaaaaattatgcctgcagaatatttactttattatttgattaaatgtattatttatatttttctttctgcttttgtaacgatggttcaggtgtcttctggctcacttccaggaggtttctttgagcatttttgtaaatgtttgtcagggaagagtctgggccaaatattggaaaagcacattagctgaagagtgcaatgtattgtccaggctgccgattccttaaacttgggagagtgttgtccagtgacaggagtttgaggataatgtcaaagtcgacatttagttgggcttctgtagtccatacaaattatggccattgaataatctagagaattaatacttgaaaactaattgcaatattttcactaactattcattctggcaagtggccttgctttctttttgaaccctgcttgtaatggcctggggtttctaggtctcgatgctctgtgtttctgctttgtcaagtaggtgccatattcattgtatccttcttgcactgctcctgtgctcccgtgttgtaagccagcttgctgtatgcatctcagatgtcggttggtacgtccaccctctgctgttcttcaggaaatccgtggcctcacagattggaaatgagccctgagtgtaaacagccgctccagagcatagctccttaataaagagatgtacctccataaagagcagagctctttcgtctcagagaacaccattctggccagtcacaaacatgtggctaaggctcacatgaagggggtgacttagtcaagccttctattttataaacaaacaggtgtggggtgtgggttatatacttcccaacctgtttggtggtggtggtggtggtggtggtggtggtggtggtggtggtggtggtggtggtggtggtggtattggtatggaggcctcctagagtgaactaactatccacacttgtttcattaaataattctggcatgatagtgtgacagctttgaacttcaaaaggattcaagtcaagtcctaggcctgatgacccagagtccaggttacac

SEQ ID NO: 26791 - DNA, 1157 bp, Mus musculus
ctgcccaacaccaagggcaggtcttcttcctcatcttcctgctcctcttcagctgccccgggccagcatttgcagccaatggccaaggaccaccatacggacctgacgaccttatagaagtggggaccctgggcctatcccttcttgcactccaggttgaggcgaagctgcgggtgcaggcggggcctgctgtcacctcactgggctctaaggtactgtgggggtggacctgggacctgcaggccgccctcggactaggttaccttcctgcccgagggcagccccctccctaaagtggggaagggtgggagggtgggcgggcttctttaagtagattatcatatggcaggagctactgagaacataaacccttggcgagtcattaaactcctgaaaatctctgctggtggattgaatttgcaaatgaaggttggaggctttaccccagtgggaaccgggatggtctcctccacaccacccccttcagggagctgtgtggcttagtaactgtgggggagttgaggcagaaggccagccagtgctaggtgctttcagtgcaagcaggagaggctgagccagaatcccagaactttctggattatctatagaatttcttctgtgatttaaaaaaaaaaaaaaaagaaagaaagaaattgtttgcttccagtggcccatgcccaaagaaataaatccaagaaggaaacgggttattttatgtttagtttatatttgcttaaatatttatttgttcggggaatggactgcagaaaataaccgacacctgcgtgccaaaaaccttaagatggtgaatagtcttaagcttcagggaactgggttagaaagctgtggactcctttctggccctattccggattttgagctcctccctcctaaactacccaccctggagatgtgtggaggaggcccttaagccttcaagagggaagctgaggagccaggagaagcgagtttttgaaaatatgtttccgaatgtgcttctatagcactgtgtttacaagcagttccgggtggatgaaagaagggggttggggaagaaacaaatggtctaatattttcttctggggaaagaaaaccaaacctgtatgccctgggccatcagataatgtctgaatttcctacttcaactagattccaaa

SEQ ID NO: 26792 - DNA, 1296 bp, Mus musculus
aagccaccatgactttgaaagaacaactaccactgtgtgacactttggctcccacttctctcaacacatgtccaacggctgctgggtttgatgtaagactgagccacaccctgttaaccatcctggattggagtcagaaacctgtgagcttcagagtgcatctctcactcctatctgaactagtttcagccatgactcttggaatccaatactatcataagcatttgttaaaatagaaaatgtgggtgacgcctcccaggcgctcggctgtgtcaagatgaagctgaacatctccttccccgccaccggctgtcagaagctcatcgaggtggatgacgagcgcaagctccgcaccttctatgagaagcgcatggccacggaagtagccgctgatgctcttggtgaagagtggaagggttatgtggtccggatcagcggtgggaatgacaagcaaggttttcccatgaagcaaggtgttctgacccatggcagagtgcgcctgctgttgagtaaggggcattcctgttacaggccaaggagaactggagagaggaagcgcaagtctgttcgtggatgcattgtggacgctaatctcagtgttctcaacttggtcattgtaaagaaaggagagaaggatattcctggactgacagacactactgtgcctcgtcggttgggacctaaaagggctagtagaatccgcaagctttttaatctctccaaagaagatgatgtccgccagtatgttgtcaggaagcccttaaacaaagaaggtaagaagcccaggaccaaagcacccaagattcagcgacttgttactcctcgtgtcctgcaacacaaacgccgacgtattgctctgaagaagcaacgcactaagaagaacaaggaggaggctgcagaatacgctaaacttttggccaagagaatgaaggaagccaaagaaaagcgccaggaacagattgccaagagacgtaggctgtcctcactgagagcttctacttctaagtctgagtccagtcaaaaatgagtctttaagagcaacaaataaataatgaccttgaatctttaaaaaaaaaaaaaaaaaaaaaaaaaaaaaaaagaaaatgtgtcaaatggcacaacaaatactttatatttctgagcatgaaaaatatataagagagtatgccaggttttttggctaaatttttgttactgagagttactgtcattttggaagagattaactacaattgagaagatagttctatcagactggtctataagcaagcctgttttgttggttaatgattgatg

SEQ ID NO: 26793 - DNA, 1119 bp, Mus musculus
tatttgtaggtaatgagagatccccaaacaaaacgttccagaggctttggttttgtgacctactcttgtgttgaagaggtggatgctgcaatgtgtgctcggccacacaaggttgatgggcgtgtggtggaaccgaagagagctgtttctagagaggtattttaataacatgttgtataatacttggatatgtttcagtttggtttttttgacttataattattttatttgtaggattctgtaaagcctggtgcccatttaacggtgaagaaaatttttgttggtggtattaaagaggatacggaagaatataacctgagagactactttgaaaagtatggcaagattgaaaccatagaggttatggaagacaggcagagtgggaaaaagagaggatttgcttttgtaacttttgatgatcatgacacagttgataaaattgttggtaagtaacaatttatttgagtttcgttttcataaatcatctaagtcagtggttctcaaccttccttatgctgtgactcttaatacagatactcatgttgtgaaccccaaccataaaattttcattgctacttcataactaattttgctactgttataaatccatgtatatctgataagcaggatgtctgtgactcaacctataggctgagaactattgatctagatcaggaaacatttctaaaatattgactcattctcttctcagtctaccatcttaataatattttaattaattgcatggtgataaagggttcactttaacatggttttccaaacaaaaaataacttttcttttgtttttgacttaaaaaaatatagttcagaaataccacactattaatgggcataattgtgaagtgaaaaaggccctttctaaacaagagatgcagtctgctggatcacagagaggtgagtaggctcagatacacataaacagtgggcatgaacagttgtgggaaagatgtgaacttttcactccaattcttgttacaggtcgtggaggtggatctggcaactttatgggtcgtggaggaaactttggaggtggtggaggaaactttggtcgtggaggaaactttggtggaagaggtaaggtgttctcattatatgtgc

SEQ ID NO: 26794 - DNA, 1119 bp, Mus musculus; identical to SEQ ID NO: 26793

SEQ ID NO: 26795 - DNA, 2189 bp, Mus musculus
attgtggtagtggtaccaggaataaaaaattaaggaatttttaacttttcaatatttgtgtagttcagtttttctacattttagtacagaaactttaacaaaatgcagtttcgaaggtgtttccttgtgagttaacacgtgaagaagatcattgttaattactattttgtatgaattttgctaaagttaactgtaaagaaacacctactgacttgcaatttaaggggaatctattctccccatttccaaaacaatgatgaatgggcgctgacatgtggagagaatagatatttgtatgtttgcaatgtgtgttttagataattagaattgggaaataaaaaaatagcatatttgtgaatttaatagcattaagattaccttcaaatgaaaaagatctcaaaagttgctgtttggtttttgtgcattttctttcaaagtgtaatcatgattttagtgtattagatttattgagtcctagccatgttaagaacatctccattccacatttaccttgatcccgttgaaactgctgccaatagttcggggtacaaagtgttcatactgctctttactcaccaaggctggtagatgtatgtcatctcccagtttaacattactttcccatacagacccacaaagtctgctgggtctgagcaaactggtgggtacctggtttgcttttgcttataaaggtctcaaggcccattggtctagtcattttccttggttaagtgtcccacacacacagcttttcagagcaaaggaataaaagtcactcattgaaacccctgactggctggcatgctttcctgtttatccattttgctagatgatgaaacaaaatgatagtaaggtgttgtccaaacaaagcagcagaagatgtagcacacacggttgctcagtgcaagcacctcacagccccaaatatctgaactcaaattcggaatgtcttaaatccccaaagaagaacacatggttattctttgtgtatatatatatatatctctcattttaaaacgtcgggtgtgacaatttgtttggagaccctgtttgagaggagtttcagataaaaggtcatatataaaaattgtctactgttgcgccagctagtgctgaacaatttcattcaaatcctgagtatgtgccctgctgttacttcctttggcagttgaccgttgaaatcagatttttacttggtttttaaagtataagctaaacaagcaataaaagggggaatggggcgtgctagtatttcaatttgctctcttgttgctctacttctgtgcctctgtgcattattaatatttggatgcatgcagtgctagcatggaactttggtcttcacaattactgcagtttttccagaaaacactcacaccaataaatgtaacagaacattccatttgttaatgggcatatgtgcataagcagtgtagaaaataggctcatgttagaaactggctacatccttcataactaaaagtgtggttatatgaatggacactgtcaatgttcatagcttaaacctgggtacctggtcaaaatgcttaggaaacattaaaattgagctaaattgtctcaagtccttttattcatataataaagattgaagggatgggggggaggctgacattttctggttttgtttgtgaaattgctggacacaaccttgacagtatcctttaatgtaatgaggtcaattgtattgttaaccatctttttatgtataatagtgaaaaatttacagtaagttggtgtttacaacctataatcaggtaaaatctgtatgtgacctgtttataagttgtactgagttagtttttgtgaactgtggaagagtaagccatgagagcgatttaaccagctttaaaggacataagttgtgctttttaagcacggtggatcaaaggaaaacccactaagacaggacttcagcagccatttgagtatggacaagtcagcataaataaagaatgagaaggcagcagcagcaagagcttcaacaacagagaagtggaggcataagatactatgatgctagtgagcaacttcccaaaagctagttaaagctgcttattgcaactgaaatgtcgaagaaagtagcaggaaggagcttcgccttttggaacatcaatgagctagttgccacaggcgctaggtctagcatttagacctgcaaggaagggcaa

SEQ ID NO: 26796 - DNA, 2189 bp, Mus musculus; identical to SEQ ID NO: 26795

SEQ ID NO: 26797 - DNA, 1616 bp, Mus musculus
gactgaaagctaatttagagttctgacaaagataaaatacttatctattgaaaaatgggagttgaaggaattattgaaaagaacaccttggatttgggggtagggaattgatctaaaatgcacttagcctctgctcatacaatgtgaccttctttcctagtgtcttaataccgaaaacaagcagctggctgatactaccgctgttcccagcccagaagccacactgacagaaatggacagcaattaccatttttactcatcgatctcctcgctggaaaaagaagtgggcaactgtggtccacatttccttcatggttttgaggattctttcagcagcatcctctccactgatgatgccagccagctgacctccttagactcaaatcccaccttaaacacagattttggcgatgaattttattctgctttcatagcagagcccagtgacggtggcagcatgccttcctccgctgccatcagtcagtcactctctgaactcctggacgggactattgaaggctgtgacctgtcactgtgtaaagctttcaacccgaagcacgctgaaggcacaatggaattcaatgactctgactctggcatttcactgaacacgagtcccagccgagcgtccccagagcactccgtggagtcttccatttacggagacccaccgcctgggttcagtgactcggaaatggaggagctagatagtgcccctggaagtgtcaaacagaacggccctaaagcacagccagcacattctcctggagacacagtacagcctctgtcaccagctcaagggcacagtgctcctatgcgtgaatcccaatgtgaaaatacaacaaaaaaagaagttcccgtgagtcctggtcatcaaaaagccccattcacaaaagacaaacattcaagccgcttagaggctcatctcacacgagatgagcttagggcaaaagctctccatattccattccctgtcgaaaaaatcattaacctccctgttgatgacttcaatgaaatgatgtccaaggagcaattcaatgaagctcagctcgcattgatccgagatatacgcaggagaggtaagaataaagtcgccgcccagaactgtaggaaaaggaagctggagaacattgtcgagctggagcaagacttgggccacttaaaagacgagagagaaaaactactcagagaaaagggagaaaacgacagaaacctccatctactgaaaaggcggctcagcaccttgtatcttgaagtcttcagcatgttacgtgatgaggatggaaagccttactctcccagtgaatactctctgcagcaaaccagagatggcaatgtgttccttgttcccaaaagcaagaagccagatacaaagaaaaactaggttcgggaggatggagccttttctgagctagtgtttgttttgtactgctaaaacttcctactgtgatgtgaaatgcagaaacactttataagtaactatgcagaattatagccaaagctagtatagcaataatatgaaactttacaaagcattaaagtctcaatgttgaatcagtttcattttaactctcaagttaatttcttaggcaccatttgggagagtttctgtttaa

SEQ ID NO: 26798 - DNA, 1181 bp, Mus musculus
ggatgggtgtgtgcgtctgacttgggccttgtacagtcagtgtgggttttgtggaggcaataagactgaagtagtagacaatccccaataccatttgcaggtctggaactgcactctcttttttaaaaaacatgtatacattttagggctgtagatttattttcctggttttatttttcattgctgacttttgagcacagaattatgataatcaattaaatttatacatcacctcattgatttttccaaactttttttttttaaacaacttttgggattttactccctggccttgactaggacaggattgtaccccacccctttttctttttcaccaagacaactgagcagaaatttggctgagcagtgttgtgggactatgatgtgatagttttaatcctaccttctgctttcgggcagctgcggccagcacagaaaccttgcaagctcactctgtatgtaagctttctggacaagggatggtcgccaaatttttagtttggatgtcttatacgaaagggaaatagtcttcattaaagttcgtatttcttttacctcggcctctcaaaaacaaacaaacaagcaaacaaacacccaaaagaaccaatgaaaatattggattctgtgactaaataatgtgtacatactcatttcacaaatatttatgaggtctacatccggacttgcatggcatgaagattgctttaatcttggagatagtggagcagttgttcttcaaggacatgagtttctgaaattgccctttctaattactctaaccctttggctcttggcactcctgaattacaggatgtgttttatatggtgattagtgtaatttcattaatgccgtctatccttcggggatgtagattcttaaggtgctttgcttttgtttaatagttgctcaggaaactcgaaaagggagtctcttacctacccttagtagcttgtgtgactggccattatagcattgtctacacacaaaatcagctgtgcttggcctcacagggcctgtgtttgcatgttctgttaggaactcatctgccagaatgctcagttccattgacaaaagtcaggggaacccagtcagacttggtcctttgctttcagaatgctttcatttcttctctgaaatggcatggagggagtgcctcttttggcccttctgaggtcaatgt

SEQ ID NO: 26799 - DNA, 1090 bp, Mus musculus
tttttttaagtgcggagatgccatgtatttattatatttaaatatattagcaggtttttttttctgccctattttctgattcttagatatgattgttaatagtcgtacaaatagatgtttcccatatactgttttctatgtggaatatcttatttattcctttagcaactctgttattacatattactactgtcaacattttacaaatgaggactcactaagactacttagttactagatagctaagcagtgacttttagtttaatgttagcacaaagatgagggtatgtttctatccagtgcatgcataatgtactgctcttgttcaatgtcacagcatagagtaagggggggttactttccttacttctcattactaccttgctactgaagctttgaatttggaacttagatattccccaagaaaatgttaatggctcaaaggaatgagacttcttttcctttgtaacagaaccggattctctgggttgatgagaacaatctgacagctcacgtagaggctgggataacaggacaagatttggaaagacaggtatgttatctctttaattaagcttttccaaacagtgattttctgtgtctgaaggaactgcctttccacaatacattgttcactcagtgaatttgctcagtttttattgtaggttgaattagaactgagagtacagtagtgaatgagacactatcccctaccctcaagggccttgtactgggatagaaagttggagaaatagacaatggatgattcaggctaagtaagactagatttagattgtttgtgtcatcaaaaggggccaggtaggaagaacttggacaattatgtatcatagaagtttgacatttaaaatgagacttcaataaaagggaacaaataagaacaaattatgtatgaaaatgccataatgaaattcattatttggcacaataactttaacaattaatgagataaaatgagactggcgaatgagtcagagttaggaaaaaggggctcagttctgagaaggagtgtgcaggagctttcagggtagcattacttttggaacccttaatctttctactctttctcagt

SEQ ID NO: 26800 - DNA, 1135 bp, Mus musculus
taacagtttgaactaaacacaaaatgctgctgtgtcatttggcttcacataggtgattcattgtgcttaaatgttctttagaaggtcttcctcccccacctcaaattattaaccttcttagccttcttttgtaatgtactatttagctttgatgtatgtgtctagatttaacaagatcttcacgtgtgtttaagtgatttctgaaaaaaatttactttaaaatattaagcataatttccattttcaaatttaaacaaaattttggtactaaaacacattgtagaaaatgtccttgataggatgcatgggaagtagtgtctgagttttctctcctggaaacacacatctacactcactacacccacacactcacagtggagggaggcaggaacaaaagctgggaagtacttttataaacatggacttttgaattaaccttcaataggttcttgagaaaattctcagtatattttattttctttgaacatgcctacatttcactttgttttataagatgtatgagttcttttcaggtgttggtgagtacgtaggctgtagcagatccttttgaactcactctttagatattaaatatttaacatcttgttctccttatacctcgtttcccatttggaaagcttccgtcttttctgcactatcttactccactgtggtctttgacttttagagtactggtcatcagattccaagaattgtcttcagactgaccagtttctaggatcactgtcactctccccccaaaagtacagactttttaaaacaaaacaaaacaaagaaaatcagacagtctatatgattctgtctgtccttaaacctgccatgcagcccgaacagagaatttgtgatctttttgcttcagcttctggtattaggattacatgcatgtaccaccacacccctgtgtttttgtttttgcttcttaacaaatttgtaaaggtacttttttcacaaggggactacatcttaaaaaaataaaaagaattgttagctggtcactattgagccctcaggagcaatagtttggctggcagggctatcgttgatgacttcagtctgccatgtctttccttgtcttagtatggattgctaggtagactgccataaactagcaggc

SEQ ID NO: 26801 - DNA, 3763 bp, Mus musculus
ctgtatttcagctacatttgtttgttggtttaaaatgagttggtttttgttctgtgctttgtttctacatctatagattgacagatggcgctcctgggcctcattgtaggtgtaccagtttatagccaactaactggttgtcgtttcagattttagtcaggcagcacaaggctgcccattatctgaggaatatgctgccagctgttttacatgctcctcctctcggtgagctgaggcagagggtgtcatccgttgctcggctagcctctcttctgtcctgtcctttcttaaacatttctctaaagcagataatctagcaaagattctgctggtgagagatatttgtgtatgttgttaaagcatactttcctgtgagtaggtcattggggaggacactcaagacagagctggtagtctgttactagcatgccttcatctgtataaggtgctcagcctaagctttgcttgaagtgcatacatgttacaaacttaaattgccaacatataaattactctgtcagcagacacacttttgtcctccgtgtctgttcctaggagggtgtgagctgtatttgtatcactgaggtgtcaactatagctgtgtcctggatcgttcatagcgtgctttgtaagaacagctgacttaattcacgtgaagggcaggttgtaccatgaagtgaaggccattgtccatcctccagcctcaggtttcttctgccccatgcctggtaagctgcacacgcagtgcagcatgagcaaaggaaagtcttctgagcctgctgtctccgctgtagagaattatttggctaaagaaatagtcattagttgactcaaagtctcaataatttcaatgacaacgatctttttttttaattagccacaaatagcctgataaattttcatggaaaaacattttcagtttaattcttaataatggtttaatgcttttttgaattactggtttaacctaaattaaaagaaaatgtattactgcatatgccataatcacaagtttgaaatatcctatttcttaaataaaaaggagaacgttaattacatttagcagacatttttacattcaaaactggatattgaaatacgtggaacaattgctttaaatcactgtctgttgaggttcctgattcatgttttgaaatgggttcttttcttaatgcaatacctaacttttgataattttttaaaattaatatttaatcagataatgtaagtcaaaatgcagacgatcctttaaaaggacacactgtctgtctatgtagcaacagctccagatacgttggggcagtttgataccttttatatcttaagtagccttaaacagaacagcgaaaatttaaaattgacaaaatatttttaagacttcaaaatagtaaataatttttaactattataattggcctcaaactaacaaatttaaatctgtaggaaaatcaatattaaatattaggttaacaacaaaaactcaatatttattttttggaagctgcctttttattgatgatttatttttaattataaaatttacatcagatctttgattaaagactttgatggtttgaaatagccggacactcaaggaaattgcttctagaattataagattctttataaaatgcatcttcatgaaggtgattctctaattggtaattgaaatgtagcatttagtaagattccaacatctcactgcaagtgtctacatgtttccaagtagttattttaataatttcattagtaggtccagttccttgcatgtgattgttaaaacgtttttctcaaggagttcagcttttcacagcctcagcgatctgtactgtaattgtaacacctgagttgctgggttggttcttatgagctttatggcagttggcagtttatgtctttgcttcccttttctgtgtatggaggcctcagcaacctcgattctataatggttactacattttgtattttaagtaatttctacagggatcattttggaacacatgaatgttcattagtagtagttcttactgcaaatcaggaagccttcccagccacttctgggaggtgctgcgttgtagactgtgtctgcggaggaacatgagttcatgaatatgcacaaagcacttaaaccttgtctcttctttcagaagtgtctgcacatggcttcatgaagctaagcccaggaaaatactgttctctgaagcatcttaactcaaagagtagtgtttttcctgttgggtatcagaggcctagaacactgacttgtccttcccaagttagtcatatgtgtaatagtttgcttaaatcacatgcaggttgggctttcagtgggaatgggaacttgctgctagtgagaaatggagtcagatactaaagactcaccaaacaggctgtattgaccttggagaaactgctgcatccatgtgtggtggtgcataagtgaattgagtcttaatgctatggtccttgagcatctccgttagctgaattgtggagaccacatgtttcttgtgtccaacattttattacagaataaaggattaacctatggtctttttagaaatggtaggttgttactcaaaatgcttacgtataataggattattgacctgaggttatttatgaatctggaagctttctggtatgcatatttgtgttgttggtgtattttgggaaacaaaagctcaataaaatataagcttccattggtgtgtatattatatcagatataaacacatgtaggaaccctcctttccccctccagaacactgtaacagtcctagatgacgtatttgaaaaagcctttctgcatgttaatcccagagatattttttgtcatactctttcataccaacagcttctaagtgtaactgatcagagaaactctgacatgctaacctgaagtgtgttgctccaaatggggccagctttggtagcactgtcagaacaaagagatgcagagggactgcctcacaccatgcagtcacaacactgaaggcggcctcagatgctgtctgtggaaggtgtatctccagtctgaggagcttgagtcaacagttttagtaattttgagggttccccccccccccatcacttaatccttagtgatttttgattttgacagaggctcagcttttaacaggagaaaaggagggagcacagccggtgcaggttaggactgaagagctccgagttctctgcctttggcattgtcagttctggaggcttggcttggcttggctcagggctctatgctccattatgagccatctgcctacagattcatttaattcttaccagtttctctttactaaaaaaagaaaatcctgaaagtataaaaggtttccttaaactgttgaagtgtgtgtctgacatgaaggatgtaaccaacctttctgttccttaagccaaatagtgttcatcttcagtgtgaaacttaactgtacaaactgcttgtataatgtcaagagattatagaaacattattaataaaatgaacatgagcctatgattttttaaatcaaaggaagtgtggagctgttttttcttctgtatgcatatgttttcaactttacttttttaacctgtatttccagatttgaaagtagaaagtaatttttataagtctgctaatgtagcattgtctagataacccaactatgactaaatccctttggctttacagctgaacatatcataagctaagttgtatcagtctctggttatttttaaaccaagactaaactcctaggtggtgttgagt

SEQ ID NO: 26802 - DNA, 1195 bp, Mus musculus
tttgcttagaataagcattttattaatgtgatttgactgtagccaccaaatattcttggaccattcaagagttgctgcactacgtaagactttgtacacactgtaagtgtacagggacaacagtttaggtctttgtgtggctaaaaggcgaagaaacaaaaccaggccagggagagttaaagagtcggaggacccgcagcctctgcgagagttgggagtcctgcgggatctcacagccaatcagcagcgaggatggagcccgccatcagctggtgctgggtcctgcctttaagaggagtccttgggcacagcagttgcaccttacatcttggcctccctgcatcagtggaccaagggtggcccagggcacggctgctgtgattgtggtaggtgctggcctattggaagagagccggctgggcagattgggcctgggagccctgattgtgggcagatgcaacgagggcctgggtggaccgagagaggagcgttcaacggtccccagcccccggggccaaggcttcagttgtgaacaacaaaggctgtgttattgataggaccctctgtagcgcctcgggtcctggggtggtgaggatagcttggtaaaacttccacagatgttggccggaggttggcatcgaggtggagggctgagcatttaggaagctggattcttgttccaattggtgggtattatatagccactgccaggggagaaggatggacggtagacagctctgaaggactcgcagacccaatgaggagatcctctcagtcgcgttacctcgccccacccacacaaccgcgtggaaaagtttgtgttttcttatgcatctgtttagtccttcttaaaacagtctagcgagcttcccctacctccttcatcatttgaattatttggactttgtgaaatgtaagcgctttgctggtgccttggtggttctcacattgacttactgttcatgaaaagttagacgcgctccacagtatatagcagtatcaacacctatttcaggcctgaaaagtgacagagagctaacctagactgcgtgaggcccgaggtgtgagccttggcaccactaaaaaaaaaaaaaaaaaaaaagcaaaaataagcagaaatcccaagcaaacaacaacatgggatgtcactaaatctttattatcttatcatttaattattatttaaaataatctt

SEQ ID NO: 26803 - DNA, 1161 bp, Mus musculus
caggagctagagactcagggctggagaaagaaccatcactgactcttgtgagattctctactgcggagtagaaataatgttacatactaaatagagcaggtgtcaggcataattagtgaagtcatccattcattcaattgaccttattttttttccaaagatttttatttaactctattttatagatatgagtgttttgcctaaatgtaccatctgtgtcccatgtgtctgcagtatccgtgcaggtcagaggaaggcattggattcccaggaactgaagttacagatggttgtgagctgccacgtgtgtactgggagttgaacctgggtcctctggaagagcaatcagtgctcttaaccactgagccatctctccagcactcagcaacacagggtctcactacccagcacaggtgggcttttaactaaatcttctttgtcttggcttcccaaatgctgggattccagatgtataccaccacacttggaaactaaatattttgacttttaattatgtgttgaatactgtgttccacacaagagataaagtatcaaacaaatggccactctttcctctatcatgaagttaacagtttagcctcatgtagttaatgattatatagagctcatagtttagggctatgaaatgcatgtgtacaaggacacaggagacattagttttccaatttcctttgactatagtgcccaaagccaacttctgtattgtctaactagtagtctctaagcgtcaggaattacagatgttacaatgattttgacacaggggttacaatcgttttttcctggcatcacactctgtggaaggaatgttctgtttaccttcagcttagaaagtacagggagtaacttgcactaaggttccacttttccttgtcttagaaggaagaccagtcaggtgaaaacaatgtcatcattttattgacgtgaggaagtgcaaagatcacgagtaagacaacttgcgcaccagcgccatctagtgggaaaccgttttcttaaactgcagtgcctgtaaaataagaatattgattctcatcctgcacgtttagagcttatagtatttccttcaagagaagcactgggaaactataggaaaggcatttatatctgtatcacccaaacatgaaacatcgtatactcgag

SEQ ID NO: 26804 - DNA, 1147 bp, Mus musculus
tgagagaactcaggttttggctaggttccttgttagagactgggacagccaaattcctgattaaaggaaagaaaagctttgtaaatgtgaactaaaaagccttatatttatggctttagtggaacctttcagacgtcatcttatacaaatgatgagaaaggaaaagcttaagggtgaagggggaaaaagatggcgcagaagtccctccccaccagctgctactgagagccaagctttaaagtagggcagctttgccttcatagtgatgcaggttcacctggcttcccaattaaaggaactacatggttttcagcatggctagccatcagcgcttttaccattattgaattttgatacatattcagggcagagatcaaaaagggtcaaattacttgaaaatggtgcggtggttaggatagaaatagctataacttggatgtttataccatgacttttgtttttgttgcacatcctctattaaccatggattgcatagtgagattttctacctttggggtgcattaaataattttattagtcaagagtggaaccctgaacctatagttgtagttcttcagagactgaggcaggagaatcatagaaactgcagagcctggaagacacagtgagaccctgtatcaatatgtgaatgatctttttttaaaggttcaacacgatagtatgatagactcccacattttacatgtcatgacaggagggatttcttcggtgtggttggtgcactgttcatttagcttttataggacgcacctcctgcctgctgggtgctcttgtctctgaggaataagcctaggattcagtgagccccacccgagagatctaagagccagtgttgaaagtagttgagctcccttttaaggtgagtcttgtttttatatttctctttctgttagcggaatatagacattttactatttcagagcatctggttttaagttaatttacagacttttctctctcacaatgcagtcagtatctgccagcatcagctctctaagtaagtctggtcttgtttacttggaggcatttatgctgaaccaggtcagactggccacgccacggaaggttacagagctcccgacagtgagggatgctaactacatcggctgcacgtgatgattttcat

SEQ ID NO: 26805 - DNA, 1266 bp, Mus musculus
caccccactccctgtctgttttgtttgtataagcattgacgagtgattgaggtagtgtgctgtggatacttcaagaccaatgaaaacgaatggttttctaaaggatttgctttacaggtacccagcactaactgtcatgtttgcatgcgtcattacagaggagctgagtgccaacggacagtatcagtgtctcgcagagctgtccaccagtcctatcaccgtgtgtcacggctcaggcatctcctgtggcaatgcacagagtgacgctgctcacaatgctctgcagtatttaaagataatagcagaaagaaagtaggcttggagcgacttaggaaatctttctgcggcgcaaagaagtttccctcgcccttctttccaagcaaaatgtttactgtaatgtatgtctgtgtgtcctttccaaatctcttcagattccgtcaactttccagatttaaatgtctcctggtaggttattaagctctttttaatggcttcaactttgtattggtatatcgtgtttataaactttgtaccacaaggctgagtgtggttttcattttacagggtcagacgcataggttgaacatgcatgtttgactgtaacggtaaagagataaaacagccttactggtgctgaaactcttttgtgcaaagctttgtggagtggattctgaagagcccctttagactagagtgttgaggcttgtgatgaatgtcattgctaaatttcagggaacgtggttggtttgctatgtatttgaaaccatggaataaagagctgttcttataatgggagctctgctcattttattacacagctactcacttgatcttagctttattctttgtaggcaaactttcctatgaacgtgttcatttgtattgtctacatgcctctagcttactgaggaaagtcaaaggtaaaaacctgtggcctaaaagaaatatgcaaatgtatgtattgatttttctctaggcctatgcaacataggcctttgacataaccattcgtagatgaattagtagttttaaaatgtgttaacaaaatgcaaacaatacccttccagttcactcagttcttttataggactatttcaaaaacatgatttgattcaaaggtcagagaaaaaggctagagagatggcccaatggataaaggtgcttgcaaccagtactgaccacttaagttgaatccctgaacccacgtggtggaaggagagaaatgactcccacaaggtgttctctgacttccacagatgtgctgtg

SEQ ID NO: 26806 - DNA, 1201 bp, Mus musculus
gaaacactaagctataatcaggcctacaggcctacacagggactttctcactcctccatcccaattatttgcatagcttcggcatgcagcattgtaagggaagacttgtctactctgccagcctgtgttaaacgtgccagttggagatggcagtagctgagtctcgctcgtgtcatagcagcaatgacgcttcagttatttatttaggtggttgtcaatgtggagcgcagcttcttcagaagtaggcattgattccccaagtagctagtcatttcaaactcccttgacaaaactcttctctctcccctgtttataaccccccccccacacacacacagatacattaaaacccgatttatacaggattttttttttaatgcaagatacatcaaaatcttagagaattatataagcagatgatgggacacattttcttgcctggctatctggaggaaaatgcatttatagtctgttacaatactagtaggctaacattcctggctaatggttatttttttaagtggttttaatagtaatgtactttatacattcatacaaacgtacacacacacacacacacacacacacacacatttaagaacttcaatcatgcatctatatcactcctatccatctcccctcctccttgtccgacccatctcctcatcccaaaatatgatttcttctttaattactattgctacatgtactttccctgggactatttttagatttatctttatgcttatgagtgttttgcctgcatgtatatatgtgtactatatgtatgcctagtgcccacagaggacagaaggatgctaaatgcattctttaatcccctgaaattggtgttatggatgattgttagccatcctgaccctgtggggacttggaaccaaaccaggttctctgtaagagcggagagtgttcttaaccaccgagccacctttccagcccttagtgtgtacattttaaatatttttattaagcaactcttatgtacaatgcactacaaagcttatctaagtcactaatacatcggccctacaaccaagtagtagtcagtgcgattcagaagaagctaggtgaggaatggacaggtttgtgcaacattgaataatttatggccaagtgactttttaaagatccagactaaattttttttttaatatagggtcttgtgtagctcaggctagcctca

SEQ ID NO: 26807 - DNA, 1374 bp, Mus musculus
atcgcttggttaaattcatccaagcaggtagatggcatgtagtgtgccagccctcctcctgacaatgtacaaaacaaatctttgcctctggaaattacataatttatcttaggaatgctaacgtttctccttatgattggcagtggtagaaaagtgagtttctctctcaaacaaacagaaggttatcaggaaactggtgggattttgtttgtctgaaaagacctgagatgctctttctcgggatcagccgtactcgctgaacttgtcaatcactttccacaggacctcttcactgttcaggaaacacacttaatggagatttggcatcagcaaccattccggaagaaagcagactcatggccaagacacaatctgaagaacctcttctgcccttctcctgaggaaacagacatgcccagcttcctcctgaggaaacagacatgcccagcttcctcctgaggaaacagacatgcccagcttcctcctgaggaaacagacatgcccagcttcctctgagtgtcgctatgcaaaagctgctgtaattaaactcggtctgggctagctttgccctctccttaggatttctctgcactttatagaatattgtaaacaaacaacccacatacttttgaagtgtattttatctttctatagtttacttgcaagagtattttcctaataacttcacagtatgaatgtgcatctttttttttttttaaacaaatgatggtgtaacattttgacatccataaggacaaatgtagatatttttctaaaaaactgtgagggactgacagcttggtcagtgtgtattgtagtatataaacatgaaatctcgccagatttatttgacagaaatgtgagagatgtaacttgtgccatggaccaaaaggtcacttcaccccagcttaaaattaattaccatagcagcttgatggtgattatatcatattcctttaagcaaaaaggaaacgcttaatattctaaaggtctttagcccaaataccatgacatattgagcatttttttttaaaaagcagactccgctgtccttcatatgtgaagttgacatctactgatttgtcaataccaaacatcagattacagtatttaatttttatttatttattttcttattgcatcagaagatggttatgtcctaacttttatggcctccccaatttaagatgtatatgcatagttgttattacgttgttctaagatacatgaggcaagtgtcccagtgatcttgttcccttacacgagagaagtaaacagctttcaatgggaatggagttcagtgcttttcagaaaataggcagcaagctgctgttgtaaggtatgatttgcagctctttggcatatctagagaca

SEQ ID NO: 26808 - DNA, 1522 bp, Mus musculus
cgataacattcactgtaaaggtgctggactctccaggaccacctggtcccattaccttcaaagatgtgacccggggatctgctacactgatgtgggacgcccctctccttgatggtggtgcccggatccatcactatgtgatagagaagcgggaagcgagtcgccgtagctggcaggttgtcagtgaaaaatgcactcgccagatcctcaaggtgagtgagctgacagaaggtgttccgtactatttccgtgtttctgctgaaaatgagtacggtgttggtgaaccctatgaaatgccagaaccaattgtagccacagaacagcccgctccacctaggaggcttgatgtcgttgacactagcaaatcctctgcggtcctagcctggcttaaacccgatcatgatggaggtagtcggatcactagctacctgcttgaaatgcgacaaaagggatctgacttctgggttgaagctggtcacaccaaacagctgactttcacagtggagcgcctcgttgagaatactgaatatgaattccgggtgaaagccaagaacgacgctggctacagtgaacccagggaagccttctcatctgtcattatcaaggagcctcaaattgagcccactgctgatctcactggaatcaccaatcagctcatcacttgcaaagcaggaagcacatttaccattgacgtgccaatcagtggtcgtcctgcccccaaagtaacatggaagctagaagaaatgagactcaaggagacagatcgaatgagtatcgcaacaacaaaagacaggaccaccctgactgtaaaggacagtatgagaggtgactctggcagatacttcctgaccctagaaaacacagccggtgttaaaacatttactatcacagttgtggtcattggaagaccagggccagtaactggtcccattgaggtctcatctgtctcggctgaatcatgtgtcctatcatggactgaaccaaaagacgatggaggcactgaaattacaaattatatagttgaaaagcgcgagtcgggtaccaccgcctggcagcttatcaattctagtgtgaagcgcacgcagattaaagtcacacacctcacaaaatacaaagaatactgtttccgggtcagctcagagaatagattcggggtcagcaagcctctggaatcagtgccaatagttgctgaacatccatttggtaaggaaaatgagtaccaaacttcaaagtctgttttaaaatttttaaatttctactgaattctataaaaccatatctttatatttcccttctatatttagttccaccaagtgctcctaccaggcctgaggtctactatgtgtctgccaatgctatgtcaattcgttgggaagaaccctaccatgatggcggtagtaaaatcgttggctactgggttgagaagaaagaacgtaacaccattctttgggtgaaagaaaacaaagtgccgtgcttagagtgtaactacaaagtgacaggcttggtagaaggactggagtat

SEQ ID NO: 26809 - DNA, 1193 bp, Mus musculus
gtaactcggttcctgttgatgtgaacagatgccttttctggcaaaagaagtttcaggggaaaggaaagggtaaggggtcccccttgctctttcatccacacagacccaatttccccatgcctccatcaatggttcctagccatgacacatattctacccttgtccttcacttcctgccccacgattaagatttgcattcatgggttgtgctggctgtctaatgctgagcatagtggtcttccacccatcactcacttgttctaaggaagacacaaggaaaatgacaattccacgtctgtctctatctttctgagtccactgggaaaggggtaaggggaaaggtagctaactaacaactttcttgaattcttagtttatgccccatctgtgtaatctacgcccaccaggtatggagaatcattagctcacgggttaaagaatgggtaatggagctttaatgatggtcttcactggagatcccacccttcctgcaggtcacaggcaggtgcaagagggagcatgctggaaagagagtgagaggtcaggagaagctgctaggatccggttcaagaggagggaccatggagaaggtgctggcatggcttttactatagcagtgtgctacaacgctgcatgctctccactcttcttctggtccgcattctggtgaaaccacagtgtattctgccctctacacaggggtgcagcctcttctgcttccctatgctacagtttacacttctgtgagctctgtttagttttgattcgagaatcatccagcgtgtcttggttctcccggggctatgaaagattcatggccattttcaaaaaagatctttttctaaattttcttagttctttccttccctttcatcttcttccttctctttttccgttgctttgcccaaacatctctcccttcggagatggcgcagctctgcaactacagagagagcatcggtgaagcaggctgcatgtgttcccagccccgcctctctgggtttccatgtccctgaagagctgtggcatttaagaagcttggtccccctgcctaaggccttccagaacttctatttacagggacagcctcatgatgaacttgcgctcagagccagcagagatgacatatgacccttccagtcatagtagggacgccccaggattgtctgtaccccttcaggaatgagcaagcc

SEQ ID NO: 26810 - DNA, 1194 bp, Mus musculus
actcaagtgaacttttactgggtctagggcactaactaaatatgtctgtattatctggcttcccattctataaactgctcacactaagtggagggcagagtcctacataatctgcgtgcagcttctctgtggcaaagcagttttcaccaatgattaaaagagatgattgaaattaattttaactcttgtttgagttcctgttgccattcctattccagacaagcttcagaaagagatggaaaaatccacaagatgagagttaataggagatcaaggacttcttagaccattgtttcagatttaacaatcttgagtaaagagtctgacatagagatatgtaaactataccatggccataagctctccgtaatgttctactggaaaacaacaaataaccttcaggggttcctctttggaagattctcttggaataatgtctttaaaaatcagttatagaaactgggtgaatgagagatgtgaagttcgtgtgcctgtggtcccctgtaagtataaccacagcagagttcttcagaattgtaagagaggttatgatgggatgtggtggctattataggataatgtctgacttacaagcttaactgtcagatgggggtcatctcaaacactgctgtgtctgggaacaatacacctgagtgacagtggccagtgtccattagcttttcttacaatggtactttgcaaaggggcaggcccaccaggccctctcgccattccataccacttagaactgcatttcctgcaagctgttgtgataatcaaaatatgatacatcctcttagtcaacttgtttcataaaatattaagtatcaccaagttcaaaggcaatactttaaggaaagcaaaacaggaagtctagtgccgtgggaggcttctttgtgtttctcatgaatactttgtctttattgttttgttctaaaccaaatctaaaggaggacattttaccaggctctttatgaattatgataacctctactgagccttggtgtaaaaacatactacctgtatgtaaatacatgtcccaccatggggacatagtaatagaatatttaactatactttgcctcacctaaaatttatgtttaagattatctctccaagtaactttccatccacatttacttaagaaaaattttaacaaatgaaattgatcatattggtcaccatttgtgtgtt

SEQ ID NO: 26811 - DNA, 1722 bp, Mus musculus
caaatgacaagccctgttcttcctttctattgtgagttagattgttctatttcagaacttattttaattcatatcacacatcaaggcttctttactgccatggtatttgggaggtttatttgtggacttggtgtattattaattcatccttatgttattactaagtggtgtccccatgattggatattgccacttgttttctcagtttcctattggctaactgggctgtttgcaggactgtcaactatgaacaaagctgcagtggtcattattaggagcatacatatgaatatagttattcacgtgctcgtgagtaaatacttagaattgctggctcgcaaggtggtttttaaaaggaaactatcactctttttcccagtgtggttgttctgtgccctgatttttatattttgggtgtgtaaaaagttgtaaacaattttttctgattctcatgttgaaatagtaagagaagttgggggtagaaattatatcgctcacatttgaatgtggtagttggtatttgaggggagggatgctgtctgtcacaaaacagctcccccaagcggttccccagacataaaattttagaattcgccctaccctgtgagaggttaggctctaagcatgctaatttatagctagaaggaacagcacaagcctgattatgttgcatttaccacccactttcagtaagtaaagtaagacacatcactgagtagcaaagaacactttatgatggaagtggagagggcagaaagaaaacccaaagcatacgcaggagtcagttcctggtaccgtagagtgagaaagacacctgtgcagggaagggcccactgtggtcaggaaagcagacaacaggatgggaagaactctacctcacagtttacatagcagatagttatgttttgtagacattttagcctttaaatgtcacagtcttcatcttttcagcccacctttgttagtttcatacttgggtgaattttttctactgtgtattatcctcatcttctgttctattaaacaatatccacctgtgaaattacggtcatatgtttccaatacccatgttcagataccagtgtgtgatttacctttcctatgggatttctaagggctgggaaatttggcttctactgtatatccttataatgtgcccacattgtaaatatgcaataaaaccataaaaaatacaagggcagcagattttcatatgtatttctttgccatgttgttttttgacaagtttgatttctgtaaataaagattattcataaaatctagggggaatttactcattactggtctctacagtgtgatctgatggattttacatctttaaccatattttaattatttttaaagtattttttgaccagtattttctaaacaacttttattaaaagaacagaaaatgtagcttctttagaagacagaggtttctctctcaactctaacaacccaaccatctttgctgagtggcatggagattcaatgctctagctatcctagtaaagacttgatgctgtatccataacgttgattcaaatccctgaaggtaggagctcttgcctgtgctctgtgttcacaataaagagagagactgtgcagctcagtatcaaccttttatatttctgtctgccttatctttagagtattctcagacttatccagccctaccagttacacacacacaacacacacacagagttacatccatga

SEQ ID NO: 26812 - DNA, 1224 bp, Mus musculus
tatcctttaagtgggaggcaggggatgggaatgccaagtatactaacagggctgtcagagtatatgtctgtccttcgtaagatcagtgtgctgacctgggctttggtaaagtgtcaccagtctctcctgaggaacaccgacagggacagtagcaccctttgaagatgtgactgtgcatcattatttccgttgttctgtagaggtcacttcacttcataggagaggtctccttcacgaagtcttccctgtggactgggtttccaaactcttgtgatggctccaaaagccaaagctggatttgaaacacttcagggtgactcggtaggcctcctgctgaacaacatctagcctgtgtctcagccccagccttggttccctgctttacagttttaatagtttatatattttatgtccttaatccatttcagagtggcatgtggtataaatacatgaactccatggatgtgaaggcatgaggacatgaaggcagacagactcataggtcgggccagagatggtgacaaggctttgctccacaggtcagtgtggaggtggagctctgagctgggcttattgtcatgggtgggaatccagacagcatgagcgttggtgcttgctgtccttggtgtagatgagatacatggcatgctaaaaacacaataggtgggtggcttttaagtttagattttttaagggagagaggccagtttgaagaagaagctgacaatgtgctggattggcaagcagttaggatccaaggacatttaaggagaagtgatgttggtgggaagagtctcaacacagtagaggggacagggcttccttcactctctggatttggatttcttggctttcccagtccctacattacattcacagtttatgtcagtccaagtccttttcattatacaagttagctttgctttgcataggtaatgcatgcctcgacttcagtttatttgaggcaagaagattcctgaagacttaccttcattcttgttccttgagcactgtcctgtgtgaagctgcctgtctttagaatgttcatgtgcccgcccttccagcaatatctggtttttgcatgtgtgctttcttacccttttcacattaaagatacctcagaccctattgccacactgtcttccagggcagcgctcacactgtctgaaccttggcttatttttcctcgtaccagaactcgaagagctttgttctcctccccct

SEQ ID NO: 26813 - DNA, 1157 bp, Mus musculus
aggggctccattgtctcaaaattgctggcttctatgatgtgcaaagctggtctgactcatctcatcactatggatttacaccagaaggaaatccagggcttcttcaatattccagtagataatttaagagcctccccattcctgttacaatatattcaagaagagatcccagattataggaatgcagtcatcgtggccaagtctccagcctcagccaagagggcacaatcttttgcagagcgtctacatctgggaatcgcagtgatccatggagaagcacaggatgctgagtctgacttggtggatggccggcactccccaccaatggtcaggagtgtagctgccatccaccccagcctggagatccctatgctgattcctaaagagaagcccctaatcacagttgttggtgatgttggaggaagaatcgccatcattgtggatgacattattgatgatgtggatagctttcttgctgcagcagagaccctgaaggaaagaggtgcatacaagatctttgtgatggccactcacagcttgttatcctctgatgctccccggctgattgaagagtctgccattgatgaggtggtggtcactaacacgatcccacacgagatccagaagctgcagtgccccaatatcaagactgtggacatcagcatgatcctatcagaagccatccgccgaattcacagcggggagtccatgtcctaccttttcagaaacataggcttagatgactgaacagttctcctatggtagaactcccacaggccaagtgggagcccagcgtgtacgctgggagggcccatgcccggacagacacacgtgaccctccctttcccacatcttcctcattcattcctgtgaaggtacaaggaccagctttttaatgttggtttaggtttttgtgagttttaggggtaatttttataacagaaagacctcctctgaaatgaaagaagttaaaacctgatcgtttttagtgtaaccattttaaataatacacttgtgagatttttaagctcagcctttttttaaagttgcttgatccaactgttcaaaagaattaaataaaatgatctgctgtctactacctagaatcaaaaagctactgttggttccaatacgtgacctttttaggaacgctttta

SEQ ID NO: 26814 - DNA, 1846 bp, Mus musculus
tccaggactgtcacaaaacttccatttcaccttcccgattgctcgttatcactacgattggcttctaatccattctgctcctgtcacatgttattccagtatctcatttctccactttggttccatgtaatgtgtgtactttatcaggctcatctccctcctcaggaagatgcactagtcacaccagcatcatgaaacttgtagtgatgcctgtgtccttaccacagtgacaacagaggctgtctctgatgtgtctaacaaacttagtcagtcttccaataatttacccttttctgtgaaacactcgctgcctccttcctacgcttttccagtgcttctacacagtttagatgtgcatacatatgtacataaaaagaaaagctatggaaggcctttacatttttctgtgcatgcccacactacatacttgtgtgcatataaccatgtacatatgttatttgccatctctatcttagtgtgtaaaaagtttccaaatctgttgtgtaattacagaaatcaactttaagggccagtgagatgtctccgtgattaaaggacaccaagtctgaaataagctgagtccctgacagccacaggtggaagggaagaaccacctcccacatgtcctcttacctgcgcgcgcgcacacacacacacacacacacacacacacgcacacacgcacacacgcacacacacgcgcgcacacacacgcacacacacacacgcacacacgcacacacacacacacacacacacactgcaaaggcattttttttaaagagacgaacttcagtgacttgttcctcattacctattatatttagggagccttatgtataaatgcataaaccactttcttatatttcacttactgatttaacaggtagaaattctgataggtggctataggcgctttcatttgcactttctccatttccttcattcctttttccgtttcagaactctccagccattctttgaaggtctgttacccagagacaacccacgcaatacccggtttgccatcaacttcttcacttccataggtctcggaggattgacgtaaggatcatttgcagaattttatctttagttacaacattatgtcaagtgcctggtatacatagtgtaacacattacatctgtgttagggatgaactgcgagaacatctgaaaaatacgcccaaggtcatcgtagcccagaaaccagaagctgaacaaaagaaaccagccctgacatcttcatcttcagagtcttcctcggcgtctgattcctctgactcagaatctgacagcagcgagagcagctcagagtcctctagtgatgcgagcgactcctcctcctcctccagcactcagagctctacctcaggtatcacggctcattcaggtattaccctgctcatttctaacaattgcagggctcgattgctgcttacttatttttgccatctatttaaaacatttattattggagatggtcatgtgtcactgacagtctgcagtgttatatctgtttcagaagcctcttagacagggctaattcattggcagctgcgattccagggatgtccatgtgtttacagggccctcctgaggctttattacaaggcatgtgggttttagttgtagtcaagctttatgtggctacttgacatcattgtactcattggacggctcactgggggctttgccgtacctagctttccccagattctgatttgtaagtccatcacttagtcttgcctcttgttttgctgacacaaggtcttacaacataattaaagctagtcttctcctcactgtgcagcccagtttgatcttgaactgcagtctctgtgag

SEQ ID NO: 26815 - DNA, 1214 bp, Mus musculus
ctccagaccggcatgcgaggcgccttcgggaaaccacaaggtacagtggcgagagtccacatcggccaggtcatcatgtcgatccgcaccaagctgcagaacaaggagcacgtgatcgaggccctacgctgagccaagttcaagttccccggccgccagaagatccacatctccaagaagtggggctttaccaagttcaacacagatgaatttgaagacaaggtggcggccaagcgcctcatccctgatggctgtggagtcaaatacatccctgaacgcggtcctctggacaagtggcgagccctgcattcctgaggactttgctggcagaaaagaagtacagatgaggttatagtttgaaaaacgttaattccgtttattgactttagaatgttactttgcatagtatagaccattacaatggaaagtacctgccttaagaaacaagaaaactgcagtttatggagaaagaattttctattttgacccatgtacttaaaatttttggtgtatactgcagtgtagcaaatgttttgtggtgacggtataaatggtactgtttgttatcttggattgagtggctagagaagttggaagacgtgtgagaagttcttctttatagagaattaaacatgaaaattacatctcaaaaaaaaaaaagaatgccaactctaaaaacaaaaataataggaagcaacaattacttttccttaatatctcttaatatcaatggactcaatttcccaataaaaagacatagactaacagactggctacacaaacaggacccaacattctgttgcttacaggaaacccatctcagggaaaaagacaaacactacctcagagtgaaaggctggaaaacaattttccaagcaaatggtatgaagaaacaggctggactaaccattctaatatctaataaaatcaacctccaatccaaagttatcaaaaaagacaagaagggacacttcatactcatcaaaggtaaaatcctccaagaggaactctcaattttgaatatctatgctccaaatgcaagggcagccacattcattaaagaaactttagtaaagctcaaagcacatatttcacctcacataataatagtgggagacttcaacactccacttacatcaatggacagatcgtagaaacagaaactaaacagggacacagtgaaactaacagaagagatgaaacaaatggactta

SEQ ID NO: 26816 - DNA, 1186 bp, Mus musculus
acaattctaagggatacatcgaattataatgacattgagaaaaaaaggaagtatcttcccctggtctacatgagaaattggtattattgctacagctaactgtgctgcagacttcatgagcaaagacagttcattaggaaaatggcctctcacaccaggtcagtgctcaacatttttgttcatttgtacctggcttcattaaagctttcttgtgtcttatattacatggaatatattttccatattttacactgtatggtaaatgtcaggaaactctcatgtctggtatttgtgtttgaaactttcttttaggttcttgcttcctcaaacaaactttttttgacattgattcaatgtagccaacaccttcaacaatacccaaagcactcgattattatacctccatttaccatagtttctctctatgtattatctcgttgtttgttatggttattataaattatctatctccttgtacagattgtggacttctcaagaacagggactttggatttttttacttgctgctgttactctggtgcttagagacttagtacagccttagcaaatattaattgtccaagagacaagactatacatctgatgcagacacctgttgcctaaatcatagcactataaatcaatctgttgagtataccacaaatgaatctcatcctcatcgtcacttattctacaaaagataacaattgcaacttatctctctgattctgttaccgaatttcttctccctgctgagaatcagaagtcctgagtaagaaatcctcttttctttatttactgaatgactgattaatcgattgattgatttttgcatcatttggttgaatataactagggacttgggtaaacattacccaacattaaagtcctatacactgtcatcaaaccagcctttttccttcatataataagaattctcttgaatgcatgctacttttttctttcctatttatcagtcttcagggcatccctcttattctatatttagggctatgcaaaattatactaggttatagtttctactttacagtgtttagtttataaacacagcacatgactgatgtttctgtagtgtttgcttgctctccgtgatgtcagttaaggttacaatgacgtcagtggacaggttcctagtgcttaagggaactgttaattccttttctct

SEQ ID NO: 26817 - DNA, 1191 bp, Mus musculus
gagagaggagctggagggaagctcttccttgggtttctgacccagcttgtctccttctttgcttatgctaagatagttgcctcctataagaaaaacaaagtgtgagcaaagcttaggtttcacagctgggtcctcagtacacaagctgtatcaactccctatgatgttttccctttaatctattctttctttatcatgcttggtctgaactactttcctggagaatcctttaaaaatgaccaaaaaactaaggtgagcagtcccttagaggatctgttttgtgttcttagggattaggccttctgacttttgtttctgattttccaacactagtatcatgagaaaatgtgcctgtatatcctttctaaggactgtgtatctcatgcatgcgaagtatcggaagatacagaaagatatgatgtgaagacctgagccacggggagtgaaaacggggctgtggactgattgacgtgcagtgtgacctctgagcacacttgacatctctacgtcttcttcctttgttgcagtgtctcagaactgctggagctttacgaggaagatcctgaagaaattctatataatcttggatttggacgagatgaaccagatattgcttctaaaattccttccagattttttaattcatcatcctttgccagaggcatagacattaaagtatttctgagtgcacagatgcaacggatggaagtagagaacccaaactatgctctgacaagtaagggctctgatgttagtgtgatgtttgaaacgttgagcaactaggccagatgatctttgttttcacatctgacattttaaaaataaggttaataatagactaggttttttgctcattctgaattaattattctagttataatatctatatctttatatctatctatctatctatctatctatctatctatctatctatctatctacctacctacctacctatctcagtccatttcaggtgcttttctgtaaatctaaaataccttggccagttgagtcttttctcttaggcctctacttgttttttctctgttaaatggtgtcttgaaacaggattcctcccaggttgctcgtggaccaaccttatgtgtgctttaactgtactctgcagttcagtgtagaatatactcgaatgtgtattttcttaggagggcatttgaaaaagtcttagtg

SEQ ID NO: 26818 - DNA, 1196 bp, Mus musculus
tgagtcctgctgacttcctgccagcctcacatttagtccgcaggctgctgtgcgaagtgacttatgagaagctctatcatactttcccaaagaattgtgatggcacaggaaatggtggcacatgcctttaatcccaggacccaggagacagagacagcttggtctttgtgagttcaaggccagcctggtctatagagcaaggtccagaacagccaaagttacacagagaaacccagtctcaaaaaaaaaccaaaataattaaaaaaaaaaaaaagacgtaaagtgatttttttcgtaatgccttcggctgggttgtgctacacaggactctgatgtgacacagggggtgggctttcctaccaggtgtctcttctgtgcttgtcacttgtacactgtggccttctgtgatttagctgactgccacaattaagcggtatgtactttatctgaaaacaggaaaaatagcgtggtcatattgttcaatgcatatttttcgttttccattgtagattaaagagtctattgttggggaaattcgacgagaaattgtaagtggacttttggcagcagtgtcttcaagtaaagcacctggtcctaagcaggacagccactgagcggacgccttcggtaacgtttgtcatgtcttacacattgacacttgattcacaagtctttgctttcttagggaagctgttagaactagctaaacttgtatttttaaaatagatgtcatagttgtcctacagtatgaaaaccatatgcaacccatatgtataaacaattcaatttaagaacagaattgcctgcagtgtattcttacatagaaagtccttatagtaaataaatcctggagttggactgtagaccagaatcttactttaatattaattaaattgtatttcaaatgtacaatgtgtgggcaagaatttgagaattagtcaaaaaattttaatgccttaccttattatttttgtcatttgaatagatattctgtagatccatttctaatcataatttattaaggattgttttatgtgacttactacaataatagctataactgtattttataaattatatatatattttattaatagcaatgtttattgaacacaccaaggaataataatgtgtacaacactttcaaagctgaaggtgtttattcagtgttatgaaaaatgttgatatataatttc

SEQ ID NO: 26819 - DNA, 1389 bp, Mus musculus
ccttctttttagggttgagatggatcccattaactaatataggcattgtcagtgatttatgctggtggaggtgttgtttgtcctatggaagatattttctactgagctgggctactgtacacaatggacagtgtgcatttctgtacaggttacggttctatgcataaacattttagaaaacaaacatagaaacttaggcactttgctgactcctttctgaactatcagactggccatttgaaagcctagtatttatttgtatgtcaatatttgcccagttgatgtcctatgtagagttaattgtaaaacttgaagaatttcagacataaccaacttataaatgacctatttcttcaggctagcttctacaacactgacctccatgaggtatttactgtgcaataacagattcgtcttctgagagcttgaagcaacccatgatttgtccctccactgctcttcactgggttcacttccaaggagactaatggctctattgtaaaaattgctcttaattcttgaagaggctactgagaagcagtggggtagatctcatgaggttacctacagctacttcatgttcttacactgtaagccttgttgctttgccccaacaattgtaatttgattatagctatgagccttatggtagacactatgtaccctctgcggtgtaattgcattatagctatgtgccttgtggtaagcactatgtactctctgcattgtccaaatgtcttactttaaggtgtttcttctgtcttttcgactaagtagtattgtcaagataatggggcctgtgacttgaatggatagaatagaaatgaataagctggtttttgtttttccaaatgagatttagatttgtttttctcatgcataaatgattttaattcagttttaaccagtgaaaactcgtggtttttctgaaagaaaaaagaaaagggtttcctatctggtattatatatgtcaaataaatgtataaagtaacacccaaatgttattagaaactagtcttttagtatttgtaattttcaactcttattgtgttactttgtgtgaaaatttttagtcaaaagtgcttggaataatggaatggttagcattctttgaaagagtatctaaaaagtttataaatatttgaactatcacacaaaggttgatctctaaaaaaacaaaaaaccccattaaaacaataaagaatttattttgcctaaaatgttaaatttattttttgagctgtaacatgaagaatttggattacatttgagggctaaccaatgaagtctgaaaggtttattgggccttccctccctgaagaggctttggcagggcttttaggaaagtcggtgtccaccaccacgaggacacagcaggacatcactctt

SEQ ID NO: 26820 - DNA, 1950 bp, Mus musculus
tactataactgaaattaagataaagaacgtatcatattaccacttagtgtcttaataccttttctgtcactgtgtaaaatattctgacagaagcaacttaggataaaaatggttctgactcacagttcgagagcacagcgcattcacctagcgaggaagtcgagaggcaggtgctgaagcggctagtgacgtcacccaggcaggaagcttgagcgcctgctgctgctgctgctcagtgccctcctccatcttacagtcctcccctgctaggaagtggcaccgtctccccagctcacgccccacgggattcccagagagcccgtcaaggtgacggtagaaaccatctcacacaggatgacacaccagtaggtgtgacaatacctactgtgtgcaggtgaaaactggcacatcagctgttattgagcaaagagtgttttgtgatattctcttcagtaagaacattgagtatgtgtaagaaagtaaaatactgattaccttataatacctttctcttttgctcacctttacatgcatgcaggatgagctttgatggtgttgaagaaaaagcatgtaaggaaaagaatctggagaacggcatcaaaagatccctttcccaagtgacgatgctcctgaggaagcagatgcacgtgacctgggcctcgcagttgcctgtgtacacagagctcctgtgcggcactgtgggctgcacatgcttcctggagagccaggcagcgccatctgagactgcagtccacatatggttctgtgttgtgtctttgttgttgttgttaatccttttagaaatacacacatcagtcttagctcagggccatatagaaatactccacaggccaagtccagcccagggactagtttgctgaccccagaactgatgtttggacacctggccctgcacgtggctctgttaccttcagactgtacaaagtagacttgggttttcacttgtaaatttctgatgcgcttgaaaagaactgacttgcttttcagtcacctcttctaattctgtctatgaccatatattttattttgactattttcaccacataggaaaataaaaattacccatttttcctactatgtactactgtatagacagaggctttcttgtaagagttgaagagttcttaatttatcacaacagtaagtgtaaaaatcctgtaagctgctgtcccaggaacaaggtaagaagaagtatttacagcagttgatgggctgtgtggctgtcacaggtctaagcctgtgtttagtatgtacaccttcatttatttgctttcataaatgttcctactgatggttttgttggttttgtttcacgtgtcttcctgatattgacatatttcccttctgggttctctgttttgatcactcatgttgattattttttcccctgtagccgtggtttttccttctgtccaatattcactattccaataggaacagtaattttagatttattttaattggctcatgatgatgctgtttttcaattattgtctttttcagtaaagtttccataacaactgaagtactttttactaaaatcaagcacacaatggactcttcccatttctcagttgtttagactcagagggtcacaggtccctgctgcaactccaaaaacagagtgacctctagttcagttctctcccggtgtgtggggtggtcagaggatgccagtgaataaagtcaaattattttttctaaaattcttttgaagatgattgttgtgtttggaagattttatcactttccctgctccctagtcttgtcttcataaaggctatgccataggtttgtgctagggaaagcagtgtgcattagtttcctttctacctcattcagattctcctgtgttttattacattttaactccctgactcgggctctgctgtacatgtgagcacacatgagccttaccgttcctaacga

SEQ ID NO: 26821 - DNA, 1416 bp, Mus musculus
tttcagattgtacaagaatcaccattcctgacaatggatctcttggaatcttgttttccttatgtgttgctgagaaatgcataccatgctgtctacaaacaaagtgttacatcttctgcatagagtacttactcaagacaagcacgagtttctgttgccttgttttatctgtaaactgtggaactattttaccttaaagcctgaaaacagttttgtggatgaaattttcttcatgctgttgtattttctgatcattggcttcctaatatggttgtactacagtacatttgattgatttagttatacattctcaaaactcagtgaattctatgattttagagtatcatttgtttgaaataccattaacactatgtttttgataactgataatgaaaaaacttgcttgtttatttctgaaaaagaactgtatttagtgattattttagatagtgatatgctagcccccatctgtgtgtaaattatttcctatagggagagttctgatctgtacctacggttccttctgagatggagactggatgtgcacatcggtgatgcttacgactacatttctactttatgttgaacatttgccaaactaaatacctaacgcggtttaaccttccacatggcagacaacttgagcatcggaagcaggttccgaggttctcagacagcagcacatgctgccgccgcctgtagaaagcctactgtagaaacatctcatcccgtgctgcccggctggcatctgcactgcctttaccctgctgtataataaacaaccagacacttggcaactgttgatacagatggtagtcccgaatcactttttatatgttttaacatttgaaattcaagtgtacctgccataacataaataaacactagactgtatcacaccttgaatgatttctttaaaatctttggaaacttatttgacaatatgaaatttttagtttaaactttgttaatttatcagatttattattacagaattttttttaatgttttgaaaaatacttccggaaaaatatactgaaattggtggggggcggggagaatgtgtgtgtgtgtgtgtgtgtgtgtgtgtgtgtgtgtgtgtgtgtgtgttcggtttgctgattgccaaatggagttgttgaggaataacaaaaatggagtggccatggaactaggctgtgttgttaccgatgggtcagtgctaggtaggaagtccacacgtgccctgctttgtgtttggcgtggatggcagagtggcacatcttgccttctgattgctattagacagcctctgctgctttgcattgtatagcacagagctgccgttcatagcttcaatgtacacggctcactgagtcgagatcagcaaaattgcttatgaacccatttctgtttcccttgttcagatatagaaag

SEQ ID NO: 26822 - DNA, 1099 bp, Mus musculus
tagctggccactcctcctgcctgccactgtgttccccatagcagtgctttctgcacgttgtgctgactgctgtataacctcatggacattgttacattcttaccctgatgccgacaatgtgagaatataacattctttcaaaagcatgttagctccatgtctttctccaatttcatattcttaaatgagtgaatatattagaaattagtggttttgagacctatacccaatttaccaactttctcatgaaataattaaatatatcaatttagtggttatatggatgattatttatcctcccatgaacttatataagaggaaatggtgatactgcctaacccatcagtgtttcttcaaggcagagaagataggtaccatttccatagacagcaaatcgcaagttggaaatgctcattcttggtccgttaccactccctgcacctacactgtctacccaagtgaagcacaggtgacacgctgatatctttccctacagcggctcaatgcacagagaaagacgcaagtttttacggtctgcactaaaagaactggccactgtcctctctgaccagcctggcctgcttggtcccaaggtaactgagtgatagttgtaccctatccgccctgtaaagcatgttttctgtatgaaatttgcccaaagtggtagccaagaatgcatttgctggcttgaggctcgcatcacacttctgtctttccttagttcttacgtgtgtgttcatctttatgtgaactgctgtgtgctgtcttgatctgagtggctcttttacatttggtgttaattctttgtcagggacttttcacatagagcaagttttcagttgttgagtaatgagttttgttgatttgttttcaataggcactttttgttttcatggcgttatcttttgcccgtgatgaaattatctggctgctccgtcacgcggacaacatgccaaagaagagtgcagatgactttatagataagtaagtgtcacattggagcaccgtccatttcctgcttattttggttgatgggtcatgagtctgagaacatgtattaaagcaaaggtgttttaaaaactctttggggttctttata

SEQ ID NO: 26823 - DNA, 1137 bp, Mus musculus
gtgcctgtatgtatgtatgtattacattatgaatcactagcgaatgaacctccagtgatggaggttgttgcccattgtagaaagctacagtgtaaccaaaggaacttgtctgtgcagtacttgtaacttgtccttgtttctctttgtttgaagttggctttattctgtgccatgggatgctaaatacggaggctaccgcactgaacctttggaagctagctcttcagagtagctcttgcctctctctctttcgggatgaagttttccacattcacaaagctgcagaagacttatttgtaaacattcgggggtatggtgttttcagatttgttcattttggggggaggaggtggtgaatgaaatgtctttagtagcataggttttggggttagagagttgatcacattgtacaggaaagtttggcctagactgtcttactttggtcccagcaatttgcttttaacaatatcctgataatagtagaaataatattctttttttgtttgtttgtttgttttggttttggttttttcgagacagggtttctctgtgtagccctggctgtcctagaactcactttgtagaccaggctggcctccaactcagaaatccgcctgcctctgcctcccgagtgctgggactaaaggtatgcgcccagctagaaataatattcttatagataactttactaattacaaatatttacagtttctcacctttttgaaattggtattctagagaaatacgtcttctttttattcagacttaattttattcataaatattgctaaaagtaaaatatagagtgtattacccagcatggtggcttatacctttaatcccaacactcagtggacagaggcaggtacgtctctgaccttgaggctagtttggtctacagagtgggttccaagtcaggcagggtttcacagaaaaccttgtcttgccccattcctgccgcaaaaaaagagaacagagtggatttataaaagcatttgaaacaatcccagatgtcattgaatcgtgcctaacagtcacagaagcctgatcatagccctgagggatcatggttctcgagagcagattacacccaaaggacgtagagtcactcagtctctgcaaagcgaatacttttct

SEQ ID NO: 26824 - DNA, 1510 bp, Mus musculus
caaggagccaatctgtgagtatagcaggatgtatttagagtcattttattgctatgttcctttaccaaaactgtaggttttgtgtgtgtgtgtgtgtgtgtgtgtgttttttccccctaggtccctggcctatctagtctcaggttcttaaccacctgggcagtatcagggatgggctccatcttctggagtgcaccttaaatctagtcagatattagttggttacacccacaagctttgtgccactatggtactattgaagtgcaggcacttcacccttgtagatggaaatttgtagcttagtgatagtgggtgacttctgtgcttactcttgccactagacaggttgtccagataaaaacttaaccgagaaatgttggtgctaaaggatgtaaatgaaaccaaacaaaaacaaatggacttaacaggtattcagaaaacatttgctctttccgttcctagcgcagccatggctcgtggtcccaagaaacacctgaagtgtgtagctgctccaaaacattagatgctggataagttgactggcgtgtttgctcctcgtccatccactggtcctcacaagctgagggaatgcccgcctctcatcattttcctaaggaacagacttaagtatgccctgactggagatgaagtaaaaaagatttgcatgcagcgattcattaagattgatgtgaaagtcaggaccgatataacctaccctgctgggtttatggatgtcatcagcattgacaagaccggagagaacttccgtctgatctatgacaccaagggtcgctttgctgttcatcgtattacaccggaggaggcccagtacaagttgtgcaaagtgagaaagatctttgtgggcacaaaaggaatcccgcacctggtgacccatgatgctcgtactattcggtaccctgatcccctcatcaaggtgaacgacaccattcagattgatttggagacaggcaaaataactgacttcatcaagttcgacactgggaacctgtgtatggtgactggaggtgctaacttgggaaaaattggtgtaatcaccaacagagagagacatcccggctctttttgatgtggttcatgtgaaagatgccaatggtaacagctttgccactcggctgtccaacatttttgttattggcaatggtaacaaaccatggatctctcttcccagaggaaaaggaatccgcctcactattgctgaagagagagacaagaggcttgcggccaaacagagcagtgggtgaaatggtctctaggagacatgctggaaaagtgtttgtacaagcctttctaggcaacatacatgctagattaaacagcatggtgaagcaaaaaaaaaaaaaaacaaaaaaaaaaaaaacaaaaaaaaaaaagaaagaaaagaaaacattttattcaatcacaaaagaatatacctttttctgagcatctcatgagattttttaaaattaggtatttagctcatttacatttccaatgctataccaaaagt

SEQ ID NO: 26825 - DNA, 1456 bp, Mus musculus
ggacacagataattggctcagaaaaggaagacctgcccttgctgcttgaatttcaggaaacaaagaaaatttagttgctgacatattaatgtcttctatttctagaccttactgatctcatgttttgggggttgggggttgttgttttagagaacaaattaagtgaagcttctgggggtctggctgaaaatggtgaaagaagtgatttggacgaggacagcggagggggaggacaggaaaatggatccatcgatgctgttcctgttgatgaaaacctgttcactggcgaagatctggatgaactagaagaggaattgaacactcttgacttagaagaatgatgaggatgaaaactaggtcagctcactaggatcaacatgaactgagattgactcattaattgtttggccacctagaatcagcaggatgtttctttccccatgatgaccctggagggattctgtcctccacaaaaggagtactagccctgcgtcctctcttctgaccttgactacatctcatagtaagttcagagtagttggtgataaattaaaaatggtcattacagaagatgattgtcgttgtaactgtccactcatgtaggaagtgtaaccgctttcccagcttttggttttcattgggcatgtgtaatttccagaaacaacagattcacacttaagacacttgcgtttgatgcagtttttaatgagtggtgtcctttcctttgtatttatatgttttagagactgcctgaaaggtgagcactgtacttgataaaggaaactgcatatgcagattcagtattgtacttctgtggacaattaggtggacactgagaatgggacttgtcaacctgacagggtcagctacagtgccgtgttaaagctgtttgaagttctccccttttttgccaataaagttgtaaataaaaaccatcatacatccaaatccaactatgggcctttttcttttaagttttctatgaaaggtttcatagaaaacattcctagctttgtattttaattaaatattatctgtaatgattttaggcacaaaaggcaaaaatttaatagatttttcaagtatgtgttatataaccatagagtactgacaggattaacaattgttatttttcatttccaaaaagactaagtactgttactttaattccaaattgttagatcatcaacctagttaaaggcctcctacatttaattcttccttggaattaacattacattaagtttgatgactctgtttacaagaaggtaaataaattcaccagaaaactcggagcttaggagctcaggggcttggctgaggtcttgatatcccttgaaaatttagagtaatagcacattttaaatggacattaggttagcactagataactttaatcatggtattgtggttttatgaggttatttgtagtgtttagatttttatttttttcctg

SEQ ID NO: 26826 - DNA, 1096 bp, Mus musculus
ataagctacaagcacactacaatattcactagtttcagatttctttaaagtgtaataaccagagaaaggagaaacctcagataaatctggtttgggtcagtaattttgcaatttaacatttgagcagaaaagcaggactacttgtattaaattgcacacattacttcactctgtcggcctggtgtgataaaaatgataagatattcttaggtgtcttatatcagtacctacaatagagggaaagggttgttttgtttttaacttcctgcttaattaacacatagtgtaatagttgtgtatggttatggttcactaactttagtactggagacttacctccagtctcctactgagaaagaaattagttacttagttaatggctttaggggttgtgggtgtaatgtatgcttacccacaaagcaattttctaatagaaaggacaaagtgttggctatctactacccttgtgctctcctgaagaagtgtcttttcttccataacttttattccattaaaccttcccatatagtcatccccattcttcttcaaactcaggactgtttttttcattagttattaatgcttgcatatgtatatacatttatgtatgtgtatatggactgttcagtccacagttttatagatttaattacctcaaaatcagagacagctaaaagtactaattgatagggtctattactgggtagtttctgattacagacatctgtgaaattaaaaattatgaagggtaaaaattgatacttttatttaaaaacaaggtacagatgatagaagtattaacagctgaatcatccataaggtgagctaggatctcaatgtttacaaggccagaggggcctcacagggacaaaagtttagtgacatgctaacattcatgtacctttgttgtataaaaagaaacacctataaacataaaaatgcgagtcagaaattttgttttaaaaatgctttcctagggctggtgagatagcttactggttaagagcatttgttgccttaaagaggatctgggtttggttcccagcccccacatgttagttggcaactattcataactgcagttccaggggctctg

SEQ ID NO: 26827 - DNA, 1137 bp, Mus musculus
acaaaagtccctcagaagtgcctggaggaaccagggaacggggtgtgcctggttctttttcttttgattgcagccagtccccggcttgcagggcttcggctggaggcgcgctgccactgcccccctggtcctttggatctgggccgcagtcccgggacagcctcggaggaccggccgccagcgcgcacggaagtgcgcccggccttctcctgtgggaggccaccgtgagcgcgacttcctctttcggcggggcggcccggcctggccggctcctcctcctccccggcctcctcccccagtccgggctgctcacggttccgaggtactgtgctcgccccgccacttctcagcgccaggcaccgcgcgagccagcgacagagccggagtcccgggtcggacaccgctcctcctgggtgccgcccggctcagcttcgcgccgcccggccgccccgccgcccttgaccgcaagcgcacagcacagctcggcagttcgggggcgcgcaggcggcgggccgcggccaccgagcaccgggacagggactgaagtctttcggctctgcgccccgcgcgcgccccggcgatggctgctcccgggcgcctgctgctacgccctcgccccggcggcctcctgctgctgctgccgggtctcctgctgcccctcgccgacgccttcaacctggacgtcgaaagtcccgccgagtatgcgggtcccgagggaagttacttcggattcgccgtggacttcttcgagcccagcacgtcctcgtaagtggccgcgctcgagtccccaggcgccccctcccccaccgcgcaccctcagcggatccgcacccagccgctggctccagggtcctcccggccccaaacccgcctactctctccatgccgcggctggcccaggtctggcatggatgaaacttttgtggggatgacctaacctgacactcagcatccagtttcaccgtgtccccaacttcttctgattggctggggacagtgcgagagagctttgaaggagctctgttaagcatccaggaaaagtgagacatctgtacaggcttgtcctgcgagacttttggccatctcttgtcattccgtaacttgcttcacttggccccagaatttttttcttccgta

SEQ ID NO: 26828 - DNA, 1050 bp, Mus musculus
tacctttaatcccagtgctgggcaggcacgggtaggcagatgtgagatcaaggcctctacttaatctgtgtagtaagttctaggaaagccaaggctgtgttccaagaccctgtctcaaaacatacaaagaaagaaacaaaataaaacaaaagaggcctgctcttttctgaagggaaccataaaggagtggatcttggggccagggaagatggtggggagggctggggggagcagagggaggggaagcagtggtcaggtgtaatatatgagaattaaaaagaaaagcccagagctagctgttgtcctgtttgttaagctttatgcctagaagacagagaatctatagagtttctctttggccttcacgtaaggatgcttaatgttcaactgttacaaatgccagtgtgatctcactgtgtaaggaaatggtctgttctggcagggctgtggaatcgccaagtgcttgcagatcacctgccaggttggtcgactggatagaggcaagagcgcaatcctgtacgtgaaatccctgctgtggaccgagacgttcatgaacgtaagcagacagacgtaccagcaggtgtatacattttttcaaagagttataaggcttgctatctaagagaccatcgcttgttatttctgtgcagaaggagaaccagaaccattcctattcgctgaagtcatctgcttcctttaatatcatagaattcccttacaagaacctgccgatcgaggatctcttcaactctacactagtaagtcaccggcttcagagcacggatacctgccgtgcaaacaccttagtgattttagtggaagtttaactagaacaagtgaaaagataagttattggagaggattatagaatggaaagcattctctttctttttttaaattacatttgttgttgctgaggagggtcacgtatcacagtgtgcaggtcagaggacagcttttcagaactgattctgggacgtgaggattggaccttggatatgaggtgtggtgaccagggcctttagctgacgagtcatcccaccgacccag

SEQ ID NO: 26829 - DNA, 1106 bp, Mus musculus
gatcatcttggcagttctcgcagggctgctgctactggctgtgttggtatttgtaatgtacagggtaagtaatgggcgttgaagggggtagggggatggaataagagaagaagggacaggatgaagggagtaaagaaaaggagaaaaggacccacagtgttgctgcctggtgagcagggcttatttcaggatgggacactaaacaaaaacgccatttgaattttcgaggtgataatagagtcggtcatactttcagcgatctgttactgagctagaactatgctttttctttaactggcagatgggctttttcaaacgtgtccgaccacctcaagaagagcaagaaagagaacagcttcagcctcatgagaatggcgaaggaaactctgaaacctaaggtgcttcttaagtggcgccacttctgtccgctccaagttcaccaccgtggtggtggatttcaacatctctcgtgaacagtgaaatcccaggactgtattgctgagagcacccagcagtctcagtttatccacaaaattgaaatggatatttgtcgacttctctttatgaataagttcagattacatttacttcgcctacactaacgtgtgttcttagggacttaagtgatggaatttcaagtgattatctttgttcagtgtacataagacagacagcactgagtcagcacgttacatagcatagtacctcttcagttactgttcctaattgactgtgtggggtttctctcttcgacgttacgttagggcaattaggattgtaaagcagttcaaatttagaccatcagtaagtttgcacaggcacttagaacaggtacacattacactacagttgacttcataagctactgaagactttgcaattgcatggacttagattttaatatcatttacacagtagaacttttaaataacacgataccatcaaaattctttcctgggactatagctcacttcgaagcgtgtgcaactccctgggttcaatcctgcacactgggaggaaaaccagcagtttcctgtattaacaatggtacagtatttttatatgaaagttaggtttttatttatgtgtagtctgcattgtgtctt

SEQ ID NO: 26830 - DNA, 2459 bp, Mus musculus
ttttaaaagtaattgaagtttgtctcaccgtatcttaggctaattccatgtgcatatggatgagctaatttggagaatatattttcataacatgaagcacatttatgtgagttgtacgaattagaatatagacaggaccctatatttagctttaataaaattttaaattaatgagttctggcttgaaagatcataatcatatatgcaataattatttttttaaaccaatacatttaaattcttttaagaaacattttggtcttagggacaagtgtctctaagctacttaggactaccacacaggtcactaagttggcctatacaaacttttaccttctttgtctgtcaacataatagttgtcattcctgaaaatcaatgaaattcattctttgtaaaaatcaatattgatttttacagttattcctattatggcttctatgccaaggaataactttctgttagagattgaaagatatttgtaattggaaattaacatgatgtagttttcaacaatagcatggattttcttttaaaaaatataaatttgtatctctgtaaacttaggaactgtaatttgagagttaacactctgaaaaaaatgttgagatactctttatcccataacagcataggcatgtagtcaacaaaatagcaagagattattttagattcatatttgtaatttaccaataattaacatttatttctaagcataaaattttcataatataggttaattaaagaaattgattgatccagaggacatttgacacatgtgaggaatattaacgtggatactgatttcttatagagatatttattttagagttggtactttaaaacatctgtgtgagggttactttcctcccttatgtttaattatcatcataattctgattgtgttctgaatgactacggaaggtgaaacagtcaaaatattgtcttaaatctacctgtattacaatattacttattaatagtaaatcctcatgaatacattatttatataatgaggaaaatcactaagagcagacaagagtttgttgccgccttacgagaacagtgtgagtttctgtagtgagtctaaccccgaggagggaatttagtggcaaagtatatattggtagagcaactggttcttgtagggcaacagaaggccaaggtggcatccatccccatttgagagaattctggggagagcctcaaggagaaggaaaggaagttgttctagagtctctgtgtgtggccattgcctatctctgtgtcaccttgttcttactcgtggctagcttgtacatttaatttgatgagtaaggggagatgaccaaaatgtattatgggatctaaaaagacaaatacaattgcttgatgtctagtaatttgtaaaggtttctttggacttggtccttttatttgaaccatgaacctgtggctatgccatctgcagtatacactggcattcattataatttctgatatgtcatggacttcctgtgaggtactgaatctttgaattttgttgtcattgttcttaagtgcaatataacaatgtaacgaaacttaaatataagtcactatttagtaatcttaatccgaaatttattagtatttttttgttagcagaaaagaacaactctgctgtagttgtagatatataggtgaaattttttgttttttgctttttctttgcttttttttttttgtttgtttgttttttttacctctaaaccatccaatctgcattttattttaggtggaagatgaactattccttaccagttttaaaacactttcagtatattaaggtaacttggaagctgtgtgtatcaaattcttttgctcgctaagtaacctggaagataattttttttggcttctctcgtgatcacccacattgggtgagacataagatgagtctctcctgaaatctgtcatttgctaacttgttttgagttagtaaaagcaggtaccatgttctgctttgtttccagtgtgtaacttgtgactgtacaataaacttgaacgtgtggtgccagcttcctgtgtggattctatcctctcctatgagctcatgtttcctaattacgggaaccagcgatactgcatcaaacagtgacttcagggtggtgacacagctccctacaagtgcaaagatttaagggtatagttatctaaaggaagggaaccaacaaacaaaaggcaaagggagcctggtgttaagacacattcctcggaaggagatacattcttagcgtttcagtgccttgaaataatagcaagaatcagtcggtgagattatgtgaaattgaaaggcatctgcacatcaaaggaaacagcagaaaaaagaggctaactatggaacaggtgaaagtctcagtctgctttgcagcctgcagaccactaatatctaggtgctgtaaagaactcagaaaactaaactccacaacgctaaaccatc

SEQ ID NO: 26831 - DNA, 1241 bp, Mus musculus
cccaagaagtcacgagtgcagtgggcactcatttcatcaacaagcacatacagtttgaaacaaatatggtggccttcaaatgtattctcactgagaagcataggatctatctcacaatctacgtattcctgcatcgtaaatctggtagcttctgctgacattctggcaagttgggtttccataaatagacagctttagcagagctcataccaggccttctacttcctgtcaagaatgctggcaagaaacaagaatgtggcacttcctttgccaaaatcacagacagcaccctacctacctagtaaatctcgtcacagactatcttgagtctagtcaaagacaatcgttgtcccagacggcagagccctccagagaaacactcctcagacatcaacagatccttttacaagagatgaaatggacaacttcactctgtcagccaattcttttaaataacatatgtactgaataaaataatagaaatttaagtttttgacaattataaagctacaaccaaaacttatttgcatattaatacagtactaatttatactattagttttttttttaagatttctgtttcttaagagagcaggaaaatccatattggaatatgaattttgtattgacaacaagaagacagacgagggataagactcagtttaggaaaatctatgatactctaagtcataattccctgagggtcgcttttctctttgaagatcagatgagctctcagaactgaggtgagaattactcagtaaggagcccccaactctaaccctctcagcaccacagggctgtgttctgactttccaactgtttgaatgccaggagtgtgctcactgctgtgcatctgatcccagaaacaaaggtccaggtttgtgatttctagaatgaggccaggttgaacgtgccaatcaaatgatctggctttagaggttgggaagctatctggctcaccactattgcccccacggctggtttccagcctccttattaggttgtctgtttcattgaagtctctcctcttgttcagacttgatgagcatcagtccttgtgtgtgacagtgcatgaggcacattcaggtcgttttgattggagattaagagaagaagggatttggagatgagaaataaggaagtttcacaaacttgatctgatcagctctttgcccagtcagtctagcaggatttcttatttagctttggagagatgtctcatactggtcaagaacatc

SEQ ID NO: 26832 - DNA, 2691 bp, Mus musculus
ttcccctggagcttaggttacagacagttgtgaacggctatgtgggtgcttggaattgaccgtggtcttctggaagagcagtcagggctcttaaccactgagccttctttccaacctgtttggttggttttgagatttaggacgataagatttcaaaacaaaaagaaaacccagtctggcctttatcttattctgtagctgagggtaactttaaattcctgatactcctggctttgcatataaatattgggatcataagcatatgccaccattgaggtctcttgctaaatattgcaggctggacctgaacttaagaactgcctgactttgtccatcaagtgctaggattagctatgtgtggcaccacgcctgtgtataattgtagccttacagttagagcagtgtgttggaatgaatgcttcatggttgaaaagccacgaccgggaaatctgctttcaagtactgaggtggcacggtggatggggtgtaaatgaaatgagactagccatgaatagtcattaaggctgttagatgtgtggaaccgaggtgcaggaccacggagcacacatcaggaaaaacagtcgagacagcagcagcagtacaggcagcagcagtacagcagcagcagtacaggcagcagacagcagcagcagtacagcagcagcagtacaggcagcagcagtacagtagcagcagtacaggcagcagcagtacagcagcagtagtacagcagcagcagtacaggcagcagcagtacagtagcagcagtacaggcagcagcagtacaggcagcagcagtacagcagcagcagtacaggcagcagcagtacaggcagcagcagtacagcagcagcagtacaggcagcagcagtacaggcagcagtagtacagcagcagcagtacaggcagcagcagtacaggcagcagcagtacagcagcagcagtacaggcagcagcagtacaggcagcagcagtacaggtagaggtggcttttggattatgagtttctttaactgccaagtgcagacagaggttaggtttcagatgtctatgagactgaagttctgggatggggaattctggaacagtcataaggatggaagaggaaggctgaaccaaggagactccctgtcacattttagcaaggtcaacgctgtttttaagttttgttaaacttggcttgatggtaaaattttcatttataagcatgactgtagacaatttaaattttttgtttatggctattggatcattcggatactttaaatggagcacattgtagtagagggtagacaacgtggggaaattggccaccatgctagcgcagtctttggcccagcaggtgcatttgcacatactaatttgtttctaggaaggacagaagggaggcatggaaatctcatgtatcacacaccaaagccagtccctctgcgcagctggattatatgggctgcaacgtggctctctcctgctcttaccagagcgcctggattcatagcccttttcctgtgcacaatcaagttggaaggcagggaatgatgccataattgctcctcttttaaccatggctgcttcttatccatatcaccccttttaataccactgtacctttaagaaaggtatcaattgacaatttccatacctgaatacagtgttaccttggtaatgtttaccaccgtacctctttccatctcccccaacccactgtaccttatagctgtttaaattccagactacaagactctgcagttgccatcttttccttcttttcttcaaacttgaaatctttctatattggaaaagccattgacgtgttaatctctcctaagctacactctctttcatctttgtgcctttataaaagtgcatggagacacacaagctacctatgtctagtgagaataagctgtcaacattgtaggcttgcaggctaaaatcttttaggtatatcctcatgcgtctgtccattggcttctatgccactctgcctcatggttgttgtgtgtatattttaaccccagctgcaggggttagtgtctgaaatcttggtcctctgctagagagaacaacaattttcctttagggctaggatatgaaatctcttctggagtaagccttggagtctgacagtggttttgagtctatgaacagttttgaatttggggagccaagccctgtcctgggttgtttcacttaagccctctattttccacagactctgtgtattcctcttgctcccattccaactgttcccacccaagaaggatgccttgtgcttctgcacattttactcagtcgtattggcctgtgtggtagccagagatccggttagaggactggtaaatggaattagagaggtatgagaaaggattttgcagaaattggatgtgctgctgtactcctgtaatcccaggccctgggaagtgggggcaggaggatcactacccatccttagctacttggtgagtttgatgccaaactatgccacatgggaccaggtctcaaacaaaacaagcttgctttgcggtttgcctacatcttagaaggctatttattctactgataacagcagaagaagttgtactgggtaactatctttttgtttttccggctgtacaatttgaaaaatgtaattgaaggtaatttacagagtatcaaggagtagttttattttgtttcatttttgttttt

SEQ ID NO: 26833 - DNA, 1069 bp, Mus musculus
tacagagacaagaggatttacaattgaatcctacccaattgctagaaagctactatctacatctaagcagggtctgatgcaatctttaggaaggaccctagctcctccaaattctcatcatgtcttctgtctagttttgagaccccaagctcttcttgctgaacacagttagtacttaactggatacatttgtaacacacttctggttcaacttttacttcccatagaaccctttagttctggtaacacattccagtaatgatttcttcattcccagttgctttgtaaactgcattataatggatccatttaaggaaaatgatctcttaaataaaaccccaatttctttcatacttcatgcatcctgaaaatatttgtccaacaaccatttgattcagatgcttgggcttaaggctcctcctgttcctaagcgttccatttctggtgatggaggccatagataaatgagtcagtaaggtaagcactgttagaatagtgactgttaaacatgtactagagaggccgactgccagaagggcagcacggcatctttgaggtgtactgggctcattaaaggatagctaggattctgctccttgaagatttgaagtcatttaagtcagatggaacactgcaaaactatagaaatgcaaaaagtagacacctaatctgcaagaggaattctctttgtagaaacatttcatctagtaaatgaagtagtttgaaaaaaaaaatgtcatcaatgtggaatccctaatacctaggtctttcaggcattgagcatcaatggttgatatcacaaaaataaagaaataccacccacgaagtttaaaaactctggtagagggtatggctcagtggtagacttctcgtctcacatgtagggagtcctttgttcagttcccaagcacagcaaagaaagaatttagttttgagtctgatcaagcctttggattcaactagtatttaaacaggggaaaggcaggggaaatactgaactatattatcaagatgacccaattctttgataaattagttacaataagaaaagagtgtaggaaggacaata

SEQ ID NO: 26834 - DNA, 1963 bp, Mus musculus
cgtattacatgttttccctgcttgatatttaccacaacttgctgattatccatattttggagatgaagaaattaattttaaagtaattaactaacttgcctgaggtctcatttttgttggttcccttggactagttttggaaccaaggctgagtgttcacctcttataatgggtttataagtatgcactattatgtctggcttggggtgttaggcattgaatggagaacttcatgcgtgttaggtgcgcgctttaaatttactacctacagtgctacatctttagtactatttttgtttttgttgttgttgttgttgttgttgttgttgttgttttgggtttttttgagagagggtcttgttgctgcccaggaacttgtagtatagaccttgaacttggggccagtcctcattcctctgccaacagattctggtaaccaccatgcccagtcctgaatcctttgtttttttaaactactgatttcaaatggtttaaggcaaaattaatggaacacaagaatgaagatgacttaagcatccttaaggatgcttttctggttgctggctgataccagccactagctgaaataggaaacagtgatgagtacagggtggcagggctctagaatcacaggacggtttcaatctgtttaactctcttcccctggcgtattaaacttgggttcagattcggaatgacagaagtggagacagtcatctgtcaggagacatggtatgctgggctgccctgcctcgtcctggtctctctcactctttccatggtctccacctatctcttctcctcctccttctcccgctttctctctagtgggagactggcacgctgctgtgggaactcatgggtcttttacgcagaacccgtgcttcctctttgtcccagcagacttactgctacaatgcagacttgcagggcttatatgggaccaatgcgggttgtagctgtgcctttacagtgcagctctccacagcaacgccctgcccaaggtggagaaggttccaaatgggcagtgcctagtaaccacaacgcatgggtgccctgtgctgtcagaggccatcacctcctgcagaagggcacgcaccttctgacttgtcacatcccagcttcacactacttcctattttgacttttttgcagaattgtggtttcggagccaaagttagcttggtaatgatagatagagcaaatgcctattatgcgtggtttctgagtttaatcctcaggtcagacacaaattcttttttttaagcacttttatatgccttacttatttttattgtatgtacattggtattttcctggcatgcatatctgtatgatggtgttgggtcccttgcaacttgagtcagtcgcgagctgccatgtggatgctgggaattgaacctgggtccttgggaagaacgaccagtgcttttagcctctgaagtatctctcgagccccaacacaaattcttaatctgtgagagtgtacataactattttttttcttttggatttttcgagacagggtttctctgtatagccctggctgtcctggaactcactttgtagaccaggctggcttcgaactcagaaatccacctccctctgcctcccgagtgctgggattaaaggtgtgtgccaccactgccactcctgttgtccattccctgtctgctttcaggcattttcattttctcataacctagacctgctcagcagtagtgtcacatactctccatgtggcatctgtatatacgattgtatatgctcgttcatgctttatgcttctaatgactgactgttttgccttagtctgtgttacatttttatttaggcctgttttcttcctgcttctgaagcactcatttctggctgctatggaaaccatacaggctacatcctcaggggacaagccctccttaagatgagctggttgtgacccttcttgctcacccttccctat

SEQ ID NO: 26835 - DNA, 1111 bp, Mus musculus
aagataaaatgagattatgaatggaattgcacttaaactataattggcacataccaagtatgttgtagctattattattattagcactattttgagataggctccctttatttagcccagtctggtcttgaactcacagtagtcttcctaccttagcttcttcacggctatgatttcaggcatgagccaccacacctgacatattactttattatcgtacctatcattagatagttctctctgcaattatatgtacatgtatatgcatttgtttatattaattagatgattattttgcaaggtaaattatgtctaactacttaaaggattatttcaagggctacccaaaatgacaattagtgtacatgttcagttcccagattaggagaaagtggtatcagtcatttgatggatagttacacttctctcatctaggtcctattctaaatgtctattagaaatgatctgtacagaaattaaagtcagggtttacagatcactttatggcaaggccaggtggaagcatccatcaagtctagatgagacttaataatagacttttgaacctgatggaaaaagacttttttttttccccaaataccaaggttttttggatgtctgaatccttgggaggtaaggaagtaatctgcttgcagagcctatgagagctatgaaaagatttagttggatgaagtcaaataaaaagccacatatatttgttaagtacattgctatacacgaggacttattctggttataaaggttatcgtgagcacaggcccttgtcctaagaaagccagagaaagagttggaaatagtaatgttactagaccactgttaaggagaacagtatagagtagggaaggttgtgtaaccaactacaggaaactgcataatttgaggcaagaggtaatgatagcttagaccactgcgacatattataaaaacgattaccaattcaaggtctatgtaataatgatagtaacagctggtatctcccctcttcttccctcccctctccttttccctcccctccttcccttcccctctctttccccctccctatctcttctcctttcctctccccttctctttcttcctcctccccacc

SEQ ID NO: 26836 - DNA, 1097 bp, Mus musculus
tgtgatccaagttcaatgcttggaacccacataaatgtggaaagagaaccaatctcaaagtgcatgcatacctattaagcagcaacaaataccccgttgggagagacagcaaagacccttgtactaatcttgataatttgcaaattttgactacctgtgtgacccacaaactcgtaaatagggactttgaagtggtacttcattggtcacacctctagaagattaaaagaagtcagtgcattttctccgaagatttagaaacaactcccataaacttgagccaggtccttaagttaggcagagtagtaaaagagcagtggaaatggtgatagaagatgcataagccaatccttaaatacttaagatgttggcacaagcacggactataacaagatacagatttgggtcagtgagctccagtggtcagaaggcctactaagcaaagccctggtagacgatgtgaatcttagagcatgtaattagtgagtaagagtgttggacaatgacatgtaagttgaaagggtgattagagtagaattctgtattgaagaaaagtaaagatgctgatcaaaacttttgtgaaacgtgtctctattagctgtaactattgaaggatagaaatagaacatatgacttctaaagaaaaggcaaaagcagaaggtagctgaagttgatagaatgacctgggcttaaaggctgcagcagtagaggagaggcgtatgtcatgccagtgctagggttagcatgcaacaagtgaacagagcatgggtgggaagcaagtgtagagtcagaagacgtcttccaaaaggacgaagtaacttgagtaaagcttcagtagctggtcgtgtaagcttaaacacaagggtaggacccaatactattacgtcttcctgtcttattttataaattgctttttaagaaaaccttgtatctatgcatgtgttcacatatgtgcacacatgaaggccagaggccaacttctactagcgtctcttggtctctattttgggggaaagtctctctaaacttgaagcttactaattggctatactgcccggccaacgagctcctgggatgcgcctatctctataccctag

SEQ ID NO: 26837 - DNA, 2020 bp, Mus musculus
tgctcagctgtgtatgtttcccctgtcgtcctgtcctcagccttaacagccttctcttttttccccacagcagaagatttagcgccactctacctgctccatatgggcttataatatattacttttattttttggtggtgaaatggactgatgatttttttcctttcttcgctggactattgtgccaactgccaggctgactcctacccttgtagcccaaattggctgccgtcatccgtgaattacctacatcttccactgaagtttaattgtcctatcctcccagaccctacttccagttttcccccaagaaacctgactctgttatttgcatatcttgagaaactgctgcagattagctctttttgccagccttccctggaactcttggccttgcatagagggagggagagtggaactctctactggaagcaatgggaagaactgaaaattacacactgtctgttcagcagtcagcattctgacaaactgatgacttttaatcaagactattttttctggtgtggggggaactttttattttgttttggatggggaagtgtgagttcttcccttatccagtggcgatttttgaagccaagaaggctggaaacattggcacattccacctggcaagggccctcaagtaagtgaagtactccccaacctcagagtgagaactcttgttcctcctgttcaaggcagggaccacaaaggacctacagactccatctctctgtcagcttcaggataaccttggggtgctgtcctgaccaaggctgtccttaaccctcctctcctaccctgtgataaacctgctaacttgacctggctgttttgcaagatgctttgtaaaaaggagaatgccatggaaccccctggttgagaagaaacagaaagattgtctattgagaagatgaacctctaggaggaatgtacatgaagtggttagtctgaaactggcaggaagcttcagagctggctttcctcagccccctcaccccatctctcttcgtcctttataagcttgtcctccctctcctccccttccctggatttgttggccaacttacaagacttgtacatagctcctccccctttgcccttgtaaggtaggagttgccctggctttgcctcttctttgtgcctttggcctggggtgcatctcctccctctcttccaggtgcctttctttgcctctgcagtctcatttctcatgattttgcaagttagaccttgttattttcttacccactgttgacccccagtagctgaagcaaagaagaggagtggtaacttagggaacttcacgtccctactgggtgttgttaaagcctctgacatagccacaacaggcttctgcttaacagtgtgcagttgggattggtgaaaatccatcccgataagtctcaaagtgaggctgttaggagggagtgctgtgactctgactccttagtcgtccccagttcccatcatctctgaaaggctacagggaatcaggccatgcctccattacacccttttctgttgtagtgagtgttacagcttggctagagaagcagctactatgtgggtgcaattttttttaaacatttttccttattttctttccttaatctaaaagctctattcaatgcaactggaattctttatccctcttgtcctgttccttaatatattgaggctatggggtaggagaaaagtgcacagcccaccaactccttttcttatacattgcagtcaccccctccccccaacctttgcttccttcccatttcttcctagtcccgtttcccttttctggcaaaaaggagctctgtgctctctgtgaccctcagagtacactgcacaggggagcctcccccacccacatctatctgcctctggttttgggttctcttgtcctcttctgctcttcctggtgctctttcttctcggtggggtgtgggtaatagaatagccatgggctttggggacctttaactgtttttttgtttgtttgttttgtttttcctttttc

SEQ ID NO: 26838 - DNA, 1215 bp, Mus musculus
ggaggaccctgaaggagccatgtctgttgtttctgtggagaccacagatgatgggaccactagacgcacggagaccacagtaagctgagattttcgtgtcttagaatgataggtcctctgtggtattttagtagagaagctaacgagttaagtgagccaaagccactgtctgccagaaagaaagtgatgcctgggcaaagagacaaggtaaaagaagttcaggaagtgggaagagaggaggagtatgacagttacagtagcttccggagaggatgttagtgattgggcagtttttttccattgagggcttctgtaggatggagaagagatatagatgacacacacttctgtataaagacctagagggtagggtttctatcttagagtactgtggaatttaaacttagattctttatttcctcaatagttggttttccttttcttattccttaaatgaaggtcaaaaaagttgtgaagacaatgacaactcggacagtacagcctgtccccatggggccagacgggctgcccgtggacgcctcagcagtctccaataactatatccagaccttgggccgtgattttcgcaagaatggcaatgggggccctggtccctatgtggggcaagcgggcactgccactcttcctaggaacttccactatcctccagatgggtatggccgacactatgaagatggttatccaggtggcagtgacaactacggcagtctgtcccgggtgacccgaattgaggagcggtataggcccagcatggaaggctaccgggcacccagtagacaagatgtctatgggccccagccccaggttcgagtaggtggaagcagtgtggacctgcatcgttttcatcctgagccttacgggctagaggatgaccagcgcagcatgggctatgatgacctcgattacggcatgatgtctgattatggtactgcccgtcggacaggaacaccctctgaccctcgacgacgcctcaggtgggcaggagtgggggaagaggtagctttagggactcctagaggtcactaagcacctgtctgctctgagggctcttcctcctagagctgatctttgctggctgaagatgccatgctgactgtttggatgcgtagttgccatggaggaagattttacaatgggattgattggtcctcactccctttctttcttccttccctttctttattcttgttattg

SEQ ID NO: 26839 - DNA, 1131 bp, Mus musculus
gggaaaacgctttggggaagaaagcagcaaaccaaaccgcagcaagtaaagaaagtaagctcttttctgttttcccacccagataggtagggaaagggaacaagaccctcatcaaagagaactgaggcttaggcgtgccgttctaaaatgctttgttatttagcacctcccacctccccccagatctgcagtaattcctcagagattgtatagtctccgctttaaatatacatataatatatatgtataaaacttcctcgtctttctctctcccttttttttttttaatttcctataataaagtttcctattggataaggtcagctccctgatttatgcctggttcctattggaagctcgcaggggctgacatcacttaggaaagctagggtagggctgccagatcagtttgtcaccacccaggctgccttgcctttggctgggtgcaacttccattttaggtgttggatctgaggggaaaaggagagagggagagagagggagagagggagagagggaaagggagagagagagagagagaaagaggacgatcaagagggagggagggagagccagcgagcgagacagacacggagggagaggagaaaggcaggaaagatcctggaacgaggaagaggaagaggcggcgaacctcgctggatttgtctttctcagcacattggtgaagctttgggtttgtttcttaaaggactggctttagaagtccacatttgaggtgtgtgctttttaaatttttttccttttattaaaaatgtgtgtattgggaaaggggtaactcaagtggaatttttttcttaatggtaactggagggacttttaaaagggtgagaaagcctgttagtgctgacggtgaattttaaccaattatttttttcacttttaatactttggaggtttcttggtattttatttagttaaggaaaaggtaaaacgtacaagacctggaaacaaacttctaggtgtaataccggaagctggttggaaccaggggtagaagttgtgtaaattcctttttttgtgtgtacttttatattatttttttccctggatttagctaacatactcttatttttcagagctcaaaaagttgtttgggggggggggcatgtt

SEQ ID NO: 26840 - DNA, 1363 bp, Mus musculus
gatggggaaaacaagaaggacaaataggatcctgcattgtttttgcttcctctcctgtcaatttcaggaacctttgaggcccagttccagctataaccacaatccttgcctgaggccttttgatttctgtttggctgtgcctgggtaggggcactgtgcctgcttctgattttgaaagaagcatcctggaaaccatgaagtattctactatgaagggcgcatctgccctggtcagctgtttctcgaagggagtgatcttatcgatagaggtagaaatggtttccctccaaggttgggtcaatgtgtaaattgctattcaacacttggatattaccagtctgtggtttaattattcctcctagtgagcttgcaaagcatagactaaattaaaccctaatgttagatgtcagtataaagcccttagaatttttcctcaaggaccccttcttcctttaggcctttctgtcttgatctgtgcattaagaaatttaagtttggggctggagaaatggcccatcgattaagaaagagcactggtggctgcttttccagagatcctgagttcaattcccagcaaccacatgatggttcataatgggatctgatgccctcttctggcatgcaggcagaatactatatatagtaagtaaatcgtaaagagaaaggaatttaaggggttggagagatgactcagtggctaagagaattggctgttcttccagaggacccaggtttgattcctagcagcacatagaggctaaaccacctgtaactctagtctcaggggctccaacatccgcccttgaccttggctggcactgtatgcatgtagtgcacaaacacgtgacggaggaacacataaaaggcttgtatgtgttatcatttaaggtcactgttcccaattaaaagccttcaaccatgattttcatcattggaaatagaattgaatggccaccctgtgttgtgggaactgagaagggcaatataaacctgagaggttcctttgtgtggtggggcctgaagaagaaagccccacggctggacagctgttctctcctcctatcccaccgcttcccctaataaagggactgttcttttgattgccttgctgtttttcctttactagtgggcagctgccgggggactgctttttttgtttgtttgtttgtttttttaatcctaaaattgaatatcaaacccagggactctaaaagccaaacacctctagacctcaacttcctttttaaggttgtggatgagggccttgatcagttggagaaatgaaccctaactcaccatcctcttgatttcacctgggtgtctgagaagataggcaccagctacagcgtctggattgtaaatg

SEQ ID NO: 26841 - DNA, 1644 bp, Mus musculus
atttagattttttgttgttttgtgacaaggtttcaagatatagtcttggctggcctggaactcacttgtgtagaccaggctggtttctatctcagagatctactctcttctatctccagagtgctagaattaaaggcatgcaccacgacatccagttaggtccatcttttagtttttgaatgttcttactcttttctttgttttctccagaaccgacatagtccagaccacccaggtatgggcagctctcaagccagcagcagcagcagcctccgctaataggactactggacttggccaaggatggctttcctgtgatactgaacctgctgataaaaacttgtcttccaggcagttggaccctgttgtgggggcatccaacagctggagaggggccagcccctgctgtgcatgtgactaatacactttagggaaggaccatgcttttttatggttatgtccaattggcattttcatggattcctttttacaagaatctgtttttcttttttttccctcttttgtgcaatttgatcctaggacttcaatgttttgttttaaagcgtgtttaacaaactgaccggtatggctgccttttaagaggcaagtgccattctatttgaatcaaagtttaggacaaggcattaagatgcaagagattttggatcttgccatcacattatttccttagcaggctggaactggaaaatcaaaatgcgaatagagaacatggtctgaaaacagtaacttgctactattttcctaccatagacacaaaatactcgctgattatgctcagagcagagtgcatggatgatcttcacctttcacctggaaagctggcccaaataaggtttatacctgtgtttatataccacagggaactggtgagccacaatcacggatatattttagcaggaaaagccaattagtatttgtctcattatgctcccacctttttctggagcctgacccctaagacttgtgaacactaggcaagttttatcttttcctttccctctcttgactttttttttcccccctacatactttttaaatgaacctctggcaagaagcttaatgctggatttggttgttttgaaaaaagttttggtttggtttttgtaggttgttttttgttgttgttgtttttgacacatcacactatgcaaccttggctggctatgaacactaggctggccccaagcttgagagacccatctgcctctacccaccaagttctgggatcaaaggcatacaccaccatgcttagctgtttttactttcaaaaggaaacaaaggaatagcaagagattcaacagagaggatgtatttgttatgaaaagctaggtttttctcacccagcagggcatttaattggatagccagaataaaaacagaaccagagaatgaggtttctcttttgactccctaagaccattcaccctgccttaaccagacaaaacacaagtcaggggggactggttagatcaggatttattttattccttgttggtttaaaatggctaatcagaataaaaaaattaaagggtctctgtatagaggctggagtcttccctgtttaaaggttagaacccagctaccccctctacccagcaccatattgagatgggctaaggggta

SEQ ID NO: 26842 - DNA, 1665 bp, Mus musculus
gtgtcaggggtgggtggcaccacttatgagatttctgtgtgaatcttggcgcctcccttcccccacacctctgcacctacaccaaagggcctcaggtggccaccttccttccttcaaggggctccccttctttgcatggacatttttaaaatcaccgactccatgaggatgaggtttgttttacaaaatgccatgaggttaaggagagttgggaccctgagactggagtggcacctccccctcctttgatcttttaagaccttcccttccttgatccctggaccagactcagtggacatttgtgcaattgctcgccctggagggaaccagatcatttttaaaccagaaataattttttttattattgttacggattctatttttttcctcttctccgttaccaggtgtgtgtgtacatatatatatatatatatattataaatatcaaagaaattatatatctatcctgggatgggaaaacaagggagggatatatagatatatatatatatatatacataaggagggggattttattcttccctttccttagaccagcaggaaaagagagacattaaagtcttccttttctcaatggttccctctcttttgtcccagttaccaactaaggaagtagcactctctgctggtgctaagagattaggaaagaaacctgggtacatctggggttctcagataaaagaacttgggagagttttttaggctccttcacatctagtttccccaggaaaggggtcagttacatgacggtggtgggagatcaggaagagagcttggcctaatttaagaaacaccaggcaaccctgccctccattcttgggagacagggactgtgttgggcttcagtgagccccttcaatgcttccctataatcagaaaaatcttaaaatccaaggccaggagagaagaatccaaaaagcaatatttttcatcacatgccaaaaatgggatagagagaaggagtggcaggcctaggcccctccgagtgtcccttggggtttaccccttagcccatctcaatatggtgctgggtagagggggtagctgggttctaacctttaaacagggaagactccagcctctatacagagaccctttaatttttttattctgattagccattttaaaccaacaaggaataaaataaatcctgatctaaccagtcccccctgacttgtgttttgtctggttaaggcagggtgaatggtcttagggagtcaaaagagaaacctcattctctggttctgtttttattctggctatccaattaaatgccctgctgggtgagaaaaacctagcttttcataacaaatacatcctctctgttgaatctcttgctattcctttgtttccttttgaaagtaaaaacagctaagcatggtggtgtatgcctttgatcccagaacttggtgggtagaggcagatgggtctctcaagcttggggccagcctagtgttcatagccagccaaggttgcatagtgtgatgtgtcaaaaacaacaacaacaaaaaacaacctacaaaaaccaaaccaaaacttttttcaaaacaaccaaatccagcattaagcttcttgccagaggttcatttaaaaagtatgtaggggggaaaaaaaaagtcaagagagggaaaggaaaagataaaa

SEQ ID NO: 26843 - DNA, 1213 bp, Mus musculus
tttttatttttttaagtctgtgggatagtaggggcgaggggtggacaggtggatgcacatgtatacctgttaagtgagaagtcccagggattgaacccaggttgtcaggcttggtggcagatacctttacctagtgaagcatctgactaaccgtagtgccatgttttaaggatgccctttattctgtatctttttgctcctaggaatttgaccatcactgcccttgggtaaacaactgtattggtcgcaggaactacagatacttcttccttttcctcctttccctgacagctcacatcatgggtgtgtttggctttggcctcctttatgtcctctatcacatagaggaactctcaggggtccgcactgctgtcacgtatccttgaatgcctttggcttataggatgggggtggggttggagggcaagttgaatccttgagtctggaaaggtaaagggcaagtggtcacagtagaactggggaaagcaagataatattgttctgttttccttgaccacttggaatcagcatggcagtgatgtgtgtggctggcttatttttcatccctgtagctggcctcacaggatttcatgtggtgctggtggctaggggacgcacaaccaatgaacaggtaaggaaaactggcaggagactgaatagggcatgtcttaagccttactacagaggaacatgacactttcacaaatagcttgccagcgaatatttaatgtgatgatgtagagatattacctgtagtggggaaagtgaatgaagtaggcctacgtcctcaataagtagagttaaagctggaaatggtggtatagatctgtaatcttaggaggctgaggtaataggattgatctacttggaccctgtcccaaaacagtcagaaaaattaccttaagaaatggtcttgttagaattcttttaacaaatatttagtctgcaaatttatagaagttaattgggacagactttaggaagtacatagtactgcttaaagattatttttgtgcacataatagtagctaatgttaattacttagtcttaccttgtagttagcctatctgtggattctttaggtttaatcaaatatagatggtatagatggggagggaaaatcacatcagtactgagtatacatatcctttttcttagcattgttctgtaaataatacaataattggtatagtattagtataatgatggaaa

SEQ ID NO: 26844 - DNA, 1122 bp, Mus musculus
ccagtgtcctgttctttgcatacgattcagagcttgtttcgtgttggctaagggagctggacaatgggcatgtgttactttgttttccaatagagtgatggaggaaagactatgcaattcaaatctcctgttagttacatcggtaggtagttttctttttatgtcctagtcattcactcttactttttgttgaggtgtgttactattccacctaccagaggcccaggagcaaacaaaaatacctttactgctggatagtggaggcgcacgtgtttaatcccagcacttgggaggcagaggcaggtggatttctgagttccagggcagcctggtctacagagcattccgggacagctagggctacacagagaaacaaacaaaacaaaacaaaacacctttagcttctggttgtggagagactggctgtaaacagtgagtctggcagcaataagaactgcagaaaaagataaagggactaaaccagtggaagatttttttgaatagtggcctgatgtggtgatttaatcaaatgtttaatttgggtcctaggcacgtcagctttactggaaagatgagcgaggaatccaatgatgacaagaagccaacgactaagtttgaactagagcgagaaacagagcttcgatttgaggtggaggcctctcaatcggttcagttggagttgttggctggcatggcggagatctttggcacagagctgaccagaaacaagaaattcacttttgatgctggtgccaaggtggctgttttcacttggcatggctgttctctgcagttgagtggccggactgaggtggcttatgtctctaaggacacccctatgttgctttacctcaacactcatacagccttggagcagatgcggaggcaggcagaaaaggaagaagagagaggtccccgagtgatggtagtaggtcctactgatgtgggcaagtccactgtgtgtcgactgctactcaactacgcagtgcgtttgggccgccgtcctacttacgtggagttagatgtaggccagggctctgtgtccatccctggtaccatgggggccctgtacattgagcgtccagcagatgtggaagaaggtttctccatccaggcccctct

SEQ ID NO: 26845 - DNA, 1128 bp, Mus musculus
aggccgtggtgagtgggccgtggtgtctgatacccagggtaaccctgattcctgattatgccattgccgtgacagaggctcagcctttagacccaccccgggaacctaggctgtggttagggtcacattctcggggctgcatgggttcagacccacggttttgtgtgttccgtcccaactgtcaatcctctggctctaggagtgatctcgaggtactaagagggctcggtttccatccccgagccccatgacatcgcgagtgaccttgagctggacactgtcctctttaagggcctcatctccacttctgttaagagggctgattacgtttactgagcggggtattggtccccgctggtctgaaacactgtaattcctcgcgccctccagcccccccgggggggtggtactagggtgaaccgggagggatcgatgctgactgatcatgtccgctcctaggactaaagaccaggaggctattctctccacggtgctaagttgacatggatccgctcagagcccagcagctggctgcggagctggaggtggagatgatggctgacatgtacaacaggtaaagagaagcactcggcttcaccttgtctaggaaaactcgccctagtcacccctagcccgacagagtgaagcacttgtaacgaatgctttcgataaggtagtggagccaagtcccgccctcctaatcccgccccaccctcaccgcgtgcttcgctgaagtaaatacaggtcactggaaggacttggttggctatttggagggaataaaaggggtgtatgatggagaatctcctgcccaggctctgctgagtatcaagaacatataagcactttctcttctcttctcttctcttctcttctcttctcttctcttctcttctcttctcttctcttctcttctcttctcttctctcctcgtttccatctttctttctccttagatagcccatttacccttgtttatgtagtttatgtattttgtgtttgtttatgaatgccaacatgcatgccatagcgccacacatgtggaggtcagagggcagcttaataggatctcatcttggattgaactcaaatcttctggtttggcagcaagtgcctttgccgcctaag

SEQ ID NO: 26846 - DNA, 1182 bp, Mus musculus
gagggtctcggggtagccccagacttccctttccgcctcctgctcgcttctgagaatccgatctggtgcctagaggctggctagctgtgggccagaggtggctacagagcacggtgtgccccttggtgactttgagagactttgggaacttggggggttgtctcctggagcgggatcggggcgccctggctcgggtaggcaagcccggcagcgcgccaggaagttgcttcgctcagaccagacctttctggttcctgatagcgccctgcgggccagtggcgcgttcgctcctggcactgccagagcgcgcggagccagctccgcagcaccgggctctatggggcctccatgaaggctccatctctttggctccaggggtctcaggagccaccatgatggagtacccttcccaagggccgctaggaagcccttctctgagcgctctgtttctctgcagagtctcggccaccatggctcccacgctgaagcaggcgtaccgcaggcgctggtggatggcttgcaccgctgtggtggagaacctcttcttctccgcggtgctcctgggctgggcctccctgctgatcatgctcaagaaggaaggcttctattccagcctgtgcccaggtatatctgagaagggtgtgggggtgggaggtgaagaccgcgagggacggtagaaggaggaggcaggaagttggaaaacaaggacaggtggtcaggcagagacaaagcgacaaagcagggctgcccaagaccggaacactgggcagctaggaattggacagcctcacttcatgatctcttcaaacttcaggtgccactctgtcaggattctctgattcagtgatgagtgaaagccaaagtcccactaggcatacatatcctgagactgattgcctatgacaaccttctgtctagagtagtccgtagactcttagaagttctgcacctacctggataaggaatgctcaagttaaacaggtcttttgtgtgtgtgtgctagcaagcattgaactacatcaccaatacacagagagttcttaatgagatcaaacagaagtacacaaactggagaatggacgtgaaggacctatactcttggtcttttcaggaccttggagttcccaggtctacaaatcatcccttttgtacaaagttaaaagccttatttcctctagaatg

SEQ ID NO: 26847 - DNA, 1310 bp, Mus musculus
ctcctccatgatgggagtcttaggcaggtccctgaagaagatgtgtccagccagtaaggatgtggcttcctttgcttttctttccatgttctacaggtgaacctgggcctcctacttctctcgttcctgggatttctcctaccttcctacctctactactaccggtctcgcctgcagagagagtatgccaccaatttggtagacccacagaaggtgctcaatacttcgaaggtggctacatagactcctgaggccaagagacttggaggacaggcagtcaaggcctgataaaccgaagggaatggcctgtggctttctacctgcatcgtgttcatagagccgggttctgtggatttataaatactaagagttctatttttgtagggacttgcaaaaaaggaaacaaacagaacaaaacccccaaaccaaaaacagcccttaaaaaactccccccaaccaagctatccatcaactgaagacagtgcccgttccagtggtattgggccatcgtctttgaaaagaaagtgtggggctgccctttctccacacttggcctaggagcctctgtggagttgccttctgaaaactcatgggatcagtgaacagaccacactaagattccagccgccaagtgtgcacacatatatgttacgcacatgcatattgcatcctttcctgcaggagaaggactgaggggctggctgtatccaggatggggtgtgggggctggagggcgggttccctccctgatgctgtttcttacaggtcttagaggaaataaaaagggaaatgaaatctggctggtgtgtatctgtgactggaggagtaggttgttgtctttccagaactctatccctctgcctcacccatgcttggctgggcctttaggaaggatgcttggtggggttggagtgatagttcagtacttagagccctggttgctcttccagaggacctgattgctcacactccagtattcagagtgagttctaggacagccagcgctacatggagaaaccctgccttgaaaaacaatacaatgtgtgtgttgtgtgtgtgtgttagtgtgtgtgtctgtctgtctgtctgtctgtctgcctgaccattatttgtctagccatcttcctcttctcaactatgtacttactgccttgctatctgtcttagttattttcctgttgtacagacaccatgatgactttaaaaaaggaagagtttgaaggaacttacagtttctgagggctttgagtccctaacttccacagcagggagcatgacaggaggcagccatggtgctggggcaggagctg

SEQ ID NO: 26848 - DNA, 1113 bp, Mus musculus
ttaagaaagaaagaaagaaagaaagaaagaaagaaagaaagaaagaaagaagccatgaaaataaacctaaagtccttcaggtcaccttaatgtctaggtagaaaataggccatagaccaagtaggactttggtccttctgttggtgatgggagtaactcagagttgctggagtggcccctctttcctgtttccccaggtatcgatggggcttgccattttcctgacattggtccatcccttcctggtgtaccgtgagtgccgtgctgagaagacaaaatcgtctgtggatgcctagtccactctctagcctcgatgatgccttttctgttcattactcgactttgatgatccagtatctacaaagactgcctccccaggagaactgtaatcggcagtcatagtttttcttaaaccactgccaccacaagaaacaaaccaacaaaaaccaaaaaaacagaaacaaaaaacaaggcactcaaatgtcacctaggacttttgatttccaagatgagtggaaatttcagtggccaagcagccttcacaccaacccaaagcaaagatttagatgagtttttagttactccctgcacagggccacagcagagctcattgcaagggacagggagatatgtcacagagtcatgctaccccaaaggacttgggatccaactgactggctagccagaaagattttggacaacactttgtatcttgcctgtgagcaatgtctcctcttcaggaaaagggctattcattgacttagggcagcttttatatataattagcttggggttggagagatggcttaactcttaagagcactggctgctcttccagaggacctggtttgatttttagcacccacatagtggctcacaaactgtaactgcagtccctccatggatactgcatgcttgtgcacagacatatatgcagacaaaacatccatacacattaaacaaatataatttctctagggaatacttttatacaataataaagcctctatgtttaaggcaactactgcttctacctctttgtgtttgtatgagcatgtgcttgtacaagtgcacaagtgtcctcgtggggactgggtgcaaggtggaggtgga

SEQ ID NO: 26849 - DNA, 1141 bp, Mus musculus
ttattgggagggatagctctgtgggttattgttgtcaatgtgtccacttttggagcagaacggatcctgcctggtgatggcctcggttacagtttacccttggagtgcatgcaaagctctaggttcccagagacttattctatctccctaatgactagctgtcccccacccccacagctgattctgtcaaataggtcacattggaagttcctgcccagtgtcaaatatgaccatgccaacccttctgcttgcaggtgactgagacaacactgaagggtactgcttcaaccaacccagtgttcaccagtgaccaggccactgtagagaagcagtccacagactcgggggcctattctattggtcactagggcctcttcccagggtgccatgcttatccttgggctgcagaaccttcaacaggccactctatctcagcagacagaggtgggagggggagaagaggggctcttatttctgatgttcaccccaaagaccaggtatctagaccctcactgttcagcagacaggcagtgcttcccgctaagacctgaatcttgcctttaccccttgcatgcctcccatctgcttccctgggtcccaagcatccatccatttccaaaggatagagaaaatggtagctaaggttacatccatagaacctaccacataccagggactcccatacacattatctctttgcacccttaaaataatcctataaggtagatttctgggggtggggggtggggggtgttttgtttttgtttttgttgtgtttttaagagaaggaggaatgaactctctaggtgtctactcttctgtgtcagttgccttccctgccttcccatgatgcccaacagtgagctttctcaggaatgcagaccctactttaggagagcccagggaaatgcaatataaactctgatataaattctgcaatataaatttctgatatggccaagtccagcttcagcaggaaatagaaggtgtgactgtcagtggatttttccttgcctcaccccgaatctcaagctcaagctgaggaatagacctttattctcccatgaggtcctcacacatccacacatctggaccctcctccagaatctagacagaagacacacacatacatgactgacaa

SEQ ID NO: 26850 - DNA, 1155 bp, Mus musculus
ttggctggctggcctgggagcagaggccagctgtttgaatacccacctgtgttcacaggcctttgcccagaatgttctgtcaaaggcagatgtgatccaggccaccggagacgccatctgcatcttccgggagctgcagtgtttgactcctcgcggtcgatacgatatccggatctaccctacctttctacacctgcatggcaagacctttgactacaagatcccctatactacagttctccgtctcttcctgctaccacacaaggatcagagacagatgttctttgtggtgagcaaacccctcatggggtgcctggttttgcctaagtttttagtagataaaggtcatgctgcctagaggtccgtgttgttcagtcgcctgggcttcaacgcagccgtgcccgcttgtccttttcagatcagcttggatcctcccatcaagcagggccaaactcgttaccacttcctgatcctcctcttctccaaggatgaggacatctccttgactctcaacatgaatgagtgagtgtctcactggacttccttcttgctgctatttacgtaggaggcaggcccgccgttggacttcatcttgctttgtttgtagggaagaagtagaaaagcgctttgaggggcgactcaccaagaacatgtcaggatccctctatgaaatggtcagtcgggtcatgaaagcacttgtcaaccgtaaaatcacagtcccaggcaacttccaagggtaagaatatgggccgaggatggggatgaggcgggaagtgttgccttagtaaagaagtctctcctgtgatgggtgtgctctggtagaagcctgagtgcccttgtgataggcaacacttgggtcaaagccccctagtggaatctgcccttgggctctgctcctgttggtgctgacaaggcttcctgcatcctccaccaggcactcaggggcccagtgtattacctgctcctataaggccagctcaggactcctgtacccactggagcggggcttcatctacgtgcataagccccctgtgcacatccgctttgatgagatctcttttgtcaactttgcccgtggcaccacgaccactcgttccttcgactttgagattgagaccaagcaaggcactcagtataccttcagcagcattgaaa

SEQ ID NO: 26851 - DNA, 1099 bp, Mus musculus
gggccagagacacagggtgaagacagctcgtcaccttcctttgagactccttctgaagacactggaatggatacgggagaagcacccagcttgggagccaggtacggttctccatcttggagctgggagggaaggtgtgactgttctttaaataaggggcctctctgaggagggaaacccagctctctcagtggactctagtgtttggaaaacagagtcctttagggccgtgactgttcagttccacgttttatattttatgatgaactttgaaacacaaaagttaaatgcattctattttagaagatgaatgtaaaatttgaggcaccattttgggctttctcaatgcgtgagttatggctgtctagggaagtagaacctgctacatctttggtttctggtgagctaacactctctctttctctctctctctctctctctctctgagagtttgtgtgtgtgcaggcacatatttacaagcttctgtgcctgtggaatgacactacctctgctgtcatctctgtcactgtcttatctttttggggacacattgtctcactactctgaaacttgccaagtaggctaggttggcaggccaaggagccccaggcgggtcacctggcttctgcctccccaatgctggtattataagcatataccactgtgtctggccttttttactcccgcaaagcaaagcaaagcaaagagaagacaccgtgggatctggggactgtgctcaagtgttcactcttgcaagggaagcacgtcaccaagtgatgtatcttcctagtatggtttctgctgagctctgtcggcttcaagctctgatggaaaatgagctcctggaatgcttgcacaggtagtggaaggaaccctgtggaagcccaggttaccgaagcctatgttatagtggacggtgactctgctcgtctgatcaacggtttgggaactcaggaatctcgcctgctcttgtcgtagtacccagaagagcagtggccgaggaatctgaagttgttgagaaccaagtccctgccctgtgaccttgacccccaaccctttttcttttctttgccctggctgacctcgagacactctaggt

SEQ ID NO: 26852 - DNA, 1198 bp, Mus musculus
tactgattcttgggcatctcaagtctctgtcaggttcttgaggtgtcctccaccttccgactccctctcataaccgctttcaggtgtggccactattcaaagcagatttctaaggagtgggggtctgccggctgccccactggggttggttcttgaagagggagagcagcattctcttctctgttcaggatggatggaggaggctccctgcaggcttaacaggacagtggcagcttgaagatggctttgatgatgaggcttctggaggctcccactaagcagccatgtgtttttggacacagctacatggtcatctgagcttagaatttatcccaggcacgagcacctgaatctcattgtatataacagaaaacatgtttcatccacagctggaaggaaatcactgtttgggtgtatgctgtgtttctgatacatgtcctttctgacacagtaccatgtttggagagagctgtgtgctctgtggccatgcacgtgactcagtgtctaatatctaggacttgaagttgagcaaagttttccagacttacctgactaatgtctggtgagctggtgctatgagcgtctaatgtggggaaataaatacaccatggagtgcttacctttcaagaaaaatttggcgatttcctttgtatcaggaaacccttgagaatgggtcagagtagtctggcttggagcccatgtggtagtcctgactctctacccacctctgtgacctcaggtgagtaacctgaagcactgccttttctcctcagggtgcctttggccttctcaacctcaggacccatatcgtcataggtaaactgagaatttactccaggcactcttggagtttgcatgaagaaggtttacacgtgtaaagtgatcgaccctgcctctcctggcctaattgcttagacaaacaaccaaacaaaccaaaaacagaaacccaaaaaaactagtctcctgtatttttatctgttttgcaagtgtggatgtgaagtgtccagaaagggaggccccttggggatatttttgttgctgccctcatgttgaacaaatacactgtggatggcagtcatttggtcagactgctggcaggaataactatgataaactagcatggtgtgggggtgcgcttcagcctgatctagggccatctcatcctggagagagtggcacttctggggctgccagagct

SEQ ID NO: 26853 - DNA, 1179 bp, Mus musculus
gcccaaggacattgagcttcaaatcacagaacatattctttggttcataagtaatcccaattccattatccttctgtcactgctgcaaatacagatatggcaacatcagaagcactcaagatttccagagaggtagatgggcgcagaactctaactataatcactgaacttgatctcatggatgtgggtactgatagcatggatgtattgatgggaagggttattccagtcaagcttggaataattggagtaattaccagaagatattaacaataagaagagtgtaactgattcaatctatgatgagtatgcttttcttcaaaagaagtactcatctctggccaatagaaatggaacaaagtatcttgctcggaccctgaataggttacttataaatcatatcaaagattgtttaccagagctgaaaacaagaataaatgtcttagctgctcagtgtcagtcttttctaaatagctataaaaaacccgtggatgataaaaaagtgctactttactccagcttattatgaaatttgccaccgagtattgtaacactattgaaggaactgcaaagtacattgaaacttctgagctatgtggtggtgctagtatttattatattttccatgagacttttgggagaaccttagaatctgttgatccactaggtggccttaacactattgacatcttgactgccatgagaaatgctactggtccccatcctgctttatttgagcctaaagtttcatctgagttgcgagtcaaatgtcatagtaagcatctagaggagtgcagcctacggtgtgtggaactggtccatgaggagacggagaacatcattcagcattttagcaattacagcacacaggaattgttactgttccctaaacttcatgatgccatagttgacatagtgacttgtcttcttcctaaaaagaatgaatttatgaagttcctcggcaaatggatggacctggagggcatcatcccgagtgaggtaacacaatcacaaaggaactcacacaatatgtactcactgataagtggatattagcccagaagcttagaatacccaagatataagatacaatgtgtaaaacacatgaaactcaagaagaaggaagaccatagtgtggatactttgccccttcttagaactgggaacaaaacacccatg

SEQ ID NO: 26854 - DNA, 1117 bp, Mus musculus
gagatgcagaccagaaatggactataaggtggtatgtcttatcatctgagaattctacccttttcatctacagtaggtgcaaactcagagtccttgatttgaggaggaatgtgcaccatgacttctggagcatacagactggatcccatgaagataactgcccagcacagatcgtggcacagaagcagccagtggagacctgccctaaccctagaagggagataccttttatggtggtgaccgactttgaactcacgcaggagagtttcgatgaatggaccatatacttgatgcagtggatccaggagagaaaatcttccattcatctatgctgtaggaagctgaacagttgtgcctcaccagtctctaatgtcatagagatctttaaattggtggatttaaactgtatcctggagctacagctgagtcagtggtggcctgaagtcctggaagaacttgatccttacctggagggaatgaataatcttcacacactcatgttagagggattgaagcccttcagatttactgcttgtgaagaagaccaggaagacgagtggcaaagcacgttgccttctctgctctccaactttggcagtctccagaatctctatttgaatgatatctaccttctagaagactcccttgacaagtggcttgggtaaggggagatgaacattctccagaccatagaaaacatatctcttttccttagaagttgttagtaagaccttgatggtctgaccactgtaaacctagaggtgttagagacaaacatagcatatctgaacatatgagttctaagctcagatataagtgaccatgtaccagcatgcttctaattgctcatgtgcaaaaggttagtttgagtgcagaaagggattgaatatagatgatgggaaatgtgtatgacatttggtttgaagatggggaagtggacaaagttgtggtagggaacagatcaagggcttcttagggacacccctaggataaagctgaacccatcatatggacagactaaatttgggacaagtgttacctgccctgatttcaataccattttgcaaaaataatcttcttgctctctccctagctgcctgaagacccctttgaagac

SEQ ID NO: 26855 - DNA, 1190 bp, Mus musculus
ttttccctgaccaacttatcactgagtagagagctgttaataaatatgtagatttttttgttgtttctgttgttggaggatacctttgaactatagttatctgataagatgcatggggttatttccatcttttatctgttgaggcttgctttgtgactgattatattgtctattttggagactattcaatgaggtgctgagaagaaggtatatttatttgtgtttgggtaaaatgtactatagacatctgttagaaccaattgaatgatctgtccattggtgaaagtggggtgttgaggactcctatcaatgtgtgtggttcagtgcatgagttaagctttagtaatatttcttttaagaatgtgagttcccggactctgcatttgcgcccacctggcagccagagccgggggtgtccactgcagcccgctgccagggtgtcgcaccgatgcatgggcagcaacacgggtcacgatgacagattatggcaaggaacaacgcaatgagttggaggttctggagaccatctaccccaactcctgcacagtattatcagaaagcccaccaagcttcaccattactgtgacattggaggctggagaaaatgatgaaactgtccagactactctcaagtttacatacagtgaaaagtaccctgatgagactccactttatgaaatattctccaaggaaaatctagaagataatggtgtctcagacattttaaaattactggcattgcaggctgaggagaatctcggcatggtgatgatattcaccctcgtgacagctgttcaagaaaagttaaatgaaatagttgatcagataggaacaagaagagaggaagaaaagaaacgaaagaaaaggaagcagaagaagcagagaagaaactgttccttagcacccctgttatgattgagaatttcttgcgttggaaggccaaatttgatacagaactcctggaaattaaaaagaaaggaatgaaagaagaggaacaagcaggggaaaataaactaagtgggaaacaggtatttgaaacagatcataatcttgacacatccaatatccagttcctggaggatgctgggaacaatgtggaggtggatgagtcattgttccaagaaatggacgatttggagctagaagatggtgaggatgatcctaactacaatcctgttgccccagggagt

SEQ ID NO: 26856 - DNA, 1171 bp, Mus musculus
ttaaaaaacaaaatgggcttaagacctgaatagagagtgatcaacaagaaaaacaatggctaagaaatatcacaaaaattgtttatcaaccctagtagtaggaaatgcaaatcaaaaccacttgagattttattttacccagtcagaatgatcaagatcaatggaaaaggagaaaacaaactaggaggggatactggaaaagtagaactgttattcactgttggtggattgcaaactggtatagctacttgggaaattagtgtgaagaactctcaaaaagcaaaaattaaatctgccactgaaagtataacaacgtaaaaacagaattctaggcctttaggcccaggcttgggaatgtggcctttgtaaaggtatgttaatcataaaagagatagcgacattcctctacccacccgcttcctgggttcaaagagtgctcattcaaagaaagtcaccctggccattaccagaacctgcaatgcaaatgtgctattgttagaggctcttagaagctgtcttgagagttaacaattaccaggtattccttgtgactcttgtaactttacacttcctgtgactcttaactggtatctttggtatcttccaacaacgccctccccacttccttgagtttcggtttcttcctttaaatacccccttacccagctactcggggcgccatggtcctctacccctgcgtggtgtatgaacatgggcccgagagcgctcttgaataaaaatcctcttgcaatttgcagcaagacccgtttcttgtgggtgattttggggtgtcacctctcctgagtcagaacgtgggggagccctcacattgtgggtctttcaccacatgacccagctataccactccttagcatatcctcaaaggacattctaatcaccacttgttaagctatgtcattgcttccttagtcacaataactagaaatggaagcaaccttaatgtcctacaactgatgaatgaataataaaaatgcgacacatgtacactatagaatactactcagcagtaaagaaaaataaaattacaaactttgcatgtgaatacccagaactagtaaagatcttactgagtgatgtaatccagatctagaaagactaaacttgtatgttctttctcattggaggtactaacctctaatttttcatttat

SEQ ID NO: 26857 - DNA, 1212 bp, Mus musculus
gagctccagggtactggttagttcataatgttgcacctacagggttgcagatccctttaggtccttggatactttctctagctcctccattgggggccctgtgatccatccaatagttgactctgagtgtggggagcgggtgtggcggcagtcccaaaggcgccagggactgcagctaagtcatatgacttgcacctgacttcctcatataagacacaaacatcttgagtgctgctcaggtgtaccaggatacaggtgaatccaatttggtggagatttgcccctgctgccctgattagctgaagctgcgtgcctggtgaggtggcgtggcctgctgtgcgtggatgggaactgagagtataaaagagtgagaggcccagggttcgggggagatataaacgagggagatataaaaacaagggagatataaaaacaagggagatatataaacaagggagatataaacaagggagatatatggagaaagaagaaacaggactgaataaacgtgtgcagaaggatcctgttgcagcgtcgttcttgctggcgagttgggggcacgctcgagagttaatgatccttccgcaggtgcgggcgggcgcgacccgctccggggacagtgccaggtggggagtttgactgggcatccacttctgtgtttgctaggccccggcctagtctcacaagagacagctatatcacggtccttgcaacaaacgcttgctagtgtatgcaatggtgtcattgtttggaggctaattatgggatggacccctggatatggcagtctctagatggtccatccttttgtctcagctccaaactttgtctcagtaactccttccatgggtgattgtttctaattctaagaaaaggcaaagtgttcacactttggtcttcgttcttcttcagtttcatgtgttttgcaaattgtaccttatatctcgctatactaaatttctgggctaatatccacttattagtgagtacatatcatttgagttcttttgtgattgtgttacttcactcaggatgatgccctccagttaaaaccatttgcctaggaatttcacaaattcaatctttttaatagctgagtagtactccattgtgtaaatgtaccacattttttgtatccattcttctattgaggggcatctgggttctttccagcttctggctattataaataaggctgctatgaacatagtg

SEQ ID NO: 26858 - DNA, 1561 bp, Mus musculus
gtgtgtctctgtgtgttttatagcgtggtgatctgtgaacatttcagtgtgaactcagaataaccccttttcccctcgaagtccactggctttagtctatctgcagtgacacacatcagtatctactgtatatataaatactaaactcttacaccagtcattcctatgaattgaggtgtacaaagtttgatttgtatcaaagatgtaattattatttttaaaacctcttttcactacactgctgctgtaattactttgaatttttaaagaaaaaaaatgtagttttttttttttttttggcttcaggtgtgtattcaccaagaatttcagaatttatgtggttttattttattggtacataatctgtaaacttctcaaggcattaacatgacaagatttgtgtcttttattttatcttgtggctcaggttatatttgaagaagtttcaagtttatcttctagtaggcaatgaagtctatataaggtcttatgaaggaatcgccaggtccctggactcctgtggctgttttccacagtaacaacacatcctgctgtatgtttgggacaatggtatcctgttgaagatgagggtgggtcttctccaaggacctggccactgtgggccccggaactgccttctgatgttctgccttctctgttcctcgtgtcaccagcactttgatggctgactggacctgatcatgagtatttgtagggttagagagggtgacccataattgaaagtcccctgctgtgtttcagcgctgtagtgctgtggtgtgtaccccccccccccttttcctttgcggtactgaaaggattgaaagaagagggtcatggcattgtcatgctttgggggagaattttacttctcacatggaaactgcacttttttttttctaaatcctttgcattttgatgttcatttagtgtacagccctacagagaatgggctggcccaggtagcttgggccccttgactcaacttcactggggaacttgactctgcagttgtgaatcagggaagccatgctgtctccaggtgtggagtgaagctgaccttgggctcattatttccaaatgccctgtcaggtctgtctaggatgtgctgacttcggggtgctatacagaggggcctgtcctggcaatagttctgtgcaccacctctctgcctcctcagtttgttaggaaccattgtagagggtggtgaggggtccaatcccatgcagcgcctatgccctgcctcatctgccagaaagcatgaggaaaggacttgcccctaaagtagtcctgtagaagattagagtcccttaaaaaaatcaaagcaacataatcataatcacaccatataaaattgcaaaacccagagccgtctccacttcttcccgtgtgggtctgcaaagtctttaggcctcagccccaacaagccattcccagtcccaggaggaaggctagtggcagagaggtctggagttccaaatgggcaggtcacaagaaggtcaccatgccattccacatctggaggaggactgtgtggtggagtttgcatagcacagccatt

SEQ ID NO: 26859 - DNA, 1177 bp, Mus musculus
gttctggtctgggaaggcttaagggcaggtcttgtgacggacatgtgaagtagagcaccatgacatgttcaaagcactcagaagagcccacggcactctatttcaaggaaactagcttgccaggcaggctggtacacaagggcctgtctgccgttccacatgcagatgggtttgggaaagttggggatggtggtgtctgagagtgccattccacaggtaggcctcccggtcaggtctaggaaataccactgtgactctcttatctttggccccggcattgacctggggatttttcaggactctgcttggctcggccctgctaatgctgggtctaaccagcagtgttgaagatgtgccagggtactctgatccctttccaggctttgcgagtctgtttttccagctcggttacttgctggcacacataggtcaatatacaaggtgttcttggagacgccagggcctaatgttgacttttgcttcctgggatgtgttctgtggaggaagtgggttttcaggtggtggtgggaatgggatgtggtctggagtgattggtactgcacacagagaataaggttagctaggaggggggagcttccccctgctttgtgctcttgggctgaagtgcctcaaagggagctttgtgagttggggaggtgccctgaattctgtgtgtaattttaacatttgaaatagcaggcagaagcacacgtgttcgctttattgcatatacttaatttatttctgccaaaaatgtataagaagcaagttcaaatcctgactttgacatttatttgctagttgtgtgagctcttgccattatatttagccttgctctctgagcttcgtgttcctgggttcaaaaaaaaaaaaagcagaacaaaactcatagttacaaggttttcttgcataattgtctgtaaagtactcagtgtacagttcttgctacaaagcaatttggtaatggtagcttttatcctaattattagagaggcagttgggtatggtagtgatggtgacagtcctggcagtgacagttactgagtgctttcagtgtgtcagctgttcttccaagtactgtgtatcagttagcacatttaatcctcatgataacccaaggaagtagatgatgtcataacctctttattgataatacatgcaggcacagagaggttaa

SEQ ID NO: 26860 - DNA, 1190 bp, Mus musculus
gaagagcaatctctgctctgcctggctcagcattcccggcacgaccttccagggagcagtctagggcccaggctggtcctctcgagtttcacccactgacttccttgctttgttttaattgtggagttttgctatttgaggcaatcctggtggtaaatgtggtatatataccccattctctcctatcatttgtttattaatttcatcttactagtgttaggtctgtgcgcgctctctctctctctatatatatatgtaaaatattatcatcatgaaatcctctatgaaacgtctttttttttccccctttttttcgagacagggtctctctgtgtagccttggctgtcctggaactcactttgtagaccaggctggcctcaaactcagaaatccgcctgcctctgcctcccaagtgttgggattaaaggcatacaccaccacgccccggcttgaaacttttctttaatggaggctttgtagttaatttgtgtgtcactactaactgtttcactttatgtggatatttaagtcaaatcctgtgggattccccccattgtgttacaagttgcaacctattggcaattgtagtgttccgaagacagcctgagcctttccttctaccttgtttgcttgtggtgtctcttgttcaccacagtgtgccagtggaggtggcctggagcgtctggagattttcttgcctctaccacccttgttgctgaggagtgctggggtcacagacacagggactgtggcacctttgtgagggttctgagaatctgaacttagctcctcatgtttgtatagcgaattctttacccattcacagagccctctcaccagcctacaattcaagatttaaccccaaatctgcctgcctttaaatccagtgccatctctgatggtattatgtctcctgtgtccttacctgttggagttccagagtcttccagcaaaaacaggtctgtattgctcttcatgagtaagcatatcttacttgcgatctccagaagtccgtttactttgtatttccatggctgactgttgttaagggctttgctagatgagagtgttcctcatctcacatgaggacgggttgtcttatgtagtgtacactgtgtgtctcatattaaaggactatcacatggtttggaaaatatcacatgtaagagcaatatttgatttaggaagg

SEQ ID NO: 26861 - DNA, 1194 bp, Mus musculus
tgatgactggaaaagtcaggtaaaaattaactaatttactaatttaaaattaatttagttaatttttttcagttgttttccttaagatttgttataaatttggcatgttaatttctgttactcttttgtgatatttcatttaggctactttaagaacatgcattttcaaacatcatttggacttgggtcataatagccaagcatatgaggccttgacccaaattccggactccagcaggtactccccaagttgttttagagaaagcagtttaccaggcctgtgtaactcaccaagacagttcaccctcacctgctgctttctttctaggcagttagactgtttgcgacagctggtggtggttctatgtgaacgctcccaactgcaggatcttgtagagtttccctatgtgaatctgcataatgaggtaattaatttgtccacttttgtctagtaacaagtcttttggctgccatgattgctactaacttcaacatctgattgcttgtcttttgttaggttgtaggaataattgaatcacgtgctagagctgtggaccttatgactcacaattactatgaacttctttatgcttttcacatttaccgccataattaccgaaaaggtgagcagctgagccagaaccttggtggtaaaagcagctttgttaggttaaccctatttccagagacattgtgtataggatatgtgctttaattatatgtaagatttatatatttatatatatttaaattaacattgaaagtttatatttatgggctctcataacattttcaagtgacttccagtaaaccggtactggaataaacttcattcattttctgcctgactataaggggagtattgattttctcaaactggaagtactttgtgatccttagttttagtttctaagtccttggctgtctcccatttttattttgtttcctagagtaaaatcctaactgcttaacttcttaaatttccttagttcaccttaatataatagtcttccctatggttaaattgccatatcccttcaacattatgcaaattctttaaaaggatcacaatttagccaggcagtgatggctcatgcatctttaattccagcgcacaggaggcagtcagaggcagacagatctctgagtttgaggccaacctagtctacagagcaagttccaggacagccaggg

SEQ ID NO: 26862 - DNA, 1384 bp, Mus musculus
gtgataatatattggaccaaaatgggatttaccagtcagaatcagaaacattcatgcatacaaactttgggaaaggtgaaaaataataaaaatatcctttgattttattctgtatattaagatttatcttttaaggaaacaagtctctatactatttgtttgaatgaatgccctttgacatctgtgtttttataaactttagaacgtatactgttaacatcctatttgttacatagtttatagctctccaatgcagaatatgacatgctatggatgggcccttgcccttgaagctttctaaacttacggctctccactacagcataaaaggcactggcctgtattcaaccatgttcaattgtagtctgaaaattagcataccctgtttctgccatatctgaagagcaacaaataagaggatagcggtgctgcctcgcagttcacatagcactgcccagcctttcctgtgctaaccgccatgtcaaagccagtctgatctccgctttagtctacccgtctcattttgattccagccagagcaaagagacttgtgctctcactgcaatgtgtttgccgccgtggctctgtgcttgggtttactgtaccctgtgaggttttattagtccacagtaattagaccatggcttgttttgttttgttgtttgtttgtttgtttctgtcagaaagttgaaaggctctctgagagtctagagaaatggctcagtggttccacaggctggccactcttccaaagaaccggagtacgagtcctatgcagctcaccgtcaccgtaacaccagctccaggggctccgacaccctctctaaactccactggcacctgcactcatgtacacacagaaacacataagtcaaaataatataaaaatcgttgatgttgttgttgctgtcttaaaggttctgttaggctaggagtgtgtggctcactgatagaacatttgcttagcagatccaaggccctcaatccccagcaccagaggcatatagtaaaatgtaactgcaatggctgtaacagatgtcctgactggtatactagatttggtagggctgagtgccaaggcctttgtttgatccccaataccacaaagggagaaggaaaatgatagtaacatggagttttcatattgatatttttttaccagatatattactgtcattattgtaacattgcaaaatttgctatacaaattttatagtgtatacaaacacactacttttttaataattcctttcctttgccagccctccccactggatcccagctgcctaaaacccttagggtctgccaggataagtggtacacacctttaatcctagtgctagggaggcagaagcaggaggacctctgtgagtttgtggccacc

SEQ ID NO: 26863 - DNA, 1154 bp, Mus musculus
cttcactgaacccccaggggcaggggagacacaaaattacagatttggagatagctcatctcttaggaataccagagttcacttcccagtaccaccaccaaccagctctttagctccaggagatataaaagccttcaggtctcctgaagcacttgtgtatgtaggacagaggcagagacaggtgggtctctgtgagtctgaggactacatagtaataccatttcaaacaacagcaacaacaagcaaagcaaagtacctgaaagatcctttttttccatttcctccaatataagatttcatgtatcccaagctggcctagaactcactgtaaccaaagatgatcttgaatttctgctcctcttgcctctgcctctaaagggttaggattagttataaccagcacacccagtttcccccggtctctgtgtgctgtcgtctagaactctacctactaagctgcatcccaagctccagttgaagaccttaattggctttttgagattattagagtcaaatgactggttgttctgtgaaacatgctgcagggctagagagagttcagtaaaatgtcagctttatgacctagtccaggctcctaggctacacacatatggtcatatatgcttgtgatgcccatgctggagggtagagacaggatccctgtggtgctggccagccagactagcctactcggtaagatccagactaggagatcctgactcaaaaacaaaacaacaaggacatttcctacaaaatgacacctgagacctgagcttgacctctcgccgccacatacatacaggtacacccgcatatagagggaaacacacaaacacaaaaatatgtgttgtgggctgaagagatggctcaggggtcaagcacaattcccagcaaccacatggtggctcacaaccatctgtaatgggatctgatgccctcttctgggtgtctgaagacagctacagtgtactcatgtacataaaataaaaaaaattttttttaattatttttaaaaaaaaatcaaaaaataaatgtgaaaggcaatttgctctaggcaatgatggtggcacattcctttgatccccgaactcaggaggcagaggtacgtggatttctgtgagttaaaggccagcctggtcttcagaacaagttcc

SEQ ID NO: 26864 - DNA, 1198 bp, Mus musculus
tcctgctcttcctgtctctttctactgagtgctagaactgagtgctggagttacaggtgtgggccactatacccactttgtatagtactggggagccaggcttagggtctcctgcttcaagcactctcatcagctgagctctgttgctaacctctggaaacacccttttcctgtcttgtgtttggatcattctcacttgacttttttttttttttttcttgccaaatttgagtatcaaatagtttagtaaaactatgttaaatctcttctgtaaagcaccttgcaaatctttggccttccctattatggttattaattgtaaagtgagtcattggctgtaggttatagctgacctctatttttaaagtggcaatagaagtcattacaggttagcattagattatgagaagtgttcataatgactagactgtttcattgatcataattttttgcttactgtgtcttcatgtaggggtctcattcctcgcctcctaggtgacatcatttctttgtggctgtgtaactcactggcctatctcatcaatacctatgcactggacagtggggtaggttatggctttggtaaaatatgctggtgagggctttctttgtattcactggcagccattttagctgtaagaaaaatggtagtttgttatatgctagacagaacattatacagtaaaaactattatttgacttttcaaaggctgatggcatggccatgctatttcctatagagggataaacctagaaattccctcaagtctgacttgagtgtgctcatggatctagtcctgatgttgtcagagcttcatgacttttttgttttttgttttttttcttttctgatgcttaacttcagagtgcacaagacagagaatagctgtttggtatatttggaggttttctgcatcttctgggatattaaaggggctcctagaaatctcagcctgagaggttttgaggtctgaattatctcttgtgtatagtataagtaagacctcccacaggcttttttctatggtgtggaactgttaccaacacaatttttcatttttcaaatattgatacgagtacatttcttcctaatccatcatagtgtgataagaatttgtcaatattggtggatgaggacaatccatttagaaatcttttgatttcagtatgtcagttgtcttgattggcagttttttgt

SEQ ID NO: 26865 - DNA, 1144 bp, Mus musculus
tgaaaaagactggtataagaggtacttaatgaaaatgctatgacacggctttactgggtccagtcttgacgtactcatttcagttacatctcctagaaacctgtccagttctgtgtgctggtttagatttgccgtgttcatcttcatgctagactttatttctatttcttttcttttccagggaaatatgagccgaggaaacagcttgtttttccggaaggttccttgtgggaagacttactgttatgacctaagaatgttaatctgaagatgtggggcagggacagtgacatttctatagtcccaatgcacagaattatgggagagaatgttgatttctatacagtgtggcacgcttttttaataatcatttaatcttgggaaaatggaggtgattggtgtctgccttttttgttctttgtcctagcacaacatcttttaccactggggttccccattagttatttgaagtgagacatttatttctccaaattcttgttttaaacagaaaacagacacatttccctaaaggaacaagcaggttttcatgtagatttgagtctcaggttagggctttgtcaaatgaagaatagaaccccaataagaagcagctaattctataagttgataaaattaagaaagcataccatgtgggagtttatgaatgacctgagtagacagatgctagaaagtcagcagcaaccactagtctacctcccaccatgcttccaagcagccgacccatcttacctttcagtgctgctgagttactgtagatttctgccttctgttcctacagaagggaaaggcatcaccaccaccaagaagaaggtcaggtacagaggcttaaggaagctttgggaaggaagggagtatgatggcctttcactccaaagaagctcctagcctcgtgtagcacgagaagcaagcactgcagcacacacagcagcaccccgagtgctcagtgcccacagcctccaaggtctggcctcaccgcggctcccattgcctataagcttctgctcctaagcgtttgtttccttcttgttactgcagaaggtgagtagtttgggtcttatttctgatgacacccttgaaagtgtaactccttatctgatgacgtggaccaaagtccacatggttc

SEQ ID NO: 26866 - DNA, 1161 bp, Mus musculus
tgagttagaaatctgtatccatcccgatggagtcatcccaacgctgacttttctcagggatcacaccaatgcacaattcaaatccttggctgacttgacggcagtggatgtcccaactcggcagaaccgttttgaggtcagttaactgtgagatttggtagagtacttgccctccactcacaatgctctaggttgatccccagcactgcataaagctaggtggactggtacacttctaatccttggtacacccgagtctagctctgtggaagtgacggcaggggggccacaagttcaaggtcatctacagtcacacagagcattcaaggaaaactggcaatatgagatgagatgctagcttataaaaagattggtggcattttaggactaaaggtgagaaagggcatagaagacttcctgagtgacagctactatggaaaccagagccttcgtagttgcagcttcggttcaggtcacacagagcataacaggatttttgcccagttttgtttgttggcttccttctttcctttttccttctttttttttttttttttttttcttgttttgagacaggatctcactgtgttggcctggaactacttagcttgcagaatgagttagaactgtaggtccatgttacaatgttttgctctgcttggtttttctgaaagtaaatttgtgctgggtgtagtggcacatgcacacagcacttgggagacagaggcaggcagctccctctgagtttgaagccagcttattgtacatagcaagttctaggacagctagacctggtctcaaaaatcaaacaaacaaaagaataacattatacatatgtgtgtgcactgggccttggacctggagccctacacttgctagtcaagtgctctaccactgagctatagccacagttggggatttgatattttgtggttcaaaaggatattttgtggctggccttggatttttttttttttctgttaactagcacaattagaagatcatataatattaaaatatagaatttatcttggtgactttagaatgttcatatcattgcaggcataattgctcgaagcaaagaacccaggaaagaactgttagagaagcaattattgaaaatgtttggggggctggcagtatggctcagtggtagaacac

SEQ ID NO: 26867 - DNA, 1256 bp, Mus musculus
tggttttcaaagtgctctctatggagtcttcatttacttgaagaaaactgattatacattattcactttatttatatgtgcaagtacatgtgggcatgtctatgccttggcgctcatgtggagatcagaagacaactggcaggagttagttctctaattttaccatgtgaattcctgggaccaaactcttggctatggttttcaggcttggcagcaagtacctgtatccactgagctaccttgccagcccaaatctttttaaaagttaattctgagagtccttcagcatctgctcataggccaagggcattgttatacctgctccttcttttcttggttgattttctaaccttgctcttcaggtacacaactggagcccagaggaggctatagaagcgatcgccaaaatccggtcacacatctccatcaggcccagccagctggaagttctcaaagagttccacaaggagatcactgcaagggcagcaaagaattaactactgattatctctcatgctgacttaagagtctgaagactgtggataacaaagaacttggatctccctgagatatagtaacaagtttacaggacaaagcagcttaacccgaccacactgcaaatgtgctgactggtagataatgtgtctcctttgccttccttcctgaaataacacttggatggctacagagaacaagattgtctggctaaatcttattttctttgacagggataaggaaatattaattttaacagagatctgttgtttctaatgtgtgtaatggcactgtaaatcaaagacatttaatcctagagagggaaagaagtatctagagctgttcttattactgtcagaatccaaatcttaattgtatgacttggcaaagtgcttgcccagcatgtataataaggccccaatttggtccctagcaggtccaaaaataaaaataaaaatacagttttcccctggccctgtgggactcccctcacacttctggggagtgatcagaatgttcaaggatatatggggtgtaggcaggactgctgagtcaggatggaagaagtctacaattagtttccctttagaagtcacccattcaggagtcaacacagacacacaaatcatttcagaaacgtttatttgtatgaacagttcctaactctttatttagcttagagcctttaaaagaccagagactgtttttatttgagtctggaaaacagtttctgctattaatcagaaacaattgtttctact

SEQ ID NO: 26868 - DNA, 1102 bp, Mus musculus
accaggctgacctcgaactcttgagatcagattgcttctacctcctgagttgttgggattaaagaggacgtccaccaggctgtcagcattgcattttgtatttagcggtgttcttcggcttttccctgctcctacctaattcaattcgtatttgccttaaaacattttaaagctgggctatacagagaaaccctgtctcaaaaaaccaaaccaaaccaaaacaaataaaacagtttttaaaagggattttacaaattcattttttttatgccaggcatggtgacacatacctttaatcccagtatttgggataccaaggctctatgaattcaaggccagcctagtctccatagcaagttacagaccagccagagttacatggtgagagcccttctcaaaaaagagaatagtaacagtaacagtttattgcatgtgggggcagggtgttgcacagccatagtgtgtacatgtgcaggtctaaagacatcttggtatagtggcttctccttctacccgtggcatctgaggaatgaactctcgttcattcctgtaatagctttatgctatgagttcatattttattaatgataccttcatttaagtaaatttttaagtgttttgaggaacaaatcaccctatgtttattgtattttttatatctttgtaggagccctggtcatgcagttggttagtgtgtaacatttatatgttatcttttagtacaggctttcaggcatcaaggcaggccatgaagtcagggtcctctcaccttttccccttcccatcactgggataatagaagtgagttatgacttgaggccttccttcaggtttttgtttgttttgttttgtttgatagaacattttcttgccctgggtgtcctgcaactccctctgtagacagacaaatctgtctctgttgctgtctctgcctctgcctcctgagttattggggttaaaggtgagcaccaccactgcccacccttaatgtttttttttataactatttatttattatttatttatgcatacatgactgacaaaataatattgtatcctgataggaaatttaatgaaccattattttgcaaagtttttgtga

SEQ ID NO: 26869 - DNA, 1162 bp, Mus musculus
tgtagcccaggctagcctagcctctaaatttaggatgctcctatctctgtctcttgagtactgactggggttataggtgtgtcaacaaacccagctctgaagttttatggatctctttgatccaggttgtcatcttctaactttggctcactgggacagtcacagtgcagctcagataaacctcggacttttaagagcctcctgcttctgccgatgcattctcaggtttggcttgttgtcattgtttttattttttgagatagggtgtcttgtaacctaaggtttatgcttgctatgcagctggggcagaccttgaactcctgacatgttttcctctcccaagcgctgagattatacgtaagtgccaccactcttggcattttaaaattttaagattttggaagttgatgaacacagcactagtcttgtgttcaagataattgacactttgttagaagcagttgtgaatcttaaaacctagtcttctaaagtgttccttttcctaactctaaaatatcattagtcttatttgaccaatgaattttcttttggatacaagatctccccagtaagctggactggaactgtctacctcgttttattacatttatttatttgtatggatatgtaagtgtaagtgtgtgagtgccaatggagacagaggacaacttgaaagagaaagttttgtccttccactatgtcgtaacttgggatcttattcaggccattgggctttgtgacagggccttctttttttcttcccctttacctgccaagccttaccagccctgcctttgttttgctgtttgttctcttcctggctgtcatctgaatggatgctgggattatagatgattacaggtatgtgctgtcatacctacttctccttcagttccttttgggtaggtgagtggattaggtattgcgactttattgatttcttagtgaactagggtgtgtaaatctcttagctctatctttgtagtccaagtagttctccagtggtggtaggaggtactggggattgaacccttggcctcatgtatgctaggcaagtgctctcctattgggcttcacccccagctgtttgttctttcttcctttttcctcctctaacttcttcctcttccttttctaagatttatttatttaatgtatatga

SEQ ID NO: 26870 - DNA, 1175 bp, Mus musculus
caaatcttttaaaagttaccttattggagccagagatgaagatgaatgcttataggtccagcagttcatgctaagacaggagaatcattgaacctagtagtttagaatcaatcttagcaacatagtcaaatctccccattttaaaaatgaacagaaaatgattactagaaataaattgcctttgccattgtctgtcagagagtcacttgtgaaaaatagaatgcagccgtcatatcttcacaaaggagaatttctgccttgactcaggaagaagtggtgtaaattataggtgtctgtccacagcacgcagcagcagtcagagaacagtgtatagaggtttgtttccccttcatacattctgtgggtttcagagatcacactcaggccatcaagtttggcagcagtcatttttacttactgagccatctttctggctccaaaagaaggaatttgatcctttggttttggtgtttatagggttgctcatccccaatggtggtaaagtttgccgacacccagaaggacaaagaacagaagagaatggcccagcagctccagcagcagatgcagcagatcagtgcagcgtctgtgtggggaaacctggctggtctgaacacacttggaccccagtacttagcagtgagttctgtggtttgctttctgcagactttgcaagctcccagctgtttcttcttctgctgtctctagctaacaagcagtgtcatttgcaacgttggacatgtagagatattatataaaaatgtaggcattgtcattaagttgtgttagtctaccttatggttccatattgagacttttgttacaattaaagtaaaatgttgattttaatttaaagaattaccagtatctcatttccctgcctctaagagaaatccttaagaaaatcttcactattcaggatcattttccatgtctctttatataagatgttgagatcaccatcaaaatctttattaagtcccctaaaaacatgacagatgtatctttcagcagactgaaatatgactttgagtcatacagtctaaaagaaggtccagatctataatctattattgatgttatgttataatttatcataatattataggggattattagatttttgagtcacaaaagaaagggcatctttgtccatagttgcacatgactatagt

SEQ ID NO: 26871 - DNA, 4091 bp, Mus musculus
tttgttgctgagaccctgcttgcccagagactgtcttcatgtgttaggtgctttgcaggaaatccaagccttaggttcccctctgtctctggcagttggatgttctcttggtgtccttcatgtccttttgaactttcccctgtgtccattgttagcatgtgcaaaagttcttgtcatttcccacccctgcccttccccgtctcctcatttcagggctgcatacagtgagtgtcctgttctctctctctgtttggatgtattgctctgtgtaactcagtggatctccctctttctggtttgtttttttttctagattcctgccgtttgttcatcgttgtgcctaaagcatgtcgatgtggcgtcaagtacatcgtccaaatccctgtctcttcagcttctctgatgcttgaactctcacctttgaccttgtgttgacctttgatgctgatgtgtattttattatgtttgtttctttctttgttttttcttttttctttcttttttttttttcccttttgtgctgccaaattggttttgctagaacgactgctgaagggaaaatatttaaacttgcatttgaatataaaaaaaaatctatttttctagaacttcataagataaccacttgattttgtgattccaattctttgtaactgtctcagagcagccctactagcacatgccgtgtggtgtttgtatccttgtgaacacacagccagtccgcttccaggctttgttcctctgtgtgcttagttttaaagacaactttgaaataaacaatgaaataaaagatgtcactaaaatctttgaggctcctgaacacattttgctgacatagttttggggcttgaggagaccgcatgttgttattaatttttgtttttctgagttctcaactgcagaaaaatgtctgaaatacacccttacccccattcccttttcactgaatgctgaggtttgggccccagctagccttttttcttttccttttgtggttcttcctgaagcagccctgcagggaagccctagggtccctcttcccctcccctcccctcggctcagccagctcacacccgtgcttcttcctacagtctccacagcaaaatgtgatgctttcaacttttttgggttttgtattcttttgcctttttgttttgaatttttcctttcctactaagattatgcccagaaaaaacaagttgtgcatgtttcctgctgtttcttcacaccttcgtatgtatcaccttcacctctctgttttctatagtttgtgcaaaaactgactgatttaaaggggtttcaaagaagatgttttaaattgttatggggttgattttttttctcaagattgtatcgttttattttgaagtggcaactttctcctctattgcccttagagtgtttgcctgtgcacttagactgtcactctttgtggtggcctccaggtctcagtgggggatccaggaggctggctgctctgctcagggagtacagggggccagaggcagaagcagaaccaaaggtggctgtgggtaggcaggatgcttagggcatcaaggctagatcacggagggagggagggcaggcgggcagtacttctgattacccagaggaggccatcggtgcactgagtggcaatatacctgcctgcctgcgctttccctaggtgacaagcacaataaatactacagtcttcacactgtttacagctctgggcaccaaccaccccgcactggctcttcactatggctctgctcttacttagctaatagagttggggtaagggcaagaaactgtttttaaattgggtgaagagccagatagctactgttcccgggtgccaggccagccagttctttggtttcctaagggaaacttaccctcttctcttgtagcaccatccagcctcagggtcttggggacttggaagaatgtgaatagaggaggagaggctagaggaaatgagtagacagggatggatctgtgaagagcagaggctgcagggaggatttttgacagatcccactgagacttaagcactggtgggagggaaagtggaagcaaggttgtccaggaaagggtggcaaggtgcagcaaaggatgggggtggggagagaagcacggtctggcatcatccactctctgcctggtgttgaaggaactccagcacagtttctgctctgggacccctacaggttgcccaatatattatgcttgaggccaccttactaggaagaaatggcagccaagtgggggacttaagtatgctgcttaaggtcctggaaggggtggtaggatgccagcgcctagcatgagagagcctgctgtgtgcccacagtctgactgcacagagcgcctctgtcggcaggaggtgctgcggtccccttcctgtgtactgagaagctgggcttgccaatatagtttgctttcgattccaagaggagctctgggaaaacctgtggataaaaccaaatgccaaatgttggacattgtttccttttccttttctctctgattgttttaattgttccgtagtggttttaatggatttgagaccctggagcggcagctgcctttctgatttccagctgctttttgtgaataatttaaaaagaaaaaaaaaagaaactttacattttggagacaaacctgtgtgagttttttattggtacaaacgttgtatttaacactaggggttttgtacagttttttgccttttctactagaaaacaatgtaaagtgatttcacaatgtgaagagaaaaaaattgccactatgaccaaacgcacagtctgttctgcagcaacaacgggattcaatcaactcaaagtcgtgattcagccgtagaaatgcttttcttgaccttgtttgagctttccttttttcctgtttgatttataaaagatgtcttttgtgtgtgaacttgtgttgtactctgtagaaaattatggattttgctttaatggtttttaaaaaaaaaaaagggcaagaagagcccgtgtcgcttttcttacctaatcacagtttgtgtagtggattaaaaaaagaaaaagttgttaaaagtttggagcaagggagtatgtgtttaaaaggactctccttcctttttgtgtgtgtttccttttgtcccaatggggaacctaaatctgttttaattgcacagacacacagacaaaaagtcattttgtatctgccaagtgtggtaccttcctttgtttatttgctattaaactgtttgagaagaactgtttgtcttctgcgttgtcaattgcccgggaaagggggggaggggaggggatgggatgggatgggatgggatgggatgggatgggatgggatgggatgggatgggatgggatgggatgtgggtgacttccatgctgacagaacctattgataattcagctgaagtcacacagagctcccgaaggaaaagacagtttctctctggaatgctagttgtgtgacatgtctgcattctacaaagtaaccataatatggaaacaccttgaaacactttggtagctttaatttgtcctccctcttccattacagctgatggcctgtgtgaatcctagatcatggccttctcttcaagcctttagtcttcagccccaaaagtagttagacctttaaggtgccttaagttaattcttcaggtattctagatcattctctaatggagcctcctgcctaggactgcctttgaacttctgggagcttgcagttcagctacttgtgtctaaagaggcagagactctggccgagcaacagccctgtctctgtccagtccttcactacagctaccaccctccatggagactcctggtactgggtggtccagtcttcacagaggtgaagccgcctctctgggcgctagagctgacttgtgggtggagcccctctatttggggtggacctggtgggtagtgtaactcaggtatttcctggacactgtccatttgataatcacatgaggaataacagagctcttgtcaaccacacttgcctttaattactgttttttaggtctccatttctgctcttaccccctgccccccctcaaaacagaatcctgccatgtaatccca

SEQ ID NO: 26872 - DNA, 1118 bp, Mus musculus
agcccagtagatgggcacagcccaagcatggcgtaggagaatctaaccaggaccagatgagctgaagttagatctatccagtttccagcacgtgacctaaacctctaaagtctgttgtttttgaaacttgagaattagccacggtgaatctcaggcacagtgcctggcatgagggcagatgatgggcagccacatcgtgctggatgatgcacggcttcatcagcaatcctactgtcttttgtctgtataaccccatgttcccaactcaggcaaactttcttcctgggatctcagatgcagggttctagaagtctggtgtatcagtgatcctgtaaatagctttgtccaatctcatttatactgagaagaaaagtcagtaaagacttgcctgctagcagaaagcaagttgattattgtgcgatgggtacatagtaggacatcttccctttgctgttccctctccgtgactaatcaagctctgtggtgtcttgtttctccagtcctgatgtgaactatgaagagctggctcggtgcactgatgacttcaatggagcccagtgcaaggccgtgtgtgtggaggcggtgagtggtcagcgtgggtgggtgggttattggaagccttgctctttccctgggtaggtcagggacccacacttaggaagttggaagtgcagggaggcattctgggtcttctctgtccggctgcagggtatgatcgcattgcgcaggggagccacggaactcactcatgaggactacatggagggcatcctggaggttcaggccaagaagaaagccaacctacaatactatgcctaggggacacctctagtctgtccgctggtctgagggctaaagttgataataaaaggtgttttctgttcttcgccacagtctttctcagcctctgtggactctgggtgggagtggaatgtatggagaaggccttttgctcagaagctacagcctcaaaaattctatagatggccatgggacccaaaccagctgtctgggtgaggccccatggcaggaggtgcaagcacagctgttgcctgagtcctccccagtgccccctcccccagcctctttatgtcatctttccactgttcattgccatc

SEQ ID NO: 26873 - DNA, 1183 bp, Mus musculus
ctagctggtcttctcttacgtctgagtgtctttgtgttcatctgtcacggggctaagctagcctcattactttctcttcctacaatagcagactagccttctgttccctcagggctccagagtgtgtgtgtgtgtgtgtgtgtgtgtgtgtgtgtgtgtgtgtgtggtgtgtgtggtgtgtgtgtctgtggggtcactgtgagcccactattgcctgtccttgagatgtttgcactgtggtcccttgtcctagtccttatatcctccagtttaggagtcttctctctgtcctctatgatctggcactgtggggcacctgggacagttccactctgggaagtgaaagacacctggggacaaatcttcctggctgagggcctgggaggaggaggggaggttcaaaggaagctcagtaagtggtgggcgaccttcctgcttcctcacagtttctaaactgtgggtgcatgtcatgctgctgcctgccccagctccatcgatgggtgtccctgagtggctgccatgtgccgagctgggatttgtgcagtggtcttcctggcctttggcatgagaggacggaggaatgaggtgatggtgtcccagacagcaccagctgctctgcctaagggccggggataggtgggtcagggctgagctgagcccagagtgcacgcctgtctgcaggcagagtctcctggcttcagtgccagaagaaagctatggactggataggaggagaatgtaaatatttcagctccacattatttatagaaaaatgtacagctgtgtgatgtgaaataaatgtcctgaactccacttgggctcctgtgcactcctctcagcccgggcctgaggaaggctgtccctagctcatctgcatccagcgttggcatactgagagcctgccctggcctcctgcctcctgggcttcctggggtgccagaaaggaacacctacgacactacggctgtaaagtcctgagatgttctgggcactagagaggaggtgacttgggcattcacacctgaacagcttgataaagaagtcacaggaaaacaggggtactgctctgtgaccctgtacacgtgtgttcagatgtgctgtggtgacctgggcctcccaagggccttcggaccagggttctgtaaaaaataaagtggtaacccatgtccaaccctcatgggct

SEQ ID NO: 26874 - DNA, 1117 bp, Mus musculus
ggccaatggtgtgatgaattccttacaggtgaggctgcgctgctggacctgggaaaaagtttgccttctactgtatctaatatgctgagtagccatgggcagctctttagagagcacttgggtttggcagggtagttactctccatccctgagtttgggctaagcctctccctaaggtgataatgtgtctgcactgatttgcctaagcttgttccttgtactgctctctcctcctcccaggttctgccaggcaggacttgccttttccttagtatccaggtggcttttaccccagcttccaccacaaacttccaacatgggggtccccagccctctgcagtagccagccctcattctgtgggaggctctgactttgtgtttttattctccccactcaggatcgctacggttcctactgatccaggctccatggctcaggcctgtggtgacgacagcaagaaccctgagtcccaggctggagatgccggtcttgtgggtctggggagttgttgactttgtgtgtgtggtgtgtgagttggatgacttgggaggatcttggagcggggaatggtcggcatcagcccttgtcttcagcctgtgcatcgagtccttgtcctcatcccctcacactctccctccatgctagtgttcttctccagtcttgccccaaagctgctgctgcttggcctgctgcactgggagtgaggggggagctccatcaggatggctttatggatctaattcttccccaaggagggaaggcacaaggcttctgcaggctctaggatccttgtaggtggtctgggggcttgggcgtccatcttctggaaacaggggaggcctagcaagagttgtgctgtatcagccctcagggagaagttctggactcgtcactgctgttcctgtcagtggcctcttctgggttccagggaagggttaggagaaggatcctggtagctcaccaagagctagaacttttgcttggtacccaaaggttttatttgggattagcccggaggcctgagcactcttccattgtcacagctgtcccttgaaggctgacttctgcctaggtgtttgagagcctttatctaccattactgtgggtcacagcgcc

SEQ ID NO: 26875 - DNA, 2288 bp, Mus musculus
tgcctgtaactctacctccaaggggattgaaaacctttggctctgtgggcacctgcattctaatgtacacacacacacacacacacacacacacacacagagggggagggatatcctgtactaaggatatgatttcaccatcattagttccttcacagtgtatttcatggcctagacgctgacattctgccctgaatataaaacacacattggggccatttttttgcaggacagcttataaatttaggatacatcatcatttagactccagttgctagaaatgtagtctgccccatttccctatgttggctcattagctgtatttttcattctccttctgtatgatgacaatgacattgctataaacttcatggccaggttaaccctttcataactttaaaggtctctaacaccacatattgccatatgttcccagcgaccctgtagtgcattaaaagttaatttctatggtagttttctatgagaatagtatttaatctgctgtttctttgcagcactgttaatattaggaaggctgactttatccaaaacggtaacatactctgttaaaggccgtagacagcctccctgagtggactcatcggtgagaggggatgcattagatggttcttgagatgtttacctgttcagctcagtgacccatgccctccttttatgtggtcaccaaatgaaaactggaatttggaattaatcatgtcccctctttgcttgccaccttcagtttagtgtctgtgttgctacaaaaatggacatgtttttcccttgacattcttctgtcagagttttctggagtctgaaagctgcctcggtggtgatgattactggatgattgcctatactcctatgggctctccattttcagattacactgggctgtacggcttctatttctttggcaggaaaacccaaaggcaacagaatacattttttcctcctgtctctggcttagtttaaacagtgactcacatggaccctggggctttgcttcgtattctcatctggggaccactttctacccctgttttaatttgtctctagtgttcctttggaattctttatattctatggcacataggatgtgtctctgagttagacttgtggtgtacacggtacagtagtagccctaaagaaaatgacagtccaggtctgtcctcagctgtgtcagccttgcagcagtcaagataggttggactgctacaaacaatgactttagggaagccaggcctgctcagggagtttgcagagccaggcggaggggggctgggaaaggattccccagaaacctcaagtagtggtttcatcgaagtgaggataaggatgctctgttaaccttaaaacttccctggaggcgcactcagaagaggtggtcatgagtttatagaggctgtggttgtatgaagtgtttctcatagaaggacttgatctaatctgtagttcggagttttgttagtggaaaacccagacacccctccttgttcataagtggttctgtctggttttacctttccattctggatctagccttctgagtctcatctaataagggattcttcatttttctctttctagttttaacagcgtatgccaaggaactcacattctcttccgggaattcagctttatacaagccacacctcataatagagcatcattccttcgggccttctggagatgcttccgaactgtagggaaaaatggtggtaagtattctcaactctattttgccccatttccaaccaccccctttctattctttccaaacattttccttttaaaaaatcccatttatatattggatatgtgcttatgtgtgtctgtgggctgcaaagtgacctattcaggcagttagagtgcacgtctggagataacggtgcacagctgaagttcataggacagactgcaggagctgcttctctgtccaccctgtggcttctggggattaaactcacgtcaccaggcttggcagcacgtgcctttcttccaactgatccagcttgccagccccatctgttattattattgtcctataaatacagtttgactctaggctttggaataccttattctgaggagacaactctgctgggtcagaaatgttattagccatcgcgcagtgatacccatcaggaaccaagtattgctctgaggacatgaagtataataactcgctcaaccttcatagcagctctccctgcgagctactataatctccatcttataagtgatgaaacaagactagagggctaagcagtgtggaagattacata

SEQ ID NO: 26876 - DNA, 1151 bp, Mus musculus
aagctccacttctgggataagtcttttgtccctctaggtatggttggtactccacaggtcttcggtgctgctacctacaaagagctctcagagacatttgctctacctcatttctgccaaacactgactcttgtcactaagagcagtaagttacccatagagactaggtcctttatgagcgattgctagcctccacaggctgggtatgaaagctctagtctcccaggctgggtgtgaacactctagcctcccaagctgggtgtgaaagctctagccacctagggtgggtgtgaatgctctagtcccccaggctgggtgtgaacactctagcctctcaggttgggtgtgaacactctagcctcctaggctggttgtgaatgcttgatgctcctctttcaccaggttttaataaatgtggctcaagaaatggcggctgttcccacctctgtttacctcggccttctggtttctcctgtgcctgtcccactggcattcagctgaagggagacaggaagacctgtgacccctctccagaaacctacctgctcttctctagccgaggctctattcgccgtatctcactggacaccgatgaccacacagacgtgcacgttcctgttcctgggctcaacaatgtcatctccctagactatgacagtgtgcatggaaaggtctattacacagatgtgttcctggatgttatcaggtatgagtggcactggaacaggtgggggacacagacctgatcctgagcagtcatgtgtgaggttacattctctattgacgaataagcggactggatggcttggccgtttgacatggagttagatttctgaccacttcacagtggtccacacttacattgcttgtttgctgttttggtgactgtaaagctactcaggggcctgagattggaagatcgatagttagaggcctcataggcaaggtccagtctcaaaagagtaagagcagagttgcttaccatggttccccacctacaatctcagcccttaggaggccgaggcaggatggcttgggttgacgatcagcctggacaatgtagcaaccttctgtctcaaaaacaataaacaggatgcagctcagagtgctcgggaagtgcactctgaaagtgaaagcactggggggtgggg

SEQ ID NO: 26877 - DNA, 1198 bp, Mus musculus
cacctcttgcactctatcctgggccccctgaagctgggctcagtgtgattccttgtcagcacagagctccgtctccctttgccctggcatcctatgtgcctgccccacagcaccgatgcaattcatgatataagactctggtcttccccatcacagctggcatgatggcctccctgtgaactggcctaccaggggctgggactggaggtcacaggttaaaaggtaatggacagaggttgagagaaggaagaagcagcccagctggtctgggtgcttgggaaacctccagcctcaagtgttggtaattatgaaaaaccttggggggcggggattcgagccctggaatcatgtccattgctggcagtggacattctcctcatccagaagtcactgctttgtcagttgtgatacaggtgaagtgtgggaatggcttaggctcttcttcctcctgctggaatgtctggggccatttctaccttggataactggatagctcctgccatggcaactcactaataggaattccctcctggtgctgtgatgggccgtacttttcttaagcctttagctatgctgtgagcttgagtgaacattgggtgggccttggagagcagacttgtagaacgtttaagaagctctgcaaagaaagcatagcatcctacccgagcttcacctattctactcttctctcttccattctgtgggattctaagggaaacaattctgtcacagcctttcaaagactggctcaacattttcctaaatggtcagaaagagcaactagagagacacaagacacccaggggctcaggaggagaattgtgaggttgaacctcttgagttcattctcaagtgctcagggatccaagttcatggacacagcctgtggctctcgggtggtaaaggtcatgtgccaactcttctcagcccctgtccacactaaagtgccagcattagcttcatgctcctttaggccaagggcttctctcaggggagctgagatttttttttttttttttttttttttttttttgtgctgccctagaatctcatcccagtttttctacttctgagagaggggagtctagccttgctttctctaaccggtcctgtgtcacctcaatcgctaatgtccaatgatgaggagggtcagtgaagatgtaaagtggtaagcaaggagtggagaggtggtgagaac

SEQ ID NO: 26878 - DNA, 1183 bp, Mus musculus
tcaatgcaaaaaatgatgaaaacataaaaattaaaatcttgtgtgccaatgagatggcttagcagataaaaatacttatgatctatcctcacaaccttaatgaatctctctgacctgtgtgataaaggagaaaagcagctccttcaagctcgcatctgacctgcacctcctcctgtctcatgacttcccacatacatacatacatatatacatatacatatacacatatacacacaatcaatgaaatatgctttaaaatttttttttagttcataagttaaacattgagtggtacatgtttttcttgtattcattgtcatctattttaatagataaaaataaaaattactttggttgttcaaaattttgatttttatctaattatccttatagatactgcatcttaaggttccgtgtaagtgactgatgtcattggctcctcatgctgttctgatgtttattcttgttcaggtgatgcagatgaagcttcacattgttgctttgattgcccagaagggaaatttttctaaaacgtctgctcagattgtattagatggccttgtagacaagattggagatgtgaaatgtgggaacaatgcaaaagaagccatgacagcaatagctgaagcgtgcatgctgccctggacagctgagcaggtgagttccagagctgtctccctgtgttgtcccaggttgtccccaatgttaactgaggcctaccaatcacagttaattcttgagtatagttttttataactgtggggtctttgtgtatgtatatgccctggctgacctgcaacttactatagcaaataacattaattttcttttaagacactgtaattcaaatggatcagtcaatgaaagtttcaaacaagaatgttttaaaactctgcacctcatttctttttaggataaattaagtcttttgttaatagatccttatacttaacacctagaaactcatatttaataagtgactttaatatgcctcatatttaatatatgaatttaaattaaagtcataacttatttctatgagaaatataagaaaagtagagatctgatgctatgttttctgatgctattgtttcaggtgatgtcaatggccttctcacaaaagaatcctaagaatcaatcagaaactctaaattggctatcaaatgcaataaaagaatttgga

SEQ ID NO: 26879 - DNA, 1136 bp, Mus musculus
aatgcgtgaaataaccattgcactcagaaaaggtctctgtcattcctccttgaccaggttggagaaccaaaggatgtcattcgtaaagatgtccgtgctatcctgaaccggatgtgccttgtctacccagccagcaaaatgttccccttcattatggaaggaaccaagtccaaaaactctaagcagagagcaggtatagcaaaacatatatatatgtgtccatctatctttctagagttgctgagagctgagctcagagtcccatacgtgctaggcaagttctctacactgagctatatttctcaacccaccccctttcccccaaaattgaagttaaggtgcaagtctttgcataagtgagtctcaagaagtcatttataaatgagcagtgaaatttcttcagtgtctgtgtagttgattccaattttcttcttcaaactgtgagagtgatgagttgcacactggtggagccatagtatcaggtgatacaggcaccactcagtactaccctggtgacaaaatcaagtgcacaggggccatctgactcacaggcataccttgtcatgaacacttataacaccattgtctcatatatgacagtgtaaatgacagaaaaatctaaaaagacccagaataagatttgtcacttcctgtgtgccaaagaaaagttgtagaagcttctataccatatttttttgagtttcattaatctattctttcttccccaatagagtgcctggaagagctaggttgcttaattgagtcctatggtatgaatgtttgtcagccaaccccaggaaaagccttaaaggagatagctattcacataggagaccgagacaatgctgtacggaatgctgccctcaacaccattgtaacagtgtacaacgtgcatggagatcaggtgttcaaactgattggaaatgtaagtgacacttctctgtacgccttgtcagtatgttgcaaaaagaattccaagatttcttggttgttgggtttcctgccatctcactctactggagtttcattgattattaagcttaaccatcaagatgtcctagatccaggtatgtatttcaggtgctttcattgttgttggacctctttactgtgtttgaatagattttttttttttt

SEQ ID NO: 26880 - DNA, 1136 bp, Mus musculus; identical to SEQ ID NO: 26879

SEQ ID NO: 26881 - DNA, 1196 bp, Mus musculus
ctcctttcctctgtgtctcacacagagaaggctttgccattcccttagggctgaggctagagtccttgatacagaccatgttagcagcacacatttattcaagaatttgttcacttggggcttcttccactccccatagttaggatataaaatacaatgcttagttcttcctagtgtactgcttcctaccagtttcttctacaggcaaagcaggtcctatttggcttttcatggataatcggggatcaaaaatagagtagaaaggaattagggttagggaaattaattagggttgttttttgttttttgttttaacattctgaggttttaaaaatgtgttggtacaaacatgcaatcccagcacttagaagtttaaagtactggccagctgggccacagagtaaatctttgtcaatatatatatagctgaatattgactagaatataccaactatgtttttcttctttgtctcatatattgagttttaaccttcctaacacagttagaactggatagctatttcagatagagagcttggcccgggaggcctccactggagtactgaaagacctgatgcatggactgatcaccttaatgctggattctcggattgaagatctggaggaaggacaacaggtgattcgttctgtgaacctcttggtggtgaaggttttggagaaatcagaccagaccaatatcctcaggtatatttataccctcgtcagtaaaacttgggatagtctcttatttgtctacagatagaaatcaggtagtcagagttgtgagtggctcagtcagtagagtgcttgcctaccattcagagtcctgagtctgccccccacccccaccccacctgacctctaaaccccctggggcctccagtctcttgagggttagctgcttcatctctgaatgaacacagacccagcagtcctctactgtgtgtgtgttgggggccttatatcagctggtgtatgctgtctgtttgatggtccagtgtttgagagatctctcgggtccagattaattgagactgctggtcctcctacaggatcgcccttctcctgagcttctttcagccttccctaattcaacaacaggggtcagctgcttctgtcctctggttggatgcaaatatctgcatctgactctttcagctgcttgttgggtctttcagagggcagtcatgataggt

SEQ ID NO: 26882 - DNA, 1178 bp, Mus musculus
aagtaatggaggaaaataccctatgtccatctctgatctccacatacatgtgcacacacataataaatcagtattatacacatagagaacatatactcacctaaaattagagccttgaatttggaaaattgatgataaattatctttattttttagtcactccttctgtttcttattttttaatggtttgtttatttttatgtgcattggtattttgtcttcttgtatgcctatgtgaaatattggatcccctggaactggagttacacactgggtcttctggaagagcagccagtgctttttgtatggtttgttttttgggttttgtttgtttgtttgttttttgagacagggtttctctattgtatccctggctgtcctgaaactcactctgtagatcagactggtctgaactcagaaatccgcttacttctgcctcccaagtactgggaataaaggcaagtgctgcggtcacccagctgcagccagtgctcttaactgctgagccatcttttaccctctggtttcttattttaatagtgtctatggagaatggttcgactattacctgacaccatcaacagcattaacctagacagaattcttctggacatccacattttcatgaaggtctttcccaaagagaaattgaagcaatgcaaaagtgaatttcctataaggactctaaagacccttctacatactttatgcaaattaaaaggacctaaagtgagtaagaacaacaattgatctcttgagtacattacatggaagtcattactagcatttgaatgtgctgtctccttcagatcctagaccaccttacaatgattgataataagaatgagtcagaattggaggcccacctgtgtcggatgatgaagcatagtatggaccagactgggagcaagtctgataaggaaacagaaaagggagcttctcgaatagtgagtagcctgaattcccaggggtgggggtggagtcttaggaatcagagtaagcggtctcttgatttgctgttatcgccatttctgcctaatatttttaaaacacttgagtagtgaacacacgatttttgatctccaaaaaagagttctgtgtctgtgcccaaagcatggttagatcattaggtaagtccactgtgagctctacttaactggagaggaatggaccagcat

SEQ ID NO: 26883 - DNA, 1472 bp, Mus musculus
cctccctaggtaacacaaatggagaagaagtggggccatctgtctacttggaaaggctaaaaattctgcggcagcggtgtggtcttgacaacacaaaggtattgttcctttctgtgtggggtggagaggagcgacagagtcacctcagtagagtggcctgcccttggtatacactgctgaagagttacatcttgactgctccctgaacttagcccatgtctccctgtcctctctcaacagcaagatgaccggcctccactgacctctttgctctccaaaccagcaattcctccagttgcctcctccacagacatgctccatagcaagctctcacagctccgggagtcccgggaacagcaccagcactcagacctggattccaaccagacccactctgcaggaaccatgacctcctcctcctccacaactaacattgatgacttgaaaaagagactggagagaataaagagcagtcgcaaatgaagctgcccaccctcggcactctgcagctttagttactgatctagaagccctgtagtgtgaagcggccgctgcaggccattgtacacaaactggttgtatgtatcagactgcagatgggaggagcagtggtgcctcaagtctgcacatgctctgcttctagaagactgactgtggattagcttagtgtacagactttaaacagctgctccctcagctcagagtaggttccatatcctttttttttgttttgttttaatggctcatttgtaaaattgtcctaatttttcctagctttcagccattagaaactcttttaatagttccttttgagttgtgagctcttcttctgtagccctgaagggacactgtattctgtatgaatgcatggcatgagacaactaatttaagagacttttataaataaagtttgcattaactatacccatttcccaaaatgctctgggagttctgggcaactattttctgtcacctatttaaggaaagctaggtcaatttattgagttcaggtagagggttaatggcctgcttaggtcgtctcctttctctaaattcacaagttggggttgtagctccactgaaacaggagagactttctggcctgctgtccatatgcagacccaaggagcagaggaagcccatcctccctgtttggaggccttggtttatgaccttcctctgctcagctcctgttgtttggagggacatttatgtgtcctactgctttgctgtaccaatgacaagagattgtttgggccaacagttcccacaccacaagtgaattgggttcactggtgcatctgggagagcttgctcttttcctgcctcaatatctggtccagactaattgcttcatgctttggtttgagtgagtacaaaaaatgtgaaatgaagattcacttccagaaaaatggaggctcttcctccatagttagaaaactgtttcatgagtaaaagtttctgggttctag

SEQ ID NO: 26884 - DNA, 2272 bp, Mus musculus
atttcctgactgccttcctggtgcaggtgagatgtcccctggcttcctcagcccacctggtgaggtgacggggaggagatgctctcattgcttggatgctctggaaggagctgctgggagtaggaggcagaggccagagattctagctgcagccctttccttccacagatatctgcccactgtgaccagaacaagatgaccaacactaacttggctgtagtcttcggccctaacctgctctgggctaaagatgctgccatcaccctcaaggctatcaatcccatcaacaccttcactaagttcctcctggatcatcaaggggaattgttccccagcacagatgcccagggggtctgagctcaccacctccagccccttctctggcagcccgagttggacttgtcctcctggcattaaccttactggagtccagggctcctgcctaggaaggggccctgaagccccagaagatggaagttggagcctactaactgggcagcccctcctgtccctctgcccgtcccaccttaccggccctggaggcctctgttaccgtaagacattttctttgccttatacctctcactgcctctctggttgctgggcttggttcttctaggatttagccacagtaaaccttttcctttttcctgcctgtttccctggcgagtgtagaagactacatcactgctggctgtgctggtagctggggctggtcctctctttcctgattgctaggaagtgagcattggcctgggtgcaagttccctgtgcctgccctccctgctaatagggatgataagaccagagttggcctgtcacttctgcctcctgggtctgttcttccccaagtggtactgcccccagagtgtactattccctcatttctgccacacttggcactttggatatcaagactcagaatctgagtgtctattgaaatggtcctgtccactcccagggagagccgtagtgtctggtaggatcagttacagcagtcctggccctccattcattctcatgtgcacagatcttcagccaaaggctatagtaggtctttcaggtgtggagtcattttgatccctgttctagccagagataccaatgtctctcactttctacctggggactctcggagagtcagaaactcagaagccctgaagactgacagagcttttactaatagatcacccctgctggataggttctagcagcttccttaggggagtgtggtggccacagggcctcttgtctttcagaaagctgagccccagtgatgattggtagctttcattctattcctaatgaagccttgtgactcttcccgaagtccactgcctaatgacagggaggtacctgcagtgaccttgccctacaggtgtggctaggcatgacagctccagaggtggtactggctaccatgagatctgtactgatgatcttgcagctgaggctgggcctgacctcactggctctttcttgcaccactgttgtagcaggtctctggtgccacaagtgctgctgtcagtccccagcctcacacctgacccagcctgggtcactctgcttttgcccacatttttgtatcaagtgttgctacactccatttactgaggagcctttggacctcttgttttcctcctgcccggtcctgtcagtctgtggcaggggacgctcttactgtgaatctagtgttcacatttaccacgatttccttggcaccaatcatgtattttaccgtttgcactttttgtatttcaataaaaatgtaaatgaaaaaaacccatttggctgtttaggaagtaagaccctgaaattcacaaccagacaggaagtatggtatagttgagaaagagagctttagggagtcccctccttagtccatctgctgtctgctaaattttctcggggaaatatgaacaaacctgtactccagataaggtaccaattaatgtccaaaaaaaaaaaatcagtccaagtctgcttgaggattgtgatctcaagaagctgtgtcccagaggactctgtgggaactgcacagatggggtccctcctttagtcagccttcatcttctgcacacttccaaaatcacatgcaactggggcagagttatatagagtatctagttaggtgaccctggctagccagagttatatagagtatctagttaggtgaccctggctagccttctaaaactatgcaggtcaggctggcctaaaactcaacagagatttgcccacctgaatgctgggattaaaggcataagccatt

SEQ ID NO: 26885 - DNA, 2307 bp, Mus musculus
ttatacaaaggatgtttcatctttattttcccactgtcatgattttggctttgtttacctatcttatgagttgtggttcactgggattcatcagagtcctgtgcagccctgtgacacacaccacgaccctaccctctattccccaccttgcacttgtcccttctctcagcccagtgtctgctcagattcccttcctgttagtttgcctggcactgcccagttcctgatttttctactgatggctggctgcctcttcaaggccttctggagtaagcccctcttctttgcctgctacaggactccttaccagagaagctggctgtgcatgagaagaatgtccgagaattcgatgcctttgtggaaaccctgcagtaaaagtgtcccgagtgtctgcagcaccccctttctgtggacccagcagagaacctcctcttcctcagctgcttcctagccttcatgctggttctggccaggtgaaagacagggtggttcccctatgggacctacaagtccctgctcttgaacttcctggagactcatggcagcagtcaggcccagtgccggacttggcgaggactcgggccgtcgagctggaagctggctgtaacagagcctcagcaaggactgtcctcagctgcttcacaaagggtgtcatctgttcttcctgctaccagcctcctgcctgggtctaccctgaggccggcccctacctgcttgtccttaccatcaaccacctgacattccagctggtggctagaacgctgggcaaggcagaaagaggaagaaaaccaaggagaccaacccgggcgaaggagggccctgcatcacttcctggaccaccccactctcccacccttctttctccccttcccttccttccgttttcattcactccctttctcccaccttccatcccttgccttcctgggcctgtgcttttgacaatatgacaggccaatctgcctaaaatgacaagtattccaaagctagccaccatttcccaaaggctgcaacagcctgtttgtagaattcgttattgagagtcacagaaaggttctttcctcgttttccctcaatcgctgctgcgtggatatagaccatggtaaatatttattactttcagagaaatcagatattttatagaagtatgtttggggttagcagttccactggggaaggaggagggtttcttctgggatgtcggcctcccgtgaagattgctcagtacctgtgaggatactcctgtcacatctaaggagagatcaggaatggcctggcaaaggccaagcggccccctcaggctgcgtgtatggacatgtgcaggcgttaggcttccccagcatgctgcgtaccccaggaaatctcgggtatgttcagtgtggtgactcctcagagttgtgttgcacacggtgccccaggagcactgtgtgtcctgctgctcaagttcctgagcctggagcaggactagggagctcttcctccttcctctagtcccagagtctgtacgaggccctggctttacaagctggattggttccccttcaagaaaccaaagctgagcttatggttgacgtaaaccttcaggtttgcttgagtgagtcaagtgcctctgccagcctgctctgttcctctgtccctggatcctcactggcagcagctgttacgcattggagcaggtggctcgcaactgcttgttagaaatctgcatgtaacactggagcctttcccctgtgcatgctttgctgccacagagaaatgtgcccagcggtggtggccaaatgccattgcagcctttgggtcaggggcacactcatggcctacttaaaccagatataccccccagagccagaactgtaggggggtgagggcacgggttctttgcagggctcagccagtggcctttgcagacagcagcctttatgtcctagattattaggaaggaggccagggaagctgagcagagcatccttcacggtagcctctgcccttcagccctacacaatggaaggatgctctctagaccaatgcagccaagctcaggctaggaccaggtaaggcccctccagtgctttgttgggaaatgagagctacacctggaaatataatcaagagatttccaataaaaagttttctgtacttcatagcttcctattccaaatgtcttgacagctagttcaccagtcccacctctgcatcactgagccaccaacagctttcatgagcgaagggtggagcctgaatttcagagtcctgagtctcaaggctgcttcagtcttgagacttgatcaagtaactaacagccctgac

SEQ ID NO: 26886 - DNA, 1134 bp, Mus musculus
tcccctccatggcagcctgcactcagatggctccagcgggggcagcgggggcagcacacatgacgactttgttatgattgactttgtaagttgccaccaccacccttggtctttgctggtctctggagagtaaacttagaagcatctgttacctgggaacaagagatctccctcaggatggggtggtatacaggctacaggggcagcatttagagcctgaggacttttaatgtcatgtctttgcttgaaattcagcttggatgggttttccaaaagccctttccttaggagacgtttgaagggtctaagggtctagatcataagcctaagcaggggaaggaatggcatcaccaggacttgctcatttccagacgagcaaggtgcaaagactcttcctcccacttaggtgagcctagaagacttttcctggctaattcctgactacatatatagattacatacatagccttgtacatagattaacttttttaattcttcatggttcaaagatgaactaacctgagtttgtattgtttttaaagaaaccagctttttctaaagacgacattcttccaatggacttggggaccttctaccgtgaatttcagaacccccctcagctgagcagcctctccatagattttggagctcagtctatggcggaagatttggtatggaaaccccttccctcccagggctcctcctccagcctcctctcctcatctgatagtcactcctgtgctacacttctagaactttctttctgttactccatcctgcccttgccttctatctttgctgaaagagaaaaggagtctttttaactggctttcaccaagtccatggtgcctggcagtcgtcctaaactgccttgagcttgttttcttgttcacagcacttatacttactgtgtgtttgtgcatgtaatgtggcaggaagggggtcatgtacatgccacaacacatgtgtggagctcagatcagaggactgctttgtagagttgctgtctcctgcctttacctgggttccaagaaccaaactcctgttcttaggctcacacgataagtgcgttttctcagggccacacagccggctcttttctgtgctttcttggtgttgctcacacttgctggg

SEQ ID NO: 26887 - DNA, 1170 bp, Mus musculus
actatgccataatgggccctctggacttgaaggtgacttggaagatattctaacaaatactgtattgtgcttcttgcattacaggcaatttgagaggaccccacctatcatggggattatcattgatcactttgttgaccgtccctatcccagctcttctcctatgcacccctgtaattacaggtaagggctgagacgagtctcccccaagctacagctaagcaatagcagcctcgagccatgtgggtagaaatgaaaaggctagttttgttctcgctgctgcctgttaggtacaccaaggcctgagccaccgtatctaggaactaactgggtgttcaggtttgtggccacatcacctcctccaggttatttggggactgcaagatgtcgggactttgtgaactatgaaaaatggtttttggtttgctgtctggctttataatctctggctagaactcgttgacacagctcccagcctttcctaagcactgtttgcatactttctgaagtcggctattgtgattatataaactccatcgtcgttcctccctccctccctccctcccgacggtagaactgctgaggacgcaggggtcgcgtacccgtcagtggaagactctcaggaagtgtgtaccacatctttttccacatcccctccctcccaggtaggaaaagggttatgggggctgtgtgtattcgtgtgggctttagggaatgttgtccaaacttaatctatgccctttggtgatgagatcactctaacatgcatgtgttgatttagttgctccatttttagtttagttttgttttgtttttgttttgttttgttttgttttcaaaatagggtttctctgactagcctttgctgtcctagaactcactctgtaaaccaggctgacctcgaactgagagatccacctccctctgcctcctgagtgctaggattaaaagtgtctactaccactccttgcttattttcttaataagtaataaatttcacttcataatagtagactatgtaccaaagagcaggaagtacttaatataaaattgaaaacaacatgcagaagcactgcttttcttcaagctgatacagccatctgcctgcctggccacgccctctctacctgcctggccacgccctctctacctgcctggccacgccctctg

SEQ ID NO: 26888 - DNA, 1142 bp, Mus musculus
ggctggttttcactttatatagttttgggtgaccttgaactcctgaatctcttcctcctgaatactagaagtgtgaactaccataccaaacactatagactgaatttaaatcttttaaaggcttataactcattaaaattattttcacattcattttaaatacctgcctgcttttaactgtagagtgcattggagcaacttattagaaaagtcttctgcggggctggagaaatggctcagtggttaagagcactgactgctcttccagaggtcttgagttcaaatcccagcaaccacatggcagctcacaaccatctgtaatacaccatgatgcactcttatggagtgtctgaagacagctacagtgtacttacatataataataaataaatcttagaaaagaaaagtcttctgaaggccattgtaagcagcacaggcagcctaatgtccttgggcacacgagaagggatgacagtgtgaatcaccgctacttagaaaagcaactgaatggccaagtacagttgactgttaggaaaagtattggctaagtgaagaattaatagaagtcataacaggattacagctttggaaaatgctgcttccacttctggttcacagatatatgaataaaatgtagaattaaaagacattttacacgccgggcggtggtgacacacgcctttaattccagcacttgggaggcagaggcaggcggatttctgagttcgaggccagcctggtctacagagtgagttccaggacagccagggctacacagagaaaccctgtctcgaaaataccaaaaaaaaaaaaaaaaaaagaaaagaaaagacatttacagttcttttaaagtcatttttacagtcattttaaaggggttacctctcccttttagtattgtcaatggctttcttatttaaagataacttaagatggcattaaggtcagattctctgaggtggatgttaattactctgttttaaataaagatttattgttttgttaattattttacctttaaccctttgtggattttttttctctcctccctcagccgagtttattttttggattttgtttatgtgaataggcacatgtgtgccagggcacttgtgaaggacagagaatgtgtgggagtagtt

SEQ ID NO: 26889 - DNA, 1196 bp, Mus musculus
cctcagtgagtttgctttctgtactgagacagcaggaaggtggctctcaggcatctgtgtatacttcagccacagaagggaggggttttccatcatcagggttggcaactgagtcagatggagggaatggttccagccaaaacaactcaggcagcattcgccatgagcttcaatgtgacctgagacgcttctttttggagtatgacaggctgcaggagctggatcagagcctgagtggggaaactccccagacccaacaggcccaggaaatgctcaacaataatattgaatctgagagaccaggtccttcccacctgcctaccccacacagcagtgagaacaactccaacctgtctcggggccaccttaatcgatgccgtgcttgccataatcttctaaccttcaacaatgatacccttcgttgggaaagaaccacacctaactactcatctggtgaggctagctcttcctggcacgtctccactacctttgagggcatgccaccaagtggcaaccagctaccacctcttgagcggactgagggccaaatgcctagctccagcaggctggagttgagcagctctgctagttcacaagaggagaggactgtgggggtggcctttaaccaggagacaggccactgggaacgcatttatacccagtccagcagatctggaactgtatcacaggaggccttacatcaagatatgcctgaagaaagctctgaggaagactccctcaggaggtaagctgctgctggcctgtgctctgcctccccgcctcttctccttaatgcccatcgtccttcagtcttagcagggttgtggcttatataaagcctctgggacccatgcatctggttctgatcttgcattttttggggaaatctttctttgatggcagagatagcatcaggcctagtgctgtgagttaactgttgtactagtttatttttgtctaagcccaaagctctggttttagccttaaaagggaaatgttgattgggttaaagaagcatgaggagatataatcattggggtttttttttttttgccttgacttttgactttgaaatatcatagatataggactacttgttgagataagactgtgttccaaaggactatttatagtgagaatttttaaaaagacctacagtggggacagatattttgttcagcattttgtgctagata

SEQ ID NO: 26890 - DNA, 1157 bp, Mus musculus
cagtctgatgtgtgaacctttcatttccccgcagggcatttagttcctctggttcttagaattgaacctaggacttttgcagacatgacctgggtgtcttagtgaacaattcagtatttctgtccttgagcctaatctttatctgtcagcaaaagggacaactctatagaatgaagaccaatgtactctcattgtgtgcattacacactatggtctctatgagatgtgcataacaatatgtaccttcaagcaattatttcttatttctgaagccactgaaaaatattttcttcctgaactggttgtattggtggtatatacctataatcccaggccttcagagacagttgcagaaggatctgatgtttaaggttactcaactacatagcaagttctaagtcagcttgggccatatgagagcctacctcaaagaaaacaaaagcaaactaaaaggaaaaagaaattccttttcttttttccttttttcttttttttctccctcttcttcttttcctccctccctccttcttttctttctcccttccttcctttctttctttctttctttttttttttttctctttgtagtactggctgtcctggaacttgctttgctttgtagaccaggctgactatactctgtagctgtcttcagacacaccagagagggcatcagatcacattgcagatggttgtgagactatgtggttgctgggttagtgttcccactaacttagagtttctgttgctatgataaaacaccatcatcaaaagcagcttacacttccatgtcattgaaggcagtcagtgcaggaactcaagataagaacctggaagtagggggctggaaagaggctcagtggttaaaagcactgactgctcttccagaggtcctgagttcaattcccagcaaccacatggtttgatgccctcttctggtgtgtctgaagacagtgacagtgcactcccatatataaaatacataaataaatctttaaaaaaaaagaaaaaggaaaaaaaggaatctggaagtaggacgtaaaacagaagccatagaggaagcttgatcctcttgacttgcttgcctgctttcttacatagcccaggcagcaccccttacccagagatagcagagcccacatgattgacagggagat

SEQ ID NO: 26891 - DNA, 1276 bp, Mus musculus
tgggttcctgggaaaggcttgtctttgtcaactgaggaaggtggggtgggatcagggaggagttaactctgcgcttaaaactatggaaaggctgtcccaaaggtacatgctgctacctgactcccaacagctattgaggccagcagggcagaggtgactctgcccatttccccggtgaggaacttggagtactctgatcctagatgaaaatagaaagttgaaagtcaggcttggtagctcgtgcctgtaaaaagcggcacttcaggactgaggcagtaacactgccttgagttcaaggttacagactgagagacttgagagtctgtctttaaagggggggggggggcgcgagggttaaaaagttgaacgaataaagaaaggtttcatatcacatggctgccctttcccaccacttccaggtgaactggtcagtcaccactagggggcaggattttctctccttgatggacatgtctgcgttgtctggtgagtccgagctaggtcacccaccgcactaatgcatctccgttattgttttccagccaagaaaggaaaaggaaaggactaagtcaggaggccagagagcctccggcctcgcctggagcctgaacggagccctcctctcccacaggcccaagatataacccaccagtgccttttgtcttcctgtcagctctgtcaatcacgcctgtcctctcacgcccacaccaagtgcccaaagtggggagggacaagagattctggaaagtgagcctccccataccctcttttgttctccccaccctgatacttgttattaagaaatgaataaaataaactcacttttttccaataaaagcttcttttttaatatataaaagccccttcccagtttgccatggagctctgtcggaggtgggaagatggggaaagatggactgaggggagctgagggctatgaaggaagtgctccctacagctcgtggaaaaagagcagaacatttacaaaaaaaaaaaaaaaaaaaaaaaaagtctcccagggacccacagggctggggttagggaaggggacctaggtgactcacttgaactctgtcccagctcatcaagagtttctggtccaggctactgcaagtctggaattttctcattggggatccatgagggtgcttgcttgtgtcattcgccactgtgggctgtatggatcaccaagttccccaccatcacctttccctccttggacccatacctccctccgctcagaggtagagaggaacactgcccactgctgttcatt

SEQ ID NO: 26892 - DNA, 1307 bp, Mus musculus
gccactacattgtggaagccggggcctccctcatgaagacagatctgcaggtgagttgcctggcagagcacaaactcaccctttcccagacttgggggcagggctagggaatttcaagctcttctgagccaacacagtccaggccctgagaaacctgagccagcagggggaaagcttgtgacctctgaggataccctccccctctggctccgtagaagaacccctgccctttcctaaggccttgggggcccttccacccttttccagggcgacactccccggcagcgcgctgagaaggctcaagacacagagctcgctgcctacctggagaacagacagcattaccagatgatccagcgtgaggaccaggagacagctgtgtagttaaggggaccatggatcaacaagggacactaccagaggactctccttgcccatctcactgccacattcctgtcagatggctatggggggaccctgccacagggaaggagccccgtgccaccccctgagaagctgttcagatctagggctggactctaaggagctggactctcacctgtccctggtttcatggggaacaggaaacaggctgggctggctggttccctcccttcagggcagcctccagctcaccacagcagatggaagggctggacagagctcagcatcgatgtcagggaggcctgcactcagcaggactttcaaaagccacctgatcctttgggctctctggagggttctgggtacctaaccctcctctctgatccacccaccctgggcatcccagaaactcaagagcctgctgtattcacttgcccgctgccctgcttggcacctaccctggtcttcctcctcatgtatccagccatttcatttcggactgtatggcctggggtggggggtggggctcccacggtgacttgtttacagctgggtgtgactcagtaaagtgaattttttttcctttcttgttttctttttttcttgttgtgggggactcacatgagcaatggtgtgtgctgggtaatccttggggtcggggaaatggccaccaacatctcagatcacttcgggagatgggtctgccccgatcctgacctctgcctagggccttaggctcacagcgcctggggcggagctgattttcccgctcctgcagggatgataacaatgaaagtaaaagaggtggggcgggggccaggcttgggttctttggtcttttggccctgtgccctggagcagtcccctccccctggcttgtactggggggggggggggggatctgcttgaggtgagcctgaggc

SEQ ID NO: 26893 - DNA, 1182 bp, Mus musculus
tctctcttcgctcgctctcttttttttcctacctcctcttcctcccttgaccacgctcgcaatggtgggtagctgcaaggtggccctggcaggggaggggtttgatgtggacactggggcaccgggcgagagaggtctcctttcaactttgtcttgtggcttgcaccccgggaggaggccacatgccgattgtggggtgtagatgtgccgggagtgatttctaagtagttgagttgttgagatgagggtacgacggctagtggtagacaggttttgttttcgtgggtgaattcggtgtcatcatattccggtcatatgttgaaatattctttgtttaggtcttgaagtagaggatctccctctgcacgtccacattgtgttgtttttaaatgatgtttccgggagtatggatttctagaatcacaaatgtgattttaaggtctcggcatgtgtgggcctcagcactggccttgacagtgaactttatggctgtgtttttggacttctaagattttatcccatggctgggatgctcgttatgctttttcttaatggtagataatcaggaatgtagagtcttgagctgaggaagttagagagggaagggcatttatttattaataattgatagctgagtgttagaatcagattcatttgggctggttgaaggtttttggttgttgtttttcctcccttttttctttaaagttgtcctgtactccagggagccttttggcaggcattctttctggtggctctttgggggcacggagagggtgggtatcaccttttagagaggccgtcaccatcatctgtagttttactgaaggcaggcctgctcaggaggctgatattgaggctaagaagtggagggccacttttcagaaaagtatttatgatgcttgtttacatttcatgtttgctcacatttgggcagtagaaataaataggtcagcatttctattggtctttgaaggttagcccccccccaccccctcaaagttttaccatctacttggtttacagccttgtaggaaagaattactgatttttccctgggaatactgttacttattttaatttcggtaagttccttgctattttcttctgtcttcacttatatatggaatctgttgtgagcttaacattagcttaccgagggccattttaaatgtctaagaa

SEQ ID NO: 26894 - DNA, 1115 bp, Mus musculus
cttaggtgaggaaataaaacctcagacttaggtatgttctgtacatgggtagggcaagaagtactgacttacatgtcagccttgcattctgcttctcaacattactaatttgtacaaacaaaatatttatctttttttgctcactttgcatttgatagcagttaacaatcggtcttcagaagaaatacttgaagtgttggtgtacagattttaagactgctagtctgagaggaatttgctttcctgcgtgtctgagtctccttgagggttgatgatatgtggacctgcttccctgaagctacacctctgctcacacatgcagaatccgcttgtgggtatctttaagcataaaggatattgaattctcaaacttgccctaagtagcttacatgtgatttttctttaaaactttgctcaaagtatttctccatgtttgatattgctcatttcttagaagagcaaaggagtttgccctgcttcagagcaatgctggctggtggagaaatatgctcagtcactggggcatctggcctgtggattcttctctcctgtaccctttgctttgctttcctgtgtggtttctgtagtccttgtaagcagttttataatcagtgtcatgatattatcacttcatgcttttttctctttattagcttaggattgactctgctcctgaattttggaggaaatgcctgggcaacagatatacatgcacacattgtaccgtcttcccattggcttctcagaagagtttattccttagactttcctcagtgctggattaaatagacgttaagtcccatcctgccctgactgtgttctagtgtcaatgagttttatatatcctgggtgtatgtatttgtttacttttttaaagttaatttatgtctgtggacatgcgtgccagagcatgattttcagaaatggtccacagtatgaacaagttgtggggatcaaacacgggttttcagacttgactgtaagcaccgtgacccactgagctgtctttctggcatccatgcaccatgtagtatttcattttgtttttcagttgaacacaagttcttaattttagtttagtcctatttattagtctttttttcattatattttaa

SEQ ID NO: 26895 - DNA, 1135 bp, Mus musculus
ggctgcatagacttaggctagccttgaatacacagagatctgcctattgagtgctgagattaaaggcatgcaccactaccgtgcccagtggagttttggttttgtggtccttctagtatctctcttactttagagactgggttttgaacataaaatggagactcttgaaccagagaacctcagatcttgctaccatttaattctattgcctttctctcatggaaccttgtaaagtaagaatcacgattctctaccttatggtcttatagaatcatggaatctgtcctaattggcagtttctttgcctacatccctgactggttgttacttattcgggtgcacattgaatactatgttttaaaaaaatgtaggctttgttttctgtaatgaatatgttttgagaaattctgattccacagaaattgagattgggtctggggtgggaaatgggttctgtggtcaaataacttgggaaatgctgcattaaacaaagttaaacaggtctctttactgcaggacttctcagaacctttaatatgctaatgtgcattgtgaatctccaagatggggatatgatatgcagcattcttgaatacttctaatgacagggagcccactacctcataaggtaacccattccttttttatacagctctaatccttagtccttctttatattaatctgaactctatctcccaggactttgctactgctaagtatgatattgattggttatgctgggacatgttcccatgtcactctttctgtggtctatatttattataagcttcttgccaggctctcctgaacagccctccacccccaaatcatcccacgacctttcagtacatgtggcagccagttctgaagtcccagacactgcatcgctgtgcttttgtgcaccactctccaatcttcatttcagatttctataaactctaaattttacttcagtgttccccttgttgggcgaagttggggttttaataggcgtgcttcctttccctgcaggaagatagggagtagaagagtgggagtgtgcaggtagcctgtgtcccagaagctgagtttgacctgtactttgggatgatggtgggaagaggtgcagcctctgaggagaatgttgtgggaatt

SEQ ID NO: 26896 - DNA, 1211 bp, Mus musculus
gaaggtgagactgggtgtcccaattatgactataaattcagacttttgacatctccacatacagttacacatacgtgtgtaagtaagagtgtaatcaaattcaaatgcaccccccacgatgggagactgggaactccccagtccactctagtttaaaaatgcttgacatgttttgtgtctcagtgttcctgacagtgtcagtctcccctgctagttctcatctggatggaagcggtccttcagctccctgtcctcagtgtgagcacacagtgggtgttcatgtgttcccttgactgtctcttttgctgttgtattccttttcttagttatttgaagtgtgctatagaggaatgcccaaaagagcaaaacccagaaagttttggtactgaattgttttttttttttaaaagtcctttgggggatacagtttttgtgtatgtgtgttacaaaatataatatttctaatttaattataaaagtttcttcattcccaacacaatgattctaaacattttatgatctctacagctgcagcaacaagaggagcttgtaattttaaacggaggctgaagacactgtagaattagcagacataagagagcgtggagaaggcagaggatggagttgcagactctacaggaggctcttaaagtggaaattcaggttcaccaggtatgtgtgtgacagactaccgatgcacactgcgtcactaagcaaaacaggcccagctctgcgttttggtcaagttatgcagtcattctactacttaccacatgactggcgtttgtccagattcactctccacagctgtactttgtatactgcctttaagaactttaataagatggccctgacatcttttcctgaaaagaggactggaaatatctttttcatgtcctaaaggtatttgaaaaaaagaattctattttgctatatttctggccagtttgaaggccttctatatacaagataccttctttgcatgttctgtgtttttatttacttttgctcttttgacagggcctcaggttggccctgaactctccatggaaactacattgacattgaagttgtgttggtccccgtgcctctgcttccccagtgctgcctttcctcacttgactgtggtgagaatgcgatgtgtgcttactgcacacaccaatgcctgtgctcacccctcactctctctgcctcctcgctctctttaactt

SEQ ID NO: 26897 - DNA, 1181 bp, Mus musculus
agaaacaacacttccttccctcgtttcttttcttcttttccttctttttttttctcttggcagtgccgagctttgtaaatgataagcaagtgactattataactgcactcctggcccaacaagcagtcttaacattccaaagtgttccttgcccctaggaggatttaggcccttgttggtattcattcaagctggtattccctgcctcagtttgccagcctgtctccctggtttcatctcactttctccctgttgcatccatccactgagcagcgaaccctaaagccccttcctctttcatgaccttattgaagccttttattttctttgtagttaatgttatttacagtcaggtttgtctgtgaacggctgaaacccccacatacaggtggcttaagcagccatacttggacttctctgccatccgagagctcagcagtcgactaggctggaaggagtatttgtccagtgtcagtgaccaggcacctcctgttctgctgctctgcaattcccagcctgaagcttcgcatcagagtccaaaatagtagctccatctggtgagggggtcagcacagagggagccctttagttttaaggatgtttactggaagctttatgtgccacttccagttaaatctccttgatttgaacatagtcacatggcctcactagttgcagggaagactgggaagtgtagtttatttctggaggccgtggccagataaatttaggcactgtatactgaagcaaaatacagttttacccactgtagcataccacagtttgtgattacatatctgcttataattactattttaaaaatgtcttactaaatggtttcaagagcacagggtgctgacagtgggactgggggtgtttctgactcttgcctgctcttgggaccctttttctcctattgggttgtctcacccaaccttgatatgagggaatatgcctggtcttattgctgtgccgggtcttattgatgtctctgggaggcctcctctattcttgggggtagatggggtagtgtggggctgggggagaggggagaattggaggacccgggaagagggaagctgcagttggcatgttttatatgagactaaattaaaacaaattaagacagggaatttgtttcatttccttcttcatttctagtataatacttcctgtaatat

SEQ ID NO: 26898 - DNA, 1178 bp, Mus musculus
tatatacatgctttagagaactgatagtggtttgaagaagttaagactcctgccttctgtcattgagctcagtgttgcagaaataatccttacgtctagtaaccctttttaaaaaatactttgtgatacttcgaatccttcttgtagttctgtttattacaactaagaacaaactgcttatttaagcgattctgaataattttactttccagcttgggtaaatcatattaggaactcataatagggtttttaaatatgtcagtggttaaacagactactcactgcattataaaagttaacatgtgcacagaacaggacactgcatattaaagagttagcatgtgcacagagaacagacatgataaagcgtgtgtgcagtggagaaggagtgagaacccaagtgggagagtcagagacaatagagatctgtatagcccagatttacctcacacgcctgatcttcgtgcctcttcttcccaagtgcttggattgcaaacacatgtctccatgccccactcaactgatgacactctaagtcagtagtcctatgaaccaagacgggtagacacaaacacaattgtgaatacacataaaaagtgttgattaagaaaatagacgtggacagttatggcagggcctctacctgttacttgacttgtttgatggcttcggtcagtgcctgttgcttaagtgggactctttcacatctggagggtaagtaagcttgtattttgaggaaataagtctttattggcctgaataaattcagaggattaaatcagttctctctcttgtagacagatgtcagatctatagttataagagaacagaaatttcccttataattagaatcatgttttctgattgtgagatctaaggttatttgccttcaaataaaatgtttaagaacatgagcacagagctatgcatggtgatggacgctttcaatctcagcataggagaggcgactttgaggctagcctgctctttctagcatgttccaggacagccgtggctatagcagtgagagcttctgttgaaagttaaaactgtagatttggacaagatcagctgaccctaaaattcctacttgcgtcttgtttgtttgtttggtttggtttggttgtttgagacagggtttctctgtgtagccctggctgtcctggaactcactttgt

SEQ ID NO: 26899 - DNA, 1148 bp, Mus musculus
gcacttcttttcacattgatgccaggagggatatttactgaatatccctaccccatatccttggtctgcccataactctattcatagctctaacatcgttcaagattaaggtgagagggtgattagtaaaatacatgcaggacagcaagcaaattaatagttgtggatgattcacaagacgttctaagaaccttttctaaattgcattaaatgtgtgggtgaacatcacagatagaaactcacagaagactgtatggtttgtattgtggttcatcctcttgtcttctgggatttagcaatcttttcagcctctctcctcatgtgcatgtatatcactgggtaacaggctgattgctgctgatggtactaaaatgttttgatagtagcaagactgcactgccttcttcctcatgagcccagtgccgtgatgacctgtttgcacatgggcccgtggtgtatcattttcccttgtataggaacaatagaataaggtctgactctagttgattgaagtggtagttttagattccagtaagaggacctattgccggtgagggaggttgaaattgcagaatgagtttcagcgtgaggcaggtctgcccagctgcaggttgatttgctctgtgagacaaggagcacacataaacagatggcccaacagtgagtcaaagcgatagatcccgaacagacacgctatcttttgcctgattcttaacatgactgtaaagagtggaattttatcctgccacctgaaggctaaaaccaagcatttagtgaaagaaattccatttgtgaagaaatgcgttgttaggcagaggagaagcctaaatatcactgggtctggacactgagaagccagtagttgcaggaacaggcatgagctggctttacttttggtgtgtgcacattcagcatcattctgctgtgaacacaccaacatgtggcacagtaagacgagagtgaattgatgtctctgacactgggttttaaagacacacaagccttttgttgtaaaaacgtatctcatattgaggttaaggagagatttttttcaaaaaaaatacctttgtggtaagcattataaaaatataccacaacctaagtttgtaaaggtttaagcaaggaaaagttcatggaaaaaaaacaga

SEQ ID NO: 26900 - DNA, 1578 bp, Mus musculus
cagggccgggtccgccccctcctcgctcctccctactcagacttgctgtctccttggtacagggatctcatctcctgtttgaagccaaaatggaatgtgcatagtgtcagggcgttcccacggtctcagaccttgctagaacgcaggctggtgcccacctagcccttcccttggtgctgctctgtcttacagccaccagcattacttatgcctcgggggccccttgggggactgaccagtgaggctcctcactgcctgtatacttggcctccaggagggtataggatgcaggctggctgcatcagggaggaaatgctttgagagtccgtatgtctctaagagcccaggtagccttcaagtccatcttgcgttaaagagagaaatctgaagctctagggggtctctgcctgcccgccccaaggtcagagttcactcccattccactcactcacatgcttcctgggtgttcctgggctagaatcactatgcttgccttgtgtggcctagtgtagacttttcttcttggaaaaatggggttctgaaaggctctctactcatctccccgacaataccatagggaacataactctacgagacgcatgctcccagtggaaatctttatctgatccatgtccttgagtgaagggacagagacctaggctctacccccaggtctgaaagcagcatctctctgagcccgccaggctcccaagtctaggagtagcaggaaagacccctttgcttcttccttgcccagttaggtccatggaaaatgagctggatcctgactgaaactacagcagacaagaggtgcttgtgagagtgagccaggcccatccacaccagccacccattcacttcccagcgtttgagaagagggcaggtagtctggccacacaggcctcagcttcaggcctctggcttcaggttgactgaggggagcagagaaaagccctcttttcttatttaggaactaaggtgctgtctagttagcgggcgttggagatgcctggactagttggatctttggcagaggatcagagaccagctgcaggctgatatcctgtctcagctcccccaacctgccaaccccctgttggacttgtctgggcccataggctggggcttggcacatactacctacctgtgatgggaagaggttgacaagccatcaacaatcactacaggcctttgctccagaagagctgctggtggcagcacgagacccgagcagcatagactcccatcttctgatgtttggaaatgagttgctttgagtcaactggagtgaagtaaaaaaatgtagccctgctccaagcctccactgtgggtcctgccccttccgtctacttgcccttacctctgtcagcacaaagctcttctctgtccctttagacctgtgcgtacctgggaccacctgggacatacacacacactgccccttcagagccgcttccaagctcccatcctccctcccctacctgcgtgtgttgctcttgtagccacatgtgtaaggctcgctagcatggcagtcactttggagggccttggactgggagtccccttgtccccagggtc

SEQ ID NO: 26901 - DNA, 1189 bp, Mus musculus
ctgggatgaggctcctggtcacccccatgtcccccacttcccaggcgtgcatttcagcagttctacaagcagtttgtggagtatacctgtcctacagaagatatctacttggagtagcagcacccccactctctgcagcccctcagccccaagccagtgcaaggacagctggctgctgacaggatgtggtactgccacaaaagaatgggggaatgagggctgttgggtcgggggggccggggtttggggagaggcagatgcagtttattgtaatatatggggttagattaatctatggaggacagtacaggctctctggggactggggaagggtggggctggggggtggggggtcaggcccctggccacagagggactccctaggaacagaggcactgtcccatcctgggcctgtttcatgctaggggccctggctttctggctcttggctcctgccttgacaaagcccatgccacctggaagtgtccagcttcccttgtccccaccttgaccggagccctgagctcaggctgagcccacgcacctccaaaggactttccagtaaggaaatggcaacgtgtgaccgtggagaccctgttctcatctgtggggcctctgggcagctccaacctccagcctggctagcacacaggtcctcgcaaggttgtgtgtgcaaggagagggccacagtaagccccatctgccaggaaaaggaggcctcttagctggccccagccagccggtcactgtcttgtcacctggctactattaaagtgccatttcttgtctggatcagagtgggtgtatttacttggacccctgctgggccttcttgcgccacacaagctatggagccaagcacttgctgcccagaatagctttatgcggggttcccatcacaggttcacatcatagtaatagtcagccatgttgggcccgtcccgcttgcgctgctgggcctgggagagaaggggtcggggcccacctggcctcgggtgcttgggtctgagcccatagtctaaagagagaagagagaagggtggaaagaaatactgctgactgggaatggggctatagccagctctcaagaggcagtctgggagtagaagtagggcttagccctagcggacctctaagggcacctgctatggaaggtgggggaggggagagaaatactaccctaccatcc

SEQ ID NO: 26902 - DNA, 1888 bp, Mus musculus
cctcgctcctgcctcaggaccccatctcctcacagacacagactttggtctgggacaattttattgaaaattgaataggccgaggtgggttcagagtagggatgggtggcaaggctggtctctcatgggcagcctgtaggcataaaccgtggcctgggcccttccttcttgccaacagttgccttacatctgtccttcccagtgcatggggctccctcacccaggaagggagctctcccagatggtcctaagccagacatgtaaaaccaggactgaccgttccctcccaaggagctatagctgagtgaactcaggtcctcatccatagagacaggttctgccaggccaagccattgttacctgagtctcctcaagatacccaggatcagtggacctgtcttgaggcctagaagaatgagctgttctggcagtatcatgtggcttcagagtcacccattccttggtcctctgtctcctcaaccccacctctgtcctctgctgcaatgacctctgcctcagagccactgagaagctgagctctacacgtgtcttctgctcagtctccgaaactctgggtgctggtgactgtgcagccaagcagggctgtgacagatgcaccatgggccactttgcctcgggatattgaatgactaagggacactgaggttgaaccccttgtagtcagcttggatgttccctgggagggtcagggcttctgcccagtgagttccatttgtgatgccctgtgatttcagacctgttcttatcctcctcttggagaagggcttgggtctgcccacccttcatgtctggcccgagaaccatatgcctggctcaccccatatcttggctgggttaacagactgtgggaaggtagggcttagagtgtatatgcagtcatttctgatgggacagggactgtaattcagtctctggagtagaactggtagtcacgggcatagaatgaaatgtatctgaggggctgagacttattctctctgggctggtagtggctttcattggttcacgttggtgagagtaagaagtgaggcagtgttgaagactgaggcttgtggccattgtgccaaatgggtaccttgctgaaacacagggttacagtgtgcccccccccccagcaaaggaaaacaatgaccactgagacaggtggaccactcagctgcgtgggcagctcctgcccagttagaatccctccagagacatcagagtgcgggcatcagaggtgccagagctattgttttataatgtctgcttgtggcatctccagctgccttaccccctcctcactggggaaggagagtgcactcagctccgggactctgtgtagttaagttctgcctggagccctgaatctgaggtcccagagcttctgccctctgctctggctgtgtgttcccagcctgcgttgttttgctgaggtttctgtttgacttgttcaagtcagatctttgattttgagcaaggaccttggagtgacttgaagcaccttttaaatgcctttcatttgtgtgaagggggaggggatgggggaaggtgtggagagggtgggtgtggccgaagagaggaagaaatggactttaagatgttacccagcctgagctggcggtcctttgctgcccacctggagccaggtgatgggggccaggagatgccggatgggttgaagtcttctagaacactcctttgttttttcatttctgcccccttggaaggcatcccaacctgttttcagtggatagtctgggttaaattctaacccggatttgtgcttttttttttctttttgtgatccatgcacctcatttggctgcaggccccaggttcactggagctcatgtgtgccctggatctcctctaagaagcagcccag

SEQ ID NO: 26903 - DNA, 1153 bp, Mus musculus
ggacatgtcatgaatgatctccacagtcatttcagtgtggattaagatgggggaggtgtgtcagaggggacatgcgaagtatgtgctgatgtctctgtccttcaaggagggttggctgggccgggctctgcacccttgtgtggtgtccagtctgtctggagtcaggagaaagtggtggcctgggttggggatttgggccccacttgaaatggtgtgactgaaaggacatccctgcgtccccttagaggtgctgagtgcctctttatggggcttaggcagttgtcgcatcctgtctcccgccatcaggtacaggaaggaaaacagccactcatttcacacatgaagagtaagactgtgtgtcagaacctggggcccaggtctcactcgcccttcagccccagtggtgactgggtttgtggtgttgtcatttggaacaaaacctcaggacctcttctatgtacctcccctccccctggcatccacaccggctgtgcccctctgctggtgtgtttgttgggatgctctatttcattctaagactctgggcgtttgagaaggaacctgggctatctggggacatttcctggggctgcaagacatcagggacatggcgctgggcagcaggtggaaggaggaacttctaagctgtgccttggaatgagtttgctggagtgaacgcgagatgctggggtaccaggaccctgggcactggccgggtgagcaggttggtggggatgcagggctgggatgctgttcttgtgttcagtgggactatgtacatcctggtggagctctgtggaatggtctacatttgctcccatccttcagggcatccttgagatgcagagactggagctgcctggggtcagccagagcctcacttggttcccctccgcgccctgtgttctttcctaggttgtgaggactgagcacaagagagggcccctcatctcagactccagtgtgcatctcagcatctagctcattgcccatctcagtacgtgccctgtggtatggggtggcatgactcggggctgtggaagatggtgggcagatggaggctggggtagaggctgtggatgctaatggccaggagtggttcacgtccaggcagtgtggccactactatggaaagcctcattttctgggctta

SEQ ID NO: 26904 - DNA, 2224 bp, Mus musculus
ctggaggtcgtcagcctgcagtcccactcaccacagggatggtcgagggtattcagcctagcctagcgtcatgatgggagaggctcaagcacgtgtctgctcctgacctttgcctcccccgacttccttcacagtggtcactgccacgcttgctgagacgggcctcatgtccctggggaccgtgctgctcctggccagccgcctcctctttgttattgtcagcatctactactattaccaagtcggccggaaacccaaaaaagtgtagcaggctgggacctgcctgggcctggacctgggcccgagcagctggggacttcactgtccatgggtcctagacaggcctgcaggcaggcagggtgcacacgccttccttccctcccaggcactccacggagtcatcttgggtctcctgggattctaggagtgacagaccaggctgtggcctctgcaccccacccctcacccttgtgcagggacaactccttgccctgtgtttcttggcctctagactctaacaggcagagtctagagtaagttttagggtctgggctgagtcaaggtgagttcctctgccaggaagccctttctaggaggttgtgtcggccccagcaggggctctcagcttctccccatccagaaacccgatgtgtgagtccctcatcacacacgcacacacacacacacacacacacacacacacacacacacacacacacacacggtgtttctagagatccagttgaggacatctagcaaggggagtgactgcctcccttgggccaagttccccagcctcagcctgcacatctctctctttggcctgctggagggtactctgattctctggctggccgcctgcgtcccagagcaccagagtcccttcccgacaggctagggttaggcaatgtaccacaggcctgatagtccctggctcctagctgcccataggctcctagtgcatgaggaattctgaggagaggacaagtggggacatttcctcggcatggcctccaaggcctgcatggctacacacctggctcagtgcctcctccagatcccctcctgaggctgccccaaggcctacgggttaaagccaatagctgctcacatgcaacaacggaaggagattcaagagtctgccatcccttagcagcccctaagtgggcctctagagctgaagacacacccctggtgccaccagcctgtgtggcccctccccttggccctagctcccagcacctccctacccttcagcagcaagcacactaagagatttggcccgaggcttctcccttctgcaagggggtggtcccctatacccgaggaatctttctctagggcacctgggctcacagcctccctgggctcggttgttcctgctgccaagtgctctgtgaccatggcctttgcctagtggagggaactcagtggaggatgtgcccagcagtggccggggctgcttctgtaaccaaggtctggcagagtagcgattccctgcgtgttcaggaagggcccattgtgtatacctgcctcttgtcactggcttggtgccagtccctcagtcccacctctttactcggaccatggaccctgccactgccagctcttagtacagtcccaactaccgtagaccaggtgacatttgttgacaccattctcagaggtgttgaagatttatcatcttgaatcctccacaaatacagatacagtcccaagggaggtagtcgtagaaatggaagacgccagccctgcgcagcctgcagggacatccgccaggcttcccctcagcagcaggagcccaggtcaccctggttaaactgcagtgatacatttaggtgggtggggtcaaggcatatgtggcctccgggagacacctgcttggaaggaggcagtgatggagatagagccccactctgagtctgggctcagagtgccctgactgctctcccccaccccatccccagctcctcttgtcatgcttctgcctggcccccaagactgcctctgtcatggtcactatttattcttggtccctttttctttttgtaagaaacagtcacaagaaaacaacaacaacaacaaaaaacaaccaatgagaaacaatctgcgtggtgtcctgttttatattacaaaatttctcttaatatagaatataaaaaggggagacttgggagatacaatgataaattagctctgtttcctactgcaagggacatttaca

SEQ ID NO: 26905 - DNA, 1138 bp, Mus musculus
gcggtccctgctcccgctggctgagggtggctgtgtgtggacactggatcagaaggtggccctttcatttccgtccagtcacacagcatgtgcatgacaaggtcatctccaggctgctgtcgctccagccaggactccaccccgatgtaaactggccaggaactgcctgcatccagctctacagtccgtactgtgtccactctgccctgcttgtacctctgtcagagatccaactgtgatacatcacctgtccccgtgggccatgccccacccctgttctcccaggtggaagacaccccagtattgttcatttctctctttctacccagagctgaggcttgaatgtgttcttcaaggtccctgccaagaattcacccctgcatccctccacatacggatggatctcactacctcccaactcagcctcctgccttcagatgctctgatgtcaccatcacctccgcagacagaaggggtttccatttttccgtctgtgtaccccttcactctctctcctttctagaggttaaggtcatgcctcttgtctgcagacttaaccccacagcatctcctaccgtgacaccttctgaccttttgctgaacatttattttgttagtctctctaggctcagattacccagactaataggttcacaaccaaccaaccaaccaacagacacacacacacacacacacacacacacacacacacacacaaacaccccagactaataggttcacaaccaaccaaccaaccaacagacacacacacacacacacacacacacacacacaaacaaacaccccagactaataggttcacaaccaaccaaccaaccaacacccccccacacacacacacacacacacacaaacttgaactgcaggctaggttagcaactagttgcaagatgcctgaccctgccaggaccgtgttgaatccattagtgttgtctgtcaggatctcaaatttgattaattatgtctgccaagggcacaaaaggggaacagtggtggaaggaacagctaggtgtctgctctcctctctcagatggaagagcctgacctgaactccagccttcctttgcccttctgccacctgggagtcatagccatagcctgttctattctgctgtct

SEQ ID NO: 26906 - DNA, 1196 bp, Mus musculus
agagcagtgcaggtcccgacagttcttacaataacacttccccagcctctgccccagccgtgcaccctgctcagcctgtgaatatttcacattcttccaaattgaaatggtcggtccctatttcagctaaaatgcaacctaaactcaactccctaagccaccactacccactggctttcaccggtctctcgcattactggatgtaagtactattaaaaattatccaaaataatttttaatgctgcctagttagtgctttattttattttattttattttattttattttattttattttatttttatgttttgtaactgaggaaagttgtattcaggtctagggagactccaggctggctatcgaccgtcacagcagatgtgtgtggttctgtcgccgacatgaatggaaaagcacttggctgtggagtgggggcttgggtctgctctaagatgcatacacaattcataatgatgcgtttgattaatggtgaatgagcatggaatttggagggccagcccatgtgacggccacattaacaccagatgaaattgtcatgtggggtggtgggacaaaaaaaaaaaaaaaaaaaaaaaaaaaaagagccaagtgacggtgtctgtctgtgcagctagctacgtgcaacataggagacagaaagcaacctttcaacaagtctgtgtggtgtgtgtgtgtgtgtgtgtgtgtgtgtgtgtgtgtgtgtgtgtgtgtgttgcatgcagagaacagatgttgacatctgttaatgtcttcctcaatctggctccaccttgtttttgaggcagagcctctcaccgaccctggagcttagcaagtcagctggtctgagcggcctgtgagcctgcgatcctcatccttcccagggccggacgggatctcgaaaacatattactgctgcttccaacttcgtacgagggtactgggaacccatgattgggtcctggggcttgtgtgacaagcattttaataatggggcagtcttcctcccccagccctttcaatgacttctttcttcatgagtaagaaggggaagaagaatccacatgtgccaaaacaggatgataataaagagtgaggcctcccttgcacggtccacacaggccagtgagcccataaacacacaagagatcaggctgggaacgtggtgttttgtgattctctgataagcttggccac

SEQ ID NO: 26907 - DNA, 1239 bp, Mus musculus
caaaataactcacttccctcaaaaaaaaaaaaaacccaccaaattgtaaccaaataaaagctcatatgtatacacacacacacacacacacacacacacacacacacactgtggagtccgttatatgatcgtcacctatatcggaggggttgatagactcagtgtcactccattggagaaaactgatttttttccgtctcccagaaggtatacacaacagttcagttattaacctttaccctagccagcacgctaattttgattattaattttttggctttaagtgctgaagctggactcctattctagacaataaaggaaaattcttccaaggtctgtagccacacttaccagctcagaatgacaaacctaaggttggagactctggctatctgtcaataaggccccctcacctggggcccctgaagccaagcccacatttgtcctctggggatctggtttattggccctggtccagatctccagggtccttccccaacccagctacagggaccatggttcacagctcctctgtctgaagtatgccatctatctagcttaaaggctcccgctagactccttatgtgatcctcagtagtcggggtctgtttggattaggtagggtccagagatgagggaagcatgtggggccctgagtgaagccagcccaaagttccagaggagctggctagggaagtagcctgggcaaggccttcctcgtgctgacaatcctcatcaataagatgggtctgaatccctggctccacaaagagagtctgattgctcctgtctaaaggaggccattgtcctccggcattccctgcagccctcgcctcctaccacctgctcagaaaatcctgccttctaggtgcctgcatctgggactgagggaaagtggttggggaaaagaagccaggatggaccttaagggacatttctcttcacacagcaagcaggaccagcggcagcggcgggacagggggcgcggcatctaaaccagtggttctcaccttcctaacgctgtgaccctttaatacaggtcttcatgttgtggtgacccccaaaccataaaattattttccttgctacttcagagctgtaattttgctactgtcatgaattgttaatgtaaatatctgatatgcaggatatctgatatgcaacccctgtaaaaggatcgattgaccctcaaaggggtcaagacctataggttaagaactgctgatccaaaccatcatc

SEQ ID NO: 26908 - DNA, 1244 bp, Mus musculus
agagtcaccagtccctttgttcctttgccttgcatggacaggaccctttctcctaagtcatcagctttagccagcagcgtcggtctcctttctatcatcctccttccctatggctggcagagatagggttaagggttgttggagctaatccacctaggtttgaggcctgctagggctggaaaaatgactggaatttgagggggaagggcagaagtcctgacctgcagacagcagccagcagacagacagcagcccctattcactttctccctcagactgggtcaggagccttgggtcaccttgcttgccatcccagccctttgcagagccaagcgaggggctgggcgccctttcagcaccttcagtttcttgtggatagtggctgctttgggctctgctgccttgcagtcgctaaccacttccgttctgctcatccccccccccccctctcgttcacctcacagatctgagtgcatcaacaagtttgcttccgtcttcggaacgatgcccctcaaggtggtggagcaccgagcggaccctgtcctctacaaagatgacttccccgagaaactgaagagcttccccaacattggcagcttatgaagcttgctgcacctcccggggctccggggtggggccagggaggccagcctgggtccgacttcccaaacacactggagctcgttgagctggctgcgcagcctgctttgtcctcccatctccgtggactctgtgaaaatgccaaaggaaggaagcctcagggacaggctgcaacttggagcccagcgcatcactctcggcttgctggtgcagttcaccatctcactggccctacaactgccttagaggagtcagctgtccagttttagatcccaggagtcacagcagagccttgcagtcatttcacatgcgcagactctggagagagcaaacctgccatgggctacagatcccaatacctctgagggtcagaactgtgcttgggacctgagtcatgagcccagatccacagcagagcacaggctgccaagatgtctactgaaagtccctgatcaactctttgttttggctttttgatatgattaaaattattttttactgttttcttctgtctagaatgctggttcttggttatccaaggatccttccttgttttgtgcatatacccctaacctctctactaagaaccatccagaaagatgaagccaagaggacccagctccatttgcatcaagtgtaagaag

SEQ ID NO: 26909 - DNA, 1786 bp, Mus musculus
aaacagtaggtttgcagacccgaaccactggatatgtgatccactctctcatggtatgtacatttccaaatcttaaacatattttccagtttgggcttttctttctatatgatttcttagcatcaagacatatactttgacaaagtggtacacatctttaatcctaaaaaagatatttatatttcaaactatatacctaagaatttttaaatctctgtaaataataatgtagagaattagaaggtggcagataggcttttcttaagttttactcagttgtgagctgtgcttatatatctcccccatttctttccctagggctcaataaactcaatcatgcctcgttggatgtattttaaaataatcatgggtttcagcaagtctttgcggaatcgctacctgaagaaaaggaagaagaactaagtgctgctgagttattgggccccttggccaggtgtttgacctgtgcctatacactgggcacctgcctgtccccagagtcttcactgttgtctcagtaattactaacatggcatagttggcagaaaacaaattccttttagaggctcctaacatatattctggatacaaccaggagtaatttgaagtttaatgtaaatgttcttggcaaatgtatgttcctttgacaaaaaggaacaaatcccagaatgacagcggtagacacagacccatctggcccacagtgccaatgaccacattatatttggtctggaagctactataaagtgcattttttattttagcattagagggaacagggctcgattaatttgttatgggcagattcagtgtagtttacatcgagttctgtgagcttttctaagtgtatgtcccagcttcgtatttatgtggcactggtcttctcaaaggtggctaagacataaaaagagaattgaaacatggagttctttctaacacgtaagtccacaaaatgttattcttggaccacacatcatgtctgctctgttcaaatgtatgtaaatactgaatgctatatagtgtgcccggaatgtagaggtaagtgggccaaagtgtacatcaagaccaacaacatcctgtggtaccgcaggatccaggaaagcagcctgtgtggacacacagcattcgttgtgtctgcactgcacccggatacttgcctaggatggcagactccttctggggtgggtggtggggtcatggaaacatgttctttctaagatggtgtctcatatttagaattcatatatctgcttttaataaaagatgatgtaactgtggtgttgaaatgaaagtgtatttttgatagtggaaaactaaagccccagtcacactgccttaaagtaagctaagtctgactataggtgtcaaagcatgcacaaagaagaactagttctgtgaaatgttcatttggacagtcattgtgtgcataggtttcaatcaattcctaatttgaaagaccaccaaatctacttaaaattttaattgatggaagtaagtatttaaatatttctaactactggtttcacaagctagtaaaacagctcccccacccaaacatgtgcacacaaaatgctatctgctcccaaaatcattatgtaggactcttctattagtccccaactaggagccatttaagttgtatacatttagctctctgaaaagcacttgtttgctccttcccccgactcccatcgttttgctatagaactggtagcctgggtggtatctcttctgtgtgcttccactctggctggtctgatagttttggttgagatgtggtgggttc

SEQ ID NO: 26910 - DNA, 1160 bp, Mus musculus
tcagtttatgactttgttatttagactgtatttccaaggggcagccccaaatctaatcatcatatctttagttactcttggggaccccagttaatgtcttagcaattattggcttgaggggccacccagtgtgtcctgtgtcatggcagaagatgagagttagatcttatacgttgttgggaagaggtggcatcctaatcacagtgagcaggctcaacacctgcatcttgtgctcttggcactgtttcccagttaatgaaccaggacgagagagagagagagagagagagagagagagagagagagagagagagagagagagagagattgagagagagattgagagagagattgctactttccatgctaggataagaagaacctggaatatctcattatgacaaaaaacagtaaaggaaatccaaagaatgatgacaatgtatcagaaagacacagcttgaaggggaccccaccagccaagtctggacaaattgagcattaaaatggaaatgatagagcaaattataattcatcagataagcaagtgaaatcattaaccatatactaataactttttacctctctaaaggtgggtgggacctgggggaatggagcctaaaaatgaggcagactatgaagtctcatgtcataaccaattttactcagagcatcagacaatttatattctgagggttaaatagagtcacataaataaagtatactatcataagagcaagccacatgcagcaagtacttggtttccatagagatataaaaccaaatagcaaactctaaagaaactcatttctatctgctacaactgggagaggtatgaaagcacatctcaagaacaactaactctgtttttgttttgtttttaaaaaactgaggtcacaagaactcttaccttgttttcttggagttttctcacaagcactaagaattccccttgtacaactctatttgtggacgtgttttgacaaataatgagttgaaattttaaggcagaattagacttcagacagtggcaaatcccacaaaatgtcaaaattcttgtgaattaaaaagagaaaaccaacaagtttgcagtgggaagaagatgacaagcctccctttataagagggtagagtaatgaatgggacaagttaaaattccatgt

SEQ ID NO: 26911 - DNA, 2198 bp, Mus musculus
taaaaccacaacaatatttttggatgctttgtctgcagccttgacttgttttcacaatatcctcactatccagacttcatcttgtgaatcttgcttttacacatcttgatggtttgtcactgagatctgactctattggaaaagtcagtctagcctgtgatctggtgaagatcatcactcttgaaacgttactgttctcctccccattccgttaggtttctgcccaacacatggagaagagttaagagcagtcttaaccttctgctttcattgttttctaaggaagctgctaggcagtgttgtcgcattcctgccaagtcatagaaatgaagcaccagcttctcacagtgtacaggcgatgccagccttttagaaagaacttgctttgcattgccccttcagtcttctccatattttgggatacagctttgaacacagggtcttattatttgaataggagtacatgtgcataatatacgtacagacataagcatatgttgtgtgtgtatatatgcatgctatggaacttgagtgtacaaccaatcaatacattaaattctcggaaggggtcctctgacatagcgattatccctttgaggctgaatccattactgacttggtatctaggttttcactccagtagggaggaatttcagtcagctgaacttacagattattattgttgtttaaaactaaaaaacaaaggctgtttttacagagacaaatttaaagacccttgttggtgaaatacagccagatctggtgtacatacaggttcccacaggatctgctagtgtaatgtaggatttggagacttaataaccagggctacccaggagtgtgacttggtgacatagtaccataaaagttgctcactccgcttgcttttgccactttcaaattttaacttctcaggttattaatcagattattgtgtaagttagccaatagtctttagattaaggcaacagacgggaggttcgtggagtgtctcatgttgggcatttttagtagcccagactctgttcttcatttgaatgtttcacacatttttgttcacagttaatcttccaagtttactattcaagtcagaaattcagatgacatttctagtggtttgctgttttggttttttatgttttttggttttttttgaggtttcatttcttacacaggtgtcttcatcaccatcacttctacactgggggaaaaacaatctcctttgtgagaatcactgcatgtatttatggcgaaaatatttctgaaagtctagagtgatacaagtgagcacaagaagttggtcagcttgcctatggagtgctggcaataaactctgaacattccacaagcctgagctgaacctaggctcccttggaagctgaacagacataggaacatgggattgccagctgaatcctgtgaccatctagttatggacctcagagatagatcagcgtggcctaaagccatttcaagtacaaaaatgaattggactatagcaacataaatttgaacacagtaacttttcctctttgcctgagggcatttgtaaactcggcagaagtaacttgacctcatgtctactgcagagctcactgcattcacccctcctcatcctttgcttccttccccttgcctagtcagtagttcataacttagtgttccttttgcttcagaaatctgaaagaaaatcttcatgccatgaatctttttcttccgcaaggacacctgtgtctcccttgtttaaataaatgtaaatgctcccttatgcttttgaaataaatttccttttgtaattttgttttgtgtcttaatgtgttataattataacttaggattcttgagttttagatattagcatttattgattgcttctcatatggtatgctctgttgtcaaggtcagtcttaaaagccatctggtttggatatatttttatacgtaaatacagtcttctggaaaagattccattctgacaaaacagcatcaggagagctgaagcatgcatggtgtcctgtgcctataactatcagggtaccaaggtaggaggatcacaagtgatgtaggctatatagtgaggatggaagaaaataacagattcagtgacatacatctgcaatcccagtaagcaggaggctgaggcaggaggttcaagtttgaagcaagcataagctaataaaaaggtctattaaaaataa

SEQ ID NO: 26912 - DNA, 1237 bp, Mus musculus
tatgttggcaatgccttgtatgtcaaaaacaatttttttacatcaagattttcttaaaaataactctggtcctcttagagaatacagcttttcctttgaacttaaatctggccttttggcaaacagaagcatcagtctgtagcagaagtagtgctgctctggataatgagctctgcctctcattcaaatgctgttcttctcgattgcgttttctaggtcctagaagacgtgactggtgaagagtttgttttgttcatgaagatactgtctgggttgaaaagcttacagacagtgagtggacgacagcagctggtggagctggtggcggaacaggctgacctggagcaggccttcagcccctcagaccccgactgtgtggacagactactgcagtgcacgcggcaggctgtgcctctcttctccgtgagctctttgttccatgttgatgatacttgggtcactcttgagtctgcctgtattcatttacttgaacactcctcagaccttcccgtaaaagcatccttagcatagtggggcaaacagaaagcagagcggcactggaagaacccaaggcagcaagacatttctctaagggcttgcttaggagctttgcaaaaattgtaagaacttgcattctgtctccgtgtttgccctacgtgagttttctgaaatagatgtgccctagtttgaaaaacatgaaggatgtatacttttgggaaatatgcagtgtgtaaatagtacactgacatgtcactaaattttacctgagagtcaaaaaaggcattcaagatctgtcgatgtccggatgttcccaataaccttgcaaggaaggccacagaatgttaagatactaagtccatgctttttgatggcagtctgctattgatctttgaaaaaagacttgtgacttttatttcttgcattcttttttacagaaaaatgtgcattctacaagatttgtgacgtatttctgtgagcaagttctccctaacctcagcaccctgaccaccccagtggaaggcctcgatatacagctggaggtaagagaccattcctgctttaaaaagcatagcaaagctaggcccagtttttaggagaaatgggagtcactgacttagatctggtttccaggagtgtaactgaaaggtctagcagtggctagccagtaatctcctaaggcaagaattaattgcatagaaatgatttatgagttccattgcagctgctgtgacagggc

SEQ ID NO: 26913 - DNA, 2266 bp, Mus musculus
tgtgcatgcgcctgcatcttcagttaccgacagctcagcgctgtgcaaactatatatccctttttgtccacacaatgcaaggagaatatgacagccacctcccctggcccttccagggtacaatacgccttacaattctcgaccagtctgaagcacttataaggcaaaaccacgaagaggtcatggacgccaaaccagaactgcttgcctttcagcgacccacaatcccacggaaccccaaaggttttggctatgtaacatttatgcacctggaagccttaagacagggaaccttcattaaggatgatacattactagtgcgctgtgaagtctctacccgctttgacatgggtggccttcggaaggagggtttccagccacgaagtactgatgcgggggtgtagcgtccatgtacttgtgttcaaaaactaggaaccatatgggaaaaccgtgccttccatgcctggccccagtaaacaatgttcaaacaagcagtgggagaggtgtaaggcctagcagcagatgtcatcagtgaggtcacgagccacttcttactgttaacaaatacctgaggcagttcccatgggaacctacatgtcccctgtatcttcaaaacgtcaacatttgaagggcctgtggctcatctgtctgtcagggtaccccttcactgtgcttccatgggctattttgtccgtgtactttactgtaaaaaaggccagacttagcgtgctgcagctcaatcgtttaataagaccggtgccttaaaaacttgaggggtttttaggacactgattactatattaaacatgaaaatcaccactgcctgtgctggtgccagtagagaagttaccgctctggtgttgagttctcatttagttgactcctgtgaatttcagaggctttgaaccatgatccctggaaggcttaagttctcaagtactccctcctctatagttcactaaggatccagggactggtttaacccttacttagtgtgaatgtattgtccactgaacaccaagcatcccccactactttcctgttttgaaatatgctccaggcggcctcttcccagtctgtaagaccgcggtcatgtgcttgccaactgctgagtgttactgccatggaacctttcttgtctgtcccgtgcagcttggtttccacagccggttgcatatcttctgttgcttgcaaacacaaaatcaccagcccaaacgagtgatttagctcactagccattaaatggcatctcgtggatgatgacagcaactcttacagccaggaaacttcagcccctcttaactagcttttgatttagcttataaggttaattgaaataaaattgatttttctcaaggggttggagaattggctcagtggttaagagccttggctgctcttccagaggatccccagtctgtaactccagttccagggcatctgacaccctcatacagacactcatgcaggcaaaacaccagtgcacataaaattaaacaaacaaataaataaataaattgatttcctcaaaacagaatttattggaacttgggaaattgtaggtacctgagagatgcctaaaccaaggttggctatcacggttgtgtggacactcagcttgagtggtggctttgtccagctcagtagaggttctgatctgtgaccctaatgtggagaggtgactgtcgtgctgctgtgtatttgttaatgtcctgtacatatacagtactttggagtctagttctcagggagccctacgactagttagagcctttgtaaggaagcagaggggatcctctcctgctgtttacacaagatcagctatgtgttctggtggtaagaaaggcatccgtgccttcagctgaatcagagacccgagcagtgctctgacctgccctgttcccagagaacgctcagagcctccaccaaggagtctgtttctcagctgtagccagccagggccactttgacctcttcattttcccctgcttccatccttcccctataaaggtgaggggaagaccttgtcccctaccattatcacaagctcatcacaggtctcttctgttggatccaggaaatgtgtgtcccttagctgtgcctccagcagccctgagctgcttgtagcaacttctgcctaaggagcactgcatggtcttatactgtagttgtttcccagtggagtaataaatgtgggcttgtttgttgtttctttaaagcaagcagtagctgtgtctatatttatttagaaattgcctgaagaaga

SEQ ID NO: 26914 - DNA, 1142 bp, Mus musculus
cttttaaatttcacattagtattatcaccaccaccactactactgttactattgatgttatgatagaagcaggttgctaaagaatgcagaaacacccgagtagaaagtgaagtacttaaagtatatgtcaactaagacaaaaataaaatgggaacagagtaggctaataggaaggggaggaggagagaaaaagaagtgggtgtcaggtggaatatgtttaatatatatgcatacaatggtgaccttaggttatacactaccatatacaatgaataataacagtgggacaatgagaattacacgtgtgtttgatttgcaaagaggaaaggtggttgcgtaagagcatgccgagtgactgccctcgcactcactttgagccagtcacagagcctgaggtctctgtcagtgtagactcagacagcccttccagcaaccctacagtccaggcttccagatgcggaagcaggctccggggctagacaagtaagggccttgcttctaggaaacaaagattctagcgccattgttgaagttgtccttcctctacaactcaggccgtggctgcatctctaccttgtgtcacttgtcattctgtcccaactcctagagtgccagtgtctggagatgcacccactgggagtcggtgctaaggacaggtgacaccaagccgtgtgtaaggcacaacttgtaggtctcaggtcctccctgtctctttctgagccttgcctgcagtcaaacgtattgtgtgtgtacacattccttatagccacctgtcatcaaatcaaagcttggggagacaggtagtatatagcctctgacccaagctgtcccctccacagtctctctgccacgcctggtggacctggactggagagtggacatcaaaacctcctctgacaacatcagccgcatggctgtccccacctgcctgctccagatgaaggtatgctcagtgtcgcactcctcaggaggcaagaggggatgatagtgagttggcctccccctccccaggcatctaaaacaccagcaaagtaaaaaggatgataatgctccctcccaaatgtggtactccttcacagattacacctgtaggaccattggtcatcataaatagttgttaaaagcagaagtttcggaggaca

SEQ ID NO: 26915 - DNA, 3085 bp, Mus musculus
gaaatggacagctgttcatgctgggtctacatcacctgcctcggcttgactctaacgtgttctctctgctgccctcctgccttctccattacagacctgcatggtacgaccttcctccaccaccctattcatctgacaccgagtctctgaaccaagctgacctgcctccttaccgctcccggtcaggaagtgcctacagtgccagctcccaggcagccagcagcctcctgagtgtggaagccagcagccacaacccagagcagcctggctctccagagggctctgctgagcccagagactctgtgcccagtcagggcaccgaagaagtataaaatccagcgattccaaagtccatatgggtagatcctctccaacttgttgaattctatcagactgtgctcatgggacactctttgagctccttttgaggatgtctccagttgaaattttggggtgctcactataccttctcctccagatttcagggatgttctttggaatgacctggcactcctccagccacttagttaacaggatgcattgccgtctttctctgcacagtcactgttccttcagggcctgtgattaacagactcctacttcagatgactgtgcgattgttggtccattccagtagtcttatgactggacaggcggccgggtgaagccatgtatgtaaatagtctttggcagggttctagggccatgtcacacattcaggaggtcagaagacatcagaccagagtctctactgagctgccaacttatagatacatttggagacttagtttggaggattcttacaaaaaggccattactggatggccactcaaaaaagtgtccaggagaacatcaaatcccgttttgtactctcctatgcatcgatcttactccagcagaggccaaagaaaatctctggcatgagcaacagctttcaactctccaaactctagtttggttttatgaaagactcagaaacctccaccctggccttacagacttgcccaagagtcctcattctgagatctttctagaagggcagagcctcagcaacgtccttgaataagtaggaagcccctggcatgagttcctagctgctaatgtgtaggttaccagagtctgctcctgccttggccccatcatccttttcctgccttctggattgtccccttccaagatgacctgccatagctaaggataaggacccaaattaagccggtcaaaattctgatctaaccgtttgccccaggaaaacagacccagtctggcatgttcatccatgcaacttccttgataggctcctaagttctatgaacacttgggagcctattgtccatgtgcatttggacataaggacacgtttttctctaacttacatgagaaccacattcaataccatccatgagaattctcaggtccctgtactacacacacaacccccaggacagtgcaccaagtcagggttagggttagagtgagggtcaggcctggccagacatctggcagtttctcctgagagaagtgggcaacagataaatcttggagtcaagatttcccattggattttgtttttttaaagtctcttagaaatgcatttgaaacagtgtgtttgtcttttcccttctagttaagggactatttatatgtgtataggaaagctatctctttgcttttcttatttctctttcagtgaggtccaaagaaagatgcaaaaagaaatgctgcctttcccatcccatcccataatgtcacctcagactcacatacacgctgagcatctacactgggtcatcgtggagtcattatttattgagttactgagacacgcagagacaagtccaccatccactgtttgtttggattacctttcctcctccttgatgcccagccagtcctagtgcatgccaccaccacgcacccccaccaaccaggcaataatgggtaaaccatactaactagggacaaaactggaaccagatggtgccacctcaggcagctgccacccattcaaagcatttttccactgctaacaaaagtttcaataacctgttcgatgctaattaaaagggagcctgcagggagcagggatgaagtggccttcagtgatgttgtactgacttcctttttaaccaaatccaaagtagactgcaggaaaggtaactagccacttggggttttgtttggttttggttttgtgtaaataagcctagctgtttgcttttttcattgttaaaatagaaattgagttggtgtgtgtgtgtgtgtgtgtgtgtgtgtgtgtgtgtgtgtgtaacccaatgaagaaagaacctgggtggcagacagagcttttctggctgcacatctcatcccagtgagtcagagtcgctcttcccttcctttgatgggtccccgcttctttttggtgctctgaaagttgtctggaggaaaggattctaattttaattaattgtgcagtgagctaatctcaggagcttttctgcttcaaggcattttagggaaaacaaatggttttagtagataaggagagcctattaatgttggggttttgttttgtttccaaacaaacacaggaacatttttttactatagatttggtttttaatggatttttttaaaataataatcataagatagcaaagctcggggacatggggttttttccccctgattttttcaagataccaagtaagtggctaacaatattttttttaattcgttccagtcaggattttttaaatactatattgcctaatttacaccagccaaaaaactgcctcttctccattgtctctcctcctgtaagatcaacacttcatttttaacactacactagattcactgtggttggaactcactgcctaacttaactccctctaccttgtaattgatgattgtttttgaaatgcaactaagatattaataaatagcgtgtgatattcaaagttatataaactggaaggttgtatgtggttgcttcttgtttttttgtttgttttgttttttgaattggcccattttttaaaaaaaattttatactctcaaataaactttcagtttcattctttctgtcgtgtgaatggtt

SEQ ID NO: 26916 - DNA, 1172 bp, Mus musculus
ttggggttgctgtctgagctgggtgtttccaggttcatggaattttatttgggagtagagtaaaaggtcacagagattgtagggtagccaagaaactttgcttaaagcagagcaagagaaaagatgggaatgcactgcaggagaccatcagacgcatgagtggagacagtcaagttcctgctctggtgtggggaggggacagctttctcttatgggatcggagggacagaagaatttgtttactaaggtggttctttgttttgattgacagattagatcatttaatcacttttctattgtgtatatccctttccaaaatatatctgatttttaatcttgtgctgcccaattatgcataggtataagatggtaaatataggattttgcctaaaagttcctttgaggacacaattttgccttattgcacatggcaatgcacagccacttcaggctagctcatcctttccccctaccccatacctggacataactgagaatgtatctgagtggagtctgtgtaagtttgatactcctcagggcaaggaaagcagattccacttttcagaaaagagattttgtgcgaagccagatgcagcaggttgggccgtggttggtaggcatattgtttgcagagggctgtgtgcagcctgacacaggtgggtgctcacagttgctaggcacattgtttggagatgttatgcgtgcctgctacatagtagtgaaggttctaggcagccaagtgcatcattagaagatgtggtaattcatgacccaatccatgcagagccccatattgctaagctattccctgtgcttgcctaggtcacctccagcctaaactttccaagaaaatatatttgcttctggtgtctcttaaaattctatggttagtttattttaaaatcactatttttttaactattaaagtaataaatacccaagactaaaaatgtcctgggaattctaggaccaaggtgaataaagaagtcttccttgccttcctgctctgctggggctatcagtgttaaaatcaggttaggcgtttccttggccaccggttttttcctgtgtgatatgttgtgctgggctctgtattatgaagtgctggataagcatcgcctcacagtactcagcttacagacctctgagatataggcaacctgtttctccac

SEQ ID NO: 26917 - DNA, 1238 bp, Mus musculus
tctgatcccagggaaatttgcaactaaaattgtgtttcattaacagtcagaacagtttgtccctttgaagctcagacagggtgagattaatatgaacccgatattaagctattaagcatcaatttggcaaacctatttataaaagagctggagatagaaaataaagaaagtcacattaagaggcttgtctgccaaatccactctctattctgaaagatgtgacttagtaaccagtctctgtgtgagaaagaaaattgtgtgcgtgggtgtgtgtgcgtgtggggtgggtgggggtgcttgtgtgggtgtatcgactgagcatggcttttgatgacaggcacttactctgatactgccattgcccctaaatggtgtcccagccaatgtagactgactccgtattgcagccttgctgtgaaacagctggaaagtgactgaaaatgtcttgccaccacagtgaagacacagccaccccaatgtcacagcacggtgcattgttcacgtgcttgtgaggatgttgacagggttaggtgtagaaacacgtggcaccatgcaatagtgtgccagtcagtgacaataataaacaactgctactggcttctgtctgtgttggctctacttctgtttcagggcgaattcctgctcctcacacagtttattgtggagcaggatgttgttgggccagcagcagcagcctcatacggcctgtgtgtgccatgccttttgaatgcatcattttctcctgtgcctgatttaatcccttggtgttgtgttcactgtgcctgtagaaggaagacgctgtgccacatatcaatgatatgcagcccagatgccagaggactccaccatctgggtgtgcgcagaggcacagtatcatgttcacaggacaatgcagttcttgtaatgaactgtcattaagccttggagtagtaaaataattaactattcattatggctcgtctgttatacagtgtcatgtgcccaagtactggatactttgcatttaatccacacaatggtccaaaagagtacatgtttttattccccactttacagggaacagaggcaatgaatggtcaaggattttaccacaagttgcaagcccactgttaatattctgtccagatgatggtgtttgcaccttctgtcctttatccttggagcttcctgctgcagctgcagttttgtcacagttgtatgtcatatttagctctcagtacccacctccccatgaacag

SEQ ID NO: 26918 - DNA, 1227 bp, Mus musculus
ccgagacacgtggaagcaacacgtcacctcaggctaatttatggcctgttttctactagaattgcaaagtcttcacagttggaaggtgttaaaatatgactgcacatcatattaaatacatactatatttaaactgggatgtgaactgaaacacgaagcaaattagactaatttgctgaattctaaagtaatcttggttccgcctttggcttgcctgcctgcctgcctgcctgcctgcctgcctgcctgcctgcctgcctgcctgccttccttccttccttccttccttccttccttccttccttccttccttccttccttccttccttccttcctccctccctccctccctccctccctccctccctccctctctccctccctccctcctcccttccttccttcttggttttgtttgtttggctgtttttgtttggtttgggttggggtgtgtgtgcctctaacatcggaactataccatgaggttttaaaattattcaaccattcaattattcaatacttctgcagatctaagacttaagtagcaatgtctgagtgcccgtttcccacccatcctgatgggtagaggccatggtggtctgtggccaagttctgccgtgctggctctgtctgttagctaactttctatcactgtgaccgacatctgaagggagggaagctgtgtcttggcttatcgtctcagatgcagttcatggtcacttggtctcgtgcacatgggcaggccttcatggtagtgaggtacctttggcctaggaaagccgccaaccccatagtagatagaaagcagaggaaaaggaagagacaagaccacacactatcacagtgactattttctcttccaccaagacccacttcctaacaattccatccagtatgaattcttctcagacaaattctctcgttaggtcaagagctccagtgaccacttagtttctgcaatggccttcatagacactccttgagctgcacttcccttgttccctaggactgggtggctgtgaatccagtcaagttggcagcgtagatgaaccatcccaagggcagtttctggtatgagtggaaatgcccaggaccgtgaggctttcttttctgtcagccctgcagctcctgatcagaaggttctagaggatgtttgtgttctttcggaaaagacttgaaaggtggaaattggtgtgctcagagtttctagagatgacattcgttaaa

SEQ ID NO: 26919 - DNA, 1198 bp, Mus musculus
ttctcgaatgtggtttttgtttctgtgaggagtaaggagatcagacttgaacttctaggaaggaagcttttgggtagcagaagcccttctgtgtgcgctgagagaaaaacttcctgtgtgaccctagcattgtcctcactgcctttaatcctcttgggtcaggactcaagaagtttgaactgtgtctccataaaagatatgtccaagccctagctggtcatacttggacctgtaaatgtgaaatttacacgaagggcatgttcactgctataatctaatcagttaaggtgatcttactggatcagggtcaaccctcatctctgtgatttgtgagtttgcttgtgtgtgtgtgtgtgtgtgtgtgtgtgtgtgtgtgtgtgtgtatgtgtgtggtggaatgggtgcacatgtgtgtacatttggagccagatgtcgaccctagggcctgcctccatgggtgtgtgcatggtgtggtgtgtgcacccatggaggcccgaggaggacagcgggtgtcccactctaatccctttactagcgcctttactaaatgtagacataggctgacgctagcaagccccacaaagccctctgtttccgctctccatggcaatggaattaaggtgtgcacccggctgcatccagcttcttatgttcgtgctggggttggattgagggccttatgcttgtacaacaaaccttacccactgagccatctctccagtctccaccttgtattttgagacaaggcctctgattgacctccagctcactggttggagtaggctgcctggttagcaggagctaaggatccttgtctctgcctccctggtgctggggttgcaagtcatgtgactctttctttttaactgtgggccttagggattgggctcagatcttaatgagtttactttgttgactgagccatctctctagtccctgatctgtgtcctgtttccctccaccacacttagaaaacaaacacacacacacacacacacacacacacacacacacacacgaaaactggggtgatgttcatttaaaccaagggatgcctgggattttcagcagctactaaaagctagaagtacacgagagagttttccctggaagcagccattcaacattctgcctttaaaactcttgactcttgtgtcaacccactcggctgcttttagttgttgaacagcctgtgaga

SEQ ID NO: 26920 - DNA, 1128 bp, Mus musculus
tggggaatcactgtgagtttcaaactggtctacagagtgagctcccggtcaggcagggctacatagtggaacatagtgttctctctttagatagaaaattctctcctcctgaattttggagcacggggattgtgtttcttgaggagccctggaggacgttctgtctcacaactggactaattcctgggggctgggtttatagtttggggtgggtcctgagacgtcagtatggagtgagtgtgcctctgcagctctgttacggctcagctcaggatgctctccttattgaaggtccttccatccctcagtctggtccttccatccctgtgaggccatgctaaggaggcattggctagtgaccgtttctcccatgttggtctgtgctggcttttagaggcacaatagctgcttctgaaaaacctcctgagttccgggggccctttgcgccccatacatgaacgcgtccttgcaatcgaccagagacaatcagagtgttgacttggagataaacatacgttaaaggagtcatgcagactgtgtgacttttctgttttaatttcaggtgagggctgaggacggagtgggatggaaagggatgaaaatctctttagacttgagctgtttgtgtgcacaggatgcatccgctattgaaaggacgtttatatgtgtatatgaggaaataaaactgtaaaagattggctttgcaaaataaatatccacatcactggaagtgctactggaaagatagagaaaacatggtagagattcaactaaaactagatgtgatcaaatcactaataagatggagatggagcaaaggggaaactaaagcgactgggtgagaactctgtgtgtgtgtgtgtgtgtgtgtgtgtgtgtgtgtgtgtgtgtgtgtgtgtgtgtttaagcccagactttaaggggagtagtttaaatcctatgggatttgatttctaattatgctctaccttacagcctgagattttaggctgcatatatatttgtgtgctcgtgtgtgtatgtgtatgtgtgtgcacacgaacataaatataaatattattacctgttgtccctgggagaatctagcattggataaagttgttcattccccgtctgctaactttaaag

SEQ ID NO: 26921 - DNA, 2081 bp, Mus musculus
gaggttagtctatggtggtcagtgcactgtgaggggaatccttgtccctccctggcagctagcaaacattcctctatttactataattggaatcctcccttcccctgcagcaggccgtcagctcacctcacacagcccagttttctcttcatgtagcatgtccaggcatgctccagagctgggtttcctggccttcccacactcccagatcacagtctcttacaaccatgcttttcaggatccaggaagtagtaagtgtgctgggagatacccaactaactgcaagctcacaagcaccacatcttcttgagacatcagtttttctttccaaatgatttgaagtcaagagatgaccatattttttaatggaacaaatgcttatgttatacaagagaatgttcatacacctaaagtgctaaactaaaataggaaacttggaaggaaactcatatttgtaagtggacagtgattctatctcctctgcttgtgtggtatttccatgttcactttgagattttgtctgaactggattcaggcagccttggggttgctgttgatcaaggtctagacttccagatccaaggagtccaccttggagtagtacatctcccttttcctgtcagccagcttgcctgtgtacttatcacaaagctttaggggcagctaacatgtgtatgtacaggatagttctgaggcagaaacagcatagacttattgtaggagtcctatttatgtcattgttcagccctgtgcatgctagaaaatgatttatccctttgaggccaggaaactgccaagccactctgctgtaggctaggattactgaaactcaccacacatacaaggatattggggcagagcggagtgtgagatctaaaaatatgtatactttccccagctggtggctagtagatggcttagacaattttggtgtcttaccatctgtctgcaaagactggagaatttaatacatcttgagttgacaacctccagtgatatcctgttctgccaaaattttaaaagaagggccactgtagaaagagtgtaaactatcacaagattgaaaagacttgacagtttggaagcttgtcttgtctttctcagtaatcattgatctttacatgttgaccttatattagcaatgaacagatcattgcctctccacccaatcatgctatttctttaaatcagtatttggggaatgcaagcatttatgcagtggttataaacagaaatataagatttgccaacctgtctctttaaattaccatctctctgaaatcctcaaggaaagcattttccctttacttagtaagggtttcagattcactttatgggctcctgctgtcttcaacactgataaaactttaaccagaaaagcattaaacacagcacagcagcccctagcccagatccctaagttcctagtggcagcatttatcaatgtaagaacaagaatactttctgtactggtatcagcttcgtcctcaaagctatgacctcttacttggccttgtgccccatagtgaacgaagcttcttgcctttccaggtcagtgtgagttaagattgtcagagttgtatgtgtcctgacagactgtggacagcagggtttgcccaaatcatcaagtgatacaggtaatgaatgtctctaaaataagttgggtcctccaaacaagtcctggataccttctgaatgttaagtttctgagtgctgagagtaatttgttcattggtttggtttgataccgttatatctatctagggcagttccaagaagtgcttgacttctcagctctaacagccagtaagagtaagtaaccttagtacaggcaatgagcctctgtagatgtgcagaggacaagtcacttgtctgtagttgctaacaaacaatggaaccagttttgagcacagcactccctgctctgcagtcagccctctgccccacaccatgactcacctacagattgagagagagaaaggctttcagttcccccagtgtagtatgcccattcacactcggaattctttttcaaagacatcaagatggccttagtactctgctctagtagatgttgtaag

SEQ ID NO: 26922 - DNA, 1187 bp, Mus musculus
aacctgcaccgaggaccaggaggggcgttggtctttctggacaatgaggcgggcttggtgcacggctaccgggtagccggcatgtgggacaagtataacgaaccgctgctacagtcggtgtgtgtattccgagagcggactgctaggcgcgtcttggagctgcaccggggtcaggacgcggcggcccggttgctgcgcctctacagtcgccacgaaccgcgtttcccagagctggcggagctctcagaaccccacgctcagctgctacagcgccgccttgacttcctcgccaaacacattttgcactgcaaggccaagtacggccgccggcccggggacttaataacactccgaggaagagagggactggggtatgaatgatgggggttagggctgtcttctctgccacgggcaacgaccaaccagccaacgcccacccaatggtctgatcgccaagctgtctaaaaaaaaaaattgtgtgttacccacttgcccctttcttttcatgccaggctgtttcctttccaagttctggaagggcaaactcaccgaggcgagaagtgtaacattccctccacctagcttataaaaagagttctgtgcttgtgtggagattggatccgaagaaactggctgctggggtttggcccgggaatggcagtctctttgggagatgcagtccatttttgtcgccccctccaccccttcccaaaaaggaaaacttccgtttgagctaattcctctatttcctactaaacacagcgctggtggccccagagcaggctgtgacaagggctggtgaaacccccttcctgtgttcgccctttgttccggcgcgcgatggtgagataactgttccaagctgagggacagctctggataggacaaagagagcaagacttccccgcccctgggagccctccagaccctgacagtttgtctcacccattcctgaactcctatcattttggcctgaaggctatgaattcaggactagttataagcagagtcaataatgaatttcttcctgcgtctcccaattgaccaaaattgacaatgatgatgttcaccagagggggaaaaaaatcagtttcatgcactttactttttttaattttaattttttagtaagaaaacttttttatttgacagaatttgccttctgtgtgtatatatgtgcataaatt

SEQ ID NO: 26923 - DNA, 1192 bp, Mus musculus
tctttgtgaattcagtgatcagtaaatggtctgattcccattccctgttttaattcagaagaaccacggagtgtatttttctgttcataagtatttctgtacactgaatgtaaaacactgaaacatgcgatggcagttgtggtgatgggcctggtaaaggcgctggctttgaaaatggtgattttggtggtgggactgttggtgtggcatttcatcaaatgcggtggtcttttctccaaggaacaaagcggtctctctgcaatagttatgtgcaactacaagcaagtttgcctctcctaagcagggaatcacataccgtgcatttcactgtattctttttctaggcacccttgtaatgatctgtaccaacttttggaacccctgttgtctgtgtatattgtttcccatatgatttgatcgtataatttggatttaaaattagtcacttgagtttgtctctacctagagctttctggtgatgggtatttgagaaggttagaccattgtgagacaggttagttttaccctactgatgatgtgttgttgccatggtaatcctgctcagtatgagaggaaccgcaggttcagacatttgtatgtccttggctgaggagccaatggggcgaagctaccatcatctgcagacagctattctccctttgaaaaacagctcttggtctgctattgggccttagtggaaactgaaagtttgacaataggacaccaagttactatgtgacctgaattatcaatggttgctgatcatgtgggcttaacctttttttttttttaaatatgaactgagacttctgatgcccagctgcctgtcactcacaccatttcactggttcttaatacacttagggttgacctttctcctctctggataaatagtttgattttccctttgagcttttgcctcgttcattcctaagattcttttgtttcagattcagagaaatctctttttatgctggatggtctgagccacattgcacccatttaagtgatcacattccagtatcacaatccttatccaagctatgaagtatctcattcaaaactcagccctgtgaaagcatcatcatatttttctcagaatagcctttagctctgttcttggatttctacccgcacggtatttttagtgctcatctgggatgacctgtgctgcctgagtttccttcatgtt

SEQ ID NO: 26924 - DNA, 1407 bp, Mus musculus
tcccatgcgacttgggtagccttcagagaccaggcgcttgattgggtgttcagtatggagtagatgaagtgcgtatttatttaaggcgaaagctttgacctgagctgtcttcctctcccctgtacatgtactgtagaaatgtgtgatgacaaacggactaataaagaacatttggttggtcagatccacttttaacctctggtgctgtacagaaggcattaaactaatgtaaactacatcctatgtttggttcatttgaaattttggaataattgtgaatgtatgatattgtaaaattaaaaaaatatatagaactgtcccttaatcatattgacgttataactgggcttcaaagagatgtctgtctatattggggcctctcattttttataagctcttgatatacttgaacaatttaatatgtacagttagtttgctctggattagtatataagtacattttattaggggttgtgacaacattattaaacttttgtgtatataaagccaggtgtcttagctagatatatttccagtcttttaactttgacactgtgaagctctaaggatacaataggaatgaagacagaggaagaaaaactaaagagtcgtttgttcagagacctgaccttataaagttgggggagcagctgggtttgtacctataacctcagcctttgagagagattgagaaaggaggcccgctttgaggctagctgggctacgcggtgaggccctgtctcacagaggcagggagagtgttttactggaaaagctgcagttgatctcaaattgagcagcgagctttcatgctcagttggaatctaatgaaataaattctcttagcatacattgtaaatttgtattgttttaaatacagtattgtttgctgaagcattgtaatcaagtttgtattgtacagtcaaatgtaagaaaataaaaaaattctagtctactttgatatgacatgcaaaatagaagagtggcaaacaagctcaccatggtggtttgcgcctataatcttagtacttggaagactaaggcagggttcccatgagttcaagactagccagagctacagagtgagatcctgtttcacaagagaggagacctaggaaggagaacagatgggaagtagtgctcatctactccatcagctgagccaaattgtccctcattatcagtaacattagaactgcttctttctgttggcagctctggcaagataacgatatttaaatgagatggtaatgaatggtaatttaattcaccagttgcagaaagtttctccttagtgtcagttgacataaatcaccagaaaaaagactccatggtacaagttgtattgagtatgacatgatgaactatagccctaacaaaggagccttcagaaataattagtgcccc

SEQ ID NO: 26925 - DNA, 1124 bp, Mus musculus
gtagaagtaagctgattaaaagccttaaaggtccaccaatcattccctgggacacatgtccccttcactccctcagccactctgtcaccatctccagcctgaagcccaccctttgagaagcaatactgcctccagctattctgtgactttttgtatggtgagtaaagggcccttgtcagaaggcccacaggagctgtaggttaggcatatcccgttccttgttgagtcccagcattctgctcatcgtgcattaatccttagctagtctgttcttaggagaaagttgctttcactttatttgatttgcatagcatgtgcacagctactagaaaggtagaaagcacagactttgcaaccagctctgaacctcagtgtaccccagtgttcttagccctggctgtactcagctgcctgcctctccaccctgctcactacacttctattctggccttctttttcttagaaacctcatcttggaagttatatgttttctacctagatagacctttctcccagccctttgacttgccctccacaccattctgtgtaatgcccaaatgcccaggcctcccccagctgttctgtcttctcactcattgctctctagctcattactttgctgtattcctttttaaagatgaaatcccatcactctagtttgtgtgactgatgggtgactcctagagtggtgtgtaatgttttctcttggcacctggagtgcagtgagtgcttaagacggacttagatactgagcttaacttttttgagtccatgtgtgtctaacttaggagtaatagtaacacctcttctacctggatgatgtgagttattaacacatgacatttggtaggctcttttcttctctcccctcctcttcagcattgggaatccagactcttgtaacatttctattgttttgtcagtttgttttctaaaatattccaagaacacatgttcagaaacacctgtacaggaaaggtgccactacagtgggctgggcgctcctatgtcaatcaattaacaatcaagacagtagcccgtaaacatgcccattggccaatccaacctggacagtacttaaagactcccttctcagatgactctaggctaagtaaagttgatag

SEQ ID NO: 26926 - DNA, 1216 bp, Mus musculus
gaggagacctctcgtgaagccgagcctgaggatcacctgtaatcaacgctggatggattctcccactccggagcgcagactcacgctgatgactttaaaacgataatccgggcttctagagtgaatgataaccatgcttttgatgccgtttcctgaagggaaatgaaaggttagggcttagcaatcatttaacagaaacatggatctaataggacttctgtttggattattcatttaaatgactacatttaaaatgattacaagaaaggtgttctagccagaaacatgacttgattagacaagataaaaatcttggcgagaatagtgtattctcctattacctcatggtctggtatatatacaatacaacacacataccacacacacacacacatgcaatacacacactacacacacatacacacactcacacacactcatacacacacatgaagagatgataaagatggcccactcagaatttttttttttatttttctaaggtccttataagcaaaaccatacttgcatcatgtcttccaaaagtaactttagcactgttgaaacttaatgtttattcctgtgctgtgcggtgctgtgctgtgctgtgctgtgcagctaatcagattcttgttttttcccacttggattatgttgatgttaatacgcagtgatttcacataggatgatttgtacttgcttacatttttacaataaaatgatctacatggaaggaccgtgtttggttgctttcagctctgtataatgtggaatgtgaagtagagattaccagctctctctgcagtaacaataaaagcgccagcggccagagcctccatggtgtctgtctttggatggcctgctggcgcactgagacagcagtcaacgtcctgactttggaggttcttatatcctttgctccttagcttgcttttcaggagaattaaacccccttgggactggagcgagtgcttcagacgttaactacctgtgctgttcttacagaggacctgactttggtacccagtgcctgcgttgtgagctcacagctgcctgtaccttcagaggactctgaggtccctggctgatagatacgaactgtctctttaccaccacttacccctgtatctgagcagacctgaaactggtctgtctgtagacacagaaagtgggtctacccgtttacacccaactcctcttggagaaggtgcttata

SEQ ID NO: 26927 - DNA, 1183 bp, Mus musculus
tatgatggagttagctggaacaggagaatatggctgtgagcagaattagagggctgtgaggaatggcttgactgttttgaaggtgtcaccaaaaggaggtactagaaagtcagggttgggtgagaaaatggagggtatgtttaacccagagttggacagttaaactccggtggggaggctagtaggtagaactgttttacatcagcttaacgtctgagatgtctgtgtgtaaatggatcttataggaatcctacctaagggtatgacaagtgtgtgtgtgggggggtggtctacagtggagatagaaacttgagagctttgagggtactttgggtcttgacaaagctgaggagccgaccaaggcatgagaaacataggcaccaagcagggctttctggcctgtaggaactaataccctttttgttatcctcaacgtcagcctaacctctccacgactggtgataagagccaaccccatagcctttctggacattcgcataatgttatctttgtacaggccaaagctgtcttgaaattcattgaggggatctcggagaagactctaaggagtactgtagccctcaccgctgcccgaggaaggggcaagtctgcggccctgggcctggctatcgctggagcagtggcattcgggtaagggttccacatgggagtgtgcaggatttgagtcaggcacctggtggagttgtctctggttcctcatcagggctgtccaccatgtaacttctgtcaggatcatgggtatttgtctggaagctgcagcactgctcccctgggccactaggaggcactgtaggcagtaccagagctcttttgtttgcttcttaagttgaacagacacaaatgcaaagaaaacctctcatcgtgagagtgtctgactagctttggtgattgcacaaatacaggtgaaatacattatgaccttggttggtgatgggtcttatttgttttcagtaaggtattattttctggcctgtgtgtgctttgccaactcagatgatggacctacaactttgtcctccctgtgccgtcttccctggtgatgcttacagagtctgtgggcactttgtatgtggatgaaccaaggcccaggggattacccaagatcctcctgcaggttgctgctggcagagatttggccttggccccagcaccacatagctcc

SEQ ID NO: 26928 - DNA, 1157 bp, Mus musculus
cagaagagggcatcagatcttattatgggtggttgcgagccaccatgtggttcctgggatttgaactcagatcctctggaagagcagtcagtgctcttacccaccaagccatctcgccagccctgtttgttgttttcaagacagagtttttctctgtagtcctggctgtcctggaactcgcactgtagaccatggtgaccttgaactccaatattcatctgcctctgcctcctgagttctgggattaagggcgtgtgcctccaccatccgactgaggagaaaggtttctgcttataacgtatatagaagtgcggggagcttgaggtttgtttttactaaagccccgtctagtgtgaggctgacttgtgagagtactaatagtgtgagtggaaacaccaacgtgtatttctgtgctggctaatgtggccagctgctggtttatggagcttctgggccatgatggtttgctgattagcatgcctgaggcctctaagctgctatacatgcagagttccacccagccttggtcacatgaggagcactggactcttccctcctgataacagttttagtgataacttccaccagtcagaatgaagtcccaataggctgtcttaccttttaattctggaagcacaattaattataagctctttgtgctggctagttgcagcctccaggttgttttgaaccacttctggtctagtgaaagagagggagtgtcaggatttgagagaaactgtatttcttgaatcagcattatcacaaaggaagcttactcaggacaccgaagcaggaaggttgccagtagtttaggccaggctgggctatatagtaaaatcatttctccaaaacagggaaggaggctcagttagtagagtgcttgcatagtgtgcataaagtcctgggatcaattcccagcaatgcataaactgggcatggtggtgcctgcctgaaatccttctgctccagaggtggagacaggaggtttagaagttcaaggtcatgctgggctatcttaagttgcaggctaccttgggatacatgagaccctgtctttagggaaaggtgaaggaagccatgcaaagcagccagctagtgcaggatgaaagcatacacatcagcagaacaggaagtgcatccgggttgattccaac

SEQ ID NO: 26929 - DNA, 2057 bp, Mus musculus
actggccagtgtaccataatatgttaccagaagagttattatctatttgttctccctttcaggaaacttattgtaaagggactgttttcatcccataaagacaggactgcaattgtcagctttacattacctggatatggaaggaaactatttttattctgcatgttctgtcctaagcgtcatcttgagccttgcacacaatacaatactcagattcctcacccttgcttaggagtaaaacattatatacttatggggtgataatatctccatagttagttgaagtggcttggaaaaaaaatgcaagattgaatttttgaccttggataaaatctacaatcagccctagaactattcagtggtaattgacaaagttaaagcattttctttgaaaggaagatggaaggagtggagtgtggtttagcaaaactgcatttcatagctttcccattaaattggagcaccgacagattaaaagcataccaaattatgcatgggtccttactcacacaagtgaggctggctaccagccttgacatagcactcactagtcttctggccaaacgactgtgattaaaacacatgtaaattgctctttagtagtggatactgtgtaagacaaagccaaattgcaaatcaggctttgattggctcttctggaaaatatgcatcaaatatgggggataatctggatgggctgctgctgtgctcaatgtgaactatttagatacctttggaacacttaacagtttctctgaacaatgacttacatggggattggtcctgtttgtcattcctcaccataattgcattgtcatcactaatccttggatcttgctgtattgttactcaaattggtaataggtactgatggaaatcgctaatggatggataatcataacacttttggtcacatgttttctcctgcagcctgaaagttcttaaagaaaaagatatcaaatgcctgctgctaccacccttttaaattgctatctttagaaaagcaccggtatgtgttttagattcatttccctgttttagggaaatgacaggcagtagtttcagttctgatggcaaaacaaataaaaacatgtttctaaaagttgtatcttgaaacactggtgttcaacagctagcagctaaagtaattcaacccatgcattgctagtgtcacagcctttggttatgtctagtagctgtttctgaagtattttcatttatcttttgtcaaatttaaccctgtttgaattctctcctttcctcaaggagacacttatgttcaaagtgttgattctttgccttaggtgcatagagagtagacagtttggagatggaaaggttagcagtgacttagccatatgttctgtgttggaatttgtgctagcagtttgagcactagctctgcgtgcctatgaactgaatgctgcttgtcccattccattttatgtcatggagaaataattccacttggtaacacaaaggctaagttaatgttattttctgtacagaaattaaattttacttttagccttttgtaaactttttttttttttttccaagccggtatcagctactcaaaacaattctcagatattcatcattagacaactggagtttttgctggttttgtagcctactaaaactgctgaggctgttgaacattccacattcaaaagttttgtagggtggtggataatggggaagcttcaatgtttattttaaaataaataaaataagttcttgacttttctcatgtgtggttatggtacatcatattggaagggttatctgtttacttttgccaagactattttgccagcacctacacttgtgtgctttaaaagacaactacctgggatgtaccacaaccatatgttaattgtattttattgggatggataaaatgtttgtggtttattggataatccctagatggtgtgttacgtgtgtagaatataattttatgatagtaagaaagcaaaattgaagaaaataagtttagtattgaatttgagttctgaagtgaattcagggaatgtctcacgtttcgggcttct

SEQ ID NO: 26930 - DNA, 1200 bp, Mus musculus
aattatttgtgtgtgttgtgtgtgtgtatctatatgaatatacatatattgtgtgtgttgtgtgtgtgtgtatctatatgaatatacatgtgagtacaggtatctgagaagaccgttagagagcatcagatcccttggatctgcagttagatgtttgggagccaacccatgtgaactttgctcttctaatccctgaacctcttctctagtgcccaccacatgctaacacatacagtatgctcaacacaagtttttattgagtgaataatcttaggtttattccctccttatttgcttagtatagtagtttagatagattcctttttcattcctatcatattgtaatttgttttatgtatgtgtgtgtgtggttgttttactaacatgactacgttttcttactgcttttgtagaatattaatttttttcaaatttttattaaaattttttttcaaatcaaattgtcagtgtaacattgtattctccatttttttagataaagctctaaaggaaattgttgagcgtgttttccagtcaaactactttgatagcactcacaatcatcaaaatgggttgtgtgaggaggaagaggcggcttcagcgcccacagtggaggaccaggtagctgaagctggtgagtatttgggtggatataaggattagttttggttctggccttagtttctttttcctttctcattcatatgtatgtatatatgtaaaatctgtatactcaaataccctttgaacatggcaaagtacattcagcaatctgaagtattcagaacccatcatgtatcttacaggccttgatcacaggtaaattagtaactctcttgcctacttagtattgttggataaggagtatgggttaggggcagttgtaaggatttttgtctgacttgttttacttctcaccataccaacatatagtatgataactatattggaagcatatatatggaacttctagagatctgtctgcctctgcctactgagtgttaagttacatttcttctttaaggctgtgtatagaactctatggcttgaactgtaaactccttatccgctagggagttttgcagttgatgtttagcatcttaatgaaacacaggtgtgactagacagcctgagtactttcataattaataagttgatgaataaaattgaaaacagatactacaaaaattttgtgatatt

SEQ ID NO: 26931 - DNA, 1153 bp, Mus musculus
agccttttaagggaaaagatgggggaactgaggggaaaaaaagacatccttcattgaacttacatggtctccttttctttgtcagtattcttcattcatgaagaccttttttttttttttttttttttttggtttttcgagacagggtttctctgtatagccctggctgccctgaaactcactttgtagaccaggctagcctcgaactcagaaatccgcctgcctctacctcccgagtgctaggattaaaggcgtgtgccaccacgcccggcttatgaagacaattttatttattatttttcaagttctgaactcctttctgatgtcatgagtgatgtttgccgcaaggagtcagtggtggatgtttggcttgttcttgcatagaatgttcttaagttggacactgtcttgggtttatgttctttgacagattcagaaaacaataaagaagacagcacgtcgggaacagcttatgagagaagaagcagaacagaagcgcttaaaaactgtacttgagttacagtatgtattggataagctgggagatgatgatgtgagaacagatctgaaacaaggtttgagtggagtgccaatattgtctgaggaggagttgtcattgctggatgagttctacaagctcgtagatcctgagcgtgacatgagtttaaggtatgatggtgtctgggaacagaatcttaagaaatattgctcattggcagttggaaggtagttaatgttttctttgttattgcaaggttaaatgagcagtatgaacatgcctcaattcacttgtgggatttgctggaagggaaagaaaagcctgtgtgtggaacaacctgtgagtatcacagataattctgagtttatagctaggaatctttaaaatacttttctgtttaaggcattttgcaagtatataaacaacagtttgcatttatttttatgcattctttttttggcatgccttagtgacattctttgttgctttttatacttgataccttcttgggacaagatttgtagatggcttttcttctgccatgaaatacttattgcttatcctgtcagcttgtacagcagttataccagggaagttatagagcctcagcctaagtccagtctgttacgttttattgtgtaattttgttaattt

SEQ ID NO: 26932 - DNA, 1143 bp, Mus musculus
ggcatagatgaatggtagatgctggggactcagccacaagaggagagacacttactgtgagggactgaaggaagtcatctgtagcttttgtagtgacagtggttagaaatgggaaggattgctgcaggatggatcattttctttttcctgtaaagtagaggtgatagttatttgctggaaatgacagggggtgggggaattagaatgaagctttgtgagaaggataaagcctgaaaggctggcctagaagttacctggggaaggctgctggtccaccattctatctccagggaacagttcagagacaagaagtgttccttgcaattgatttgttacagagctgagaatcaaaatccacgggtttataagtatttgattaagttctccaccacttagccacattcgcagcctgagaacagcactctctgagaacagagaaagactctgggtatctctctagcccaacacttcacctcccagctggaccccagcagaattctcttcactgtgcctaggcctcacccaagtgccctcatactgtgttttctacacagccctcctgttctctctctctctctccctccctccctccctccctccctctctttctttctttctttctttctttctttcttttttttctttttgagacagggtttctctgtgtagccctggctgtcctggaactcactctgtataccaggctggccttgaactcagaaatccacctgcttctgcctcccaaatgctgggattaaaggtgtgtgccaccatgcccggctggtaacctattttcttttcttttctttctttctttctttctttctttctttctttctttctttctttctttctttctttctttctttctttctttctgtttgttttttcgagacagggtttctctgtatagccctggctgtcctggagctcactttgtagaccaggctggctttgaattcagaaatctgcctgcctgtgcctccagagtgctgggattaaaggcgtgtgccaccgtgttgagaatgaaatgtcagagtgtgcatatgcaggtcagaaagcaactttgagcggttggctttccatccactttgaggtgggttctaggaatcaaacccaggatgtcagacttgattagcaaga

SEQ ID NO: 26933 - DNA, 1156 bp, Mus musculus
cttttaaaggtagaagtgtagattattgattgtagacctttcctgtttctaagcactgttctagctgtattgtacaaattttgatatattttggttaatatttagttcaaaatactcaagatttcccttgtaactgacttacgactgcatagaaatatgttaattttcaagtgtttggaagattttagttatcttttgcttactgagttttaatattattgtggttagagaacttactttgtattgctaatattttttaatgttttatgaccccaaattatgtgaagaatttctatatcttgataaatgatctttgtgtctttgaaaagaatgtatattctaccatgtgagaatttattctatgacaggccaagctgactgattgtttgacaatgtttgccaagtcatctgtatatttattgttcttttttttaaacttttgttacttcagccattgaagagattattgttgaaatctttagttaatggctttgtccattgattactttattcttgttatatatctgcctcatgcattttgaagtgatataattgtgtgccagtgcttaggattgttgtctgtttatggaagtagttctttgattcttattcagctttacttacattccttgtcctaagttaagagcattgaggtaatgcatgggcaggcaggcagccgagcagggtcagcttgatgcttttgttgcttgtctttactgtttgtttcagtggatgtaaagtacgggctttactaaaaggcagtggttctcaagcctttgggtttcctcacctccttagatgtataaaaaccattgatgcctaagaacctgtttacatggtcatgtcagtatgtaccatatcagaaattcaaataggacatttataaaagtatcagttccttttaaaactacaataaataaaccctttacatgttcaaccctctcaactgtatttatttatttatttaaagctttagtttctgctcagctacaagaaaaagtagttgacctgttttacagaaagtgttcttctaaaaaatggagagtcattagaaaaaatgagaattgtgacttatgttactgaacgtaaaaaagacagtagggttgtatttattgaccttctattatcctccttgatatggagataatagaattgt

SEQ ID NO: 26934 - DNA, 1183 bp, Mus musculus
tgatgaatatgaagagatggaggaggaagctgaggaggaggaggaggaagaaaatgatgactctgcagacatggatgaatccgatgagtcagatgcggatgagaatgagtcagatgagggtgaaggggaggcgagacggaggagggtctttgatgttcccattcgcagacgccgctgctctcgtctgttttagctgctgctgaaggaagctctgggatgacactgttctgttaaacagttttgtcaataatgtaaataattgtgctcagcatatagccggaagctcgcatgaaatgttgttccagacctaggcgctacatgacactacattaggcgttggatcgctttgcttgactttgtgcttgtaggtagaggaacaaatgggaattgtttgttttctcttccaggggtcaatgggagagcagctctctagctaaagaacaggagttcctttgtttaaaaatattttctacttaaaaacaaaacagaggtgaaggggaaattgttttggatgaggattttatatgtaacaaaaacacccacccaagggcagaaagagactgcaggaaggactgactgtgcaaagacccctctcagttgtttagacactaacaaaatttatacttagcttaatccacttcatggttgttaacattttatactcattgggcaactaaatggctaagttcaatagggatagtttgcccttacttagacaatctctccttgcattagtctttgtcacaccgacctgagttgcaaatttttatcattacttttaatttaaagtcttcaacataactttgggctttaaaagttaaagttcttacgctatgaccgttctcacattatttatagattcatcattttaaatgtagtttgtgaaagtacgtagggtgttgctaaagattcttcatgatgtctcatgtagtctaaatttgtaaatatgctttctgttttgtttctttatacatttgtctaactttgtggtaagtgatctgaattttatgttagggttaggatatttttgtgaaacatggatattttttttttggtaattatataattgagagtttggaatgaaatccttcaagtgtcaaaaactcctattttgaaaacatttttgtgtaagtgcctatttcccatagatagtattgagcttttgttcttaagctggaagatg

SEQ ID NO: 26935 - DNA, 1181 bp, Mus musculus
agtttctttggtctttactgaaggaagagagaggagagtaggattggaactgattagaatgggagattcaaactgtcaaagcacagaactttcccaagaagctgtttttatttccctatggcaaactgtcctttctggaatgttcagagatgataatgttgtggaatccccagacaagtctcttgtggggatgatgttaggtagcgagcgcccttttagtatgctggttgatctttcatagtcttagtcttttgttacttaataagaaatcagctataaataaaatgtatttttgtaatttccatgtgtatatatggtatatttctaccaatggccagttgtagtccaaatccgaaatcagcttgcagaacactgtggccagtgcaagattttactgacagactaatacgatgcctaaacctagccacacgggcatttgatgcacatgaatgagcaaagagccaaagaaactcagccttttcatgcaaatggtgtaagactgatatcgccagctacatcgctccactttatcaataatatcagctttccatccatgcggcgtatcaacttgggactttgtggacttggcaaatgcttggaatgtgagaaagaagtttctagactgtatgcttcaaaaagacagtgtctaagctttgggctccagtaacttccagaaagatcatgaatccagagttaacagtggtgtagctccagatttctaggaagatgaagctgccgcttgctggagtcttggcagaacccatgaaatgtttagttcatcgggacaattaaaatagagcctggtaaatcagctgcccttttcagctagacaccatgggttccagaagtctatgcaaagaaaagcttaaattaatgaaaacattgctatgctcatgtttttctaccatgattaaagtctcctgggactaagatgttgttctttccctaaagagtctcctaatggtatagaggtgataggtccccagataggagactctgagaagttcagatggttaaaatcatttgatataaaaaatgagatgaggtcccaagggagcccagaggaggcagcagtgagctcagatcatcatgaccttccagacagtcacagaagccattgaggatctcagtggtttgcaaggaggaagccaaactccagacaagtggagggtggagcccca

SEQ ID NO: 26936 - DNA, 1149 bp, Mus musculus
taggcctctgttcccaatcactttcttttaatggatgcatggcaagagttctttctgtgtctttgagttctagttctagatatgagccacttagcagacagatgattcacaatcctgtggcatctctcattctgttatgagtgttttgtgatgggtgaagttcttgcttttgagggagtccaatgtgtttgtttctcccggttctatgacgtctctggtggcgtccagcacacacaggcctgtgagctctttcctctatgctctgattcctttggctttagtgcttacatgcatgtctttgatccactttgagagattttggtcgatgaagtaggtatatcttcaccttccttcttttgtaatgtggatatcaactattataaagattaccgttttccctatagcccagccttggtaaaaattgtttcaccctatacaagtaggtttttttttttttctggcctctatctataccattgatctctatgtttggcataagagttgaagcacactgttttggttatattcactttttaaaaataaacttttgaaacaagaaactgtgacacacaattcattcttgtcaagattgcttttgttgttcaaggtcttttggggctctatttgaacttcagggtagatttcttggtttctatctttcattaagggttttaaaattttttcttaaaaggtgtgtgtgtgtgtgtgtgtgtgtgtgtgtgtgtagtagtagtagtagtagtagtagtagtagtagtagtagtagcagcagcagcagtagtagtagtatatacaggtgcccacagaggtcagaacggtgcatcagaacccctggagcaggagttccagatggctgtgagctgcctgatgtgggtactgggaactgaacttaggtcttctgtaagagcagcaaacactctctctagtccctgcccctccattctcggttttctgagacaggactacgtactctgactggtcttgaacttgctatgcaagcaacactccccttgcatttacagcaatcctgtctctgactctagaatgggattttggtaggtatcagattcaatacacaattcccattggggaatattgagctctttatagcttaagatctttcaagcaataaacacagctccattccca

SEQ ID NO: 26937 - DNA, 1144 bp, Mus musculus
tttatacagctggtgtgaggtagttggactgggaactccaaaccccacactctgagctgtgacactgagctaccttcatatgaagatcatagctacctaatcgtcatgacagagatcgtcatgacagagatcacattatatatctttcaatgtgtaataataaatgattaaaatgattggagagctgaggatggtgggtggtgcacatttggaattccaggattcaggaggctgcagcaggaagatcatgaatttatccaccctgggctccatagtgataactttgtctcaagagtacaatgctgtggtttgaatgtgataggtctctgtcgctgtgtgtgtctgaacacttggtctctaactggggtgctgttgggtaagattgtggagcctcaccagagaaagtggatccatgggttaccagtgccctaggtacccactgcatagagtggtgttgaaacctcaggaaaagaggcttatttatagaactgataaacaagcttagtgtgatagctgttgggatcgataactaaagtgtaattccgtggctttggggaataatatacagcccctctccgtgggttaaagtgaagaaaagaatgtggacagagttggatgtgcaatgtgctcacagtctgggttgtgaaccacagcctttccaagaacagagtcaggaagtagggtccttgtggaatgacatgggaggtggtgagggaagcgggagtggcaggacccttctttttcttctacctgcctagattgattctaagttttctttcatggtcattgacttagttaccttcttcatctctgtgaccaaaatacctggcagcagcaactcaaggaaaggagggtgtattggctttgagtggttacatgctcagtggggtgtggggtgggcgtccatggtggaacacatggtaccaagaagcagagagaacacgttggaactgtgaacaggtatatcagacagtcaggacctgctggccttattccactaaccaggttccatcccaaagggtcctcaacttcctaaaacagagccaccagctgggaccaaacacatgaacctatggcgaccgttttccatttaaaccatggccatcatataacccaggggaaggtgaaattatatcactcttct

SEQ ID NO: 26938 - DNA, 2098 bp, Mus musculus
cgagggaccacagccagctattccaggttgctgggcatgagcaatggtcctcgcccttgtgcgcagctgttcctactgctgcactgcctcccgagctcctggttcagaaattatattttgatgagagaatattttccacatgtgtgccatttgtttagggagttgtatttttcctttcacagggaaaatggtccgtacagtttctactgcacatcctggctatttagatggtcactaagtatttctccaaattactaaaatattgaagaactaatgtagagttattgaagatattacctcctcccaggggaaaaatcctaatgaaatttaaaaattattattattttagcatattgtgaatttgaccctgaaagttttcttcctacagttcaaagctgaaggaaaaacttggttttctggctaacattcctttcttttttgcaggtatggcctcacaagtcttggtctacccaccgtatgtttatcaaactcagtcaagtgccttttgtagtgtgaagaaactcaaagtagagccaagcggttgtgttttccaggaaagaacctatcctcagatccatgtgaatggtagaaactttggcaattctcatccttccacgaaaggtagtgctttccagacaaagataccatttactaaacctcgaggacacagcttttcattgcaggcaggtgccattgttgtcaaagacactgccggtgctacaaaggtcctagcagctcaggcgcagcaggctggagtggaggcaccgcgggccgtggtgtggagaaacaggttacatttcctagaagggccccagcgatgcgggttaaagcgcaagagtgaggagttggagaatcacagcggcgcgatgcagattgttgatgaactgtccatacttcctgcaatgttgcaaaccaacatgggaaacccagtgacagttgtgacagcgaccacaggatcgaagcagaactgcaccagcggggaaggcgactatcagttagtgcagcatgaagtcctttgctctatgaaaaacacgtatgaagtcctggattttcttggtcgtggcacttttggccaggttgtcaaatgctggaagagagggacaaatgaaattgtagccattaaaattttgaagaatcacccttcgtatgcacgtcaagggcagatagaagtgagcatcttggcaaggctgagtacagagaacgctgatgagtataactttgtgcgagcctatgagtgcttccagcaccgtaaccacacctgcctagtctttgagatgctggagcagaacctgtatgacttcctgaaacagaataaattcagtcccctgcccctgaaggtgatccggcctgttcttcagcaagtggccactgcactgaagaaattaaaaagtcttggtttaattcatgctgacctcaaaccagagaatattatgttggtggatcctgttcgccagccgtacagggttaaagtgatagactttggatcggccagtcatgtatcaaagactgtttgctcaacgtatcttcaatctcgctactacaggtaggcagcaaataatttttggctacctaacaaacgctgagtttctgctaagtgaagtttgataagtgcatgtgatgagagagactgcttctttggttaaataaggaaatcaataaaatctctttaggtttgaggctataaaaggatgtgaaaaatccaggcataaaaaaattactttaaggccaatagaaatctccactagtttcatgctaagatagctgttcttttttagttttctgcgacaggatttctctgtgtatccctggctgtcctgaagctcactctttagtagatcaggttggcttcaaacctgcctgtctctgtctcccaggtgctaggactaaaggtgtgggccaccaccacctggagatgtctggttatttttattattaatgggagataggagagaatgatgtacaaataatatgaaacacgagtcttttaaatgttggaaagtatttttgaaagtagtttctgtatatttcttggagcgtttcagtgcttggaagaagtaatttttaatttttaaagttttattttttacatttatacatt

SEQ ID NO: 26939 - DNA, 1127 bp, Mus musculus
gagacagtgtcagttagtccaggttggtctcctgaatttgacacttaatgaagactgctctggggctccggactctcctgcccctaccttccaaatactgggattataggcatatactactaggtcaagtctcaatagtgttttgtttgttcatttcaatttatttattaagtgtgtgcctctgtgtgtgtttgcatgtgtgtctatgtgtatgtgtctatgtccatatgtatgtgactgtgtgtttgtctatgtgtatgtgtgtctttgtgtatgtgtctgtgtgtatatgtgcgtatgtgtttgtgtgtatatatatgtgtgtgtctatgtttatgtgtgtctgtatgtgtgtctttgtgtatgtgtatatgtgtatatgttcgtatgtgcttgcgtgtgtgtttctgtttgtctatgtgtatgtgtgtctgtatgtgtgtctataagtgtgtatctgtgtatgagggtctatgtgtatgtgtgcatgtgtgtgtctatgtctgtgtgttggtttgtgtgtgtatgtgtgtctctatgtgtgtgtgtgtatgtatgtctctatgtgtgtgtgtgtgtgtgtgtgtatgtgtgtgtctgtgtgtgtgtgcgtgcgtgtgtgtcattggacccacactgaggtcagaggacaatttaaaggagtcagttctctctctctatcatgtgggttcctgggactgaactcaggtgcttaagcttggcagcagagtccttacccagtctcccatctcaccagcccctaataatgatcttttagtgctaactaggaggatatatgtgaatcggttacttgttttaaaattaacttttctcctggaggtggtggcacatgcttttgatcccagcactcagaaggcagagacaggcagatctctgaattccaggccagcttgggtctacagagtgagttccaggaaagccagggctacatagtgagaccctgtcttgaacaacaacaacaaaataacttttcatctgtttaacatttttgtgtttttaatgtgtcagacactgcgctaaatgcattactaatcctaattgatttaatctccgttatagccataggaagtaagacgcttgatctaatttctctgttggatccaaag

SEQ ID NO: 26940 - DNA, 1957 bp, Mus musculus
tagtagcccaggttggccaggaactaagttgaagccaagggtaaccctgaagccctgacgcccctgcttgcacctctggggctgtgtgattacagggtttatttggtgttagtgatcccacacaggacccctgcagggtgggccagcacttttttttgtttgtttgttttcaagacagagcctcacaatcagctcaagatggcccaaaactcactgtcctcctgtctcagcctcccaagtaccaggattataggcagcatattttattttttcttgttattttattattaatgtgtgtttgtgggcacccatgctaccacatgctctgccatcagacaacgattatgtggagtctattcttcctttatgggggtcctggggctcaaactcagaacttttcagtcatcagtctttcaagagcctttactgaggcgtctcaccatctcctgtaactccactggacaccgttcaacaccctgttgcttgttctgtcactaatagtttcgtatctcaactgtgtgttgcaggtgacacccattctacggaatataagtaccagctaaagaggacacacacttgaagaaaaaggagacaatgaggtcttgtgaatgctctaatttttcaaagcttacttttaatgatggttcttaaacgctttaacctcccttctagtccaccacccaccaaaggtagtgaaaagaaaggtgattaggatacaggcgaagtgaacctgttcagacatggttctttggtgcacaacctagcaggaacatccaggtctcagtggaatcagctcaaatcagcatgaagaattaggaccattaggagttccaggagaagctctcagctctgcctctctggacaaatcgatgatcaggaaagacaaaagcgcgagaagcgttgcagagttagctgtacaagctagcctctctcacggtctgttgagtcctatttatactccctccaaacatcacatgtcctccatgggtcttgcctcaccgtgtgtcttacctcagcacatgaatctgtctcagctgatatcgctctgctaagcgaccaagtcggcagaagaggcaagaagccaccagccatcaccagaaggtttttggtgcatttctctctgtggagtgtcaacaaatgaagatcaactacacaatgtaaggtggaccaagtcatgcgtattgttagcaaagaatccatcatgtatcctttcacatgcttgctttgccaaaacatcctctcatttgtgtatgcttcagtgaagtttcttcccgtatctgccttattgaaacatctcttcacttgtctctgtttcaggaaaacactccttcctgtgtgtgccccagcaaagcacaattcaatgaaactgactttctaaagaaaccaaaagttggggctggagagatggctcagtggttaagagcactgactgctcttcaagatgtcctgagttcaattcccagcaaccacatggtggctcacaacgatccataatgagatccaatgcccccttctggtgtatctgaagacagctacagtgtactcacatacataaaataaataaaatcttgaaaaaagaaaaaagaaagaaagaagctagaagtttccacttgaattttgctgtgttaatgtcattttttaatttttgagactcactatgtagccaaggctggccttggactcttgatcctcctacttctgactccatagtactgatattacaggtttgtgccaccacatctggccatattggtttgattccttatcgattctaaggagacgtcaggcacacaagggtaaactgaccctaaaggctgtctttgaaacagtggagatgtctggactgtaggttccttctggtgctttgcttccttggtatagaaatagccttcgtgttttattttcagtgacagaaaggaagggcgggggtcatttgagcagactgaaccagaccata

SEQ ID NO: 26941 - DNA, 1281 bp, Mus musculus
cccataaatttattgttatgtcagtcacataaggccctaactttcctatttgattttctggccctacacatttaacccatcacacaatttgttttatctgagataacttcccaatttctagaaactgggtataaatctgttgaagtggccattctgagtggcagggttttttgtgaaatgattgttggggttttgtgcactttgtattcagaagctgaattgacctggcccgtgtgtcagtcagtggggtctgcaagggaaagagtggggatagaggggcaagagatgtgaagaatggagacaagacaggttatttcaagccgggcatggtggcgcacacctttaatcccagcccttgggaggcagaggcaggtggatttctgagttcgaggccagcctggtctacaaagtgagttccaggacagccagggctacacagagaaaccctgtctcgggggggggggggggaagacaggctatttcaagtctcgtttattgaaaggcaactatgggtgtataagcgcagctggggagtgccgctggagacacggaaccacaagtccaggatgtgcaggagaaaaacagggtgttaccagagtgtgtttagctgtggtgggctgcttgcaaaaacatgataggaagacaagtctcttgtcagggtggaacgtcagggtggaaaagtactaatctgtaagtaaataacccaagatggatgcagagatgatagccactttctgctaagagtcggctcccaacactgaattctgagaccctaaccagactgtaacctgacattggggcactgtatcaatgtactgtaagtaatgctccctgataatcccctgttggttggggcttgtgactgggcagaatggaggtcaggactgagagttgagtatgagctcttgagagagaagccggaggtaagagtcaccattacatgggatggaccataagaagcctgtggccaagagaagtgagtcctgaggaagggctggtggagcagaagcagcctgagacacaccaggttggcaggtgattggcatttgtgtgggttttacaagtggaagggttagaatagctcaatgtgcccagcataatgcctacaacttattaataaagtataatgtttttgtgttgtttacttgagaatgcatgggcaagaagtgaggtagaaactaccaatagatgctacggagtaaaagggggtgtaataatactccagaaaatgatagcatttaataaatggttgttacatcagctactgtatccacaaaatct

SEQ ID NO: 26942 - DNA, 1168 bp, Mus musculus
attattatacataagtacactgtagctgactttagacgtaccagaagagggtgtcagatctcagtatgggtggttgtgagtcaccatatggttgctgggatttgaactctaagcaagacttcaaaaagcaagttcacagtggaactacttactctttgttcacgtcctcctgtactttgtgcacacactgaaatctgaccatatccctagatcacaagatccaggaactcagacctaggctagaatgaaatgccttctttgatcattaacttgtcccaagcctgttcttttctcccaattatgtgcttgtaattcatgaaagctcctattccaacccatgcagccctcacgatcctacaagggaaggggcacattctactcttagttctaagttattatatctttttggcaaaacaacttaaaccatttccttaaattttctatcaactattcaacttcttaaagctatttaagtcatgaattccacaaagttattaattcatataaaatatgttatgaaagttcatcttcatattgatctgcagaaaaattgcccagtagagtgggtagtcgcccaagaagcaatcacaccagactgtggacagtgagggtctcctcacgcccattcacaccatgctagatacaggaggagcacagcaatgacaagcatgaggaggcacagtggcagcaagaagcaatccagagacagaaccccctcccccccccccccccccggggctgtgcctctgcaggaagctcacttgcctgatgcagttcctcctgcatggcaggagggccattgctctatccatacgggcttggtcagccattttaagggcagaaacgtaggggtgttggtataacatcagcagtgcctcctttcccccacccctgccccaaaacaaaccttacaaatttagaaactcaatccatgtaatgtctggttttggataacctgcgtagtctatggttcttttttgtttctctctctctctctctctctctctctctctctctctctctctctctctgtttttggagaccgggtttctctgtgtagccctgactatcctggaactcactctgtagaccaggctggcctcgaactcccaagcaccaccacactcggtatagtctgtgattctttttttttttttctttattagat

SEQ ID NO: 26943 - DNA, 1160 bp, Mus musculus
aacatatattttccaggacttccaaaccctcctgttcattgtactggaatagtctttgatgtagggaaactaacagcagagcgtcctgtcacctgtgttaaattgtatctcttttcacataggctggaattttaacttctattttgaaatctgatctataattcctggatgcacaatgaatctttgggaggtcaaacctcgcctttgcaagaccctctctaccgttcctgatggcaaaggaccgtaaactccagtagttgctatgtaacacttgagtttttcaggagagtgagaggtttgcctgtggccttttctagagcagcactgcctacagtactgcttagtgaacatctaatgcctagtggaggtttctttgctcagcatgctgccccttagctgagatggcttgtcatttctgctgccagaccccaaaggccctttcccaactgtaagaatattcccaccttggatatctcttttggatctgcatttctgaaccctgtggcagcttttgccaccttgcttatacaccctgggacgtgtaggccttctttctgcttgagatttaagaaaaccattgcccctagaaactgctcgctctgcttcccagtgcaaagtactgtatttctcaaagttaatggactggccattatgagatctgaggcttttggtttggtcacagtctctgcaaatgaccgtatttaccacagttgaagcacagggcattttgattattggagaccactagctagagcttgacctatcaacatgctgtacattagaaccaatatgggtcatatcccttatcagttcatcctcaggcactgcccatgtctttaatggtctactgtagcttttgtttatttttgctactttgtgtgggatctgtgtgggttctttctccaaacggtatcttctctggctaggagcagcttctccgactcaccctcctctccagccctactcagtcttctctcttctgcatcacctgtcttctgtgatctttctctttccctctactcccattctctctctccaatcctactcctgtctcctggactccttcccagcctttgctggctttttatatcctcttctgttcccagaagtacaggaggacaccaacactaacagccaagcagttctaacaggtaagcatt

SEQ ID NO: 26944 - DNA, 1201 bp, Mus musculus
acactgggttaaaatgaatatctgagttaggcttacatatttatttccggtgattgtcttattaaaagcaatatccttagcatttttacctgctgtttggctctgtggtaccaagtcatgggaatttctctcggggtcaaatgttccatttctgaaggtttagaagcctactttgtgaacagaagtgacctaataggcttattttatgtaacagcaatgctgttggcaagagaatcctgagatttcattttataagcagaggagaacaggacacagccatgttccagtcttatagcattgaccctgaacaccgtgtctttctaacatggagctgacacgcctatatatctttacctgtatcttgaattaaaatatacagagcatgtttgaacttctttttcatgaataaatctctcaaggataagcttattaagaaatacccatttctttattggttttgttgtttaaagcagggtctcacactctagcccaggctggtctagaactcaatattagtccattggctccaaattcatggcagcccacctgtctcagcctccaaaatgctgggatcatagacgtgagccaccatgcctagctttctgttcccttgtgaactgcagttgccctcggcctgttcatagctgagtcctgttgtaaaccatttcacaagtgaaggccaggtcctgtgagcttccctcaagaccctgctgctcagaggaattgcacctctcgtttattcttacagcataggaaatatcagcctcaggccgtagaggaaagtgggactattctatagccacacaccagtcctttctctataggaagctaaagaaatgtttagttggttagtgtttaccagggaatttgaaatgtatgatataggaaaacatttacgttgtagacaaagaggtgaagcacacgttgccataagctaggaaaatgttaagaaagattggattttcctacttatagagatctggagggtggggatgtggctcagtgctttacactggctagcatgtctgagaccctgggcttcctccacaaccctcatccctcaagcacacatagagagctggggtaatttcatgtaaaagttattctgtgttgatatttattactaccccagaaaactggttgccaaaggggcctccttgccattttgatataacctagttactacttgatctctaataaa

SEQ ID NO: 26945 - DNA, 1149 bp, Mus musculus
gaaaaatgtaaagtgggtggaggacctatttgaaaaatttggagaacttctaaatcatgtacaacagaaatgttcctaacatgtccacagaatcccacgtttttatagcactaatgaagtgtggaaggctagtgtcacagataatgcagccctctagcagaggcctcttgtagcattcccctgccgtggggaactgtgaccagacctttgctgccatggaaaccagtccttttatcctaatgaatggtttttctattttataaactgtggggtgactgtcaaatgataaagcatgcactaagtataattttattgctagagaaataacattgacgtgatctgacttttcccccatgacatgtcagaagtaaagagacagcagaaagcatttgtgtctggccacagtgcagaaagtattgtaagttgtggaaagtgatctggtgtgtggcatcctgtgtaaaaatgtcttcaatttagaacatgaagctcagcagctgcaccctgccctgtggactccttttgcatgtccgggaaatggtgtggagctgtgcaattctgtgactgctttttgtgtcgagttacattgtgatggaaaaaaaatgacatattattttccctgtttcaaagaaaagtatttttgtttatagtgtgtttttactttggaaatttttcaactgtacattttcttttactgatagttgtatttttcacaagaaaatgtggttttaattgttctttctgtgcttcattgttttcagtaagccctgtgtaggtacatgtcatttgcagcatagattctgtcttgaagtggacatttttgttcatacccttttgccatgttattactcagaagattcattcggtgctagaattagtttagctttataaatgggactgtgtgaaacactgcatttaatttcatatttcataaaataaatttcttaccaaactagcacttgatttataactgatttttcaacataaaaattattgccaggcatagtagtgcatgcctttaatcccagcacttgggaagcagaggcagtcagatctcttgagttcaggccaacctagtctacatagctccaggacagccagagcttcatactgagaccttgtccccctagtaccccccaccccaccccacaa

SEQ ID NO: 26946 - DNA, 1456 bp, Mus musculus
cttcatgcttcatggccaacactttactgactgagccatctcccacaccctgcctgggttgtctgtaaacaaagaatcagaattaaattagaagaaactgtgtcttcagtctaatttttaggctactgatatgaaaaacaatattaaaattgtcagaaagggaaaatttagtgtcccgtctcttattcatcctaggctttgagcctccagccccctctgtcactcgttttctgaacacaagagcaatgaaggaaactttcaagagttacatggaattgcttgttagcattgctctggatcctgacaccatgcaagccctagaaaagagcaacggtatggcctgctgagaagctcattcaaaactttttgtttaaataaattttctcactgttgtcacttttgttttattttgttgtttattcttggggtttttattgtttgttttagaacaatgtctcattgtatagacaaggctggtctggaactcacagatccccaggcctctgccttgtaagtgctggaactaaaggtatgcactaccacgcttggccttctttatttctataattaaaattattacagaactctagtgacatgtactaaatttttaatgcaaacatagcctttgcatatataaaatttcatttaaattcaatggcaagactgcaggattaaatgggattggggcatgactgtaatctcagcacttgagttgcagaggcatgtggatctctgtgtatgtcaccctgcttgacatttttttccctaatgcttgctgttacttatatacttattgtggtatatgtaatgtatgccaatactgtgctggtaaattaacagctatttaatatgttaccaaaaactattaatttgtttctgtcatattgttactctccccttttctaacgtaaccattgtgactcaatttttgacaataggtaacaattatttttcttcctctactttgtctttgcctcagattccagtgaattaagaatatctcacctaggtgttgtggtaaatacctttaatcacagcattcaggagtcagaggcaggtgtatctgagttctaggccagctagaattacatagtgagaccagtgtcaaacaaactcttttagtgggattaaagttaatgataaggtccttacataactaatatgtgcaagccctggctccatctccagtgcttgctagccagaaaaacaagtcttgttcatattcaataacttagaatgttaaaccagtttgtattttgtagcattacttttgttaaataataaatgagatttagaaaaattaatcatccttctagtggtcattgttttgttttagttaagatacagtgctaggcatggaggtgcatgcatttaatcacagcacttgagaggcagaagcaagtggatcaaagctaacctgatctatctaccatgttctgtaccagtcagaactggc

SEQ ID NO: 26947 - DNA, 1167 bp, Mus musculus
tttggggtttttgacttagcatgttttcacagttcatttgtgttaacagcacatgcgatactgtgtacatggaggttaaaggacaaattggggaagtcggctctccttccacagtgtgtgtcctgggtattgaactcaggtatcaggcttgcacccagtgcttttactggtgttgcttttttgctggacttgattgtgtttgtgacttgcatttacctgactaactgtgaatgcttactggacagttatatatcttctttgcaggaatgtctctttagtccttacttgctttggggtgcagtttctagacagggtttctctgtgtagtcctggctctcctagagctcatctgtagactaggctggtcttgaactcagagatcctacctctgcctcccacgtgctggcattaaaggcatgcgccaccactgctgggctgcagtactagcttattagtggttccttgtccttttgggattaaatttaggatttcttgatttttgtctctgggttgaatttgttttatgagacagagtctctgtagcccaaattagctttcaattctgtacagctcaagatggctttgaattcctgactcccctgcctctgcctgctcaggactgagatgattgtgtgcctcatttcaactggctgtattccgggctttaaactttattatatgcatgatttgaaaatattaatatagtattactattaatactatatggtgtctttctaaatgttttacattctgatggagcccaacttactgattctgttttttgtgcttttgttgtggttaaaatcaaatccaaggacatcaatgcttaaaattttaagagttttatatataattattattttcttcttaagactcttctttggtcctgttttatcttagaatatttaaaaaataacatttagagttggggtgtggcttagtagtaggagatttgtctgtcgtgcatgggaccatgtgttcagtcatcaatacagacaaataattccgtaatgctactactgatatcatcagtgagcctttaaatattgtgttcagcttacaatagtgggtacaagttttctagaattctaaattatacatggaatcagctacatcttatcattgataaatactgtcaggttttttgttttgttttggtttttggtt

SEQ ID NO: 26948 - DNA, 1550 bp, Mus musculus
caacagcatgatcaaataatgagtgcctcatctcagatacagattccaaatcctgctttagggcagagtcatcaggctcttcctcatacatcagtccttttagactctgcctgtgacttacagattcttcaacaggctggaattctccaggctagcctgggacaagcaaaggcatccttgcaagtacagcgtgttcagagtccgcaacagatagtccatcctttcctacagatggatggtcatatcatccagagcaacggtgaacatcctcaacagcagctccatcctcacaattctgatattatgaaactagacctccctgaaccttcaaaaccattgcaacagctaacaacaaagggccccttcagtgaagccaatccacatgactcaaagaatcagtttgtttctcttggatcaatatgcttctcagaggcaatgcttctcagtgatgaaagaaatattttatcaaatgtagatgacatcttagcagctacagcagcagcttgtggggttacaccttctgacttttccaagtcagctgcaaatgaaaccatgcaagatattgaaagtagtgattctaagtctcattatcagcagtcattaaatgtcaggcatgtgaattcagattttaactccatagcagcttcagtaggaaagccacagagtattaatgatatttccttaaatggaaatcaggttagtgtgagtctttcatcagtgcccacccttcagtcagaaacagttcttgatcaaccgcatatggaaacacctagtcaaactataccaactaaagtaccttctgccatggttggactgggtcaggaaatccaggaacaaagttctgacccattcaagaaacagttgactataaaccatgagtctaaagaagacagggaaattgctgttgacagtgcactgagtaataacagaaatcaagagtttgtctctaatagtcggagcataagtggagacagtgtagtatcagagcgtgactttaccctagtaggtgatgacactggtgtgttggtgaaccctagaaggagtacacttgcactgctggccatgccccagccaggggatgcagccagtggcaagactgaagatgaaaaacaagatgtaacatattttaaccttccaaaggaaaaagctaaaggaaaagaacaaggtaaagaggaagaagataatcaaaaacagctgaaaaggtctgctcaatgcaagcgacagaaccccagagggacagatgtgtatgtaccatacacttccccttccttggaaagctgcgatgaaggttttcagcatcaagaaaagatgaggcagaaaatcaaggaagtggaggaaaagcagccagaggtcaaaacaggatttattgcttcttttttagacttcctgaagtgtgggcccaagcagcagttctccactcttgctgttcgagtacctaacagaaccagacgatcaggaatccaaaccacccgtacgttctgtcccccaccttttgcaaagacatcacctgcagcacaagcaccatctgaaacaggaggggtcagtctgtc

SEQ ID NO: 26949 - DNA, 1132 bp, Mus musculus
ccttgccaaccactgggacacttccaccaccaactttgtctgcctatcagcattcatctacctttagcaatagaaactttgcgaccacctcacctttggtgcttcaagattcatcttttaacactacatccaatggaattttaagccctcatgaccctttgctacaaattaagacttcccagggaactgttccgactgctttggcatttgagcgcctgggcagttctgcattaagtaacagcgtaccacctcagtcttcaacatatcgctcagctcaagagtcagcaccccatcttttacaacctcaatttagtttgttgccttcaacacttgggggagcccagcaaacccctcaagcctataattcagctctttttcctagttctgctgcttccattgaaagagcccttcttcgagaatgtagcgttattaaacaccaccagcggccttcagttacccagtctattcaggcacaactgactggttcacagcatcccttacatagctacctatcaagtgcaagtattggtaattttcaggaaccatccaggcagtcgtctttatcctgtagttcagttcgagattctactcaggtgagcaatggagtattgccgcagaagacccctcaggtctcagcagaacttgctcagtcttactcatctgtaattccatcatcagggtatcttccttctgctacaaaagtagacagctgttctacaaaacaaccactaacatcaactacaattccgaagcctcaaagtgtaattcctcctgtgcaaacactaaactattctaaacctttacataaccagagttctgtaatatcaggtcaagcacaaatttattctacagcacagctaccaagccttttatcagtcagtcagtcccaaaattatggtttagtacagccacataatgtgccatctattgttcattcacaggtttataggtccagcagggttgagaaattgccatccttatataaaacattgactttttctgggtcatctcagcctgtaacctctgaaaaccagacacttagttattcatccaatcagcaagaagtattatccttagttacaaatgagaattatcctgctcaaacaagagacctgccatcagtcagtgagtc

SEQ ID NO: 26950 - DNA, 4259 bp, Mus musculus
ttttttggtttttgttttttttttgtttttggttttttaattactattcatggactaaggggatgcttcacttggagagtgctggtcatacaaatagaaggacctgagttcaatcctcaatacccatgtttgaaacaaaccaaccaacaacaacaaacaaaatgaacaaacaaacaaacaaacaaaacaactttgagtacttgggtgcacacctgtaatctcagcactgtggggaggactcaggaggacccctgagcctggtggctagccacaggaactgaaccaggaacctctaaattcagtctcaaaatttaagataggtgggtgaatgcctttaatcccggcactcgatacgcagagatctctctgtgagttcaaggtcagcctattctacattttaagttctgggacagctacaaagcctgcctgagaaaaaacaaacaaacaaacaaacaaaaagcaaaaaacaaggcttcgaggtaggggtatatgtctttaatcacagcactcagaagacagaggcagaaggatctctgagttcgaagccaccttggtttatatagctagttccaggacacccagggctacacaaagaaaccctgtctcaaataccatttaaaaaaattaaggtggagagcagttgaagaagataccaatgtcaacttctggcctctacatgcacaagcttgcatgcatgagcatacatgcacatacaatattgagctagaagtttagtaatagaatggtagaggcaagtggttgaacatttacttcatgtccatgaggccctggctttgaggtcctcagcagtaccaaccagaaagcctttgcatcttagatgcatgggtaggctttgttttttttttctcattctgtttgttggtgtgtgtgtgtgtgtgtgagtgtgtgtgtgtgtgtgtgtgtctgtgtgctcatgcgtgagcatgctggagatagaagcaaagcatcatatgtgctaagcacatgctgtacaattaagccaaactctgtctcccttgattctccgagtacattttaacacacagaaaacacatcatagtcttatcagatacttgtcataatcatataaatggccagttcttccctaataatgtagaagagctcagtgaaaaaccccatgctcagcatacgtgcaagaacctgggtcagacccccagcaccaaaacaaaacaaaaacgtagcagagtgtgacgcgcaagtgtggggcacatactcactaacatatatgcttgtatatttgaggtccattgcttgttagcagtcgaggaaccatacatgctgaggtcaaggaagcacacactcttgaagactcaactgaaaaaaatattgggatttctttgtctgtttctgccagacgtttccctattctttaagatcctttataaattggtactgtgttttatgtttatagagtgagattgcaatcctgcttgcatttgatgatttcgtccaaattaagtatctagaaagttacattgtatggcagtatttgtggatgtgagggtatgagtcttttatggcattgtagtctgttggacctggtataacataccagcagtctcaacacttaggaggcagaggcacgaggatcacaagtttggagccagcctgggctacatacttagttcaagggtcatctggaataattggtgagttcctgtctcagataaaacaaagcacagacagcactatctttacgaaggcataaaaggaagacattagttgttagagactgggaaagctttatccttttacattttcagacttgttggctgcttgtcacaaataggtcatctaccaacacttctatgtaactagaagcatttttaagtcacccatattgcccctcaagttctgttgttctccaccgcatcgtttccactataactataggctttgcatgtatttcaattctctttttaaaaggttactagaaccgactgcttgctttgtaataatcagagttacaccatgacttgcctgaactcccccaggtttgtaaaagctgggtttgccgtgagtgagcccaggtcccacccatctcacacagaattatacttaggacaagtagagatataaaaagatgggagaaatagagagatttttctgtggttgaaagcacatgctgctcttccaagggaccctttgtacccaagctctcacattgggctcctccaaccacctacaactccatctccaggggatccaatgccttcttctggtctttgcaggcacctgcattcatgtggcatacactcacacagacgtgcactcgcgtgcacacacacacacacacacacacacacacacacatataaattaaaaacatagtttttaaatttttattttgttttattttagttttttaaagcagtgtttttccatgcagccctggctgtcctagaactcactatataaaccaggttagcctcaaactcagagatccatctgtcttgcctcccaagtgctggcattaaaggtatgcacacctggcacatatatgtatgtgtgtgtatgtgtatatatataaaatttagtttgtcttcttttacatttacagtgctggggatcagagctagggccttgctcatggtaggaaagagctctacccctgggctacacacacttccataccccatatcttttaccaaatcctaatttgaaatgttgtattgactctctgagtctaagcacaaagttagcttcaggacctgtgacaacctcacattgtcccactagtaaccttaccttggtcatctaccctaacttgaaggaatctcaaatccaccactaaaactgtgaagtcactggctggtcttcctacagcaccagtattggtgtcacgatactttgaacacaaaaagaaaactataatagaaccattgttaccaagcacctggtaactgaaggggaatttctcagtgtgaagccactgacatggattctgttttgctaacctttttcttacctgtggtgttttgggtgctgagttgtttcacgtgatttctgtagggctttttagtatgttgttttgtttttgcttctccgggggatgggtggatgctaaacattaaatctgttctcatgtaggttttatacatgactagaccaggttttctttccgtttcgattgggaaatgaatggaatgtggctcaaagaagatttgaaagaaaaaaaaaaggcacggttataaaagtctgcatttggtaggacaaaatggctgtgggagttttgcatctgttaataatatgctcctgaggaaggagagtgggagggacgcactaagaacaattcacagctgtagagaaacatggtcttctgtttgtcgccagacttttttctttcgtgtgaaaaaggtggtggtgggcatcaaacccaaggccttgcccctgccagatgctcaccgagcagtgatttgtgttaacagtctcttcctcttgcattagtctccaaatttctaaccagattttttttttggtttctcagatcatttatttgtgtatactcctcctaagtgaacaagagaattttaatgctaaaagatttacttgtgcttagcaaaagctcatattattcataacattttgttttaatttaatgtgacttaaattttactgtttgtttgatctgaaatgttatgtatgacacatatgctattagaggaatttagtctagtatttacatcatttttttttaaagattagggctggtgagatggctcagtgggtaggagcatccgactgctcttctgaaggtctggagttcaaattctagcaaccacatagtggctcacaaccatccataacgagatctgactccctcttctggagtgtctgaagacagctagagtgtacttacatataataaataaataaataaatttttaaaaaaagattagattgttggagacaggcatgataacatatacccagaataccaggaaactgagacagattcaagaccagccttagctacagaataagaccctgtctcaaaaacaagaaaggaaggaaggaaggaaggaaggaaggaagggagggaggaagagagggaggaagagagggagggaggaagggggtgggagagggaaagaaagaaacaaagaaaaccaaagccaaacaaacaaacgattatattgggttgaacagtggtaaaatgcacacttagtttacacaggcacctgggtttgatccccaacaccaagtgaaaaagtttaataacgtgctgaagagctagc

SEQ ID NO: 26951 - DNA, 1099 bp, Mus musculus
catatgaagggtaatattccatgacatgaacattatatggaatccaagtttgagcatatgagaacttgttggtgtacatctattggtgttcgtgtgcacattctcaagctaggttggccaggaactgaatggatagaacagagacccattagcttgccaaacatttaaaaacatttactctctcagcctttgcaagaagctgcctattccattcagaatggtctgctttttaagaggattttattgttgttgttgttgtttatgtgtgtgtgggtattttgcctgcatgtatgtctgtgtaccatgtgcctgtctaaattttaaagagtgatgctagttagctaagcccttatatgacatatgccatactatacagtttaaatggagtacttgatttttagtaaaaagacttgtagttgtactagattaaaatatactgtggtttctaagactagaaggcatagtgtgcctggaatggagaatagataaactatagtggtacgtgggtttcttaatgctttcctttggatttttataattatagatagcactgtgttttagactctgtgtgtgtgtgtgtgtgtgtgtgtatacatacacaaacacatatatacacatatgcattcacacatacatacatacatacatacatacatacatacatacatacatacatacatacatgtttgacaatccaggttatctggcttggcagcaaatgccttaaacctgaaccacctcacatggctatgtttaacatttcgcatacatatataatatacatacatcattgaacttaaggcaaacacaattcctactgtgtttcttaggttgagtgtagttaggaagggaagaaatctctagaaaaagaaaaggggaaaccccagtgtttctcagcttagcaacagtgtctgaactagctgaaagtccatccattaaagggagtaagaaagggcaaaggtaaatgctgggcttggttgcttagtttttggaggtactggggctagaatccagagcctttcacacagttggcaagtactttaccattgagctacatccccagccaggataagcatgtgagcctccaaagtgaatgaat

SEQ ID NO: 26952 - DNA, 2180 bp, Mus musculus
tatctttttatattggtatctcccaaaatgcttgtctcaaatggttctcaagttattagcaaatgaatagactattgtccggatgatgactgtgattttagtagtgctatttatatatacatttgacagctataaaattttcacttactgggggaaaaaaacctcttcaactttgccaagtcagattgatgtatctttagtccccatccctcccagtggagaccgcttaaatgaaataagtaaagcatttgctatagactggaagtccagtggatacaggtggcaggaaactgaatatgatctttgtgaactatgtgtctgcgtggactttgtagagggagggagggaatcaacacaattggagggtagttagttagcacttgcatgttactttggaagcagggcagatgagtttgatatttgtgttttatcataacttgatttttacaagtggatctagagatttagcaaccctgtttgattcataggctgctgaacttcgagcttatctgaaatcaaaaggagctgagctctcagaagaaaactcggaaggtggacttcatgtagatttagctcagattattgaagcctgtgatgtgtgtctgaaggaagatgataaaggtttgttttaattcattctacaaaatatttcttacaagttctctaccttaaagtttttcttgtcagttatatgctttggtttgagacttaagatttttaagcaatgtagaagggaaagaatacaatcaaaaataattatgaagatatttttcaattaaatattttcagttagttttaaatgtaatattttcatataatttcagggtttttttctgttagacctataaagtaagccgttctgggggaaccttttaaaaaaacggaaaaagtgtgtgtgtttgtacatatacttgatgttgatggttttaaaatgaactgaagcgtttggatggacatcaaagagggtgttatttcaagtaatatttaatttaatatttaattgttcagctgctgcccattgagatacagcttctcaatagtcagtatagtttctgtactgtgaactctgaaatatttgttaaagtttaaatattaaatttttagagcgattaatatctctaatacttgaaaatgagttaagcagcaggaatataacagccattcacttctaaataattctctacatgaggtacaaagttttcttcagttgttgagacctcctgacctaaaatccagctagtaatttcaagatgattgtgtattatgccaatggaaatcataaagaaaacgtggatgtgtaaatgctggcgctacagtggtgctggtgaggtgagagttcatggatgctgtagtcttaaagctctccctgaaatcaaggtgttctctaactttcacagtaggcaagctatgtattttaagcatctttgtattgaaatactagaaatgtgtgccagattggacgcgctgaaggttgtgtctgctgactgtgctcttgatgcctatgtagatgttgaaagtgtgatgaacagtgtggtgtccctcctgttgatcctggaaccagacaagcaagaagcattgattgaaagtctgtgtgaaaagctggtcaagtttcgggaaggcgaacgcccatctctgagactacagttgtaagttttagactgcaagacctaggtggagaaatggctctgcagagtgcctgagtttagttcccaacactcgtgtcagatggctcagcttcccctaactccagctcttggagatccagtacttctggtctctgctggcacctgtgcacctacacacacacacacatatacaaaattttaaataataaaagtacattttttttttaaagatacagcattcagagggatgtttgtatggtataaattatgattgttagaagcaggaattctggaattggactgtcagcagctttctgtcttgggcagtcactcaacctttctgtgccccagttccctctttagatgaagttattattagtgctgccttgtatttgtggtgagagcaaataacctcaattagtactttggttgtttgttaaccaggctcagcaaccttttccatgggatggacaagaatactcctgtgaggtacacagtgtactgcagcctcatcaaagtggcggcatcatgtggggccatccagtacatcccaac

SEQ ID NO: 26953 - DNA, 1187 bp, Mus musculus
cgttatgggctttttgtgtctgggacctagctctccctctgggcatttagtgcctttctgttgagtaaatgaacataaaatattacttgacagggcttgaatactggatattcaaataattcatgtattgagtactttaaaaatatttaatcatctgagtgcattaaaaatgtttccccaacgctttctaaaaaattactactttcactattaacaggatttcagaaccaaccagccctgcacagacagacatagtaatcacctccaaacccagatttgtgagacttaaccatatttgtagagatgtagaatagactctggtctttcttatttttgccgtgtgcctttttaagggaatccagcgaagggtgtttgctaattacactaagttactccttaatccttctgaccctgagtggactccagaaataacaggcctgacatcatggaaagtcgtactgtgcccgcacaatccctctctctcctttcttcactcagcctctttgctgcatttgaaaagcatttgagtctggttgcccagctaaacgattcactctgctcatgtgatgccatcttctcagactgccttagctttagatatatattctccagaccattgtctaaaccctcaccctaccctacctaacctacccttccctgtagagcttatcaaaccctttcctagtgccctctggcctttaaagggacaaagtcaatcagtcatttgaaaagtgttaagtctttgatttgctttttcatccactcaaggtcatgtatgtaaactaatttcttcagatctctcttcacccaagtcttgctttttccctcaaaatatagttttatgacttcactagtgtgacatgttcattttcaaaaactaaataaggtatagaaaagtataaagagaaaagttattttttgtcattaagctagagtcatctgggaagagggaacctcaactgagaaaaaatctccatcagattaattagcctggaggcaagtcctcgggttttgttttgtttttggtcttttccttttttttttgtttttgattaatgattgatgaggactcggcctactgtgggtggtatcaatcacaggcaagcaaccctgagttgtgggaaaaaaaaatttaaaaaaagcaaaccgagcaagccatgagcaacccagtcaacagtgtcctccaa

SEQ ID NO: 26954 - DNA, 2010 bp, Mus musculus
gcacttggctgtcaggcgtcaggctttgggttcagtccctagtactgtagtaataataatttgttacaattcaaatgaggaaataaataagattgagaaaaaaatgcctgcctcacctgactttaatggccctaaactctgagctctgcagacctacatgtgacacagtgaggctgtgagaggggagtgggggctgggctgttttgagaacacccacattgcttgtagagtctgtctcctgagttcccaggtcctccctgcagtgctccagcacagcttccacaggcagccggatttcattctggggtggagctttgcactgtagtcacaggagatgagaaaggaacactgctggacgtttagatgtagagtttgaaacccctcagattggtgaaacgaagtggacagtgcgctgacccgcgggagcccccagccacccctgacggctcttctgtttccctcaggacgagatgctgaccaaggaggagattctggacaactggaacatgtttgtgggaagccaagctaccaactacggggaagacctgaccaaaaatcatgatgaactttgaaagacactggttctggtgtggccaactgtcgcaggctgtctgcaggtgtagtgggtgattgctatagttgtcaagggtatagcagttgtgtcccttaacagtgggattatacctcagattggggttaaaaattatttttcactccatatttactgggaaataaccatcattatttattccagtaggatttcccgtgaagcacattaaactcctggcaaattgcagtcctctgaggggatacattgctacagcatgatttttctagactcctctcccccacttaactcattaatggggaagagaccatgaaagggctctgtaactcaaggtgggtgggtgggacactgtacagagtaaccgctgtgtatttgaactattaaattttggggtttttagttgccactgttaaacggtggtgaaggtaaaggctgaaggaatcaatttgtattgtccttggagcaggcatggtatttcaaatcttctatacttggagctgtcttgtaaatggtatataaacttttgtgcgttttcctgtatagacctgctaatgtgcacaataaacccacatcctggggtttttgttttgtttttaacactaagaagcaatcaaaaaaagataatgtgaacaaaaacggaattttagggataggaaaaagatggatgctaggtatttgaaaaactgtatgaccatggtcaacaccttaatatacttgagaattttttttacatgttaatgaggtgggtctgtttttttaaatagtgaatggaaatgcagtccctccctggctgtgaggctagggatcagatgtagtggatttattatttgttgagtcctgaatctctgagcctgcttctagcacagcttatgccaaggaaacagggcaaggtgaacatctcagccattgaccaaactagctggagtaacacttacaggtgaaattccaccctgtagatgggaggaaagtgaataaaggatgcctttgaggatctatccatgtgtcttgtggtgtttgactccatagcaagtgtggtttcttcctctggaatcaaacaatcaaaagagtccgtggtccagatcggaatggactcagtaattactgacaagttcagaatacatgtgtagttgctgatttcatccctctggacttcacgcccttctctgcagttagagaactcaaagtcgtgttttcacagtagtcctgagacatttaactggaaaattcaggtcttagcattgcctgtggagcctgcctaacaggatgtggctctgcttcccttctgagaactgcctacctctttactcactcttcttttgtctccacctcttcccacccctttacctcgtcctccaccctcactgactttgttgctaagatgaactccttgggtgagatagaaacaatgtcctaatgagaaaccaaagtacagtgacactgag

SEQ ID NO: 26955 - DNA, 1165 bp, Mus musculus
ccgagtataagatagtaggatttaaaaacaaacagctcccttatcttctgattaacatagaatttcctgttgttgcactgtacccaaagctaaagagtatgtgctcaacacagttatacctaatagatcttcctgccaggtctcatcaggtggtcatggcgatctccagagtcctgagctgagaagaattcagagttcctatctgggtttcagaatgtagaggcgtggtactttagtgatctctgccactggccatggtttcccagaggagaaggcatatcatctttggaaggaagattggctgaatctgtcttagaattttataatgtttaagactgcaaattgctggacatgttgctgggccaagacaagtcttgattgtggccttgagggacttattgtttcattttattattattttaactacaggaaaattgtggatcgaattgacagtgatggtgatggccttgttactactgaggagctgaaactttggatcaaacgggtacagaaaagatacatctatgataatgtcgctaaagtctggaaggattatgatagggacaaagacgaaaagatctcctgggaagaatacaagcaggccacctatggctactacctgggtaagaggccatggtggagattgcactgtggagaacaaggtcactggagactcatcatggccacctccttcacccagctgtcacaaccttccgagtaaaacccattgtgcaacattctcctccacctacgaagaatgtgccaagttgcttttcctgactgacataggggaaggcatcttaggtcagggccctgcttgaacttagctctcagaagtacacacagagaagagaaaaaaaaatgcttctgacagtttctaattgctgctgaagttgggtggtaaggatgaaacaggcccaaaacatcatcaggaaacaaaattcaatgaagggcttcactggggaagagagtggaaactgggccttgaagcatggatttccatttggagagactgaaagaatgtggggaggggggccgaggcacagaaatacatacatggtgggtggggcttgggttagtcattagagaacggagggaggggtgtgctgcagaccctccaagtgcctggtggacagcagggagacaggcttggggagaaaggaag

SEQ ID NO: 26956 - DNA, 1178 bp, Mus musculus
ttttaaaaaaagcttttaaaaaataattcaaagtgtttgaaagtatcatcattatttgtagttttagggctacaaatgtaatttttaagaaaaaaaaaagctctctacagtaagttctcgtaccattgaaggtatatttttgtgttatagacccatgcagatgcaaaagtccaggtgctggacaatgaaaacgtaagcttgtcattgtttaatgcatacttaaacaattttatttttgtcttgaaattattaataatgtggttttctgtccaattccctaatgcaggtatccaacggttgtgtgagtaaaattctgggcaggtattacgagactggctccatcagacccagggcaatcggagggagtaagccaagagtggcgactccagaagttgtaagcaaaatagcccagtataaacgggagtgcccttccatctttgcttgggaaatccgagacagattattatccgagggggtctgtaccaacgataacatacccagtgtaagtttattgtgaacatcgtgtgtctaccttgccccaaggcccatctctggcgcgtctttatctcctcctgctcttttctctccccaggccttgccatctctctccctctcttccctgatttgtctccagggtacctgggggtatggagaggtgggctttgactttttgaccatctggaaaatgggggtgaagtgtgaggagtagttcccttcatttggataccacagaccaggggtcaaaggaactagggaaaggcacttggaaatgaaaatgaaaaccagattctaaattcccctcaaagcattttcctgaagcttctttcaggcaacatgcatccatttctgctctccgataaagtagatctctaaagtaagtcttttatcactgagtcttggatcaaagcggagcagcccagtgagcggttattcgtgatatctacagaggtgaaggactgctccctcctttacacccaacttcatttccaggaacaaaatgatagctgccattctttccacaaaataagttaaaaatccacagactgttccaggatggctgggagcttttgcatgtgtagtggggtcattctttaaagcttgggagagctgagatggggacctaagatggggtgactacgtgtctttcggagacactaccatttggtttgatttgcagg

SEQ ID NO: 26957 - DNA, 1152 bp, Mus musculus
ttaaagtgaattacacactgtagctcattaggaaaaaagaaaacaacttgcatttttgtaagagaagtcctaataagatattaacttgaatgtcaaaagtcatttagtttatccctattgatagtatcatcaggactgttcaaaggttccaagaattgggattttcataaacataagatttttttaaataaaaggattttttttaattaggtattttcttcatttacatttccagtgctatcccaaaagccccccataccctcccccccactccctagatttataattttgagtgacattttcctgaattagcagaagaagagcattgcttagatcatttttccagaaaacaaccttcctcccttgtcaggtgtatatgctgctttgcttagcgagttccttggttactgctacagtcatcacgacttaccaaataataatacatactgagtggtgtgttctgctgtgaaaataattgcagaaatagcaaaagcatctcttactgagcatgctgtgttttccatgctacttcattgcattgggaaaactgcctcatcccaccatgaaccttaaaaccaaccttcccaagaactctgtcttcagttgtccaacagctttgaatacatttagaattatacaacaaatatatttgtaggaattctttggatatctttttaaagtgtatttgttagtttttgagtcattaattccaagaattaattcttttacaaatgagacgaacagcaatatattcatagtgtactcccttacctctttagcatagttccagtatcttaaaagttaattttaatgactcaccgtttgaagtatatattcatgatattagcctagttcaaatacttaaaagaacacattctaatattgatgaaaatatattttttttatttttcctttttatttgaattagcaaaaattaattttatatttaaccatttctagactttggctataactttttctaaaaaataattagaattcttcttagttcctatgagacttaactcaatttgaaagtagaacttttagcattctctgtacacatgacatggtcttgtctattgagttaatttactagcaagtgttaaatacaatattgtggtgtttattcacagctgtattgagtgcctcctg

SEQ ID NO: 26958 - DNA, 1142 bp, Mus musculus
gagagtgatggaaagttggagacgctggggcatgtgggatagaaacagggcttctgggtactgatgaaggccgctgagaagtcagaatggaagcagccccagcacttcttactaaagccttcggcaggctcccggagcctccaagctgctgctgttccgagtcttagcagcttagagtgcttggaagcatgaaagccagttggaattttccagtaaaatagcatttttgtttagtaggttattctacacttgcttgcttttctttgataaaatgtcattttcaacttgaaattaaatgtgctttcatttagggtttttctttggcccaagtgtcagaaacctaatgagcaaatcactagatctgaatgtcagctaattggtatcaaaacagtttttaactatatttttaaattaaaaggtagaattgtttactttttctaatttaaggaaatgttttgcagggctaaactctagttttatctgaatccttagaatcctttggttttagtcatttttttattgtctctttttgttcctttgtgtgagttagggctgcacattgcttggactcttgagagaaaacttttatttgttttctatcattctgtttccttgctgcagggccttgcactgtagcccaggctggccctggacctctgcaggcttcgcaccacagccttttcacgctgggcaacatgcatgtgttaccaggctgctaaatttaaagtttgggccatttatttttacttacaatgggagtatatttctagtggggaaaaggctttgtataaaaatggctatattaattattccttcaaacgtatctgttctttttgtaaagagaataacgttttccaaggggaagagtctcaacagttgctgtgtgttctttgtatgtattcggagaccaaacataccgtagagtttatagacaaaagtatatctgatcttgagtaaactaataaagactgtattttagaaataaacaatgcaggcttactgtttaatttttaagtatgtatgtgagagagagagagatcttaagtacactaataaagacttttagaaataataatgcagacttactgtttattatttttaagtgtgtgtgattttgagtaaactaatgaggacagaatttt

SEQ ID NO: 26959 - DNA, 1580 bp, Mus musculus
cagtactgtattttaaaaatccctcaagcaaggtatggtggcacgcatctctactcccaggcagaggcagatggatggctgtcagctcgagttcagcctgctttccagaacagccagggctatatagggagaccctgtctcaaaaatcaaaaaataaaaaattaacttaaaaataaatttaaaaatcccttgatatgttgctggtatagtctctgaagcttgcctctgaaaacgttgagctttgagaccaggagttcgagactgaacaggctctttctattatatcattagctcatgagatgtctgttgcatattactttgaatacaaatatcttacatatcaaaaatggatctcatgttaaatggatttggaagtactataccccttctttctacttctgcacttaacatagcttaatgtgctctgctttgttttgttatatcttcctgctaaagtaagaattgaacagagctaatgtcatctttaatattagaaaataagtggactaagacattatagaattaaataattttcaaatgttaaataattgtattgactgataaatttatagcctctgaaaaatgagaaaaaattgtgaacaggacagatgaagtataaatttaaaactacatggttaattttgctctgaaatcctataggtggttttcacctgttatactaaatcatacactataatttgtttagttagaaatagtaaactgtttgcaagtcactagtaattctcaaaaaaatattgttggccatagtgaataatttttaaattagaactaagtgtgtacctatttttggcacttatttttcagataattaagctcaatcaagtatattttaaggatctataaaagtaacaggaaagggtttcagcacctgcatcctcagtgcttggggcagctgtagccgaaagcaaagacccacaggaaatgcagagtctgaggatctttgataagtagacaagcttttgaagttctgggttagaatctggctggcagaatctttggaaaagttttatatacagatatttgtattattaaatttggagccatagtcagaagactcagatcataattggcttatttttctatttccttaactactgtaatttccacttttataataattttgatttgaaaaataaatttatttatatttttaacagtcaaaatctttgctgttgtagtctgcagcctttaatgattgtgttgcttttatgattgaaagaagcactccacaaattgaagagagcgtgatgcagcgaggtgtaagtcgtggttagtgacatgtatggctcctgtgctcatcgctgtctctgctggcatctggctccgctggcatctggctgcatccataaggacattcgttccaaatgaaaatttgcttttctggcagttttcataatggaaaaaaaatctcctttgtctgagtatagaagttttaagatgtatcatgggtatcggtgcttgtataacacacaatgaattgtaactagcatgttgttaagaaaacacattgttagtttttttcagcttgctttcttatagaaaacaaaactaccagccca

SEQ ID NO: 26960 - DNA, 1158 bp, Mus musculus
agtataatgatctctagtttcatcttcattgttgcatatataactggattttgcttcttttatataactaagtagcattcatgatatgtatgtacattttatttatattatttttgtttttatgcctactgtatttgaattatctttcatgttaaataaatctttgaaagaatgtcatgttctacttttcttttactcataaatttaagaaacttttagaaaaaaaagaatgaaatacctagtctgacaaaagaatatttctaatttgtaaatatatatgttcttatagtataatggtaatcaagtacttgatactttgtgtatttattttgggtatgtcatctgatgatagaatgtgttcactaatacaatcgaagtatctttatctcctggattttttcacaggacacagatccaagctctgttgggccagttcagccaagcggaggcattgctaatgaaagctggagtgcagccaggaacgattgatggaatccttatggacctggggtgttcttccatgcaacttgatgctcctgaacgaggtttctcccttcggaaagatggccccttggacatgaggatggatggagacaggttagcattgaaaagacattgcttcttaccacaagaaaatcaatttcttaaatcttcgattgtaattcccttgaagactgaaatattgccagcacactcccacatccaaaactgcccatgcatagtaactcagctgtgtttggtactctttatagtcttcagtatttctttagctttgaaattctaaacagaaaatatttgctgttttttttttagtgagatattcagaatgagggaaatacacttttaggtaatttttttcactaattacaacatggctttttagtagtaatgtagaaaaaatagatgctgaaacaatacttcatttttgtgcttgcatacacacatctctttgaagacagaagcttatttaattgataatattttataatgctgccaaaaatagggtaggagctcagtggtcaccagttatatttctgtcctatttcttctgcagtcacctagtagaacctttcacagaagatctgcaatatatgacaccacaccataccttactatatatccatacatatctgtacagaattatcatcatgactcctc

SEQ ID NO: 26961 - DNA, 1189 bp, Mus musculus
ttagagtaattattttaaaattattaggaagatttttcttaagagggcaagtgaccattgaaaaagcaacatgcaattaattcaatatatgtatctatcagacattattcatctagaaatagattccctaaatgtatctcaaatctctgtacagttttgtcacgtaccattttaacattcactttggaaaagtaagcccatttcagtttttactagaaaaaaaagagaaaaggcaagatgctttatattcagtgttgaaaattgaaacatgcacgtgatatactgctatttcataaagtcacttttgtttctgggagtttgtttcattgatgttgttttttggttgtttgtttgagaaatacaatcttgctttgccctcggtcacaggcacatgttgcccgccacccttgttttcagacaaacttaacatgtcaccttgatagctgtttggttgtaaagtttgtacttcgagatgtcaggtttagaattgtatttccttgtgtgtacatgtgaatgcacactgacatcagagtgatgtcactctagagccagtgactctaaggattgccctcaggcctggaggcggccatctttccttatctggtaaaccatgctgcagatgggattttcaaatattcactggatagtaaagataagttcacatcatgtcagatacgttatatcattgggcattgcgtacattctcctactgaaatagtactcacttcttatttatatgtggaaatgaaataagtattcttttgttctttcagagaagaaatcagcatattccttacagaaatagtaagcttactcgtttgctgaaggattctcttggaggaaactgtcaaactataatgatagctgctgttagtccttcctctttattttatgatgacacatataacactcttaagtatgctaatcgtgcaaaggaaattaaatcttctgtaagtgcatttactttgactttattgtgaaaatattgtgtatatgttattttcataactaattaaaatcttaattatggtggagtttctgtcaaggaatttgccagttcaggttagaaatgtcctccctagctgctgaaggtaacttagtctcactttctgtatcttgatcccctctgcagtagatactgttactcattcttatgggtgctggactactttatactttagtgcctttt

SEQ ID NO: 26962 - DNA, 1208 bp, Mus musculus
aggaccctttcctgccattaaaacttggacttaacagacctttctttatagactctgtctaccaatagacatacttgttataattgtaggtttgtaaagataactaattactttccaaatcagaaaaaaagcttgtgagaaaaatagcattgatttacatatgaaactgcctggtacatgacagctgtattctttcatctactccttttatattctgtactttacctctgttagctcctggaacactcttgacctgatgtatcattggaatgaagaaggctggctagagagctgtctcagtggttgagagcacttgttgctcctcagaggacctggtttcagtttttagctccaagtgttagaaacttgcaatggcttgcaaccatctgtaactcagttgttagttacctcatgatcttttctgacctctgtcagaagcgggaatgcacatgatgtacattctcccatcagagcaaactgctcacacattaaaataaatcattgttttgaaaaaagaatgtcgactacttaaaaggctaatgaactcttaagtgttataaaaatcagtttgacccagtgactcccctggaaggcccccataccttcatgtgaagactacagatgcttctaccaaagttagaaccttagctgtgtagcacctgttatgttagcattttgtagtctgtcctttgttcccattttgggagaaaatgggtattttgtttgtttaagcagctgttttgttttggtaaggttttctgtgagaggaataaaaagtgatttaggatataattagagaagtgacaataaagaagttatgaaacctgataggaatgacactacttaccagccatgttctctgaacatttgaccataacctgtaagtcaccttttccttggccatttaattttccctgaagggaagttagggaaacgatagatatctagaatctgactctaacttaatggcaggcacatttgctgggcactgaatacttgcaagctaaaatcctctaccaagatgaagattttcctatgcctgaaaaaataatgattaatttatttatagatagatagatagatagatagacagacagacagacagggtttctctgtgtagcccttgctgtcctggaactcactttgtagaccaggctggcctcgaacactgaaatccacgtgcctctgcctcccaagtcctgggatta

SEQ ID NO: 26963 - DNA, 1176 bp, Mus musculus
cagataacagctctccaatatttccttttgcttactgcagtttctttgtgaaatttcatttttccaagaaatgaaacatcgcagtctcgctcgtggcagttcatcacgttatgagtattggcgtctctgctgccttttgtacttggaacataacatatctataatcagtggtaaatcatagctatcatggaacctttttatttttatttaaacaatgtataatgtattcatttatactgatttataaaagtttttaaacactgaagcaatcattgctaaaatatgtttttcataatatttaagcagtgaggctggaggatgtaatctgattattagcattaccaattaaatctttatttatatataacagtatgtcataaattatacatgcaaacaagctcagatttcaacttttcaagttttttatgctgttcatttgaatttaaatatatttctcataatttggttctttcatgcctagagatgagtcagtgctggggagaatggaagtaagacaaggtggtgacttctaactctggagcctgaagagccatgcatgcattcttactatcctagcctcagcaccggctggaggtggcaagggcaggagggatgtgtctaagatacagagacaggtggcttcataagtctcaccgtgggtggggctcgggacgatttctgtcttgatgattcaaatagtaatgggagtttggaacaatactttttaccatttgtccactggatgtcaccggtttcctaaaaggcagctattgataaatgattgggactatggtctactaaaagctgaaatcaaagtgattaattttcagtcacagattataggaacatttgtaaagggtgtaagtgatggtgttaaaaagaaaccgttgggttgaaaatggaggaatttgtcataattatgactattacctttatttttaaaaaatgggcattttgtaacattccttcaggaagaatggaagtgtgtatgtttttctgcatggtgtgagcattgtgagtcttacaagattactgcagttttcagagtaaaagtcaatcaacatgttatttatcacttaggaattgaacactggattgtgcatggttgaatgtctttagtccactgcaaatgtgcttgacattgataagatcatgctgaactgtatattttcagaa

SEQ ID NO: 26964 - DNA, 1759 bp, Mus musculus
tttatgtttcagctgttgcagaatttcagccaagttactttttttttttcttaagttatgttgaaaaagcttttttttttctttttcttcagtaacccacagtctgttctttgtgtgggccggcacctatttataactcttaaaataaaaacaacttaaaggagccaaatacatagctgttcttggtactgttgcgcatgagtagcaatactttgctttcatcgatgcgattctcctatctcagaattttaaatactgaccataggaaagtcagtgacaagtgtacagtagtctgcttgtgtacttaggaaggggatgaattctaattaatatatggatgatttgtgaataaagctaggcagtaaatatataaagggtgttcgtttgacttgtagcttacaaatgtaaatttcccttagccccagttttccatctattttcttatacagttcacagtgagttgaggcgacttggcgattcttggccttagccgttgttagatgccctgcagatgtacaactcacccaggtcccttcccgtgcagctgatttgtgacgcgtttatccattgtctgtagaggctcgtctgcacacccaggcttcaggggtaccagctcatggactttctggttatgctggactctgtttgcaagtacttttagtctgatgtgattctatttctcagtacctctttatggacttaagaggtatttggcattccttattaacaaaataattacaatctactttttttttaagctctggctgtcctggaacactctgtaaaccatgctagcttccttttgttttcccatttttgttttccaaaataaaacctactagtaattcaattgtaaaatcttagtgttttctccttctgtcccctttacctttaaaaaaacctataaaggttcttatttgaagagcatgtttaagtgttgccgatgtgagcgcactgtgagggtgagtctggcttgttagatggggctcctttgcctttactgtactgctatactacatggatgtagtcctgttctttagggtctcgctttttaagatcatcttcctgttgtaaaagtttaaggcattttgctcaagtactttgtttacagttaaaatgaatagaatttaatagaaaatacggttatggcttacctggaaagcgtcagcatgacttggcatagacgtaaaagagtacatgtgattatactgtggaatgatactgataaggactctcgtaattgtacctcctgaataagtctgtgcattttctaacttacagttcattgtctgttctagcaacaatctcattttgtagtttttattctccaaaacttatgagtaatgtttcctcaaaggttgttgaaataataatagttacataatgggggaaagtcatttgattattaattttcaagaagttttaaactaatttgtaactggacatggtttttaaaaatattggcaaagatttgatacacttgtactctttagtttgagaaaattatttggaatgtgaaacagtgctttttcaaatagatgaatcatttagcaattaaattctgattctaaggcttatttaaaatgtatttgtatgagtcgtgcttgtcctttgcatttgacaaaattgatacaattacaaatcgatgtatttctgaacgccgtgtgtaaaacaacctttacatagagtaaaaaccaaaatccgtggtggttcctgacatgaaacttcagatgtctgtattttgtttgcctttcgtaaa

SEQ ID NO: 26965 - DNA, 1149 bp, Mus musculus
gctaggcaagcactctactacagagctgtatgcgttagctttgaattttaattgtttatacatttcttgagtcaattctgtaaagagatgtgatggggactctcattaacgcaatagctcctacagttatccagttccactggggttcttctatggaatagagcatcaatatctccccaggcagtgatgtcttagatgttgcctggacagtgctgagaatttataccagggatttactctgccctccttaagacttgctgtaaccagtaatagttgacgatttccagtttagctgaatactgtgccagttttggtgtcacaagtatttactgtccaagtacttggctcctagcattagaattgtaaggtaacatttgacagcttaatctctcaggaaagatcaaagatctgtcttagtaggtggatccggacaagtttaggcattttctcggcctctgcctttgtcaatctgtctctcatatttgtattttagtcatctttataatggtagaaagcactgacagcctgccagttgggatttttttttctggtctccgtgattgtgcttattgtattcctctctctctctctctctctgtgtgtgtgtgtgtgtgtgtgtttagtaatgggtattagagtagatggttgcttctgcctctacttcagatttctttgaatccttgtagaacataaagtctaagaatcatttggtgaatcatagaatctgagaccaactcacttttgtctccatcaacacatgtatatatattatgcaggtgttatacttgggaacaaatttatgttaacaaaaatacttcattgcattgttgatataatattttaaaagttaaatcccactaaataatgccttcaactttgaaaaatgacagtaagccaacatatgtcttcatgatatgacatcattgctctttccatttgtaaaagtagatattaaagaattaagtttataaatatattatccaagttgctttttaaagttcatagatggcccattttgggcagtgtcggagattgttttcaatgcatagaaaaaggttttgttttgtttttgtatttctgttcagtgaattatggtttttgtaaaaccttgactgaaggtgataaaatgctccaatcttaaatactggc

SEQ ID NO: 26966 - DNA, 1115 bp, Mus musculus
ttcgacactcttgtacagcaaacctacttcagctgtttccgccatggtcacatttggactctgcaagtcttgtaactgctaaccacttctgacctcaataatttttttctcttcttcatctcttcattattctaaattcatgaaatttttcaacattatgaaaccttcaatctctgagtcctcatataccctacccattccatcactggtcagattagagcctgctgagtttcctttctcctgtctcaccaggattcgtatccttcttaccctgttgttctttcaaagctgactttttattgaacaacgatgaatccttttagtaatctatgccgctgtttgtgaaatgcctcactgcccagcttcttacactgtgtgaccatatggggtcaaataactgaatgtgggactcatgaaatatgtgtcagctgtaaaaggtttctggatgggtgacaagcaaacattaattcaaaatcaaatgtgtaatgtatccaaaatatttgcacagcttcactatagctatggtttccggctatgcagcacaaagaatgctagctaaaataccttgcttagctcagacttgtgactgtcacttgtgtgttatgagctgcagtgttttttttttttcctgtatttacaaatatctcagttctgacagaggcataatggatgtaattttgtaaagactacacattttctatcattattcatcttggtataaacattaaattaggagccgggcatggtggcacatgcctttaatcccagcactcgggaggcagaggcaggcagatttctgagtgattttcgaggccaggctggtctacaaagtgagttccaggacagccagggctatacagagaaaccctgtctcgaactctcccaccaaaaaagaatattaaattagtgtatctttgagttgcattatatacagtttgaacttaaaactactgaaataaatagtttcattaggaaaaaaatcattaaatgagtattggcataggattaggatagaatccagcagtttaatggccataagtatacttcttcccgattggactacatgtttatctcagcattgataattataaaattaaaatatcgaccaactctaa

SEQ ID NO: 26967 - DNA, 1194 bp, Mus musculus
ttccccctcttcttactttattcctaaatgttttataaccatagatcagatagtgtgagggaaaacatttataaaagctaggctttttgtgtaaaatctattacaaaatcagaactcttcttcctgacccgggacttagaaacaaaacctccctacatgtttaacatacattagtttgtaaatacagagtcttgctaattgcaattacagctcacagcaaactacctgttgtgtcctgttactttgagtgggaggggaaggtgtgtgtgtgtgtgtgtgtgtgtgtgtgtgtgtctgagtgtctatgtctgtgtgagtatgtatgtgtgtatataagtgtgtgtttatgtttctgtgtgtatgtgtgtgcctgtgtaagtatgtgtgtgtgtgtgtctgtgtgtgagtgcatgttttacaaaatgctgaatgtagacaagattgttggaataaatgttttctaattatattacattccccacctttgatgtgaaattaattagttcactgcagaccttttctgatgaagcaattcatcggtttttctgatactgtggtccttaagtgagccttgcttattttcaacaacaacgaaagtgctcctgcatgataaacaaatttagagcaacaggtgaaagaaacagtatgatgtcaggctaggaagctacacaaaccagttagcaaactgcttcattttgagagaagcccagggtcaactgtttgggtgtcaggtgtcagttctctgttccctattttgatggtatttcaccagtcttttgacaagtgattgttttttaaaatttaactttattgtgtgtgtgtataggtcttttgcctacatatatttctattcaccatttgcctggtgcctgcagagtctgaagagggcactggatcccttagaactggagttacagagggttagaaacggccacgcgggtgctgggaactaaactgggatcatctgaaagatgcaagtgtcgttgctcactgagttatttctctggctctttgccaaagtctttatgggaaaggggtccttccgtttcctcactgatgactgcggccttaggtagtattgggagctgggtttaaaaataatacttcctggagaaagatacaatgtcttctaagttatctctagtaggatttgtgtcatttttcagtgatagaaaaaagtttggaatatttgtg

SEQ ID NO: 26968 - DNA, 1111 bp, Mus musculus
agatgaaggcctcatgtgctctattttctcccaagaaacaaagccaccgagtagtgtgccccctgggaggcattatcacccacccaccacactcacagtgtttatttcagttctccagctcgctggcttgggtttcaggataagcctcgtgcgagcacacagctcattgtgtccgttctattaacggtaagctgaggcgaaatggagtgctttttgaaaccaggctactttagcatttacatggtttataaagaggcagagatttgggggaaaaggaagcaaatattttgactactgtggttaaacagtcttttttgttgacatgttaagataatcaggtgttgtgttttgccacttgtttggttacttaataaagcactctttctcatggtcatgccatagacagttaaattctccaaggaagcccattgataccaggatgggaaaagccagtgttggagacaaggggtaaaaacccctggaaagctgtgtttataggattttggtcttggcggatgcttttagctcaggttttaaggacagctggaggagcagggttacaggactatgtgaggcactcgggcaaagacggctactgccaattaaggcccttatggtgcaatctgagctttgaaaaatgtggtctttgaaatctggtgttccaattgtgagcattcttcattgactttgctgagggagtttgagtggagcaaatcctttcattgctcatgtgaagcttgcacagagtgggccactggaagctgtgtactggtactgggggtatttgcaaagacctcttttatttgctctgttggccctgtagagatcgactccaaggccttgcccgttttaagcaagctctcagctacatctccagtgcagggaggaccaccacaggacacgtagctggtaaactcctagctgagaagtttccagcgaatgatgtggtgtactgatgggcggaaatgaagtgtgggatgtccgctccatcctaagcagcatttgtacttggcccgtgagattaatgtgcagtaagtggccagacggtagccttgagcatgtttaattttgtgctgtagttatttatgggtttccttcaagggagaagcgg

SEQ ID NO: 26969 - DNA, 1150 bp, Mus musculus
gaaatagttaggacttagtatccaggtttccagacagagacttaaacataaataatcctgttgataaggtactgcctaactgcagaattttctgaaaaaggtgaacctttaaagccacagtagcatttattggaggagtgaatcttcccaggaatgacctggataaacgctctagccgacctggtaaggcaccagcaaattactgaaatggctttgttgctctttaaaaaattgtaaacatactcttggtatcaactcagagtggcagttaaattcgttctctaatacacctatactgtaacactggatactgtagtacttgtgtgcacacataatcattgctaagcccatcgtctgtatctctggttggtgtatattctgaaacataaatttccaacttgagttttgtgagttttcttttaagtgtgcctttctgcaatgaagttagccaggaaagagctgtaatgtactggccttggaagaattttagagttgttgttattgttcaggacttgtgttacagttaaataaagataggcttctatggctctggctagttttatgggtcccttctgtttggaaactcaggagcagtgttctttggtgtgactccttccaataaaactcattactcgctgtgggtgtttctgtttcccagacgcttagatgccaaccatattacctcagtcccggaggacagttttgaagggctcgttcagttgcggcatctgtggctggatgacaacatcttgacggaagtgcctgtgcgtccgctcagcaacctgccaaccctgcaggcgctgaccttggctctcaacaacatctcaagcatccccgacttcgcattcaccaacctttcaagcttggtagtgctgtacgtgcttaacctttttactcctgcatatttgtgttactttgagggcaaaatgggtttcatgtgacaagttactacaaaagtgtcccccatgatcctgctgttggacgattagtatttgggggaggtgcctttgataagatcaaacatactgatttcttgaataatatctagtagtagctattgagttttttaaaaacaagtagccacatttttaaaataattgggtcatttatcaaatactttttttataacttgcttttgtataacttctgt

SEQ ID NO: 26970 - DNA, 1886 bp, Mus musculus
gtttatttttcaagtcagaagtctgtgaagaatgggagcctaaagtataaattgttgaaaaacattgtgatgccccagcagtgtatgctctattggaaataaatgcgacttaaaaatgatttgatgtatggcatagcaatataaaattagttgttttttttttttcttttctgatccatcaggtgcaaagttcaaattatttctgaattaagcacaaaataaaggacagctgttaatatattttaagtgaaaatgtgaatttataaaactaagaaaatgtcttgctaattttacctaatgattcatcattaatctcaggatgacttacttcagggccaaaaaagggactatctcccagcaagagctaggaagagttcaaacaggcattaccttcacatgttttctgtgtccataaattgaaaggttttgttcaaatgatttataaatctaaaacctgaagatggttttgagaaggatgttaacagctgttagatttttttttttaatagcagaacatttgtttttgttcattgcacattgctctgatgaaatcccagtgattcccctctcagtgtttgacaatcgcagcacagagcacagggacacagcaaaaggctgattgccacgtgggtttaagtagaggtgactgagtagtaagtaccactgagcttttcatagtatccaagggatttgatggctctaagtaatgtcctcatctggactggcaatgtcctaatgtcactggctgctctgacatttccaaatttgttgaagttatctatcattctgattatacaggaagcacacttgagtcttttttttttttttttttttttgcaattgtaagataataatgactcaaagcacttaaattgattttttagtgagctgttgtatgagaacttccatacattgtttgcatgctgtaatttaaaaaaacaacaaaaccattcagtagctcagctgcggtgtgctgtggttcaacgagacacatactaggagtgggggagtcaaaccttgtcctatgtctttacattttctaaatttacttgactcttacctataggcttctgatgtggaagacttaacactgtgctaagtcagtagcaaacccactgccatcttagttatactggttgaacaaaaacttaagctagattgcagtttgattaaactgtacatactgtgcatatgatgaagtttatcttgtgtaaattatttttagaacacgagttgggcaatgaggcttctgttcactgtttaattaaagctacctcctaaactctagtggctgccagtagcacaatggttaattgtggtttagatacatgttcttggttttgattttttttttatccttgccttgtaaatagtcttggttgtacattgtcagtggaataaaaacagaatctttgtatatcaaaatcacgtagtttgtataaaatgtgggagggatttatttactgtgcttgtaattttgtaaggtcatctatttacaacataaatataatgtttgtatatttacacatctgataaatattaaatcataacttggtaagaaaatcccaattaaaggctttcttcctaaaattcaagttattgaaaactgtttttttttttgttttttttttttcctttaagaaatagattgggggctggaaagatggctcatcggttaagagcactggctgcttgctcttctagaggtcctgagttcaattcccagcaaccatatggtggctcacaaccatctgtaataagatctgatgctctcttctggtgtttgaagacataaagacagtggcattgaactcatataaatgaaataaataaatctttaaaaaaaaaagaaagagagagagaaagaaaagaaagaaaggaagaga

SEQ ID NO: 26971 - DNA, 1147 bp, Mus musculus
ttttgatagacaggcttagtcccttagctgacctctggcttttcacccttgctgttactgcaaggtgtccttaggctgtggaaaaaacagagatgaggagaaacgacttccagctcctattttagccacaaatcgtggtgttactaacgacataattcttgcttaggctttgctaattctgaggttgataattctcctttaggagctgcacagcactcagaactgtgcatactggtttgtgattgtacaaattcattatgggcatcgcttggtgcagaggtactgcaagggaaggtccggcttgaccatttctgagtttcctgtgagataaacccggtttaaaagaggttggtatcatattttggttaaaaatcaaaaatattttccggctctgcctcgcctccccaaaagatacccagagccacatgtgtgggttttatcaatacccacgggaggaatcgggtccatgtccacccaagccatggttaaaagcccactcatctacggatgagaaaatcatttgatcacctcagttaagcattgccttattttaacttaattaataggggggagagagattggagacgtactattgaaggggcaagcccttcactgcctcccacccaaataaaaaagccaattggccttgtactacaagagccggtcgaactccttctccctgtttcccacctatcatccaaaaaagcggagaaatatcaacttagtgttattatagtgtatttcacatttgttcagtcaaacttagccagagttccaatgccctacttaaaattcaactagaaagttacctaggaagtactaattagcattataaagtcagagcctacagctccaggcttttcagttagttgttcactaagataagaaaggacagtcttagccttatacagtttaccataagaaaagttaaggaatcccatgaaagcaagttttttctttagccctagattccaggcagaactattgagcatagataattttcccccctcaggccagctttttctttttttaaattttgttaataaaagggaggagatgtagtctcccctcccctagcctgaaacctgcttgctcaggggtggagcttcctgctcattcgttctgccacgcccactgctggaacctg

SEQ ID NO: 26972 - DNA, 1348 bp, Mus musculus
tcaccctgccatcactggaaagagaggcccattggacacacaaactttatatgccccagtacaggggaatgccagggccaaaaagtgggaatgggtgggtaggggagtgggggggggagggcatgggggacttttgggctagcattggaaatgtaattgaggaaaatatgtaataaaaaatataaaaaaagaaagtcaccctgaccattgaaagtctaatgattggatagttctcctaccctttgtgctcttaagagttagaaacacccctggacagtttagactgaccccctccactggtaaaaatagcctctgtacatagtgctgacatgctgctttcccagcctttgttctctaggctcaaggagctcgagtgggtgagatagcgagcgaaaaggcagctccagaaggcctactcaagagaaaaagactgcaagccccacatcagttcaaagttagagattcgttctacattagacgtctccacgcagaaaaccttgagactcggtggaaagacccttatcttgtactcttgaccaccctacttcctatttttatgggacccccttttgattttgcttctgcttttaattataggtccatgtgtgttaaataggcaagtcacctttattagaacaagaattagtgcagtgcggcttttagttttgagacaacagtaccatgccctaaaggatcaagtatgtcagggaaaagatagtgtctagttctaagattagaactactaacaagtagaagggggaaatgaaagtataacaaagtaaaaacaaaattctaggcctttaggcccaggcttgggaatgtgacctctctgactcattgctccaaggtatgctaatcataaaacagatagtgacattcctccacccacctgcttcctgggttcaaagagtgttcattcaaagaaagtcaccctgaccattgaaagtcaccctgaccattgctggaaccctatgcagatgtggtattgttaagggctcctagaaactgtcttgagagataacctgcacaattggtattccttgggactcttgtgactttgcacttccttgggactcttaactggtatctttggtattttccaacaacgccctccccacttccctgagttgtggtttctccctttaaatacccccttatccagctactcggggcaccacagtcctctacccctgcatggtgtatgaacgtgggcctgagagtgctcttgaataaaaatcctcttgcagtttgcagcaagaccatttcttgtgggtgatttggggtgtcacctctcctgagtcagaacatgggggagtcctcacattgtgggtcttttacaccctctccc

SEQ ID NO: 26973 - DNA, 1197 bp, Mus musculus
cgcactcggagtaaacgcggctggcggtagtacgtgtgtctttttgctgagggcagttatgtttctccaatattacctcaacgagcagggcgatcgcgtttatacgctgaaggtaaggggaggaggaaacagctatatatcaaaaggacgagaaatttagatgggaggaacagttggaaccggcctgcgcagcccactgagtggagccatgtcggagccaaaacgtggtagataggcagtggcttctttttctgaccacgcgatctcctggcctcaggtcacccattttcttgtttctttctatcacaccactcatattgagatattttttatttttccttgagcagaaatttgaccctatgggacaacagacttgctccgcccatcctgctcggttctccccagatgacaaatattcaagacaccgaatcaccatcaagaaacgcttcaaggtgctcatgacccagcaaccgcgtcctgtcctctgagggctcgttaatcttttacgctgctcatgcctcggcctattatcagcaaccaaacgcgtcaatctgtaagccttgaagccttcccatgctgtttggaatcctatctcactcaccacgtgaatgagtctatactgatgggcctcgcctgtaaaaggaacaatatttttctttctttttttcatgccaggttattaaagatatagtgaactgaaagttcattttgtgtgttgttggaggaagagatgggggaagggtagtaccgttggtagtacaaggccacttgagaacattcgtaagccctcattgtagcaatagaactgtgtgccatcgacgatagggtgttggggggaaaaaggctgtgaaagactcctacaaaggtcagcattccctggaaaactactgtctaattgtgggccctttaaaaaatattctgaattcctcaaagagtaaaaaaaaatgtatgtgtgttttagtattttaccgacatgtgtctatgcctatatgtgccagtaaccatcaagaccagaagagggagtcagatccctggtgactagagactgatagctagtctttctgtgactgcaggggatagacacaggtcctctgggaagcacccctctctccagtcctaccactacattttgagttctgagataacaagtatgcccaaccctggaagttttctttttctctctttagacagagtctc

SEQ ID NO: 26974 - DNA, 1099 bp, Mus musculus
gaaagaaagttaaaaaaaaaaaaaaaaaaaaaaggaagcatgctgaaagctgggttggaaaaaaaaaaaaggaaaaaaggaagcatgctgaaagctgggttggaaagcaatgagagggttggaatatattcaaaatacatcctatgaaattatcaaagaattttttaaaaagcatcaaagatgaagtcacctattataagtgacaaagcgtcaggaaggaggccagcaacactgttctgcaagcacttggcacgcaaccctgacagcctgcattccataccttacacaggtggaagtagagaatcagctctaccagcttgtgctccgacttgtgcactattctacacacacacacacacacacacacacacacacacacacacaccacatgcacatacatacacatgccttggaaacagctttttctcccattatcagcattaacaatttgtaaagtagcccatgtcaagagcagtataacacaccaagaaagaaatacttgtgggttagttcaagggtagggcccccagcggtctctgtattaagaaaagaactttgtgttgattcctttggtttcctgatttgcttttgcctgaccatcacattcttcaagctctgctaactgaggtctaccactcaagctgaacttgaatctgaagtggtttctgctaacacagaggcaacatcgttgttggtgctgctgtcttagtacccatgaaaaactaatgttttcctttcttttcagatgacggccataaaaaagcccgaaatgcttatctcaataattccaactatgaagaaggagacgaatattttgataaaaatttggcactctttgaggtaatattttaattatatatgtatgtgtctgtgtgggagtagaagagggcatcatatttccctggagatggagttaggagagttgtgagcctcccaatgtgggtgctggtaactgaactcaggactctggaagagtagcacggactctttcccactgactgagctgtctctccaacctgcacaatgcaattcatcagctactaggaaatatgaaatcatcacatttccagagaaatgtttggaagcatcaatcatcatg

SEQ ID NO: 26975 - DNA, 2900 bp, Mus musculus
agcaggtctatgatcaaataaacttagattactgatgccaggttataaagtgcactactgatcatcctatttccttgacaacttctgaagacatggaatttctagaagtgctcactgagggattagaacgagtccttcttgtccggggtggtggcagtgaggtcatcaccatttactcataatcagctgtgggagattctgcgtggtccgacttccctaagactcatcgtccatggagatgatagctctttcctaccactcccactctattcttgcagagctgagccccatctatgctcttggctgcaacatgatctgccatcccagcagaaacaaataatccctcaacagaagaatggtcaagtcctaaaagctatttctatggcaggagaaggcaagtcaaaattaacaagctaagccaaagggaaccttttggcacacagaaggtaatgagttagtaaaacatatgctagaaatgtaactggcaacagaaagcaatgttcatatctaacattcaggacgagtttcagaagacacgggtcagtgagcaccagaaagttaacaggcagttaagcttcaccttagtaaaaaatgagttcccattatagagacagcctgcagcagccaggatggaaacaggatactgatatataaaacctgagacatagctgcagccactacttcttcctcatggtttattgtctgtactgtaccactgtacattttaactgtctttgttttaaaacccattctgtggttataatgcagacagtagtgttactatagaaatgtttttttgaaaggctagaaatgttttttcaggttttcaaatgctgaactaaggggattccaaagagtgcgtattaaaatatatagaaacacagtggttagctatgcaacataaagcacacaagctattatcttaacaaatgtgggttgttatgtagttaaccagaagggtctcttctactcttagtaggcattggtcttaaaaaccaaacaaaccaaacctgtaaggaagagacgccagggctgtgtgatgccacctccaaggccccagggttcagaggttcagcagtggaactgggggtgtgaaagccataccctttccactgtgccaaaatcgtctgcctacactggcagacaggtttgcagtggcctgacacaagcaccttttctttcacaagaaatccatctgtggcctcttcaccaaagccatagtgcagatttgaggcactcgacctccatgcccagagcttttcccgtctcaatattattattattcattctgacttcggaaacttggctctgaaacaaatggttcactaagctaatgatctgctgtattggttttgctttcaaaaagctctaactgtgccaaggaaatacttgtgtaagatcagattttttttttttttttaatttactgatcacaaacacttggcttaccagcataggcagcctttgtggctgagcagtattcccagggtgtgaaacctccataccctttccaagatagttactgaagaaactgtcttcttgcttagattcacggctgcttttacatttcctttcactgacagtaaattgtgccactctccataccctgtaggacaatgaacacccagaattcaacccaagacagaagaaaaccctcaaatatggcttaagaagctgagtcatatggtttgttcttcctcctcccaggcccacttgagtagcaaaggatccagcatgttttcctttgcttcctgcagagggtagaaactactcgtagttctctttccaacactccattgcatacttgagtataatcccctaggctccaaggcattggagcgcccattctgtaaaagccagcctgcccaggaactgcctaacacatccacccctgaccaaagtgacacatactttttccatatcaaacaaacatgggaagagaataaggtttctttaagaaaggctgtttgtggttagagctacataagaatctgttaaagggtagagtatagtcttcattccccaagataaaaatcactgttacatggacaaatggttattaggccagatttgtactcatctctgtctagaacatttcatgtctatgtgttgcttatgttgtctgtctgcaaagtgtcttagctcttttaatcactgcaaataaagcaatactgaaaacttgagagagaaaatgcaccttaggggaaggggccaaatgtttctagagggaagaggaagaccttctcctgccttcttataagacccagcttgtgtcttacccatgagtttattagcagggcaggctgtaacattcgttctcccccaactggtcctcagccttccgtagctaccttaaaagctggagtttgaattgcagggcctggttgacaggtgccagcttcctcgtggcagagcaaaagctgctgcttttcatattctgttgcctccttttcttgtggccccaaggatcccaccaatcctcattccccctaaatgttaaaagaaaattccttattgtggatattaagttacactgtaagcatatttacatgctctttttcccccctggtttttcttttcatcatgtataatttgaatccagtgatagtctcacatcttccaaaaaagtctgcttatgtgatatagaagagaaatattaaagtagactgaaggggaacttgtgaaacattaagcattgttctcaaccgtttaatttattgaaaggagaagctgctactgagcagctgctattcttttgtttacatagagtctggttttgtttgttttgctctgtgctgggaacataaataaagttttctacattattttcagtcataagttgtgctgtagtttcttttctgctgtaacatgctgcacactggcctcaccacaggaggctc

SEQ ID NO: 26976 - DNA, 1107 bp, Mus musculus
tcttttaactaattaaacatacttttaaacagacttgtaacataagcattcacagggtacacgtgctattttaatgcatgtacacattttgtgttgttgaatcaggttgcacatatctccttgaacacttacccatttccttagggtgaaaatattccgaatctcttctgcttgacttttgagatacacagtacataattgttacctacggtcactctgctatcccagaacttcgtatctcatatttacctacaacttagagcctattgatcagcccaggtcttccttctgctctcagcctctgtaaggtcagcttcagtagattccacataggaaattacaagttatttgtccttttgtctctggtttatttcacttacaaaatctctgtttttatacaggtggcataagttgtaagacttcatcctctgtggtattccattgcttatatttaccacattttctttattcattcactaataaatagattatttccatttcctggctattgtgaatagtgctacagtaaacagagagaagtacagttttctatggcaaactgaactgtttcttttggataagtacccactgttggaactgcagaatcatctgagcattttttattattttgaagaatttttgtacttttttttttttttttttttttttggtttttcgagacagggtttctctgtatatccctggctgtcctggaactcactctgtagaccaggctggcctcgaactcagaaatccgcctgcctctgcctcccgagtgctgggagtgctgggattaaaggcgtgagccaccacgccctgcttgtacttttttaataatgattatgcaatatacagtcccatcattggtgtgcaacaatctcttttattttgtaaaatttttatttatttagtgtgtgtgtgtgtgtgtgtgtgtgtgtgtgtgtgtgtgtgtaggaggttggggttgagtgcatgtgtgtcttagtcagaggacaactcttgagggattggttctttcctaactttacgtggattctgaggctacatcatggaggtaggtcatcaggtttgtgtagcaagatccttactacttagctatctcaccac

SEQ ID NO: 26977 - DNA, 1346 bp, Mus musculus
gtgttctgaaaagttccacacaatgtttcagaattgtttacagttaatgctgacattgtactttaagttccaacacagtgcatcactacctcctctaatggttagtaggaaattccagcaaaccatatgcaagcgtttttgtgttttgttttgttttttttttaatatggccatttgaagtatcagtgtactcaattctaggaagtcataacagtttgaatcgtacctgtcttagttggaattgcagttagctaccactcctgctggcccattcatcatctttctttagtaaggcttgcaagcttccagaaaagataaattgacttcctcttcatattccaatgtacattttaaaacttaaagcagtgactactgagacccccagcccccctgccctccagtgttattttttaactgaattctgttttgtatagctattattccagatatctatgtacaccacagaatgaatatccgttgtagtaattgattattatatcctcagattagagtcacatccaaatgactacagttttgtgatttcgaggtgaggtatgtaagaagtcattcttcagaacgtgggggtgtcatgaacctccattcccctgaagccttcagctgggaactacagcctttctttcttcttagcctgcagttttcactgtcttattgaaccatttgggcaggttgatgtggtttggttggagtgtgatgctagtgagactaagggtttgagtctgatccttttaaattcattaacttctcacgtgcacaaagaaattctgtagttcctgattgcatatttctttcagtatccacttaataaattcagtttgtgatctcaaagaatgtggtgtgcatagtttacttctcaaagagaaatagaatgattgatttgtataacagtatagatttccagtttgaagagaaaatattcaaaataagacctaacatactttataatttttttttgtttgtttttgttttaagacagggtttctctgtatagctctggctgtcctggaactcactttgtagaccaggctagcctcaaactcagaaatccgcctgcctctgcctcccgagtgctgggattaaaggcgtgcgccaccacgcccagctatactttataattttttagttgcacaatatcaaatactatggatcagattattgactaaacagtatctttttaaaaaaaaatcaaagttcaagtaaatatcaataaaaattgagtatagtaaaaagcaatactattgttttaacagaattcttattcctaaatatgcttgttgacattgaataagatggcatgctccattttttatgctctgggcaatgaaaga

SEQ ID NO: 26978 - DNA, 1121 bp, Mus musculus
agcatgagaggtcctggattcaatccctaagactggatgtagagaaagtcagtcatgtatatcaaactccaggacagagagactgcggtcagaccaacttgtgcttgaatcttgaaacctattggttgcagccaataccaagtaacaaggcaaggtggggctgaggctgcagcaatggtagagcacatctagaacctgctgggccatagtctcaggctccagtgcccaaatgacaataaacaattcaaaaaagaaaaacttcgagataatgagaagaaaaacgtaggcctcccattccttgcctacttctgcctcagattcaaatctcccatccaagtattaaccaggccaaagcctgcttagcttctaagatcagatgagattggggacattcagggtggtattggctataagcctagctttaaatctttgacaaggcccagaaaaggccagtagcatagagacagcttttctttatatcatctttagaataggttgtaaagaatattcctggtagatagcccttctacctattctgatagatagctcccaccttgacaagctttcctgtttttattgcttcaagttgtatgtctataaaggcatgtttgactgtatgcatttacttttgaaggcattcttgctgaatctacaggcaactcttcatctctgtaatgctacctgacttctcttgtgaggagctggtgaggaagttggtaggtctctgcagacactagggccagcaaagtgttgtggagtcctgtgaggcaagaaagaaatctggcttaacatgactcatagctgatgttggttcaaacttgtagtgtctgacaccaggcagtttattttaggcatatttaagtatagtacaatttggaaaaaaaaaagtttcttagtgcaacacaatcctgtgtgcacaatgaggcatgattacactgaaactcttctcagatacaggtctgctcttccatacagtcatacagatagcacagaagtcatcttgactattagctacctctggtcctggttgtgggagcttggggaagccctgcccatacaaataatgcactggtcatttagacgattagctacctcaggtcctccttgtgggagctcagggg

SEQ ID NO: 26979 - DNA, 1150 bp, Mus musculus
agacctagctattcattatttcagttctgattccctcttagctaacaacccaatgaaagaagctaaagccgatcttgactcttcttcgatgctgtaatgatatctttcctacaggcttgtgctgaggtgagtggttcaaacctctgattcagtattctcctttctatcttattttaagaaatttcttcttaacccctctgctttccatataactaaattagataacattggctactgagatgtgtgaattggatatttactttgttaaaataatccagtgtacagagaacgacaagggtgtaggaacgcctgggcaaagggtaggatagttgtatgctttattttatttatttatttatttttttgtttttgttttttgttttttttgatttttttttattgtgttaaaaaaaaaaaaccctcattggcttctcacttcactcataattctgtttccagtaactgcaaactaaatcagacaagtgcatggaaaacataattaaaaaaaaagtatagtctacggccatatcaccctgaatgtgcctgatcttggaagctaagcagggtcgggcctggttagtacttggatgggagatgggtgctgtaggattttttaaaaaataaaatacaatagattggcttttgatttttttaatgaaaggaggtttcttttagggggagggtatttagtcttcgtattttactaagtgccaatacctttcatttcttacattgtgagtggaaaatgtgtaaggcgaacatgatcaccaccatgtcagaaacaagtggaaaacttacatgggtgaactgttttatctatgccagcttcagcccctgtctcccaatccacagagttttgaaaatgacagtgggtctacctattagttcctttggctgttcctgtgataacatctcttgacaaaagtcaactgcagggagaaaggttttgttctgactcacagttcaaggtttcagtctgtcatggtaggacatcatagtggcaggaacttgagggcgcttgtgttgtagccagagtaaagaagcagaaagcaatgactgtttaagtgcagctcatccctctcttttatacagcggagaatcccagcctaggtagagggtggtgccatccacagtgggcacatcttcttat

SEQ ID NO: 26980 - DNA, 1147 bp, Mus musculus
aagtgtgttctctgagctgctgaaagcctggctccctccccggtcctgtcgctccctgtcctgtaagtcaagagcagatggagcggataaactgagagagcagggcaggtaacacaaggcagaacttgtgtcaagggcactgcggggacatggaggaggttggtaactctctcagcagcagagatgtgctggaaccagacaaatccgaagccggacttgagatggctcagtcgatcctgagtaaattctctatgaaatccctgtttggatttacaaataaattggactccttggagcctgaagaggaagatgctgtgctgaaggcatttcgcagtttagagggggatcccgctcctgagcgaggtgatcccagcaaaggctcagatcagccacaggcagaggctccagttccacctgatcttaaaaatgatggaaagtcagcaagggcggagacaggatctgagggaagtcaggggaaaggcagatcaaacacctcttcccctggttatgagctttcgcctgctacagtgagcgtggacaatgaggaagtcatttgggtccgtgggaccctggttcacaccaccagtgattctgactctgaagatggagaccaggaggcagaagaagaaagtagccttgatacccaaaagcccaccactgttgttttatgtgaaccttctcaagagcccaaagacagagcaggggattccgaagaaaatacagacactgggaacactgatgatacagaactctgtgctgaagagtctcagagaactttacctgagacaagtagcaaactggaacttggtggtgatggtagccatccggcagagcacagccccaggcaggaccaggctgcagaagaagggtctcaaatcccacccgcagcaacagaccagactgtaggtgcccttgcgagcactgtttctaaaagagaagctccggaagagaagcccttccagcttccagctttcttcagtgggctccgtgtgctgaagaagggggctaccgcagaggcaggggagaccatcactgaaatcaaacccaaggacggggacctggctttgctcaagttgacccagcgtgttcagaagtctctgggacagggaggcccacagacagtgaagagcccaggtagagcaactga

SEQ ID NO: 26981 - DNA, 1315 bp, Mus musculus
catatttgaacacgtttttgacatttttcttccaaagaaataggcaaagagaaagaggaactcactctcttcacatttcttaaccctgatctcaacgctcgctgtgctttcggctttgccggaaccttttagacaggcagctcctggccaccccaaagggtcctcattttgaaaacaggagcgggccaatcggatgcggagcgctgtttggcgctggcatttgagccactgctcaggtgcggtcgcgtcgggtctgatgtgtgccgagaaggtggggcgctggcggagccgagtcactaagctttagcgggccggggccacaggcaaggctgatgggctaggggaaaggctgcgtgtgagacggggtgacggcggggaccagcccgggcagggaccgggactggggatccctgagcagccggctggcccggctggagggagtagcttaaggttgcatttccatctcaagaaatcagagcggggaaggccaccctgcggggaagaggataagtggaagtgtccggaagcgagaaactagctgcaggcgttagtctggggaaacggaagagtcagaaaaaagggaagtttgtggaagtaactgacagggctgagcgacccggaaagaaggctggtggaagtgaaacaagagtgaagagaggcgcgagagaagaaggtctgtgtaagtggatcgagggaaagtggaggaagagtgccagaggtggctggaaggcagcggagcagagcgagcctgagggcgtttggcaagtggaagagttggttggtggcaaagaaagtcaggacccggagtcggcctcggagagtaggcgacgtgttcgggatgtgggatcagagactggtcagattggccctgctgcagcagcttcgagctgtctatggcattaaggtcaagggtggccgcggtcagtgcgatcgcaggagacatgaaactgcagctacggaaataaaggtaagttacaacgtgttgggacaagggcatacccattttattctggataagaaagacacgtggttagaatgcagtctcggtggtgatgatcagacgtgcctccctatgttgccgtgggtttttgttttgttttacagtgctaggaataggataccaggctccctacttaaatactgtgccaccgatctggtaatctgtcgtgttttaaacaagcagtatgtgggggaggggaacacactatcctgtcaggctggggtgggcagtcagaacatttcaaacgaatcattagggagacagtcaggccaagtttagaaataggcttcataggatccttctgtatccagcaat

SEQ ID NO: 26982 - DNA, 1548 bp, Mus musculus
agttaacagtgacccagaggatccatgatagtagaagactgtgtgagaaaaaggggtgataggttgaaggcagaaggacacatagtaacttttaatggctttgggtaatctcattgccatgattctggtgatacaataatagatagacaactatttcaaagtgtattaagttttacacttggtttatgtttattgtatggcaatcagtacttccaggcagtttttgaagtcacacggtgcctcaaattctaagagtatgggttttgctttttactatatttttctttagcgttcaaataaagtcgacatcctattctttcaactcccacctttattaatcacattcaacacatctttcagccccctctctccctatgacccaatcctacacgctgtatgttatctttcttccttccactagggggcaataaagagacaggtaaaggcagcctactttctagctcaagcttaactcttgccttgacttccgggcccactagttctgcttccggggaacgccgggacttctcaggttccgggaggaaccgtgggagcccagcgtgtctgtgccgggcgctctggcacctcggggctgggtcgccgccgctgcttgaaagctttcgagagtcgccgctacgagcctctggtcagcttcagtggcgatcgctgcgatggcggctcctgcgcagcccaagaaaatcgtggcccccacggtgtcccagatcaacgcggagttcgtcactcaggtgagccccggcgtgcccgcttgtgtaaggagggatgccgaggacctaaagcccgggattgggattgattttgatatcttgtgtacgtgcaagttgctagttaaacattggaaaagctgcagtgaaagaggccgctcctcgttagaccacaaagcgtgcttctgaattgtattactctgacaagactctgtctacaagtagatcgctctatggcagttaattgtcattataacctttcatttaggagacaacagagccaattccgggcctgtagcctttcacatccttgttaattcttaggaaattattgagagtgtaagtgcgggaaaatttaagccctcccgcgcctcttctggctccgcagatttgtcagggcagaagcctagaaactgtttccattcgcttagccccagcatgtctacacagtgtttgtctgtatttctggacctctctcgcccaaagatgccttccccactaagacttgttgatctgtcatatttcctcttgccctcctgcagcctgttcttcagattgctccagagtgctcactggtgcaaacctgctcacattacttgtcttcctacagtgtcccgtaaacaattctgattgtccctgggataatgactggaatctttgaaagtgctgtgatctggcctatgcttttacccaaagtgcccttcctttcttctttcctcccttcctttctctctgtacctgtctgtctgtctctccctcctttcccccctaattttatgcttttatggctatagctgcggttacttgaatatgccatggtaactaa

SEQ ID NO: 26983 - DNA, 1699 bp, Mus musculus
catgttgatgagacttcatgggtgcagctccggagactcctgaaagaagcaaactccctgatcctctgactctcaccatcctctatctccactttactttcatgttgtaaggagtctcgagtctcgtggcctttgtgtcacatgcccctgtattgccctttgatttcgctccagctctctgtctaacgtttccttgtctgactcttttcttccctctcttccacatcccatgtcacgaaaagaggcatcagaaaaagaagactctgatctagacaatcaagctcgttgtaatcaggtgtcagtgcagcgattgaccctttttgttttttatatattcattgtttgaaacattcaacagcattggataatcagaaatattatcataaatagctgagtatgttatgattggttttaaagaatttttaaatatcacttatgtataacttatatattaaaaagactagaataattttatgttcacttcaaaactgaatggaaaagcacaaagtgcccatgtatgtgttttgttccattggagcactgtctgccttatatcagtgtactactccagagagaggtattttgtaactgatagactcacattggtagatccttatcaaaggtccgcctttaaccagaagtggtggctcccctataattccagaacttgagagattgaggcaggagcagtgttatgaggggtggcctagattaccttggctcaaaacaaaaaagtcatagtttatataagatctcacaattgtggttttacattccacgggatttaacaaatgttcaaagacatatatgcatcattacactcctataacacaatagttttactgtcttaagaatcatgcgtagccaggcagtggtgtacacctttaatcccagcacttgggaggcagaggcaggtggatttctgagttcgaggccagcctggtctactgagtgcgttccaggacagccagggctatacagagaaaccctgtctcgaaaaaccaaaaaaaaaaaaaaaaaagaatcatgcgtgctccacctatccatcctcggtctgctctgactcctgacaactactatctctctgctctctagttttgcattcttcagaatattgtgtggtagcaatccttcacttactaatatgtgtttcgattccctcacttcttgttatggctgtttctactttttggcaagtatgaataaagctgctatcaacattcatgtacaagttttgtgtgaatgtcagttcctttgtatgactaccaaagagcataaatatgctatcatcagtgtgctaggtttatttgcattgctatgatatatattctaacaaaaacaaaaaaggaataaacaaacaaacaaacaaaaaaaacaacctagtggaggaagggttgtttggcttacagttctggactagcatctatcattaaaggcaaatgagctgacactcaagcagctaatcccattgtatccacagtaaggagcaacgatctcctttctatttcacttccatatatctcttacgtatctcatagtcctgtccatcaccccttttaaagttgtatctgcccaagctccttcattttccatttataggagtggttttcaacctgcctaacactgcaacctttaatacagttaattctaaatgttgtggtgacctccaaccatagaattgtttttgttgctgccttat

SEQ ID NO: 26984 - DNA, 1166 bp, Mus musculus
tctgaatgttaggccacagtttgtgcaaagacagagtgcaggcaagatggtgacattctgttcgtattatcatcaagaggctgaggcaggaggatacagtgtgtgaggctagcctgagacatggacacacacacacacacacacacacacacacacacacacagagagagagaagcttaatataaaatagggctctctacacgtgggctttgctttgttttgttgtagtttaactgaacgttctgtcgtctgtagcatacactacacactgcttcaataccactcagccttctgctgttttgcatcctcttcacaccttattttgaacctttgaacaaactatttgaggacttttggttttgtgagttttgttttgttttgttttgttttgcttgtttatttgtcgtttttttctcagtagaataaagaagaaatacttgcaaaggaaacaaacatttatagtattgcagaatacacatttgctttctaggtcatatcttctgctgttcgtatctgcttttgcagtttacctttaggactctgccacaaaactgagtggtgcctggcagcgaggaggctgcgggaaggaagggcacccgagaactcaggcttatgagcctttgagtatacagcaccacgggatttatgcttgcaataatcagggctctctgaaagggccatccttggtaccagtgccattattgtagacatgagaaacctggtaaagctcagggcatgttaattcgtaaactttactctctgattcatgagcttattttatagtatttacaatatgatggtaatttgtacataaaccctttgccttgaagacaagcctgactttttactttttttttctttctttacttttgtgcagtcaattatttaagcagagatttcttgtagaagatagagttatttattcactagaaccttaaaaaagaaagacatatctttattcacagttaagtaaaatatctccttgtatggctacattttagacatactgattaaggttgtgctaccatatttgccatgataatatatcagtttatacccaagaatatgttgccttgggctgttaaagaagaggtctgccctttctctcagcagctgtgttaagtcacagccatcttcagcctcagtgcaggaatggccagctccac

SEQ ID NO: 26985 - DNA, 1984 bp, Mus musculus
ctggtgaggtaatgctgaataaataagatttgattatctgatatttcagtaaatatcagaaacttgccttttatattttagtgtttcctagttgatttatgacactgaacaactttttggctttgattcactgatttttaggaatttcagtgaagtattacaatgtattattaatactcttagggattggtttacataactgaaatagtatttctgttggccttgtttcttgaaattgagctgagcggtggttcttaatttgtggttggttttttacactctgatgatgttgtggtgagcctgacttcccgaataaaaggtgacaatggctcataaagggagaaaaaggcttttattgaacctgaaatgttgtttatggctctgccaaaggattacaattaattggcaagagattaaaaagtagtattaattcatgtattctgcaactatctagatctatctaggtaggcttctgtagcaattatcgattaggatgggctgtctgagaagtagtgaatatgattgtttgctgtatcgttaatagtcttctaaagtgatttttttttatcattctgtaagatttcaggttctgattttgctgtcatattgtaggttaagtctctgttttcctgagaggtcattttgcttctgtatggcctccttgctttctaaagtaagtttagctgcagaggtgagatgagtgtggattcgtggtaaaggaatacttaggaaaaccctttgatagcatcatttgatagatgcaggcacaggaggattgtttttcttattacttttgtagggaggatgtttatattactagaatactagatgcatgttaagtcagtgttcaggcatcagacctcagctttttcagcaaaagcctgtatgagaatggcaaaggagaactgcatatttccttaggaaaaacagattgatggaagtatgaggcaataatattttattatttaactttccataaatgtgggcacgaatttactattgtgtttattactctttgccatactgattaaactttctttaaagacagagccatatgtaagtaatatgttacagttagttaagtctgaaaagttaccttcataataaaagtcatgaaggttacaggagcagggtaaacactagtttttgatgttgttgttgttgttgttgttgttgttgttttaattgtattattgaaggtaaatactatcaagcatttgatggacctggctttctctttcctactgataaaatgtgacaccttgtgctgttttatagagcacacagtggctgataagaagccctaactgaaagagactagggacagagatgactggatgtaagaccgtgggcttcttgtcaccagaggagaatgatctgtgccgcaggcattggagatggttattgtatagtgagctggtttgtggggacacagcaacaaagctgggtgcatgtagatcacagagccaccctttcctgatcaggaaactaacaccaactccacctttcctttctttccactcctctgtcctcacgaggctcatagctaacagtccctcagaatccaaatcatgtcaaggggtcctaacatggtttcctacacagaaacttacgtgtttaaaatgtaggttagatgccagatatgtttaaaactattcaacttagctccctaaatttaaggacataagagtaaatattttcaaacaattaaattcatgtagagagatagtaaagtagattcatgtcttttggtgccattgttcagtcaaatattgcgctgttgtctttctccagctaagtgctgggtccgagtctttttctgtgattgtcctgggagcagaagtcatcatgtctaagccccagacttaaaatacccggtgcattgcctctgctctgtgtccttttcctcttaacttacttacatttattttttttaaaaaatgtcattgttatgacctaggctttgctcttggaacaagaaaga

SEQ ID NO: 26986 - DNA, 1121 bp, Mus musculus
aattaggtttaaggcctaaaatgctgtgtgtgtatagctataaaaagtaagtaatgtgacctaggactgacagtacagctgtatcgaagggaagaaaatcctatggaaggctgaaattgaacatggtaactgcaattatctaaaaggaagtctattaccttctgataaaactgtcaaaataatgatttggtactcccacaaattgttcagagaatcaataaagccaatatttcgtcacagtttgagaatttaggaattccactttctcctaagtcacaagagaatgctaatatagtttaagaatgagataattttactgttttgttcctgtttcatcttgtaactcctattagagtaaatatatttgcttgggaaacctgatgaacaccattcttggaaagcataaatagtatttatattcagtagttctgcacaggatttatacaaatatactactttgctttgcaggaatacaaaatgcacgattttgagtagagtatagataattcctactgcagtcactgcttttcttagggtcgggtgtaacatttggaccaatgttggtctttgatatcattggatacaaaccaaggagaatgacaatttgagcttgggtcactcaaacctacatgcttcccgacctgctcttggatatacctgtcaatacaagtgaacatttgtgttttaatacaggttaacagactcattcaagactcctgaatgctgattggtgaatatagattcatggtttgccctcttaactaagtcatctaaagttagtttttcacttttggtttgtaatttgggccatttcctataactagtacagaagtactttttgttgggattagcatccgtccatagtcatggctcttgacttggtgctctatccataaatatccactgacatggagagacgattcctcgatggcctgcctaccacttccttgtagacagaagactgaggggctgctaaggaaggaattttaggtaacataaacattagctacaatgtgacaattaatgggagatttgggtcttctttagttgacccattcagaagtttttctataaagacaggtgctaatattgttggctcctaagtattaaagtacagttta

SEQ ID NO: 26987 - DNA, 1237 bp, Mus musculus
taccaggaagtattagaagaccagattcccagagctaggcattcccggcccatcacttcttcacttttagtcgaagccttccaaagctgggattaggagtgaatctagtactgatgggctcctgcaaagaaaggaaacagatctgtcacagtagcaacagttggattaagtgagcacttcagtttgtacccagctgcctcagtcatcgtgctagcagccaaagcaagccggtttgcttatactcacttaaactgtcttttctctgtgcctccaagaggtctgttttctggactctgttgccatgggcatgcatgacatgttctgttgtttttgcaggtttggaccaggcctggtcatctattggtatggatttatccaggaactggactgcaaccgggaaagaggcatcctgctcaaagcctcgttccccacagacatcgtcaccttatgccatagcacagcttgaccccgaagatcctggaagagaagccggaagcaatgttactttcctgcagtataaactgctggcagcatctgccctgaacttgagatgaacccttgctgccgtcgcagccctacctctagacaaacatatcaggagtttctgttttccttcatccctgggtgatgtgaatagccaagaactgcagacacaacccactcattatcagcatttctgtctctgacaaacagttagtttatagatagtcataatcttgcttccttccgaatgctttctccttgtatactgaacagaagagaaagtatggagactgcaagatgtgagttttcacttctcctccctgtgatcaaatattttttcttctaaccctccattcatattctctctctctctctctctctccctctctctctctctctctctctcatattctctctccccctccccaccccacccccggtctcttggcgggtacactggtactgagtgttgcattaccggggaataacctagcacaatcctagaaaagctggagacaggaagtccgtaagtaaatgttccttctcacctggggctcagcagaggccgcccggagtctttctgtggagcctggtggcctcctgacttctgtggcattcagccaagctgcacaagtccccctcgatgagaatttcctcttttcataaagttgatgtgaacaccaaacccttcacaaggctgacctcctcttcaagtatgagttgccgctgtgtctggaaaaccatgctcctctag

SEQ ID NO: 26988 - DNA, 1174 bp, Mus musculus
aatctataatacatttaaaacatccaaatcatatatttcaaatgaatgccttgaatggtacttagttatgtataagaacactggcaaaccagacttactaactgtttacataagctcaatattaccacagggcttctgatatctttccttttctgatttgttcttcagataggaaagaaataagccaaaacaataatgatctcttaaaaatctaggcaaataacagatattgtgcacagctcagacactgaaaattatttatctactgtgattaattatttctataccagctctattggctaatttgctgtttggcaaaattaaattttgtaccagcaatttcacaaagtgtagatgtgtttattcacttacctggcaggtttaaattttaattcaaatgttatttcagtgggagtgtctgaaaaatgaaattgtcccattttcaaggagtctgtagcctcccgcagggcactagcaagtaaaccaacctactattctctagcagatttgcaatgggacattcaggaagtccctggcggccactgaacaaacatcactaaaccaccagctgaacagtattgtgactatggcctccaacaatgaggtcagtggagatagcagcacacagagtggagagttccatcaatctagttaggcccatggtgacttcatttctacttggaagaattcaagaagagtttctatgacttaggacaagtaaggaaacactgggcagctatgctccagccctcagcatggtacaatcagggttgactctggatggaaggtcaggggagctgtgaggaaattgatactgaataaacggtccagaacttaaatccagcatgccaggtctcttttgattggactttctaaataccaacatgaatgagtttgtaaatgcaggcagtacatttgcctgtatgggacaaagtagatgactataacagtgttggcccatgatatactggagtggaagttaaatggtaactggtgaggcctatttccttctgtccccatgggtctctaattggtcctgacacatgtcaggtactgattttccttcatgctggtttgtttaactctcagttcacagaattctaagtgttcagtgatcattaaggagtacataactggaggaagtatcaggcatgaaagataacaagaaatttgg

SEQ ID NO: 26989 - DNA, 1128 bp, Mus musculus
cgcctcgcgccctgcctgcggcccctcagctggagcgcgtccgaggcagcccctgagggccgaccaggcgcgccgcgcgggcagccggcggccaggcgggagatggtgcgcggcacctcggcgggaccgcgccgcctcccgcagccagcgctcggctgccccccgccggctcccgccgcccgcccgtcgccgcgcccctgagagcagcaccgcctcagccaccggccgcgtccccctcagcgcccgcagtcgcccgcgccgtctcggcttcgcactcgacctcggcgcggcaaaccgctggggtcgccacggccgcgcttgctgccgccgcccccctgcgggggtggccgggctgcccggctcgcggggcaccgctccgagtgaggcatccaccatggtgaggcccccgagccgctgcccgcgcgccccgccggccgtcgtcgcccgccgcccctcggtgccgccgctgccgctgcttccctgcctgctgttgctcctccatctcctgatcggatcacggtgagggaaagatgagcgaggagacggcgacttctgacaacgagtaagcgagccctggcctggttgagcccggggggcagccccctccccccagcccgtcccgcccgggaggtgatagatgcccgatgtgtcgggccattttctttaatggcagcaccccttttcattcgtgcattttcgcctctctgcttggggaagggtatcgagtgcagtgcagaggcggcgtagcagtcggacgtctccgagacagagtaataatgtgggtagctcaaagtggagtagaaactaccctttgcctgcccttcactccggcgtcaaacccgccccccctccccaaacaccttgaacatccagccaccctgcctctacagctatttcgctcggaaactaatgtgtgggagcacctccagccgcaaactgctcttgaatcctaattcgatgactcagtgactcctaaataccgattaagccttcgccccccgccccactttttaaacttatgacctatactattctagtaaaaagatagggttagggaaacattttaagaattaaataggattaaggacacctggagtgtgggcgatgttgagctattgtgttttttta

SEQ ID NO: 26990 - DNA, 2719 bp, Mus musculus
gccttttttttttaatggattaaagtttctgaagtgataaaaatgaaaatcacactaccatttgaagtccattctccaggttttcagtgtcatttctgtgcagtcagttttatgtgtcacacttcggcttgtgttggctttcttcttttgccccagattaaactgaacaatgtatatatatataacactatctgtctgtaaaatactttttttaagaaagcatttatatttatatgacagcttgaactgacaacattatgtatatagatcatcttgaagtattatttcacattgaaaagaagaaaaatatattgataactatagatgttatgaagaagaggctatttctagttttgtactaaaaatcaattggatgaactaaatccaaaaccagacactgtcgcagcaattttcagtcttatttttactgtttctacattggaggctgctgcacagatagatgatcttcgtccttgctgttttcagaggagcttggtttcctagagcagactgttacctttcaggattcctttttcttgctgaagtagagtcctggttttccttatgagtgattatccatatttgtaagttctgggtttgtaattcaggttggagcaaggtgtgaataactaaagaaaataacttgctggcaatataggaaatgccatggaaataaactgtgtatatacttctgagaagaacaaaattaatcattttttttttctgttaagcactagtcactatagtgcatctcctggttctgtactgtattttatacgcaacgtacatgctttaatattttaatgtttgtgcattaatattttcagtttgtttaaccactttgctgctaagattttgccatcccgttcccattttttcctttacaattttaaacatttctcttcattaaaaactatgataatgaaattgttttttttttaaccttggatttttgtaattagcacacatgaattcaagccagtccagaaaagaaactgatgatataatgttaatgagtctctttgtgaattagatggacagtttaatccaattcccaacatgtacgtgtaggtggattcaagaatgatttcttgttcactgtacagattgggcgctgccattgggcattttctttaaaacttctcttttgtctagaatgtaagcagatagctcaacaaaactggtgaagtaaaagtaaatattgaaaatgaaatcatctgaatagcgtgacccaaaaattctccagctggggggcctgtttgctcctgatctgtagttctcagaggatgcttgcagcctgtggggaagccttagatttcctgagcagtgcttgcggagctgcagtgccacctgctggatggctttagaccagcgctgaaagatggaaatggtgtctccagtaaaggagggctgtgggctgttcagggtggccagtgcccaccagagaaatcgggggtgaggaaaagcgctaaggagtgtaagtaagtctttccccaaatgcatatggttgctggaagaattgaagcactttttccttacacatcctgttttaaaatatttattgaaacttggaactggcaatcaaacttatgtatgtactgaagcatttatacaaccagtttcttcaactcagaagccattaccaaaatggtattcctattttcttcccagtaccagtcagggagaattaaaaaaaaaataaacataattacctgtattttatcatgacaactccagagagtgtgtatgtttctgagtagatgttgatgaggcaggacttaaaatttaaagagaaaaacttgaaactacctattttcattggttattcagcagtgcctaaaatgagcttctgaactattacaaatgcactttggattcatgtgtacagtgccatctggttctctgggtcaaacttgcttctcctctccctctttcttctcccgtaactaagtggcacacaggcatttcttagtgttcgtgtcggtcttcaaagtgcagagaacgtggtggagagaattttatggatcttttttttctgttaaaattgaatgtctgattatatttgcaacatgtaacttggattaatgtgttttaaagtaattttaattgtagtccagcagcacattgagcaagtgtagcttttctgaaaagtaacttggagaacttcagttaaccgataaaaccaactcatcactaaatgtcgctgctcttcctcttgatttgatctagatcccacttctgcgtcttacagggaacaccaaaaagttgctagtaaatgatagtagagaaatagagggagtcaaacagaaaatattaaaaatatgcgcacacagacaaacagaggtgatttatacaaaccagaatgaaggtggggagggaaggaaaattacagggggctttaaaaggtaccagttacctagcagctgggcaattagaaacctttcagttgctttggtacactgtcatccattgttcccaaaagctaaatttgcaaaagcaattagttttatttcattttttcaagaatttcctagtcgaaagcctttgtattaaagatgcacaggtttttgtgtgaacaggtttttttgtgaacaagtatgttgtacatttttgctgttatcttgacctcagaagtgcctcacttgtatattacccaccccacccccacccccactaggagcctgcctgcatctttctaataagcaatggaagcccgctt

SEQ ID NO: 26991 - DNA, 1192 bp, Mus musculus
aactttatttgctaaccttcttcccaacacatttcaaattttataagacattacacttgctgttttgaacagccaatatttatctcactttgctctttctaggagtacttttcagcacttttttacactctcatattctcatctgtcagtattttctttccactcaaacaaccctgagatttcttttgacatgaatttttggaaataatttatgttactcagaagatgtctttatttttttaaatttctttctcttttttctttcctttctttcttgtctttcccccttacctcctgtagtggctattcctggttgtcaacttgactatatctagaatgaactacagtccagaattggaaggctcaccagtgaccctaatctggaggctgggagatagaagtttctgacctggatctgggtatggagatcttgaggcatagtggctatggattccagaagattaaggcagggaaatcatacttacctggcaggggagataccatgatcacgaaggtggttttcccagggcgaggtgtatccattgcactccggatgtgctgaccactgcgatttccccaaatgcgggaaactcgactgcataatttgtggtagtgggggactgcgtttgtgctctcccctttaaacaaacaaacaaacaaaaagacagggagatctgagttcaaggtatggtggcacacacctttaatctgggctacaccttctgatggagaccatttaaggacattgaaagaagggagtctcactttctctccttcgcgcctgcttgccatgtgggactgagcaactgctaggtccttggacttccattcacagctgttactgaccattgttgggagttggactgtagactgtaagtcatcaataaattcctttactatatagagactacccataagttctgtgactcaagagaaccctgactaatacaccttccccttccttctctccctcttcctctccttccatctttctttctttctttctttctctctccctccctccctccctccctccctccctccctccctccctcctctctctctctctctctctctctctctctctctctctttctttctttctttctttctttctttctttctttcttcttttgctgtttgttttgtgagccagtgtcttactttgtagctctggctggcctggagctca

SEQ ID NO: 26992 - DNA, 1260 bp, Mus musculus
gggggtggaagaggtggatggggtggtgggggagggtggggagggggaggaggaagtggaggagggtggggaggaagtggtgggggagggggtggccgaggaggtttccaaggcaggggcgattatggtgggaggggagattatggtggaagagggggctatggtgggagagggggctatggtgggagaggttatggagatccatatggaggaggaggtggtggtggtggtgggtatagaagatattaaagactgcagatgttagagagcactgcttcttactagatacggtagatatagtgttctgaggagcatacttgaacatccccctgaggtagatcgtgtcagtgccctgaggaaggcatcctgaatacagaaggcccttttatgccaccggttgatgatcctgcaacgcgactctttccatagtctgggtactaaagcatgctgcgtctttttcaaaagcaaaaacacaaaacctatttttagaaatgtaaatatttattaccagcaacttggaaaatggaatgtattttattgtcatgtttgaatttagactgtaaactggtattttgtttaggattgaaacataatgacacccgccagtaacaaaaaggaatctagactctcatgtcatttgtatacctgtggatctgccctgtattgttaattctattttacaaaatagaggaagtgtctaatatatgtgcatagtcagttgtcctttttgaaaaataggttgaaattcctctggtcaggtttttattaaatttctgttgacatcttctttatttcactgtgtcatggcttatttgccagttggatttgaacctgtgtgactgactgaatggctaagtgaaaggttgtaggacccaggggtggtgggtaactacaatgaaactgttttctagacacagcagggaagttgcacacacacactcacagcagctgtgaccgaatgcagaagacacatatctttgcaagatcaggccagataaaatcctaccccctccctgaggaactactgctggccattgattcctgctgggggaggctgagtcgggatgtgggatgtgggacatgagaggttacccatggtctctctggtagacgtcccatgcaggcagacacagcactaagtgcactcagctaaaaccagaagcacatgaagttgagaatgaaaagtgtgtgtgtgtgtgtgtgtgtgtgtgtgtgtgtgtgtgtgtgtgtgtgtgtgtgtagatgggagactccagccag

SEQ ID NO: 26993 - DNA, 1119 bp, Mus musculus
acagaggaatatgaactgtacatggtgctgccccctaaaggactcaaatcatttaagatattcctttgatgaaagaccactgcctgtttgcacacctctttggagcatttcagtgacaaagagctggcttgtggtgagtgtctctctaaactttaatgaactactttacacacagttatccttcttctacatcccatctcagaaacgtgaaaagcatagcacctggtactacgcctctggcaggtgtctatattatgtggaaacttttatggagtgataggactaatggaagacctcaaaatttgtattttcactctgttatgcactagtacaagtgtagagcttgattctttagacaatgcctttttcttatttctcatccccaataaagatctcccagtgagattttgtgtaaataatctgtaatataggaattcagagggcctcagtcatttatcacagctagatgaccttacagacagcagaaaggacaggaaagatagtgggagacagtagttttcctcacaaattcttacattccagccaagacaaaggatgtgtgaagtctgagttggtactgttcctgcagaatggtaggagcaggtgggatctcctgatacaatctggaacaaagtttggcctgtcacatgaggttttgtttaccaggctgtcttgaaatgtctgggcagatgggtgtctgccaaagcaaggactgatcctgtctgtgaacagcaatgtctctgctcttcttctctgtggagtgactcacccatttactgaccacttgtgaaattgtctaaagatgtatactgtaaaagcttcgaaagaactgtacaaactgtaagatattttatacctattttatgttttctgtgtctcatatttatatcataaaaacattggatccctataacttcaaagtcgtgtgcttcttcactttatacatatgtaggcattttgttaaactttttactggaattcaaaccaaaaatgctcctccagtctattaaaaagggttttctggggggggacccctagcttatttgggttaaaatgttcttccttttttacaggatgaggaagtaacaatgcagatatgtccaccttataatgacctct

SEQ ID NO: 26994 - DNA, 1567 bp, Mus musculus
tctcagtgagctctagctgcctccgcaggaggggcagtgcgcctttactttatggttagaaaggcacaaaatttctatcaacctaactaaaacattccttttctttctttctttctttctttctttcttcctttttctctcagttaccatggatttttccaaatctcttttggtttttgtttaacaaatgctttaacaatgtaatatatttattttgttcccctattctggagggttcgtcggaaggattgttactgaaacaggaagcgtgggactatctgaatcatcttcgtagtgagtctttatgactgtaagattgtaaatacagattatttattaaccctgttctacctggaattagactgcatatagcaaatgtttgcaagcaggtagctgaggcggatcagcaaatctctccaaaaccagtgtgtggaaaggcagcagaggcagctgcttttcatctggggctcacagtgaatgatttggactcctttggcttcccctttgttttctctgtagtttcaagtggaattaggtggcggccgcttgcattcactcctccttgtaatggaagccaggagtactctaaggcccacaccaccccttgtgcctatttccagggagaagaaagaaaacacaatcaccttttctttatttcattttttccccaaaagagacaaaggtggaacttctatacaaatattacctcatttgttgtgtgactgagtaaagaattttggattaagaagaaagagtttaagtgtcaataaacttaaaactactgttgtgtctaaaaagtcggtgttgtacatagcataaaaatcctttgccgaggatgatcccaagaaagaaacagctttgtaatgttaagtacaacttctcaaagttctggttttgttctatcatcttttacaccgttgcttttatttttataaattattttctcgttgccattggaatagagatctcagactatgtagatatgctatttaaataatttatcaggaaatactgcctgtagagttagtatttctggtttttatatgttgcacactgaattgaagaaatgttggtttttcttgtttcgttttagtttgtttctttggttttgtttttgtttttgctttttacttcccagttttgactctttgccaataccctttttcctaggaacgtgcttttttttttattttgtacacatttttatccattttacattctaaagcagtgtaacttgtatattactgtttcttatgtacaaggaacaacaataaatcatatggaagtttatatttatacttacggtgtctgtgtttgttttgttctttactgtctggctatcatggggtatgggcaaaagccattcctaaccaatagcacacacacagcagggcaggaaataacgttcgtgattcctgtattattgacaggcgctagacttagatgatatatttactacaattttggaagaagaaaatacaagtctgccacatgacaaacaaaataaaaatgacccttgtgtcacaagccactccccctcaaagatttttcatcattttattaatat

SEQ ID NO: 26995 - DNA, 1196 bp, Mus musculus
ctgtgtagccctagctgtcctggtcctcactctgtagaccaggctgccttgatttctttccctttaagactagttctttcttaaacttcagatatgctctatgatattgttgagtaggaagttgtctgaagttttccctttttgcttggggagtgcacggcctgcagctccctggggagtatgtctcagctgctgaaggagtgaagactttgatggcataccagttgccaggacaggtgtcccagaaggctttctcatgccagctactccaagtctgtgtgaaagtcacctgcttccccagttggtaccttttcttgttctggctttcaggcctattcaaatctactgagagccaacatggacgggctgaagaagagggacaagaagaacaagagtaagaagagcaaaccagcacagtgacaggcgtggctgctaccaaccagctgcacaagtgcatttttcctctgtttgctgctttcagcacctctgtatgtaactgtttccacggaagggtcctttaagagagaaggactgggatgggcttgggctagttgtggtaagacgccagtttttgatttgtgctgtgtggctggatattcttagattccagccgtaaggtttctagtcatctttgaggagctatgcatcattaatctccaggctagctgctttttttcctaccctatttatgacagtaactactaactctagatggtacagttactcaagtgatttttaccttgtcatgagattactgtaatagttttattaaaagttgtgttatcctacaggtggtttgtttttcttggttgtatcatttaaaacaacaaaaaatgcatctagttattttgtatgtctgttgcacatttgctctgtgccacagcaacaacctgtacgattggttttctcgtactatgtgtgtctgggactgaactcaggtatttgggctgggcagcaagcatctttaatgccgagccatctgtcttcctggaccttatctaatcttatacgattccttcagctagtctgagttctcatagccaaacaggagtttgcttaaggacattaagataaatattggagaatcatcaagaataaagatcctgcctggcgtggtggcataacctgtaatctccgtggtctggaggcaggctggttttgagtttgaggccagcctgggatgcatagtgagaccc

SEQ ID NO: 26996 - DNA, 2098 bp, Mus musculus
tgcgtgcccctccccatacagaaccttgtacttcagttatctttaacataacttagtagactttccatctgtcctaaggcatgactgtcagcttcagcaaccttgctaggtgcaggctgggtaccctgtggcctgagaactgagcccagagtttgacctgaacattgagcctggaccaggcagaagctggtcagaatgtactgtctccattttgggccaagccgggaccaaacttactaactcaggcaagccagggtgaaacttaaaccctcttttatctttaacctgaatccaggctggagttgaagctcaatgataaagggcttgcctgtcggtcaagagaccctcggatggatcccaggactgtaaaatataaataaataaaaatatgccccctctctccaacctcttggaggcagctggcagcccagctcaaggaggcaagaggttccccctggctgcttgctttaattggccggtgatctctgcctggtgaattggttttatagtctctgagtccagcccctggacaacccctcccctttgcctctccagaactccaggagcttggctgtctctagtgaagagtggagattcagattctgagggagggagggagggtctgacctgtgtggtgacctgtaaccagctgaaggcaacaggcttttgtggtgtgctgaggatggggggtgggagaagagctggaaaactctgtagaaatgccctagaggaacagaagccctgtattcaggggccaaactgctctactaattcacaatccccaggaggcatttctaaaagccagtgaacagatctggagaggaacatcccccagtcccgtcactgactcccccagggagactggggtggtacgcaggagagtggggggagggtgggcactttgcctggccctgtctctctgtttcaaagtttggctgtgctgttcagttgtccccagtggccttgtcttgctcaatcagaggtggaaaaagatcacctcccggtgacctccttcaggccccaggggatgggctgtgtccagagctatgtggcagagcttgtttccagagcccagagaggccccgctggcctgccttgctgccccagtggcgaaacgcaagcccaacactgagcatggcagggagtgggtgttggggacagtctagccaaggcccctgtctgtcccaagctttccaggaactaagcagtgaggtcactgtgacagtcctgcctggtcagcgaggagaatattctgagctttcccgctctgggacttactggggagggggcgggtaccagtgtatggagtaacaagacatcagccttcgtggctctgcaggatttgggggaatcagtacagtggccactgtggctgctatgaagataaggccttttggagacaggctatcctggcctgataccctggttggacctagagggatacagggtggagccacagtcatttcaagttccctggggttcctgtgggctgcagacctaggggacagagcctcaaggaagacagcagaacaaagctgagctcttccatatatgccagctttggccaaggtgctatgaggtctgtgaccccaggcttgcactgcccctttctctacagttgtctgatgtccaccccatctctgggttcacagaaactgacacggggagacccagcgagatgtagcatttccttcatccccagtctggttggcccggggtctgggcatcctgccttaaggaaaggaatggggaccattattttttaacctgtatataatatttgacctttttttggttctttatatgtatacatgtgtaaatatcctctcatccatcaagtggtacagtttttaataaaaccatttaaagcagatctgttctttattttttctaaggtgtgttaaaagtacaagagggagcatcaaacagccttaacgtgtttctcccatgatagccagagttaccgacaggggtgttgcactcttgtcatggtctttcacttcttggagttgagaagaacagtctggctgcatagtagtagagccaccgaagcccagtgcctcgggacagaggggctttggaggggtcagcctgggtt

SEQ ID NO: 26997 - DNA, 1477 bp, Mus musculus
gatcatggctttaacccaccaggaccctgtctgggagcctcctggctaagatcaactgtgccttggctagcccgattcacgtctgggttcccacttggcacagccagcgcccaccgcatgggctcagggattcttactcagacgctgtcaacttccggaagacctcagggagggtcggacttctccaagaacccctcaaaggtgccacaaaatgaatcaaacttgagaggcttcaagtctgactcggtcctacatggaagccccttgattggtccccaagggtgcaaactactgccacctttgctggagccaagtagccagtcaccatgccgttgtacccagcggcctgtgcctttgtcagctctgttttcagaagaccctgccaatgactggactggatctgtctgcatccatctcagcagaagcacttggagatggggtgggcttgctgggggcgtgggaacccagcagccatcccactgataagttggtcccgggggaatcctagacctcttggtttccttggaaacgtgtacctcctcccccttacccccattccttttctgtacctagcgggatacaggaagaagctaggactgaggctttgtcagctgaaaagtgactttggaagtaacagacaatgtttagaccatggaaactgcagagctgacacatcttgaatctccctttagctttcagctaggccagaaaggagagttctagaacccagcaggaccttagctgcctgggagctccttccttctctccccgctgcagtgctcagggagggaacgaaaagcagctgatcttagaaattaagtcctaagtgttatgtatgtaaggaaagacattggtgctataatgaagatgagccaaggctcaaagaaagatggcttccctagacaaagaagaacacaggattattcaaggactttggaggagaaactcagagtagactcaaattgaacaagcccagtgactccccattctgcagaagtggggggggggggcggatttcagtaccataaaagggcaccggatctcctgggtgtccagttgggcaggtttctccctgccaaggctaccgacagagggggctcatagaggctgaggtccagcctgtgccctgctctctaggctgcacatcctgatgtgggcagggtctgcccagagtaaggaatgtctttcctaatttgcacaaaggtactgtgtgcactctcagtggtcctgaggaggaccttaaggcatgtgtataagcctttgtgtttttctgctcagatgacctggagatattacctcttcttggccacaatcatttttctcagggtctataccatagttcgtctgctaagaaagtgggtttctgtttgcaaggagaggggacccaagtaatgaatatgaagactggttctgagggtgggcttgattatttgtgaagcccagccttcctacatcccaccctccctgcagtttagat

SEQ ID NO: 26998 - DNA, 1162 bp, Mus musculus
acacttcctctaacaaaggtcacaccttctaatccttctcaagtagtgccactctctggtgattaagcattcagatatatgagcctataggggtgattgtcttccttccttccttcctttcttttttccccctcaggtgcactactttttttttttccaaatactatgatgattatactttctggtatttttccatactatttcttttttttttctttttcttttcttttttagttcactttacatcccgatgacagccgcctccctcctttcttcacagtcccacccttatgaatccctcccccattacctcctccccttctcctcagaaaagaggagtcacccttgggtaccactccatcttggatgatctactcccaacaggactaagtacttcatctcctactgaggccctatcaggctgtccaggtcaggggaaggatatccaatggccaggaacagaggccaagatagcccccactccatttgttaggggacccacaggaagaccaagctgcacatttgctatggatgtgtagggggtctaggtccagctcctgcatgctccctagttggtggcccaggctctggaattcccccatggtcctatgttagttgtctctgtgggtcttcttgtagtgtccttgagctctgacttgctcacttctatcccccactcctccacaagactccctgggctctgcctgatgtttggctgtgggtctctgcatctgcctccatctgctgctggataagcctctctcaggagacagttatgctaggttcctgtctgcaagcatagcaggatatcattaatagtgtcctacctggctataggaggtggccgcttcagtctctatatcctcctctggtaggaatctcagctagggtcacccctatagactccctgtatcctctcctgtctcaggcctagtcaccagaaatgccccgctgccaacttctattctcactcccagccctctcctccacccctaccaagttccttctctccatacactttaatgactatttagtttctccctctgagtgagatttgcacatcctcccttgggatctccttatcacccagtgtgtagattgtagcatggttgtgctgcacttcatggataacattcacttgtaagtgagtacatgctacaca

SEQ ID NO: 26999 - DNA, 1115 bp, Mus musculus
tggtcttactggttggagggctcctcggtccctcctattccactgctctgctgcccacagaatggacaccagctgaggaaggccaggctcatgcctgccatcctgctctatctcctgcccctgcccagggggaatggaaaagatgcattaaagaacaccatgatgtttgaactactgctcactgcctgggtccatccgtagacaggcagtgctggagagtcaggcaaattgcttgtacccgtggtcttatcaggggtaggattcttctggctgcaaagaacacttctctccaatgtcatatgccaaagaaccccaacctagctatgtgtctcagagtgttagagggtatttgttagaggatatttctacttgttatggaatacagaaagcacactgggctttgacagaatgtattgcaaagtggaagataattccatacaataccaaaatgtactatacaaaatgtcaacatcagggtcaaaaagaaggcttagtgattaagagcactggtctcttccagaggactcgggtttgattcccatcacccatatggcggcttacaactgtctaattccaattccagggcatctgacaccatcacacacatacatgcaagcaaaacaccaatggacataaaaattataagaataaaataattttaaaaaaagagctaaccattaaaaaatgtcagcatccccctgccacatccacacactaagaaacactatatgggggatgtaaggcaatgggctatgtacagacggccttgtctccagtcaagctgaggtcgtgaaccctggtgaaacccagtggtagtaattttcacctacataggactacggaaggtatcccctcatgtctctggacccctggctcctattgaagttaccgccccatagcccccacaggagaggctcgcagacaatgtcccaagcttctgaccttcaggctagactcctcccagttacctagcaacagcaagataacaagcccactataagaggggctacttggccccacctccctctctcctcttactctctctctgtcttactctcttagcttttacctctcactaagccttcacctttcttactctctaactctctctcttt

SEQ ID NO: 27000 - DNA, 1170 bp, Mus musculus
taaaggcgtgtgctaccatcacccggcttgttttgtttagttatgttttgttttataaatacattttttttttaaaaaagagctaatcatgtacgtatttagaaacaggagtggatgctgctactggtgtctcattgtcagtgggaacccatgtcagacataaagctgctagttttctgttttttgtttttttctaaatttaagttaacttcgctaaacttaagatgcttttaaaaattatttttcctagctttaactttatttgtacaatactgtcaccaacacccttgccatgttctctcttgtgttgagcatttacttgtagagcgtgggataggctctgaagctgaagagaatgatgatgctcctggcgaaccagctgcgtccaaccccaaagagccagaaatcccctctctgaagatgtcatcacagtactgtgctgtaacactgttggcgtgggcttcatttctgtttccttcttcccagtgaagccatgtgcctggagggagcagagtgggagctgagtaaagaaaacatacagcccttacggcacgggcgggtcatgtccacacttcagggagctttggcaaagcaagagtcagccggccacactgctctgcagcagcagaaacggtatgtagtggaatgctttgtgttcagcttgtaagtccctggtgtgataggcagcatgggggtgaagctgccgaaggcctacaggcagtggctctcaaccttcctaacgctgtgaccctttaatacagttcctcatgttgtggtgacaacccttcccccccaaccatagcatactttgctgcttcataactgtaattttgctactgttacgtatctgttgtataagagatctgatatgcaaccctgtgtgaaggtcctttgactcccaaagcagttgcagcccacaggctgagaaccactgccctaaggaatactcttcagtgagagtatggaaatctgttcttccggttttctgattgcaagctttcaatagcatgagatagtatttatttcaggctaaaatgtaaagtgtaaccatactcattgaattagatctttgagaaccgtgcttttatggttttgttgtagatggtagcattctgtttttgtttttgtgagactggctctttctggcttagaactcactgtgaagttcca

SEQ ID NO: 27001 - DNA, 1113 bp, Mus musculus
agagaagactgaagtgttaggacaaagggaaaagtaaagaaaacgtataaaaatgttactagttgaatcactgagaacttattactatttcttactaagatttatttatttttagtgattagtatgtttgtgggtctgtgtatagatatgtgcatgtgagtgcaggtgcccctggaggccagaggagggcttctgggatttcaagagttgtgagccactccatgtgggtgctgggagctcagctcaggccttctgcaagaacagtatgtgctctgagctacctctctgccttaaggtttaaaaaaaaacaaaaaaacttttaaatctcattgcgaggaggtatccctcttaattcagagcagagagtgtgtatcttatatggcatctatgttaataattaaagcttttacatgacattgtcatcacctttctctcctagctccaggtcagagcagagggttcctaaatgcagttccccagccagtacacggtaatcgcaggatcaccgtttttgatgaaaatgccgataccgcgtctagaacggagttatctaagcctgtagcccagccatggatggcaccccctgtgcccagggccaaagagaacgaacttcagccaggcccatggagcacagacaggccggcgggacgcagggtgaggactcaggggatctgccagtctgatttggagttggttggtctcttggtttgttcttgtttgagttgcttgctttgtgtgtttgatatgggctctcactatttagcttagtctagccttgaacttgctgggcagcccaggctggccttcaactctccatgctcctgcttcagctttccttgtgctagcattatacttgtgcaccaccccgcctggctgtgttctaacactgcttaactcctagactatttagaggttgtctgcatacattttaactttttttctccattcttagcctcatgacaatccagcctctgtgacgtcgattcccagcgtgcttcccagctttacgccgtacgtggaagagagcgcccagcagacagtcatgtgagtgcttccagatcatgtgcagaggagagggcgctaaggatgcctgagagtcccagcgcatctcgg

SEQ ID NO: 27002 - DNA, 1579 bp, Mus musculus
acacatgtaaaagcaaatagatctttattaagaggatatataaagttctgacagaagttggagtatactgtcctgaggatggcttcactcttgtttcttgcagcccaattattgaagagagccgtgaggccacccactcatctggcttctccaggtcttcttcctcagctcccagtacatcctccatcaaaggctttcagcttctggaaaagctggagctgactaatgacggggcaggtagagtgttccagccaacagcaagcttccgagtctgctcagtggccgtttagtccctccgcaggctgaccctgccccagttgtactatttcccaaataaaccagcactaattcaacgtatttcatatgcccaaagcaaatgaatgtggtcaggttagcagtgttgattttgtaatgttggagttccctcccccctcacctgtttttttttgttttgttttgtattgtttttctgagacagggtttctctgtgtagccctggctgtcctggaactcacttatagaccaggctggcctcgaactcagaaatccgcctgcctctgcctcccaagtgctggggttaaagatatgtgccactactgcctggccctcgccccctttctctccgtgtgtgtgtgtgtgtgtgtgtgtgtgtgtgtgtgtgtgtgtgtgtgtgtgtgtgtgtgtgtgtgtatgtgtgtgttgtgagagaggcagagacagacagacagatcatacaaaggctataaagggcatcagatctcctagagctggggttataggcagttgtgagctctgagacataagccaaactcagctcctctggaagatgaagaagtgctcttaactatctgtccagccctttactactgtgttttaaacattaatttatatatattttcaacttcttttctccacagaagatgctattcagtcaccctggtgttcacagtatcgcctacaactgttaaaatccctactagaattaagtgcttttgcggagttttctgtggaagaccgaccgatgcctgtgctggaaatagggaaggagattgagttaggtaagtagtgtgtgtgagtccttgtccttttgcacatacacataagtgatttgaatgccacaggcccttgaacactaagtgctcctaggttgtagtagatagcattagagaggttaacacattgataattcatgccacaggaacaatactacttcttcttttttttttttgcctcttttagtatttttcttagatttatgtattttacttactgttttgcctgcatgtatgtaatgcctgttgcatccctttactgcgtttacagatggttgtgaggcggcatgtgggtgctgggaattaaccctgagtcctctacaagactgctaagtcctcttaactgccatctgcctggggctcctttggatttttatataaataactttgaagagtattttagatgccacttaatggcaaaaacactagcacttctcacacttaagccaggaggtaaagtgtaaggacctacatatattcacagtgactttaaaatggaaccaaaccttctcaacaggtcctgagga

SEQ ID NO: 27003 - DNA, 1104 bp, Mus musculus
tcagtcctgtcaccttcatacccctgccacgacacacgcacacagtaaatgtcctgtcaccttcatacccctgccacgacacacacacacagtaaatgtcctgtcaccttcatacccctgccacaacatatgcacacacacacacacacacacacacacgcacacacacacacacaaagtaaatgtctttatttttcctttctgccttttcctcctgggacccagaggtctcacctgtaccacccacccagcaacaattagctcccagccttctctactgacaaatcaagaaccaattagagaactagaccatagtatcagcacctccccttacagtactgtagagagagttctaggccatccagggctacattgtgagatcttgtctccaacagtgcttccaatctgccagcctaatcaatccgcatgttctaattgcccttccattttaaatattctgtcttacaggcatcatctcagcctatcccgtgggatttttatatcaacctcaagttgaaggagcgtctgaatgaggactatgaccagctttgcagctgctgtcagtaccaagatggccatgttgtttggtaccagtatataaactgctccacccttcaggtttgtgatactactgcacacactccatctatgctaggcatttcatccagcgctgcagagatggcttgacactggctgccaggtccaatggcctgagcgggatccccagaaccccaatgggaatattgtgacaagaattaaacctgataaattgttctcttctttccacttccacatcatggcatgtacacacacacacataaaaataaatgtagttaaaattttaagatacttaatacaaaattcctttcaagcatctagaaatagaccagccaggtggtggtggcgcacacctttaatgccaacactggggaggcagaggcaggaggatctctgagttcaaagccagtctccagagcaagttccaggacagtcagagctacacaaagagaaaccttgtctcaggaaaaaaaaacaagtagtctagttttaatgtttatttatttaacactgtgtgtgtgtgtgtgtgcgcgcgtgtgtgtgtgt

SEQ ID NO: 27004 - DNA, 1193 bp, Mus musculus
tgtgaggacaccaggatgggtgtgcagtgtctcacatgactgtgtcgtgtgcaaacatatctgctgactggatacatggtgtatacctgaagcggttatgtgggccacagtagatcacagctggagtctgcaaatgcactaggtgtcctgatgcctggtaatccaggtaatccacaaagacagtctgttgttgttggctcttaaaaataacccattaaattggacagtggtggtgcacgcctttaatcccagcactcgggaggcagaggcaggcggatttctgggttcattgccagcctggtctacagagtgagttccaggacacccagggctacacagagaaatcttgtctcaaaaaggccaagtcataatagtaatccttaaatgatctggtcacttcttctccctgtcctgtacagataaggacatctactaaggtctagagctgtcagtgctttcagccctgtgtaaatcagttgctaatggaagcagaggccactttacactttagctcatgaagcgttttgtgatttcaggtagatctgttgggtatagcagacctagcgcacttactcctgttcaaggagcacctccatgtcttctgggatggactcctctggaaacttagccagagcacctctgagtgagtactgggtcctccagggttcctccatatcccaatagtttgccctctctcttcagcggactctgctgtggtaggcaacctgagttttttaaaccaagtgctgtctctgcgttcacttcagtgtctgcagagcacctaggacagggaaaggaatggccagctgaaaataagacatagacctgctcagactttagggcatttcttagcttagaaatagaaacactttagaggaataagttttctaaccaattggtgttagtctttttaacagctgtgtttatcaaaagtcggttgtcttttgaagagttaagtttccacatggtatactgagtttagattattatctattaaatgataaggtagaaccaaaccaccgagcagtctcctggtgcagaaataagtgatctctcaggtctgcttgggaatttgtcagacaccttacatagcgccaatggcttcccagcataggctcaccaagtagtgacgcactgcatgccagttctaaagttggttttcattttagatcagtgttgaagactgaatgtcc

SEQ ID NO: 27005 - DNA, 1578 bp, Mus musculus
gattggcaagtgttttctctcattccttttccggctcctcaactatcttaccggttccagatcttgtcttatttcatttcttgcccttctagatcttgtcttactcgtgtttgcatttcctagtttttgagcctaacacagcagcttgccgttagaaccaaatcagttgcaaaaccagagctttgatgtggttctgagttgctttatagggtgagaaagagcagaaggtagaattcaagttcaggagtgtgcctggctagccagtgaagagaccagctcttggaagattgaactggcagctcatctttctcattccttataagcttccacttaaatgcagccaacgattttctagaggtggtctcacacacgcgcacacacactctcggggcagcaggaattattcttcagtttggattccatttccccctgccacttgctgttaggcagttgagtgtgggtagtgacagcgatcaaaccccttagtgtttcctttttgggaaataagcaatttaaaagagaaacaaaataggaaacttgtataccttagtcctgaaactgtctatccacttttctggcctaccttgtagtcagctctgattcaggtttacaggacaatagtcttgatttaagccatgtcctgacctgggcaagaaaatagcaactaagctggcagcctcccagcaggctgctaacacccaaggtgtctgggcttggagagttcttcacagctgatgaggacttaagtcattaggaggcccatggggactttttaaatttttgatgagagactggggggaagaaacataaaatgccactttgtatcttcaatgatagcctgtcatttatatttatggtgtgaatttttagtcctatattttaataatttgtaaattgatctcttattccaagaaccctctggactcgtgggagagtgtctgggagtccactcctcttcccctcctgaccctgctttatggactgtttaaatccactttggatcaaagagttcagcaagaccactcgtggtccagctggcctcctgactctataagccttcactggaatcgggacattttctccagccctagctgtgaacatgaccagagacattatttataattcagccattcaagatatacctgtactttaaaagtcctgtatattttttaaaagttttatttttcaggtgaacagaaatacattctaagaactctgcctaagcctgtgtaagttggtcatttctcttactgacttggggaagtaggagcagaggtggtctcaggtgcaaggacgctgtgatgaataggttcaggaagaaaaggcaatcgccttgctgttctcagtgcctgccactgaagagattagagaggggtggcaggatccgtcttagtcagggaggcccctggtcggaaaatgatgtcagcttttgccaataaaagttctactctacagaccctcaagcggataccttaaggactagtaagtgcgaatattgagttttagtcacaaacatttagctgtctgaggtgaagacacagctgtctgctggcatcaccctctcaccttaaactgttg

SEQ ID NO: 27006 - DNA, 2173 bp, Mus musculus
tagggaaattccccgagccagcacagataaattttaaggtgggaaataagatgctgtctggtactggggtcgcccccctctatgtagcacgggtataacggtctggtccgggtgctgtctttgttgtaagagttgtgttatgggtttccctctgggatgatttccctttcaggccttgaaggtgaagttgaagctgaaagaagaggagagtgtccagttcctggaacagcagaccttatgtaaggacgaagccagtgacttcacaataatcctagaggaaatggagcagctcttagaaatgtagctcaaggcaggtggccggacggcttcttcctggataaaccctcggcagaggctacttaggatatcttcaaggactcaccatcccttaggtaaagaccttctgcagcagttgatccgataaggccagttgatgctggggttcctcctttaagcagattgccccaccttcagatggctcagctctcctgcaagagaggaacctgggagtttgactccatttcctgtgcagcagagagagcagcagcccttagaactaggatactaaaccagctgccttggagactctagagactcggaaacatgggaagaaggcccacaccacaacagcacgagtgctgtgcgagagatgtgactgtgagccatgctgtccccttgtctctctggttgagttaagttttatgaacttgaaattcttgaagtttttttggcttaataaatgggggtggaggtatacaaagtagcacctacctaaaactacaactagagctttggaaataaatgtttctatgaatattaatattctgactaacactagggaatgaaagtagcctctttaacccagtgtggtggctcatatctataacaatcataggacttgggaggctgaggcaggagaattgtcttgagttagaggatagcctaggctgcagaaatactgtctcagaaaagcaaggaagatgttggggattaggaaattgccacacaaaccatatgtacaccaatctcagttaagcaagaatagtttagtgaacgcacatcataatatggaagtccgggtccacgagaaggaaaagctcaactgtggcaccagtctgctctcggagtaggctttctataggaaaaaccaggtttaaaggtcaaggagaggagcagctggcttactaggtaaagtattgttagccaacctttaagccaattggtcctgagtgaggtaagaaagatggtggtcaggcggtgaacaagggaatttcagaacactgagataactaggaacaagtgatttaatcacgttgtttttgcttgttagtagcatttttcagtgtcagttacactaatcactatgaccttaatttcaccttgtgactaacattgagcctgaatacaaatggctacagttgtgttaaaaggaacaggcctcaacatgaggaggaggaggaggtaggattaagcggtgtttggtctggatctgtgagttgagcatactggcataagtccaaggtactgtgactgcctttccctccatccgctccgtgcctgtgacaaggcctcctgccttccaggattgtcagttcttccacattcgtagctgtgtgtgccatgctctattcaccgtgttggtggccagatgcctgtgttctgtctgtatgtctgcagcttgtctgtcagagccaacctagagcctggtgcaacaggccctccccattgggatcaccaaaatgcagccatgttctcccccttagctgaaacacagcagcctttgctttggccattcccattgcttttgagctttctgttttctttaccaaacttgcctaatgtctccttcaaaatcactaagactgaccagagtcccgatccccaacgaagctgagtaatgtcccatacttaactttttctttctttctttactttttcaaatgtataaaatggtttataaggtttataaggtacaactaaagaccatcgcacagcaggtgaagcatacctactttatataggttcaccatacacagaatgggactccaggaagagtcctatagaacactgcattctggcttcctgtgtgatccacatctgctcctttgacgtgtgattcttcgaagatgaagtcctagcagaagtcatatgagggagttcacagtctcatgga

SEQ ID NO: 27007 - DNA, 1127 bp, Mus musculus
tggggaggctacagggcctcccaactggcaagagcagcccaatgagcgttggccgtctgctcctcctcatgggccacccacccagccatctcaccaggccccaggcaaggctctggagaacccgttgcgccccaacctgcctctgctgatgggtgggcaggcagccctgaagccagagcctgggcgtccaggagaggagtcacctgcccccaagcaggaactgcatcagccctccttccctgcgcctcagctgtctccgctgccgatgcctggcaacccagccgactacagtggtccatgtggtgggcctgagctcacagcgctgggcagcttctacctgtactgtggccaagatgggctgcaatgtggggcttactccccttgccccatgctcccagaaggcaagctgtctccggtggcagcccccaatgaggggctgctcatggcccccagctcagtgccctctggcgtccctttccagcaccctccttggagcgcacctcgctactgctccagtgaggacactggagcgaatggctacagcatctgtggagtgttgcctctgtctctcacacacattggcactacctgtggtggctgcccctacaaaatgccttttaccgcaggtaagccttgtggggacacatggtatgctgggggggggggttaagacatggtattccaggaggctctggacaggggctctgttggttctgtgtactacctgggaggcaggaaccttggaggagggaacctcttctcatttaggcaatgttttcagcctaggaactgtcccaggagtgtcccacggttagctcttagggcctgttttgcctagactgtcagtgagatttctcagcttggaagttaataacattgccacggaacaggacaagaaggttttcctcccatattggaattccccttagactcctaggcacaggagttagggccttctgtaagccctgtggtacaagtctataagctcagctacgtagaaggctgagtcacacttcaaggccagctagggttacagaaagagaccccgtctctaacaaaaatagaaaaggcttggggcttagccatgataggaatgtcagcttagtgtgtatgcatggggttcaacc

SEQ ID NO: 27008 - DNA, 1099 bp, Mus musculus
ccccaagctacccaacacttattcttttctgtttgttctactgatcatctctctcctagtgcatgtgatataatttctcacagtggaatatactctttttgttgtgttgtttattatttattctggacataaaatcttaacaaaagaattaacagcccaattacaaaatatccaaaaatgattctggttctctctctctctctctctctctctctctctctctctctctttctctctctctcacacacacacacacatacacacacacacacacacacacacacacacacggtctggttaagagcactcattgctctttgagtggctcacaaccacctgacaccccagcattaggggacccttcccctcttctggcctctgccagggctacatagtgagactcatgtctcaaaataacaaagacggaagcagtgcagttaacaaaactaacatgttttagaatggcagatttcctggagtcaggactgttaccaccagagcactgactctgttatgatgccttgccttccacaggtaagcactgtgcgtgatcacggctgtctttccactccaaatgagctcttctctcatgtgaagcgcattcttattttcaaaaccacattttatcagccattagccacatcaaaataattggaaaatgtctgtctattgctaaagctgcctctgtgtgtatgtggggcggggggggggggtggagtgggagaggggagtgtactgagaccctgtgtcaaacaaagaaaataacacacacagacatttttgtaagccttgaatctggggtaactcctctcctcctccatctttcctgctctctctctctgtttttcttgagagggtcttgttatgtagccaggatagcctcagaatcactaagtatcccagctggcctcacactcagtttctactttcttaagctttccaattgcttgagttatagacagccatgtacaagcttgccttgaagtttttgtttttgtttttaaatcccaaatggtagaattaaacacatgcactgccactcaggattttgaagatttcttgtgtataataaaacatagactataagcaaacaaacata

SEQ ID NO: 27009 - DNA, 1211 bp, Mus musculus
agggctgagattacagatgtgccaccacacccagatccttttttattaaagtctaatggcaggtctaataatgaccatagtttttgtttgtttgtttttctgggttttttgttttgttttggtttggtttggttttttcgagacagggtttctctgtatagccctggctgtcctggaactcactacatagctcaggctggcctggaactcagaaatccgcctgcctctgcctaaaggtgtgcaccaccacgcccggcatgaccatagttttaaagtagtgaatactgtaataggctgctttctgttactacaatagaatacgcgaaactgaatgatttatatagaatataaatttcgctggccatggcatggtggcacactcctgtactttctggactgaagaggctgaagcaggatgtatgattagcctaagctaaagagtgagtctcaggctgctcataaacagaggcatctgtgggaggcacttgctctcagttctgggggctggaaaatctgagagatggatgctctgtctgctgctctagatcaaatttctttttgctttgttttgattctccagtcggggcttccctgtgatgcctctggctctgtagaccaggctagccttggagctcagcaatctgcctactgctgcctcctgagtgccaagattaaaggcttgtgtcactacccagtttggatcaaatttctgacacacaaaatttgacagacactctcaaaccataggaattctaaagcagtcagagtaatataaaatacacgatttcaatcagaggcaaagtcacaggcaatatcactgaagctcattgccttatttaaaagtgtttttgatgagagattatgaaaatgattgtcgctgcccactcttcacccacaaaaaattggctactaaattgtctgcaaggcccctgaagggatgtatgtcccaccaggacagaaaacggacagtaagacatggctgaagagaactggccaaaagtgcccagactgtgaaggtagcaacattcccaagggatttggacctaaaatggaggaaccaggagagaggcgtctgactgccttccaatcatcagtgccacaaatcttgctgaagcacctgcccctggtgctgggctcttgaacactgagcatgcccagtgagaggaatgtaaaatcaccactccaggggatcattaagaactcttcatgat

SEQ ID NO: 27010 - DNA, 1145 bp, Mus musculus
cgaacccatgcgtgcagagcacaatggattagcagtccatcgccttaaccactcggccacctcgtcccagaagctagtttcttcctggtagctatagggagtagacacagagcgctgtgacgcaataccatggaagtcgccattttgtacggaagccaacagtgcgattgtttactctgcaaacactcgaaagaagatggccgttctcagaataacagagacgaagaaaattctgtagaaaagaagaaaaacccgagggaacttaagtcagagcagaggaggacagagaagtttatgtcttaggggcggggccggtctggagccgaaggggtggggtctgcgcggcgcgcagcactgagcatgcgcatcactagggcggttagatttgaatacttcagggacgttgagaggtgacgtccgactccaaggagcgcgaggaccccagacaagtcaagcaggtggtcggtggcgggtcagaatgctcctttccgttctgggctcctgagagggctcgggttctgtttgagtgctgaagggcgggcgcgggttgctgaggtcgctcggtcgtcggggcgatctcggaaaggccctgcagccgaccggaccgcgcgagcgccaacggcccgctctccttctcctggagcgccgcgtttcgcttctcctttcccaaagccgctccattcccggggtcgtgtcgtctgcgcggtgcgccgtgggcctccgggttcgccccgcccatcatctttggtcagggctccgggatccggtcccaccgtctctcgccaactccttgtggtatgtgtttctgaccgacgttccctgcttccgtggtctgaaggcgacgagtgaactttaaattgtaggctccgtccgagcacaataatagagtttcgggtttctgcaggtccaacattagtaaagacaaatcggtgtgttagattacataaatttcctttcccatccaaaagactttggattccctttgggaagaaaaatattgcctactgcaatttttaaaatgtactagacgttgtagtttgatttatgctcatatatttgaatgccgagtcaactgagagtggcactgtttgaaaggattaggaggaggggtggccttgttggaggagatgtgttaatgagggatg

SEQ ID NO: 27011 - DNA, 1103 bp, Mus musculus
ttctcatgttttagagctcacaatgtagtctttgcttcttatttttagtcttctaaagtcatatccatgctcctaatctaccataggttatatttttcatctttttttacttgttaatactatgtgccttttttttttttttaacagaaaaaagttttcaaaaatggatggggtatattcagaagctaatgaagagaagtaagttgattcggtgctgctgaaatgttattttctattacagaaaggccacttcaaattagttaagaactatcagtaatgtctgaagttgttttctattttgttccaagtaaaagaagtcagtattacaaagcaatagcttttctgccatgtctgtataagttcattagagtaagaacttaagacttgaaggactttcatagagaccacctcccatctcattaaggtcttatgagatgaattgatttctccaaaattggtaccataaactagtgatccgtttgcagcctaaaaaacaatgttgtttgagacagtcttactatgaggctcttggctggcttaaaactcataagtagaccaggctagcctcaaactcagagaatcacctgactccaccttcattaaaggcatgtgccaccacatctgttcctaatttttaatatatatgacacttaatttttcagataattaccaaaattgaaaaaatctcaagatttcatacaataattaggttttcagtttttcttgaaacaccatgttggcaacaaatctcatattctcccttggaacaggtaactagtagaatgtaatggcagtgatctttagactaggcaagaactaacactaaactatactctcaacttcttctaggcccacctctttggtactagaaattgaatttcagatttcatacctgctaggtgagcgctctaccactgagcctcaaccctcagtcttcttctatgttttggtttgagacagggtctcactaaattgcaaagactggtcttgaacttacttggtatctgaggcaggcccaaatttgtgacccttctgcgtcagcctctaaacagctgattacaggctgtaccaccaggcttgaccacaatgtgcctttaaaacat

SEQ ID NO: 27012 - DNA, 1985 bp, Mus musculus
acaaactaaacctgaaagctgtctgttaaatataacagatggaaaaaatgtggattttacaagcagttatacagctgatgtttgtagatccagtgacaagtattcctctttaccaaatatttcttcttctgataattcgggtggtaatactatgtccttgtgtgataaaaataaggagaaagcttataattgccaagtgccaaatgaatttacttatgcagctatcttaccaagtacatatcacatggattctaaaaaactgtctgtctttccaccttgtccttcaaaagaagtcactcaaactgaaagtgccatagcgctgcttaaagatgaagatccggtagaagagcctctgggggagatggctacatttaactcaaagcatgtatctcttaacctggcaaaggatcaaacagaggcctttgttgatgttagtgttgcttctcagcctcatctctcagcccaacaaagtccatcaactcaaaaagggcaggatgttgcccgtagagatgaaggaatattagctaaagctgggaagaaggctttaccttttcttctagaaaatgtcgctgcatccacatgggaaaatgagtccaaaatacccactaatgtggaacactttgctgtaacctatgaaaaagaactgagtataagtattcaaacagataaatgtaatacaaatgtacagagccctagtaactcggccctgacaacacaagtcattcagacgcatgcaaatgctgaaggagcactagactttttagttccatctactgtttcatgttttagtagtaccaaaccaagtctgagtaatttgaatagaaaaactgaggaggtcttagactttcagactgttaatttattacctcctgccgaacagttacttgaagaaggaagtcaggcacatagtatgagtatagtacaagctacagaaatatatagactaggttccaggaatgatagagatgaagaaagtaaaactttctgtaatgaggctgaaactacatctgtaccactaaaaacagctgttaaagacaaaacaagaagatgttcattggggatatttttacccaaattaccaagcaagagaagttgtagtatcactggtgttgatgacctggaacagattctagcagatgcagctgacttaactcaactagaaactcagccagtctgtagtaaagatccaggcattggatctgttgcagccaaactgaatttgagtccatctcagtttataaatgaggaaaatctccctgtatatcctggtgagatactttcatcagattctgttagcctggacattgaggaaagtgttctgattgacacatctcagagagagagtttaccgtctgaaaacaaaaccgaaaactgcagggcccaaaaaagaacccgggttgaagaaaatgatgttacaaatgagaaaaaaatcagaacacatgacagtgcacaagatcaagaggtaagctgtcttgagccaaaaaatgttcttgaattttaagtatctaagcaatagaaactatttctacttactataggttagtgaaatattcctgtgtagaattattagaggtcagttggtaaaggatttaccatgacacgatggcctatacctgtaatcccagcactctgaaggctaaggaaaggggactgctgtgactttgaggctagccaaggctacgtaacagaatcttatctcaaaacaataatttgttgtggcaaatacccacaaaaatggaattaaaattgtatagataccaaatattataattgtgtcttgtgacttgtatcaggtgcctcataattgcttgtaaccccaggggacccagtatcctctcctgtactcttcagatacctgcatcacacacatatacctccatacaggtataaacacttgtacataattaaaaatgaaaataagtccttagcaaaacaatcacataaatagccaaatatgatagcctaatattccagtactcaggaaa

SEQ ID NO: 27013 - DNA, 1213 bp, Mus musculus
gcacagttagacttgactcaaaaaaaaaaaaaccccacaaacaaacaagcaaacaaaaagcacaagactgtgtagtcatattttcttttccaagattttgttttaggttatttatcctcaaaaggtatctattagtcataaagcttccactggtgatcactctgtgtgtgtgtaatgtttcacaaatttttgtgttatctttgtacaaggcttaacttgttcttattttactctatgtgcctattttagtatatgtgctgccaaagttgttgtatcatgttttgagacaccatctcactgtgtgacacaggccagcctaaaactcaaggggacctgcctgcttcagcctctcacgggctaggatggaaaatgtgtgtcgttcttccaacttggccattcaaattatttaaatagataatttcccaatccggtgctcctattggtactatatgaatgatatcacaaattcttcatttgggcttgtaatttcttggcttgaacccccagcattgggaaggaaggaagaaagggtagacttacttgttcttgtttgtcattctctagtttgtctgagtgggatgtcattgagtggagtgatgatcaagctgtatttacctttgtctatgattcaatagaactcatcatcacctttggagagccactaggtaagtagcaaagctaaaatgacctctacagaaaaataaatgactgtattctctaaagataaaaacctacattttattataataataacttttaacaaaatggcaatactgctgagaatctcagaagaataagggactttaataataatactttggggaagtttgctagagatcaaacccaggaactcctacatgctaagtttatgctctactgctatctcactatgaaagaattgtatgttgtagaacaaagaatatagtagaatggaacatggtggcatggctggacaggatcatctgctacctggtgagaccctgtctcagaagacaacaaacaataagaataaaaagatagttggtttgagttcttttagataatgaaattatctctatccaaataatgtttttttctcgcgtgcgcacacatgtgtgtgtgtgtgtgtgtgtgtgtgtgtgtgtgtgtgtgtgttctgttagagaatttacttgaatcgctgttctctttttttttaagatttatttatttattacatgtaagtacactgtag

SEQ ID NO: 27014 - DNA, 1115 bp, Mus musculus
aacaaagtggtagaatgcttgcctagcatgtacaaaggcctatgtttaatctctagccctataggcaaacaacaacaacaaaacaactatatcagtatactttacaattatatatatatatatttagccttattttagaatacagtttcaagtaaagttctgcttatttccagaaatatatatttgtgcttcctaagaacttgagatagtatccaaggacatgagtagccctgaaggggagagaggtataagtttttcagggaaagtaataaaaaatacccttttgtcttttctagccatgatgaaattgctgcaattatctctaaagtgcccttagaggaaaactacctgaagaatgtagtcaagcaaatttaccaagatctacttaaggactgaaagttttcccgtaagacccacagatcacagctataacaacaaaggaaaaaaaaatccatttacccaggccccatatagaggcaaacgcttataatctcaggattccagtgagagaagatcaaggctagcctgggctgtctaggagacctggttgaaaaacaaaatacttaaatgatatatcggggtcaatattgatatttatcttttgtcttaacatcatataaaagtagcaaaattctgccaggtggtggtggtacacgcctttaatcccagcacttgggaggcagaggcaggcggatttctgagttcgaggccagcctggtctacagagtgagttccagatcagcccaggctatacagagaaaccctgtcttgaaaaacaaaaacaaaacaaacaaaaatgcaaaattcctcctgatgatatcataattaatttgtatcattagttttaaaatacctagttgaaaatgatgaggtctcaaatagcatgttatctgcttgctattatccttatacccaagattaaatgatcaaacatgtgagaaaattttcctaaagtagcttgttgatagaccacttaccttgtgtgtataaagccctattttttaaaaagtctaaagttgtgctcttctcttaatacaagctctaaggggtaacatttataaggaggtagtgcacaaagattaagcctttcctctttttgggttttttttgggggg

SEQ ID NO: 27015 - DNA, 1602 bp, Mus musculus
ctacatgacaagttccataacagcctggatacaaaagttgctgtctcaaaaatcaaataattaagaattaaaagctagatggagctagtgatttaacttatttgttagaatgcacacatgcctacactggctaaaacactcatatacatgaaataaaaatgagtctttttttgtttttgttttgttttttggtttttcgaaacagggtttctctgtatagccttggctgtcctggaacttactttgtagaccaggctggcctcaaactcagaaatccgcctgcctctgcctcctaagtgctgggattaaaggcctatgccaccaccacaccagcttacagaaagtatatgtagaccatgctgtccacaaattcagagacccatctccctctacctcccaaaatgcttcctgcctataatcccagcacttgaaaagtggacacagatgatcaggagtttaaaatcaatatctcctgtaagtattccttggatggaaggatatcctgggagggaagggatgaatccaggagtggttgcctctgctcctgggagaggatagaagggcactagacaaggcggttgggggcagcttatataggatttcatagagggtggggcttttcagggcagaggtttttatttttatttttttggtttttcgagacagggtttctctatgaagccctggctgtcctggaactcactttgtagaccaggctggcctggaactcagaaatctgcctgcctctgccacccgagtgctgggattaaaggcatgcgccaccaacgcccagctcagggcagagattttgatttgacagttggtaagacttcaagtcctgcgtttggggagctcagggactggtgggcttccctgtccttggtttggtgggtttttgtgagaagtacagagattggtaggttttttggctcaaggattggtggcttttttttttccaccctctcttttctgcatcaggttcatgggttaggaatggctttggctgaggtaccacctctgtggagctactggagaggagacattgccaccgcggacagctcctgtggtgctaattcatgaagttcataggctgaggcaggaaaggtgccaccaccatggacagctcctacgactgcacctctagctagtagcaggcagaattgggaaaggatgtgttgccacagtggaaagctactcgtgacagtatcagggtaagacatggctgtttggcaggtactggcattttaacagctcatgttgaggcatcttatgggtaggttggagcaggaagaaggagccagcaactgctttgacagcttgcccagagtctacatctactacacaccaagtcgaaggccagcctgggctacaggagatcctatttcaaaaacagagaccgaggatttcattcaggagagtgttcatctagcatgcacaaaaccctgggtttgatcctaagcatctgtctaaacttaatgtggtgcaccacagtggttatactttttattgtcattcagacgccttgtcaagttcttccaggccatagccaccgccagttctccctattcacaaattgtgatatgagcaaacacagttgtacac

SEQ ID NO: 27016 - DNA, 1269 bp, Mus musculus
ccagcactctgtcaggggcttttcatcctcttctaactccatccagtaactctggtctctgacagacacatacccacatacagatacaaacacctacatgtaactaacatctctccattgtgaaaaaagatacatgaatagttgatatgcctccctaattataaaatgtttatttcgtagagcttttcaataagagagtcatggcagaaatgaattcctccattttggaggtacattgaaaaccatcctaaatcctttgaggaaattacatatgtctgaagcaattagttctattatggaatagaattgtttataacttggtgctcttgtttgtttctctgggtcaggctgtacctgagaaaaggaagaggggagaccagaatctgcaaaatctatgactctccctgtcttcctgaagctgaagctatgtttgccattaatgcagatggagtgggcgatgccaaagactgactccttaggctttctttcctgtgatgctatacggcttttctaaatgctctacagctaatggagaggactgtgtactgggcttcttcacaggctcatgttgtgactgccccgcatggcttccgggaaaacaactattgtatcagctctctggtagcagaaacacatctgatctgaaaggtttcctgtagagtctattaataactgatttctttggtgtttagaggagaagtatgaaatagcaggtgtggggcagtcttttgtcttcaggagaagtaaactggaaagatccgagtactctcacttctcaaggatggtaaactaaatgcctgaggatctgtaagtgggaatgggtggtttacacattcttttctctgtaagacagatgcaaacttagttatatgcctgaactgtcacatcattttaaaatttatttttgattaaggagtcttacatgcagcatgctagactacgatccctgcatgcttgttctctaaattactaagacttcacttaaggaaatttgttctgctgctaataaagtagttgtgtgcagtggatgtgttatttgctggagatattctagtgcaaactgaatattgcaaaacagggtttctataacagctttcggtactgtgttgttcgttatggtcagctgcagttgtaaagtgtgaacctgaaagaaagcccagcattcaggttactgcattgtagcctttggccgaagaataagaaccccaggctggtttactgtatctttcctgtggtctttgtttttattgtataagttttgtgttgcag

SEQ ID NO: 27017 - DNA, 1440 bp, Mus musculus
ggtgcctttttgtgtggagtctcttacatgctcctctcccagggcaggagacagattgcatagactctaagccatcatggggaaagtgaggaggaaggctgctaccagctcagtaaaacagaaaagggtcccttgtcaacttctagtgatttgggaaaaacttaattctgattctagtatagatttactagatttgttttcttttatcctaggattcagctttccaaaaagacctggaagaactagaagtaattttaggataataatcacacttcaatgacgtgggggctactccttaaatgtggaaaagaaatcaagttgcttttttcctctgtgactcccccatggagttcaggaagccaagcaaggtgtcctggcccctggagatctgactgctaacaccaccatccctcagctttttatgttatcagttaatttattctaatctcctaccttaatttaaattgggggaatttaaattacttgcagctaaggtttctgctttcttcctcttaagtgaattcttgaaaaatcaagacagtatagccatagggtttagtgtggacccagcccagaaggccaagagctgagaatgaagtagcagaactgtcttccagctgccagtgaggtggatggacttcagagccacacaacagagcataggacttgtaatcttttttgctaatattcaacatgtatttattgtcctttaatgtcacaccctacctacgaggacaaaaggagccagcacagcccaggtactgccctcctaccacccatcatgtatataatacgctccctgtattcctgggtgagggctggaccatggactggagacctggcagcttttgggatgacaacgctggcaaagggtctatgaatctattttgaaagtgacttatctggagaggtgcctggagtatttttggtacaaatctgaaataaactaaagttgattacaaggatatgttttgactgtttctgttatttttgacaacgtcagagaaagctgacaacgaaagcagcatatcacagtctgagcccccctgtgtgtgaatgtgtgttgtatatgcctgaaggaggccagactcagtctgaagctgaggtaaggcactccgagccgcctctcatggggactgggactcagacgcgggttatctggaagagcagcaagtgctctaagctgataagctctcgattcaggacaaagtgtttcctaccaaattctagaaaacttgggtttgagacaagaaattctaatctttatctcactactttagaagtaagtcctttgtgcaaatgtcataatttcctcacagaataaaacctttgtttacacaaaggtcccccactgcaaatgatggcctagagcagtgagtgaccccctcttcttgctatgtaggccaagctgccctggaactcagagacccacctgtctcc

SEQ ID NO: 27018 - DNA, 1225 bp, Mus musculus
tgaacagagaactaagacacttagcttcctctccggtgttggctcctagaaaccacctggcttcagcagccatggagacgatgttctagaggggtgtttgcatccacttcatgttccctagactccctctaccgccattgaggtttgattgtaaacttggccgcagctacacatttgagagagaaattggagaaatgcgtgggtgctgctcacgcctcagaggctggagccacgcaggcagctcctggcaatgtgttgtgactgagatgaagactaccaaacccctggctctaaaacagttccttccctagttttctgcagttggagtagtagctaaacagggattttatacttgaccctgaccggcacagcaccctagctgcctgtaaacttcttctccaatcatttccctagcttatagtccaagttttctcttgaagactagtttctgcccttacataagaaatgatctggctcagtggacagtgctgaatagtcctcctcctgtggctggagaacaaaccctagttttgagctaagtaatcctcctttaaccctgtcccttaattctctgccagttatacaacagccaacgcggagtctgattacgagcgggactccgacaaggagagtggagatgctgaggacgaagtgagctgcgagaccgtgaggatggggaggaaggactctctggacctggatgtggaggcggcgtccagtccggcggcggccgccttggaggaggatgactcctcaggccgagaggatgtgcagctggtcctgctgcaggccgatgagctgcaccagggcagcaagcaggacaagcgggaaggcttccagctgctgctcaacaataagctggcggtgagactgcctcctccctcgaatctgacacccacggggaatgaaaacacccacggggtttccaaccctacaaagcaacaagggaaaggcgataggggtgagagggctgcttctgcacatatcttgctaggttgcttatcctttcccagagaggtcctgaagctaccgtactgcttattgtagcttctcacttggttttctgcctcgtgtacaattccagggggccctgcctcgctagcggggtggaggggtgtgggtgggggtgggaggaaagtgcaaaggactagaatacttgtgcctccccccaactccaccacaccctgttccttcagttttccttgagagagttgaatctgcatgc

SEQ ID NO: 27019 - DNA, 1206 bp, Mus musculus
tgctaggatgaaaaataactgaaattttctttgtgtttgtgtctggatggtgtgtctgtgtgtctgtgagtctgtgtgtgtgtgtgtgtgtgtgtgtgtgtgtgtgtgtctgtgtgtgtgaagtggaggtcacaggttgatttcagatgtctttctcaattgttctcggtgttttattttctgaggcaggctctcttgctgggcctggactgtgccgatttggcaacctaaccaggcagctgcccctgggatccctagcttctccaacctgagcaccagcattccagatgggctagcatccctgcctgccttttatactcgggtactggaggtctaatctcaggccctcctgcttgcatagcaagcactgtatccactgagccattcctcagcctctggagctgacttctcagtttgcttttccttcattaaacagtcctgcgccgtaagtggtgacttgtctagtcctgcctctctgacctccccacttccctttcatctcagttagactatgtcttcctagactggcctgtgactttctgtttctgtgacgtggtctttagaggctgctctgcccaggctgagtcctatttcctggctcgcccctgtgcctgcctgtctctccactgacctctgactggttccgtggttgcaggttggagtttccttttcctggtctctccagcttccttcaggactcctgccagaaagtgactcccatacattcccagctggcttttgccccttcactttgggcgacttgaaggattggtcagcagccagagggcagggagaactgtggcttctggtccccacctgttctttagtccacattgtaccttcctcgcctgggtccacaggcgccattcctccagtcaccccagttctcgctactctcaccaggtcagaagtggggctcgcttgggaattgctcctttagaatctgcagaacttcttccagaagtgaaagccccaggtccactttgaaggagaggaaagggtcactgaggtccggagtaggtgtcctcgggaagtggggagtgtccgaaagggcctcctctgagcactggtgaagcggccctgtcagggagattgctgaaggcagggtggccgagtagccagctgtgtagcttgctgggggctccagaatgttggggcagctggagctctctcggtagaggcgtgggggcttgggtggggccagta

SEQ ID NO: 27020 - DNA, 1144 bp, Mus musculus
agagtctggaaggagcagagcagccttgagccaggagtactgtatatagaaggacctgcttatccaagagctggagaaagttggtgttttgtgtcttgttcaaagctgcccatcaccatccgatgacgctaggaccttgagtggtatcagaggccagaagccacacactgccttccacatctgtccctccactctgcaacaggctgaaggatgtgtgtctctgcacacactgaaggatgtgtctttgtagtttgtgctgtaaataattgcttttggggccccagggtcatagctcagtggtagagtgtgtgtggtcaccctgagctctctacaccgaaccacaagctacattaaattacaaaataaagtgttgtgtttgttgagctcctcccacccccaccccccaccctcttagtttccagtgctgatgtgaaacttgccatgtgcaaggcaggtgctgtgccactgagctatctcctcagccctggtttgtggggttgctgggggggggagggggcagacaactcctgtccaactggctcagcctttggccaccctgtccagcaggttttccctgtctctcctgaaactgccctggctcctcaggatagagaaaaatgtcacctttgaccaccagagtggagagccatgggggtgttggccccgctgtgcagggtttctctggttgccaacaccacacctacgcagaggggggggtgaggttcagccgtggttgggggcttgaaccctggcagtcactgccatgtcactgggcataggctatccgtgcccatctgagagcctgtggctgaggctccaagctcctccctagtggccattagctgaggcacaccactccagtcacccctctccagggctcaagccacttagaggtgccaaaagagacttgaagagattgcacagatctgtgtgccaaacactgcgggtccgtacacatttaatactgttggggtgcttctcaaatgctctacacaacacttcatttgcccaacacactgccttgtgctgttaatggcattcacaggccaggaggttgacagcaaagctggagttccccagttctaagatttatggtagaactggatctgaaccctggtagggtggcccaaaggtcccatgttcc

SEQ ID NO: 27021 - DNA, 1203 bp, Mus musculus
agaacttgaaggaggtgttcgactcggccattctcagtgcgattgagcacaaagcccgtctggagaagaaactgaacgcaaaaggtgtgcgcacgctgtctcgctgtcgctggaagaagttcttctgctttgtgtgagcagctatggcaagagataggcgggtggcctgagacttctggaccccgagacatcgggtactggcagggcctggccaacccctggaactcagttctctattgaacacagggcacatgggcctcaaagctgtacaccctggtgagccagggtgagctctgtctgtgcaggggctgccccatttggatttctttggtcaagactcacaggaaaatcccagcactttgattttcatgggatagcgccatcagcgtcagtgctgctgagcagcttgggatgtaattctcagtttcttatcctggggccacaggtcagtttggctgaatgcaggcccctcggggtcatccccctctcctagcacagtgcgaggatcaaggagaacagtggggcatcttgcagggctggcggatggtcagcttgatttggagacgtttgagatggggtatgaagaagagggcagtgagagattgagagggaaaacagaaagtgaggcgagtggtggacaggaggcagattagaggcctgggcctggaaggaggaagacaggaagggagaagggtggacagctgtggagaaggccgacacctgggctgccctcgagccccaaggccagggaggacaggactgctccctgggaagaactgggtctcagggttccccaggcactggccaaactggctgggctagcagaggggcaggaagtgagagttcaggcccagcaaagggaggggaggagctgcaggtaggagcctgaaggaggaaggggcagggaccgtccctttccccaaggtcatagcttagaaggtgagctatacagtctgcaaataaaaccttccatttctcaagctgctgtctgtggtctcctggagtggtcagcccaatgccccttcataacctttgccaaggcctgacagccttggtagatggattggaaaccgaggcttggttgaagggtgggggctggatcagatgggacaatgtgatgggaactggactagggggaacaggtgtggggctccctgcttggggcttggtttacttggttcccaggagagctagcgtgggaag

SEQ ID NO: 27022 - DNA, 1472 bp, Mus musculus
ttaagttcccctctgaacaaaggaaataatattcctgggactcctaaaagcctccacatgaccagcagcctagcctcagactccttgatccggaaacagggcaaaggcaccaacccctctggaggacggtaaccatggtaaccatctctgccctctagcttccttcaaccaaaccaggggctacagtcctgagccataggtggtctttggatggcttgcctagtgtggcatcttgcatcctatttggagagtggaaaggaccagttgtagcaggagagaacaggcaggtggttggtgtgagcacttttatcacctgtttccaaaggaatatcctgggttcggccccacagcatcttagatgtactctgcagccgtactcttaacctctttctggggacgggcctgacacagaacccttttatagatgctcaggcacactgtctccatccccatcctactcttcagctctgaccatgtccctcatgaaagctccatgggtgctgtgaagagccttccatagtggagacttgtctaaaggttatggtttcctgcaggactagggaggaagtggttccctggcatccatagtctgggaccgctcctgggtctctaaaccctgtttgccacagtgtcatcactgaagaacagaacacagtgaatgccagagaagatggtggctgtaaggatgagaggctggagcaagcagagccacaggcagttatcccagcatttcctcctgtccagcacagttcacaccagggaagctttaggtcccaccagcaacagtagcagcagctcccactcaagggacttcccagaagccagtaaagagaccaggaaccacctcaatcagcaggacatcctcaccaccctcttgcagatgcccctttgcccatcctgaatgcacagcctccccggctttgcccttcagcccctgcttggctgtatgcactgtctgtattgcactgagaaagaagggacagcaggagtgagatggggagggagctggctcagcaccacccctcccagccctgccccactcgcctgagcttgctgccctctgagaggggaaaagggcggctgggagggctttccacctgatgtccctggtggaacaggtgcttctgggcgggccagcctctaatttgcacacctgaaatcgcggaattgagtttagatagattgattttttaaacactttttttttttttggagtaggtgtaggggaatcatttaatttaaatcataaagattcccctacccaaaccctgactcctgtgtacagatgctctttagagggaatcagaaaaatgccaagcctttttttctctttgaatgtgctgtctatttttataactgaacttgtacatatgtataaagagagacacatctttcttttactaactggataaaaaaaatcttaaataaaatggagtgagataattttatgtaaatcaaagtgtctgtggtct

SEQ ID NO: 27023 - DNA, 1193 bp, Mus musculus
agatacagaaaggatgattgaagtgagaatgcaggccgtccaagtgcagtaagacaacccacacagagctgcctcccttctatgcaaagtctggcctcaggtagataatagcacacgctcagaatcccagcacccaggaggcaggttctagaccagccagagttaccctgctacaaacaaaaatctcaggtgggcttagcatagctcataagttttgggaggggagcttgtttgttaattctttttcatttttttctcatgtgcattggtgttttccctgcatgtatgtctgtgttagagtggaggagtgtctggaactggagttacagatagccatgagctgccatgtggatgctgggaattgaaccccgggtctcctggaaaagcaaccagcagccatcgagtcatctctccaatccttgtttgttaagtttttgggtagaatttaatgtatctgaagctggccttgttctcatgatgcagacagtggtaaccttttacttctgatggctagtagaattgttaaagcagggaaaggcatacttgtatagaaagtgcttggcctattgtgagtgcttagtaaaagttgattcccttctcctttctcccattgcaggatctctgctttcattattgtttcattaaggaaataagtagagtagccttccctgctgtttgttagccctttgctagctcatttgtgtccttggaaaacagtaatcactgcagtaatcaaagctgctgtgctggggctcatcggagaatgaggcagtgtgacacagcagagaagcaggaagggtacagcaggcaaggaggtagactggcctaagaaaaccaacaggtactgagagctaggaatgaaaagtgacaaggattggtccagaagtaacctgtaatcaatggtatgtgagcagagatgtctgtccaacccaacaagtaacacaggagaaacatataagccatggtggtgtacatcccaggacgtggaaggggcaggcaggagaatcaaggatttcaggttatcctctgctacatagtaagtttggaaaaaacagcttggactcctgaaaaaaacagaaaagcaaacagacagaacaaacatactagacagggctggcgaaatggctcagcagttaagcacactgactattcttctagaggtcttgagttcaattcccagcaaccacatagtg

SEQ ID NO: 27024 - DNA, 1174 bp, Mus musculus
atgcacacatacagtcagtcagtcagtcaatgagcgagccagactagaaatgggctgtcaggaaagggtatgccttcctcctcctctgcgagttttcacttccttcaagattcagggcttgagaagtggctcagtggtggagcactttccctgagtgtgagaggcctttagttcagtcctcagtacacacataacctatacacacgaaaaattaattgagcctgcatagtcatgctgtcaggaagatggagaaaatttgaggtcagcctaagctatagagcaagaccctgtctcaagtcagtgtagggtgtgtgctcatggcttagacaggacaatgaggccacaacaggaactgtaacaagtgccaggctagtcagagccatataccaagactctgcctataattgttttatttgttaatctcgcttttctctttggggcaaatactcatgtttttatgtattttctgacctttgtattcccagaagaaaaaggaagatgagttggatgggaagaggaggaaagagggtgtgaacctcgtgatcccgtttgttccctctgctgacaactccaacctctccgctgatggggatgattccttcatcagtgtcgactcagccatgcccagccctttcagtgaggtgagcctcttcctgcgttctacatcacagcagtgggactgcactctgaccttgtggcagggacatggtgggcagtgttcacttccagccttgtaggaagggttgtataaggacaggctgactctcagagccaaaggcagatgggagggagaaatgctacatgtcccccagagcatgttctcacttgagtgtgagggctgtagccattgaagttattagtaagctcagcccttctgcttccagatctcaatcagcagtgaactgcacactggctctattccccctgatgagagcagcagtgacatgttagtcatcgtggatgacccagcctcctcagcacctcagtcgagagccaccaactctcctgcttccataacaggctctgtgtcagacactgtgaatggtaagtgatgctactctttcatacagcgtcagcctgctccactgctcagtgggaagcattcctctgggggtaagtgagctctgcttccttttaggatacaggattttattgttgttgttgttgttgttgt

SEQ ID NO: 27025 - DNA, 1173 bp, Mus musculus
ccaggcttcgcagtgtctctgtaatctgagcacttggatgatggaagccagaggaccaaaaactcagggtcatcctcagctacatactaagttctagagtagccaaagatagaaggaagtatctcaaaagaggggagaaaggctattgggctgaaatcgtagctcagaggtagagtgcttgccaaatgtgttcacattcctaggtttggtgctctggagtaccgcaagaaaggcaaaacaaacaatatacatgtaatgttgtatagctgaaggtctgtttctataatgacatatttttctgtaatatctgttccatgtttctacttttattggttatcagtcagatattagtatggcagcaaaagcttatgtacagattacaaggtgactgccatcatttgagttttaaagaaagaacacctttgcacagtagtacaaacctcaagatagcatccactctctagccctagattgtaattgtagagattcctgtctatttccacattgaatctttccttttcctcctaacatgtcttcctcccctcttctttaggaacgacatctttgtgtttctgttaagcacgcgagctggaggactgggtatcaatctcacagctgcagacacagtaagtgatgaggtctctactataaatagttcattcgttgcacgttttacttttccttttgttttttcattcactttgaatgattttatacattaatttaataaattgcttactatgtgtcaagtattttcctaacagttaagatatagcatgataataagtgaacaggagatggctgctaaccaggcagtccaattggttttgtctgaggagctataactaaacaaataaaaaagagttgttttcttattagtgcctgatttcattacttgagaaggtaatggtagaagttgtggtctaaatgtcaagagctgtttggatagtgatgaataattaaataaaataaagtaaattatattcttgcaattttttgtccattcataccaagtctcctgataagactactttagcctctgaaaggaaaaagaaattttcttttgaatcttagcattattccatggattcagatgtatttagtagcagtcatagtaacatttagattgaaatgtgtagatagcagccgggcgtggtggcgcacgcctttaat

SEQ ID NO: 27026 - DNA, 1201 bp, Mus musculus
agggaaagagactggacctgacatggcctttggaaattctttgggaacctcaaaccccacccccagtgacatcttctctaacaaagccacacctgctaatctttcccaaagagttctactaactgaggagttattcatgagtctcattcaaatagtacaagcacagaattagaagaaacaagtttctagtttatttaacaaaggactagagtgtctaggttactgacaacacggttcttgtcattggcaataactctgcatccttggtgtctactcagtaagaccatacatctaaaaggtgctgtcagctgagaagctgcctccacctctcagggtgtgtcttcagtacccctggagtcaggatttagcagagctttccattccgcctctagagcacgttcctgttccaatgagacaagcatcctgataatagaaattttggctgcatacagctttgcagtgggtgatttgttgcttcaattaaatagtttcctccctccatccctccctttttttctccccaggcaaggagagcctcatcactgacagtggaaagctgtatgcccttgatgtcctgttgactcggctcaagtctcaaggacatagggtccttatctactctcagatgaccagaatgatagacctgctggaggtaggcgaaggaaccttggggacctaggagtctttgacatttaattttgataggaatctggtgtccctactaatatcagctttttgtggttttatatatcgaaggagcagagtgagtgccccccccccaataatgcagaggacttctattttttccctagccgggaagtgtagagtacttttcttttactagaaaaggaattccatagttttaaagcagatcccagccttgggagtctcttgaattctgtatagaagtcaggattggggattcagactttttatataaaaacctaggttgcagctattcaggtggagttaggtgtaatggttctcatcttgactatacattgcagacattgaaatgaggtctgagaattaactaggatatttaaaatttaaagactcctgaggtaatgttaatgtatagccatggttcaccactgcgttagccatcaaagacaacagtgtgatacatgttttgtttagttacttacatgtttagggtctctctattttcatgtctgaaaaatgactatttgtggaagcg

SEQ ID NO: 27027 - DNA, 1157 bp, Mus musculus
acactgtagtcctttctgactgctgtctgtctcaggcttcctttctgacatcactgtcataagtggccatagcacttgtaataagtgggtggtaaatgtatattgagagtagatatccagactagaatcttactttatctacatgcacctttttatatcttttgattgcaggttcatgtgattagcgattaccagtttgcccagagaagctctcaaattgagttagtctttgccttcatcttactatgctagaggatgaaatataaagccaccagtctgaggttattcacattgatctgatttcagagttgtgggcctagggatagagctcagcattcacaagcctgaaacttgctataacccccactgggtaggtgaaaggactactcaggtggcttcttgagaatttggaggccagcctgagctatatgagatcctatctcagaaggaaaaaaagttgatttccctcaaaggcttgatgtgtgtgacaaatggcagaagagccattttattgtctgcgaattttaccctgcaggtcaccgcagtgccgttggattcttactgtaatgacagaagtgcagagtatgagagaggagttctgaaggaaggagggagtctggctgccaagcagtgtttgttgaatggggctcctgagctggctacggattggctgagtcgcagatcccagttcttcccagagccagctggagggctgctgagcattagaccccagaacggctggtctttcatcagaattccaggtgagttttctgctctttggagcatgtttccagctttgacaagaggagaaagggggagaaagcccatgtgatagtttttgttgtttggtatttggagttcctgaggtttctaactctcctaacctgtaacttataggtaaaaatatgagtactttgtgtcttgagtggaaagatgatgattgaaatgtttctagatttgttcgtgagtactctcctttgataagaagagtgtaatgtcacttttttaaatgggagaaggttggggtgctcatgggtagagtgcttatctagtatgcacaaggccctcaccagatgaccccccacacacacacaccccaaaaccccacaaagtttaggaaagacttcaggtcgaatgagtgcagttgttttgtgcca

SEQ ID NO: 27028 - DNA, 1166 bp, Mus musculus
atcgtcggaagagcagtcagtcagtgctcttacctgctgagccatctctccagccctactttgtgtgtgtgtgtgtgtgtgtgtgtgtgtgtgtgtgtgtgtgtgtgtgtgtgtatgtgtgtgtgtttgtttgttagttagttatagatttgcttactattacatcaagcattctggaaaatttagctctgcgtttttgtttgcaaaatgtctttcactgattttattacattattgaatttatttataactttttaaaaaatgttgattggtgttttgcctgcatgtatgtctgtgtgagggtgttatagacaggtgtgaactgtcatgaagctgcgagaaattgaacttgggtctccaaataagcagtcagtgcttactcttaactgctgagccttctctccagtccctgttacagtgtttctaatgtactagatagctcattgggaattattgtctccccgataagatggtttttatgctaagagcttttacagtagagataaatgcttttgaatatttttgtatttgtttactttttgttgtggttttatagaacagcaaaagtatgaaattgctttatctgaatgtttgaaggaattgtttccaaaatgctcaagatctacaaaggatgtatggtaatgagatagatccttgttgtgaactcccaaagttcctaggagcactgagtgtgcacatttctctgtttgtttcaggtggttagctcttttcctatctctgaaagcctcctacaggctccaccagctgcgctcttgggcagagccggatgggacaagccatcagagctatctgagaaacaaggattttcttctcggagttgatttcccactttccttccctaacctttgcagctgccctttgttaaaggtaagccactgtctgtgcagtgtctgcttactttccttctctttgcattattcaaaatgttaaatgatgtcaagtacccagtgttctcaggagctcgtactgtgtattgagttagaacatatcatgtgtaagtttaaatcctctgtatataataacttcattgtcgtgaacaactgcttggcttgctttctctaaatgtttcctttatttttatcgtctatgttagtagttttgcctgcatgtgtctggagttgatttcccactttacacccacatta

SEQ ID NO: 27029 - DNA, 2323 bp, Mus musculus
accccaggttttggaaaaagtggatgtagaacagaagatgagcatccgatttcttcactaaagggcagagaccaaattattcttgctttctagtatttaagaactgaaacttgtgtcctccagccccaccccatcctgtcatccccttttcccagaatactacagctcttgcatgacaacctgaagtctctcctgtccatacaaacttgcctttggtgtataaacagggcgttacagaatggtaccctctgtctgcttctgttcagtatccacccaccaggtccttagttgtcagtaccatcttcccctgttagctgctgagtgccatgcatccatcctgtctggggaaatgaaccagccagcaaagctcccactggatggggactatatccatgctgccttccatccctgcatcgagcctccaccatgtttctgtgaccttgtgtccttttgtccttgtgtctgttacttcctacctctcagtcatccaaccttctctccattcagtttttcagctgccctcctgtcgttgagattccctgcattttacttgattctgggctctgggctctgctgttaagcctgtttctgatgtggcaggatagttagtggtgtggtgagttatagctaccttctaatgtgtctctgggacgttgcctatccaggagcttttcagcaagcagtactgctcttggaagcatgtgactcccttggtcccctgtattgctctgttgtcgaagggcttatgagcagacatgttcttaaaaggtggtcatggtgaggcttgtagagccatgtttcctaggtggcttcccaggtctctctacctctgactttttattttcaaacatatttatgtggcttttctgggtacagtgttgacattcattagaaaatattctaatgcctgccagtttgcttctctttggaacattgtcaccacccaagtggctcttctgacaatgtggtagagggccttcttgtagttttctgaacaaggctaggcaccctggagagctggccacatttgctctacagcatgggtcatgcctcagtgttctgtacactggaagagtcttcacatttccaaacagaaagactagtgttacagaagtgcctgacttatctcagtcctaaagaattagattgtcctcagtgtcttaaagtttcgcacaaaactctgaatgaattttatacttggcaaattttaatgctggacgatgtgcagtcagttcatagtcctggtccaggcctttagtgtattgtctcatgagcctcctgatggcgtgaccttcctagctccctgtgtatactacgcagatcccatagaagcatggggccaaggattggtggcaccaactgaggtgacatttagaggtctttgagtgacccagctcaacttctctgccaatgtcagcttgatttagatctcactgaatcaggctgcttctgtcctgtgtccctgtgaatctgctcttggctggctttctctgatgtcgcttccttgcttgcttgcttcgttgctttggaaggctatccaaggtgtgtaaacaattctttagtaaataaattgctattaacccaaacaaacaaaaacactgcaaagaggatgggtaaaggtgagcaacaggggaatggctgggatagatggctggggctacatgaactggggattctttacgaaatatctgttagactttgtgatcaaatgatgtgataaaagaattgtataaagggaataattgtctgatactgatctgtttgagaagtattgagaagcttctcaatttaaatatttaaactttctaagcttatgcccccttggctgtgtatagcaaactgtttttatccacagttgtgccttattgtcccattaaagttgtattcctcaattcatcaataaatcaattgttgttaaaacaaaagaacttggttgagttttacccggtgttttgtaacaattttatgtaactcaagtgtcctaagtttgaaataatgtagtgtctcccttgctcagattcatgcttataatatcagttgcaggtatatgtcactgctgcctggacctgtgatatacattcatctaggggttcagtttgccaagaggtacagtgtttcagctctggcctcttcgtatgaattctaaggaagatctaatatattttctgtccttttttttttgtgatatagagtcttatctgcctaactggcttggaatttgccatatagatcaggccagcttcaaaattgcaacaatccttccacgttagctttccaagtgctatgcttacaaatgtggactcaaatacctccacgggaggtg

SEQ ID NO: 27030 - DNA, 7179 bp, Mus musculus
caattttaacactattataagcacagttgaccgcagtaagttccaaatatttaatataatttgaagtgaaagaaatgttatctaaattctggctcactctttgacagttttcctggacaaaaacaagatacgataaaagcagaaaccaggtttgattttgtatgggagtgaaatcattacagttttatgggtataaatctacatttttaaacaagatttttctcttggagaagaaacctgttgtttataagaaggctttggacagtttaatagtcttaaatgttctgctttgctgttctagtccttctcaggaaggcccagctgggcctgtggctagttcagaatgggaggaaacataggctgggacaatgctcaccctgaactgccagcgtgtgggaggccaaggcaggaagagcagatgttcagggccagcttggacatcaagaggctcaaaaccagtaggaaaaaaaacagagcccagtaacaccctcttttatattccttttgtggaatcatgtagcatgtgagactgggttggaagggaactggcatatgtggtatttcagttaaggtgatgtggtggaccctgatgtgtaactggccttcacctttggacatacaggaatgaaggaaaaactaaagcttggcatataaatcttttcttctaagaaaaagaagcaaagctgtctaatgtagcattgtctgacttttcaacatttttactttatgtggttgcatttttttataaaagtataaataagttccttcaacccaaaatgggtacttggacagatttttttttctgggtgataatgtaatgttatgctgaaaatctgggactcaggtaaattttcccagtttgaattgagctgtcttaccagagaatgggcctcagaagcaatgttcccagtcctgtggttggttcactataatctcagaagaaatttggaatatgaatcaaatttcaaataagaaaagcagatccgataagaagtgtggatctagttgcaagtcactgtagatttaaaggaaatttagggcctggggtggggggataactcgagaattcattccagtgagaggtgatacgtgctctttctccctttagtagttatgttataaggaactattgtggaaatatctcttccttctcaatcaatggaagtttattatatgggatgccaggcttttacatgagagggtaccattgtttgcaacggttgccagtagagaaggagttttaagcttgttagatgagagagaaacagatgctgttagagctgacttctggaacgggctctcagtgctgcaggtgctgtgaatttgagtcataaaaatgttcaaaattagaaaatgttgaacattcatggttagtcagattgggcaacaaaattgaatttatgctaaaagcttttttcatgaatatttattataaataacctattaatgagagcaaataataataaaatactagagaaataacatgtttaaggtaacctaaatttctgggcttggttgctcaacctataaccacattttgacgactgaggcaggaggataggccacaaagatcaaggccagcctgaatgacagacactgtctcaaaatgaaacaaaaatataacccacgtttttcaagtgccccagccacttatatttttatttagaagacaaagccagctggtggttgagagcacctcctagatgctgagctgtcctgcaccttgcccttgggcaggcaggggctgtcactgctagggaagtgttccccatttgctccaggtgcttcagggaagtgcactttgtctgagccgctcccgcatcctgcatcattaacaccaaatggtgttcacagcatgggtggatcccagccctaattgcttggtgtgtgtgtgtgtgtgtgtgtgtgtgtgtgtgtgtgtgtgtgtgtgtgtgtgtgtggcacatttccatttatagtcttacttgagttttcttcttaatagcagcaaagactaccattttagagttgtgcctccatttatagctgtgcctcctcccttctccatgtaagctggcagtttttcttttgaagtttctaaacaaaaacgggatatgtgcaatatatataaatatatatataatgtatattttaatacttgtggacaagtgttacaagttgtttaagaacaacaaaatcaccaatgtcttccattttgagatgtgtatagttttgtaagcagtagtgcttgatagcatattgtagtgccatgttaggggttagtgcatgaatttagtataattttaaacttcaagatgaaatattgataataaccagtagtgtaaaaagtgtggaaaatcctagacctttactttttttgtatatgaatatttgatagtctccctgcggataggagaaaaggccaaaacaactaatgtctgaacagaagtgtggcttcccactgagagccactgcgcttgggggaatgttaggcctttcacgggggagctagaatagctacctttgtagccctttagtcctcacagcaaggcctgggttcaggcttctcttgctctctaagtttgaagctagattggtcctgtattgattttgcattgtatgttttgggttcacttttcctcttttgtgtccagaaaataattttctgttttgcatgtctgagatgccgtgctgattgctttggaatgtttactctgtggccatttcctttcctgcttgcagcatgtgtgctaactgcaaagccttgtcagcagtttggagtatcctgtactttaggctttgccccattctacatctgacttgggtgttgagtccagtctctctcatgagaactgatagctcagtggggcccatgtaggttgacaaaaagtatgttggccttcctttggtaattgttgagagctttcacattttttctactttccttatgaaaataaagtagttgctttgttctgaaaaataaagttttctataaaatggaattcctacctctaaaagctgcctaggaaacttggaagtaatcattttctgaagtgttgtagggttttgtgggttttttttatttgtttgttccttttctataatttttagaaatagagtcctgccgggtatggtggcagatgccttcccagccttgggaagttgaggcagtaagatcaggagttcaaggtcatcctcagctacgtagtgagttggaggtcagcctgggatacatgagaccctgtctcagaaaaccaaaagaaaagagagaaagaaaagcgtatgtaggatttcttaacatgtattacattagtatgataggaaatgtaaaacttccccctagaaactaggtctgagtctagtattagatatgcagggtcccaggaagagactctcttcactcaagaagatggtcagcacctgggagaatctgcttcagaaacaaaggggaaggacttgaaaaagtgatgcttataaagtagcacagtataggaaaggacatttcctactgcaaatcacaaaagccatagtgaactaataatactgtcaaagaggtggaattctgtagcaataataggtatggatggatggtaaattgtgctcacaaagctgtgtggttgagtggttactggttgagtttgtggggccctgcagtttattatagagttccacaaaaggaaaaacacatcttagttaaaaggcatttaaactatgaatgtatatgaatatatttgcgtgaaaaaataccaactttcatatatgtgttaaagatcctattttgtttccccagagtttacagctgttgaaatctttctagtacttaatctggaatcccagtgaagccaacatgtaggggtcttgcttaaattgtttgtattaatagtcatttactatatagaatgatctatgctttattcaaataatataacctttgctcattgggttcctggctactgtttcaaagggaaaagtttgtttttgtgtgtgattagtgtgtctttgggataggggagcctcaagaacttactggtatttccttgtacttagactcaaggaagttaggactaaaagtgaacaaaatgactggcagtgcccaggcagggagttatctaaacatctggtaagtgaatgtgataagcttgtggccagtgttcgaatccttatatcaaagagaacccagcagactcattcctttcttatctgagatgtaaaatggaactagggccactcctcatttcctttacctcatggcatgtggccacttagcaccttcaacatccctgaaaagatctgggtctctgttcctttgttttcccggggaagaaaagtcaaaaagtagttttgtagatctaagactcttattttattataagcctaagggtagggaaaaggctaccttgagtgtagtttctctttagatgtcctaaactacccatgttagcttttgggacaaccaagcaatattcagaacaactgcatgatcatgaagacagctaattcagttacagcagagatcacccttaacagccaagtaagtttatggttctaaatgcaaaaatatgctacaagattttgtggtctcaaaatatgtgattaattagtattcagtcttactgtagtctcttgtttactctatgtacctgtgatatgcaaaatataaaaaagaccccctagccttcaggtttacattctcatggtgctgtaggtgcaagtatactgtctctagtttattcagaacattgcttggctactaattataccattttggaagaaccccttagccaagagttttaaaatgcagagggctatgttgaatttcagggcattactgcttatgtttacactgatttagttctgctcctcaactcttccccagggagctgctcattaatacaaaccaggaaagaaaccattctgcccaagtaccctcaccaccctccagctctcagtaagtggccaagaaaacttgctccataaagactatcacctcagttcctttttcccagggctttacacttattcattatcttccaagggccaggatttctagctaagccttttagaaccaaacagaagtcctaaatttagctttttcctgtatgacttgtttgttttgaagcagcattatagtagataacggagtacctgactgcatctccgaggaatttgacttgacatattcagttgaagttttgcatgtatcattgctttttcccaagattctgaaacaaaggttttgcatgtgtgttaaaaccaggcctgattggaagtgtaagcaatagtagcaggcccataactgattctagaatgctaacattctaatgcatggttgaaaattttcattgttaggtagttattagtaattttatatatacatttatcaataatgaagcaatagatacttaaaccaatagcttggttttattgtttatttttattttttaattaaagtttgtcttacttccattgaaattggaagtacaagataaacaaggggcaaccacaagacattcaaactgttaggaaaacagcaagcagtgctcactctgtttcctagctctatttattcccaagcatgtttgcaaataaaagataaactaagcatgttgaataagctgctgttatcagggtagtgcaggatttcagaagagtagggaaataagccaagtagagtcatcttccttcagaaataacaatgttcagtgttaaataactagctgtggggcttgtctgactaggtttttgtagactaagttcgaggtttcttcaaactatagattgagccaaattcatggtctaccgtccccgaacaggcaggaactggcctgagtgtcataaacaggcgccaccatcagtgtgaagttcagtgctgactgaggacccggcaaggccctgcagcaaggtggttttgtaggatacagaagttcagactcaggctgtgctgtggctctgtttacaactgcagagctggagttgttcttcagatgagtcggtcaaaatgtgtcacttgcctgaaacttgattcctgaggaacaggagaaaactttcttcttccaaaaaatatatttatttggataaatgaatattggtttgttataatagtgaaaggaacagaagtgtaatctactggcagaacatttacctgagaaaatgggtttaattgcagcactaccaaaaaaaacctcatggtggtaacataagaatttcttgactttgaaatgcaagttacaaaatgattttgacaaatgagaagtatttataatgtctgaaaggcctaaatagatttcaaataaaactgtttcactggattcagtccaatttacctgttatatgatggaaaactagttccaaatttaactttcaccgtggtcctttgctatggatgtcaactggaatggtgactcctaaccttcagaactgaactaaagttgtcagtgtgatggttgctttccactgaaacacaggaatcaaagtatgtgttgtatcccaaatagaagtgttctttgccacttactaataaagatgtaaggtcagagttcttccttctagcattctcttcctaatagtcaccaaagtcaaagcatcaaacggcaagacttggtgtgtatttggtagactcaggctttataagatacctttaaaggggcttgagagatggctcagcaatttagagtactggctgctcttccaaaggccctgagttcaaatcccagcaaccagatggtggctcacaaccacccataatgagatctgacgccctcttctggtgtgtctgaagacagcaaaagcgtacttattttatttataataataaataaatctttgggccaaagggagcagggactgaacgagtggggccagccagagcaagtggggttaaccagagcaagcagaggacctaaaattcaattcccaacaaccacatgaaggctcacaaccatctgttcagttacagtgtactcatatgtataaaataaataaatcttttttaaaaaagatacttttaaaggcagaatacagttaggattaatggtgattttccaaacattttgacatctttggtaatggtatgctgtatccttaatttaaatgttcttttgtgcttggaacatagctcttggagaacacttggactcaggccagtcctcaacacttgacaccctatcccaaagatcagacaagaattgtgtcagtgtgtta

SEQ ID NO: 27031 - DNA, 1366 bp, Mus musculus
ctctctctgcactgccccttcagtagcttcctttcctctctctctcattagttgggcatattctattctgtcaagtctttctctgatttgtcagtttgtctgctgctcaatcagacatcactttcaaacatgggtgcttccttctataaactaactttaccttcattatttgggattaaagatgtatactaagtaagggcgtatctgtatgctgtgctccagccagagggattaaaggtgtgtgtacgcatatgtatgcatggtaagggctgagctacaccacaactataaagtttagtttttttagtttttgtttgtttgtttgtttgttttttaggaaacaacacatcttggggttaacagcatcaccaaagatcctgtaacatgtgactctattactttaaatttattttagtacatttactccataatgcctatttctgaaaatgtatttcactactaataattaattagcatgcagtgtcccttgtgtccactgttgaaaaaatgaagttggccaggataaagcgatggaggtaatagtgattgtactctgacatgccagttttatgaaaactgataaatacttgttcctttgttttgagatagggtctttctatatagctttggccgtcctggaactttctatatagaccagggtagccttaaacttacagagatccacatgcctctgcttctctgctagaattaaagaatgtcacagagaaatcatctttgcttatgtaaaatagatgtgtacattggatgctggtggtgcatgcctttaatcccaacactctggaggcagaagtgggcagatagatcagttcatgaccagcctgatctacagagtgagttctaggacagacaagtctacacagagaaaccctgtctgaacaaaacagcagcaacagcaaatgtatgtatgtatatatatatatatgtacatatatatatatatgtatgtaataagtaacagttaataaatagaatacattgtacaataaagaattcaggggccagcgagatggctcagtggttgggagcaccaactgctcttccgaaggtcccgagtttgggtcccagcaaccacatggtggctcacaaccatccctaaggaaatctgatgccctcttctagagtatctggaaacagctacagtgtacttacatataataaataaatcaatcttaaaaaaaaaaaaagaatttgtatcttttgctggtttttttttttttaatttacttactttatttacattagtatactgcaactgtcttcagacataccagaagagggcatcgaatcccattacagatggttgtgagccaccatgtggttgctgggaattgcactcaggaccttt

SEQ ID NO: 27032 - DNA, 1243 bp, Mus musculus
caggcagtttaaaatacagaaattgagccacgtgtgatggcatgcttttaatcccaatatttgggagacagagaaggtggatctctatgagctcaaggccaatgtggtatacatagtaggttctaggacagcacaggcaatagaatagagagaagaccctgtctcaaaaaacaaacaaaaaacccaacaaaataacaacaaaaatagaaaacaaaaacaactcctccctccctccccccaaaaaaaagaaaaagaagagaagttgattgatgtatagatttgggagatatgactcttaagtcaaagcatcagtaaagcgtgcttttccaagactctgggtaccttctttgcttcttgttcttgtagtggctgtgcatgtctgttgttccttggcctggtgccataccctgctctctgcctctgttatcacatgacatttatcttgttcatttggcctgtgatagattctcaaactgtaacccaggtaggcctcaaagtcccagcagtcgtcctacctcagccttaagagttctggggttgtctatggctttaccaccctgaacgtgccccatctcgtgtgatcttggaagctaagcaaggtcgggcctggttagtacttggatgggagaccacctgggaataccaggtgctgaaggctaaataaatattaaaaagagttctgggttgagtgtctaacactcttctaaggacactggtcttattggaatactacctaccgaacaacctctgtttgactaaatatcttgagaccctgttcctaagagagttgacattatggtgctagagttagggaactaactcatctttggagaatcacagttcaccatagccacacttggatttcacatgttttccaattaaagcaaagccgagaaataaatgcagaagaccactgagttttatttaacatttgttatttggtactgggaccaaacccaggagcttgagctgtcaggcaagtgctcagtgactaagccatgacttttatccagaccagaataagagatttctggagagtttgggatggtaattctcttgatgtcaaaagagcccattttgttctcattatcctttctgcagaacttggctgttataaacacttgcctgcttctttaactaggctgcttacagggaggggtgacacccactttcacatagtgagtgaatacctgtctttttcagtcttctacatccctttccctaattccagcatttaagagac

SEQ ID NO: 27033 - DNA, 1597 bp, Mus musculus
aaccctgtctcaaaacaaaaaacaaaacagaaagaaagaaaggaaggaaggaaggaaggaaggaaggaaggaaggaaggaagacagtccagtacccagtacccagtacccagtagatgccatttaactagatgttaggccagcagtacattgtttacagtgtctgtcagagagtctaggttgagcctaacatggaacatgtttgtccctcctagggaagaacgatggaagagacaagagcaagaacgaaaggagaagaaagaaaagcttttggaagctcgaagaaacctgggtgtgactaaagcccagtgaccctgtctgttcctttactctaacttgttttccttttgtatgttttttactctttctctacttcagtcaaaagctcttttctatcataacttttggtcataatttgtgtagtgtctcttctgtgctatatctgagaatatattatcaccttaaagttcataactaaagtagttttcatctaatgccctatacatctccaatttttaaaagacttgtcctcatgattcttaacagaggtttttcatgtcaaggtcctgatagttccgagggagatgacctgcacccttttctgcacaagctgtagcagaatcttagcatgagaaaataagatatcgctcataggaaaagggaggctggaagaccacatttttgttcagtagcctggaaaatctattagtcttattgaaatcttattttatcaaggtaaaaagttttagcttataagagccttgttctgacttttcatgtatttgccatctgtcattcattataatcctaaacgagaaaacctctactctctctacttgttaaataaaagccacagggcaaagggtgtgctttagttgtacaacacttgtctatcacactcctgtccctgaactgtaccaccaaaaccaaagctgagaattgctgctgtaagaattactgtcattggcagacttttttcttacaagtagtaaagagaggaaagctgcaaggggtgaccttctgatctttgctctgccttacagagattctgagatgtgtgtaatgcttacaatgttcataaataaaaattttcactgtgataggttcattgttttaagcgtaagttgctcaggatttggatggacatcagagatcagtaaacacacctcctccatccacttgtcttccacaactgttgagacagggcctcatgtagggcaaactggtcccaaactcattttgtatctgaagatgaccttgaactcctgatcccccagcctctacctcccaggtgagtgcagagttagatgtataccaccatacctggctataaagaagtgtttttgtttttccctttgttactgactacattttgaatctaaggccttgcaacttaccagaaatagtacgataacaaggttaataaccaacagttctatttgtatatactataagtcaataaagctaagctgaatgtggtagcataaatctatagttcagtactcaggaggtagaggcaggaggagcagaagctcactgtctgcctcagtctcgagaccctgcttttaaaaacaaactgtagaactgggtggtatggc

SEQ ID NO: 27034 - DNA, 1184 bp, Mus musculus
cttattgttgaagcttgttttctcagcccgggcaaatttttacattttaatacttttttcttacgatggcaatgtcttccattcacaaattactgactggcatttacattcataaaaatttcctgaggccaagggctgcattacctccatttgtgggtagtcactgtgtagactattcttccagtagtcttcagaaaaaagtgacttctgttgacagagcctcccagcagggaaagactgaagagggcttacaaggacatgaccacaaagaagttgctttggatgcaccttctcctgacaggacacctgaagttagttttgataaagcaattagagatgaagcaatagaacattttagacgtttgaaggatgaaattgtggctcatttgagaggcccagacggccgcccattacaagaggtcataatggaacaagccagggttgtctggcagtttcgtgaaaaagaagatttggataagtggatagtgacttctgataagacaattggaggtagaagtgaaatattcttgaaaatgagcaagaacaaccgaagtgccctgctttatggaactctgagctctgagcctcctcaggatggggacagtagacaaagtggatactgtgccatgatctccaggattccacgggtaggtgtggcctgttctcagtgactttgattgtagcgggagctgtaactgacacttgctcttctgtaagtgaacacatctgttttgccttataaggaggtatgtaactgcttggccttagtgtaaaagggggcattactttgggtttgagaagagtggtgcatctgagaatccagagaagatggactttgaaaggtatcccgggagattggcatctccagcttggactagagtcaccttgtagcctttattcttggttttaaggcagggtctctcatgcagctcaggctggccttgagctaactatagctgaggatgaccttgaactcctgatgctacaggggtgtgccaccacatctggtacttatattcatagttgacattattttgctgtgggttgcagagatggtccagtgagtaacgtctctgccatttaagcttgagggcccgagcttgggtctccagtacataggtaggaatctgcgtgtggcactgtgcacctaggagtaacagttgcacatgtatgtctaatggctg

SEQ ID NO: 27035 - DNA, 2243 bp, Mus musculus
aactagcacagtcccgccactcagcacactcagtattaccgtggagctgtggggttcttgctagaggccctggtggcagcagtggcagcacttcagtgtccttcaggctgccttgggcccgaccatcgaacatttggcatctaacccttgcagagagtgggactgggcggctgccatcttcttccctctcatccttctcttcttcctgtgtccatggaagagggattttcaaaaccagtttagtttccaaaaagtgtacatttatggggagggagggaaggggcctaatttgagtgagagagagagagagagagagtgtgtgtgtgtgtgtgtgtgtgtgtgtgtgtgtgtgtgtgtgtgtgtattttttatcattttttaaaatgcagtactctttgtatcagtctgtcatgggtctatagctgtttcagatttttttgagctgtacttgagcatctgaaactgcaagaaagaaactgattaaatgtgattcttcttactaaacaggcctgactgctgtagctgtgtgacttccctccctctaccctagcactgccctaccccacaggaaactcccatctagtccccttgccccataggctgtgttctagcaggtgagcaggaagctcatggcaggtcctagggagggcagccagagagtctcgctcattccacaggcacagcttcttgactgaacgtagcacatctcgtccccacccactgttcctgtctcttcctagtgactctgatgtttggcaagaataacattttctggttttttaagaaataattcaacatgaatgtggagagcaaacaaaaagatgtaggttgcaaatgttaccagcatgtgcagtggtgtgtgtgtgcctatgtgtgtctctgtgtgtgcatatatatgtggtgagcatatatatatattgtgcagctagggtgaagccagcaaagaggtgtgtatgttgttatgagacgtttgaaaagaagctgactgcttgataatcattctcaggtgtaaagctccaagtgtaaataaaagtggcatttaacaaattttttcagaacaaagtccagctgatgatctccagcaagcagtaagctaaaggaacagctgagagccgccgatctgcacacagtgcagaggggtcagctctgtgcttcactgacttggataaggaagggatgatgggaaatcatggaattaagtagtatttaaacaaaagtggacgtaatagctcttctgtttgagtaaagccttggtgttgctttatcttagtttacatttttactttttaaaaagcagcaacggatgcttttaaagaagtattgtgactgtagcactgggaaatgtggcccgtgccccagcttgttgtagctgtggcatagagttgggcaaaagagcggtgatggactcattgcaaccatacatacttgaagagtccattgaccgaagctctttatagactgttttgtaaatggggaaatcacagactgttgaacgccgcctgcactctaacggtcctagagctgctgggacctctcctatcatgtcagacttggacttttttccttcttgtttaaaggacataaaatcatagaatccatataatctgtggagtcatcctgacccacatgtagatctgtatctaatattatttggatttggacaagtgtcaatgacatggctgtgtaataaaatttttattaaaaataccacacactgtagcccctttgccactccccatctgcagctgctgaaaccctcatgctgagatgccaaaacacggggcagggaaaaaaagcccaccaaagaagattgagagttaacccagcaactgacctgcctgtctgctgattccagtcaacattcagcacctacctgcagtctcagctgaggtggggcctgagccaagatctcagccagtcaatggaaccttagctttgtcccaccaactggcttcctggtgggtcacagtttttctcctgctggtgaatgccctcagtggcctctccatcaccccaacttcacttcagtgttgaggggcgtaggacccaaagctgttttctactctttttcagttctgggaagtaagagagtccatatacctagctcatgctgtctgtagatctgttgtctggtttctgacaggcacagagaaagtctgtttttgttattttttttgtgaagtcctgacttcaatctgtaaatatatttgtaaataaactctggcattttaataagggatcag

SEQ ID NO: 27036 - DNA, 1872 bp, Mus musculus
cccttaaatactcttaagaaatcaatacttaaaccgggagtggtggcgcacgccaataatcccagcacttgggaggtagaggcaggtggatttctgagttcgaggccagcctggtctgcagagtgagtgagtttcaggacagccagggctacacagagaaacctgtcttgaaaaaacaaaacaacaacaacaacaaaaaagaaatctactttgtgtgtgtgtgtttacgtgtgtgtgtgtgtgtgtgtgtgtgcgcgcactagaaatggaacacagggcttcatgcatcctaggaaggtgcgctcaggctgtaaactatgccctaataccaaccagtctttgccctttagctttcaggcactaaagaagggaggtctttctaggacctgatttctgccctgtgatttgatggcatgtgaccaacagtcatccactgctgctactgatggacattcccacttggccctcagcatatcatttccttctgtcacagctgcctgtgcctctggagtgctacacagagcctgctgaagacagcctgcctctccttcagctctacttccgggccttggttactggtacactccgtgcacgttggtgccccatcctctacactgtagccgtggctcatgtcaacagtttcatcttctgccaagacccaaagagctcagtaagtcacctctctatgttcagagggaaggagggagctggtggaccagttggggatgggctgagggttaagtgagtccctgggtgggtaccagtcctcggctttgtgtcatatctctcttccgtccactcccaggatgaggtaaagactgcccgaaggagtatgctgcagagaacgtggctgctgacagatgaggtagtattgtgggtgtcgggacggaaaagatacaggacattaaggtaccaaacctcaacaaactgaccacccacttcatgggttttgtcttctctgcaggggctgcggcagcatctcctccactataagcttcccaactccagcctcccagagggctttgagctgtattcccagttacctcgcctgaggcagcagtgccttcagacactgcccacagaggggctccagaatggaggagtcaagacatagggcacttgcccccagctaaagatgactactctactctcctgggactgagcagtgagcctcccgagagaaggcaacacaagacttgccttcctgtgagcacattgtttgagccttttttagaacagaagggactcgtattacatcatgatactggagctcaggatctgggggctgagggctgtgccaggcgtggaaggagggtggcttcagtgtttaccctgcggtgcccaggacagtctgagcacagctctcctcactcacctccagtcttcaccagaccaggatgtgcaattactgtgctacactctgaaataaattcttttctagtctgactgatctggactgttttgtcacattcagagttggtagcaaggatggattttcccgaggagagagatgggagaaaatgtcacaatgggaggtaaacacattaccatctgggggtggcagaggtgtgtgtcctgggagtcagtgacagtgcgcctggagtgggtgtggtcctggaggactcagcatgccctggaagtgctgaggtcagagaacccaaatgtcagcctggtgtagttctcctatgccgttctcagtgggcttttttttataatgtgtgttcatctgtatgtgagtatggcatgtgtacagagaccaggagatgattttggatccccctggagctgtgtggttttgagctccctgctgtgggtatagagaccagacttggctgcgctgaccactgagctatcctccagccctggtacttt

SEQ ID NO: 27037 - DNA, 1202 bp, Mus musculus
agcagtggggaccctcagtgtagacgaggggccctcctcgttcaagcttgccgggatctccccagcatccgcagctgctacctggcccattgttcaccagcccgagccagtctgctgagctcccaagccttgtactgtggagagctactgcgagtctcaagtctgctactgcctgtacctaaggagccactgctggccactgactggcccttccagccgttgatacatctctaccaccgagcttcagatactccctctgggccacctgctgctgacactgtaggcgttgccatgcgggtcctacaatgggtgctagttctggagagctggcgccccgaggtcctctgggctgtgccccctgctgcccgcctagcacgtctcatgtgtgtgtacctggtggatagcgagctgtttcgagagactcccatacagcgactggtggcagctcttttagctcggctctgtcggccccaagtcttgccaaacctcaagctggactgccccctccctggcctgacctcttttcctgacctttatgccagcttcttagaccattttgaggctgtctcttttggggaccacttgtttggggccctggtcctccttcctctgcagcgtaggttcagtgttaccttgcgcctcgccctctttggggagcacgtgggagtgttgcgagcacttggcctgcctctgactcaggtatgtcctacactatcaaggccttcctaggacccttcactagacactaggggcagtcttgagcagtgtggcacttcggtgggcaccattacctcattacctctttgaaagcatcaagctgtaggaatagaagggtttttatcatggcatctggcagagagcaggtatacatattattactattgggttttttcaagtcagggtttgtctttgtagctatggctgttctggaacttgttctggagaccaggctggcctgaaactcacagagctgcctctgtctcctgagtgttggggttaaaggtgtggatcaccactgtctggcagggtttgtgttattaacaggtttggtttctgcttgtgaactcctacagtttagaagaagatatgctaagatcaaaaaacaaaaacatacttgttaattactcagatctttggtgtgttaagtcagaattcagagaatttttaaaagactggagtggggctggtgagatggctcagtg

SEQ ID NO: 27038 - DNA, 1182 bp, Mus musculus
attgttgtacgtgtcagcccggctgggtggggcaaggcatcccatttgggcgagaaaagggtttataagtggagggtgttgtagaaaggtacacttttaacactccacggtcaggttggaacatggttagaaccacctagactagatccaacatgggttcctgaacctagactagatccaacatgggttcctgaacccctggaatgaggatcatgggggccactggtatcgggttcagcctggagaagcctgtagacagtgcctatccatggcctctgcatctgctcctgcctccaggttcctgccctgtttggggtcctgatgtgcatcttccttactttgtgttgccacaggaacgagatacaagttcagtcactgtgactctgcctgtgcccagtggtgttgctttcccgcctgtgttccatcgctctcaggagagacaggtaagccagagttcccttaggtggactttcagttaggctttctattgctgcaccaaaacaccatgaccagaaacaacttggggatgaaaggcattatttcaattacattttcatcaggaccccaaacagggcaggaacctggaggcaggagcagatgcagaggccatggataggcactgtctactggcttgctcagcctgcttgtttatagaacccaggaccaccagctcaaggaagcacccctcacaatgggctgggccctccccatcaatcactaggaaatgccttagagctggatctcctttctcatgactctagcttgtgtcacgttgccgtaaaactatccagcacaggcgatgcttagggaatgagtggttctcagagcgcatcttccctagggagctctggacaatgataagcaagtcccttttattttcccttaaagaaaaccatatgtaagtatctatgtctgggccaggcaggcagatctctgagtttgaggccagcctggtctacagagtgagttccaggacagccaggactatacagagaaaccctgtctcaaaaaaccaaaccaagaaaagaaaagagccaggagtggtacaacgtgccatgtccgccatgcccacagagcccagaaaggtagagtgcccttggagcgtgagttacagatgcttgagctgtccaatgacagagctgcgaattcaactcaggtcctctggaagaacagcgggtgctc

SEQ ID NO: 27039 - DNA, 2255 bp, Mus musculus
taggaactgttaaatgtaggtctggcaagatggcagagcaggtaagagtgcttgctgccaagccagaaggcctaagttcgatcccatagacccacgttgtaggagagagccagtccctaaaacttgacctttgacttcgaacaagtgtgctgaggtacatgcatgaggtcatgagcatgtatgcattcacacacacatatatacatacacgaaatgcatataatttaacccgacacgtagttatccttctacagtactgttaaaagaatgagttattttcccatctcagcgtcatatggtcgggaggtcctctgctttgtggctactatgtccccgtattcttttacctcaggtatgatctcatgtaccagtgctggagcgccgaccccaagcagcgcccaagcttcacgtgtctgcgaatggaactggagaacattctgggccacctgtctgtgctgtccaccagccaggaccccttgtacatcaacattgagagagctgagcagcctactgagagtggcagccctgaggtccactgtggagagcgatccagcagcgaggcaggggacggcagtggcgtgggggcagtaggtggcatccccagtgactctcggtacatcttcagccccggagggctatccgagtcaccagggcagctggagcagcagccagaaagccccctcaatgagaaccagaggctgttgttgctgcagcaagggctactgcctcacagtagctgttaaccctcaggcagaggaaagttggggcccctggctctgctgaccgctgtgctgcctgactaggcccagtctgatcacagcccaggcagcaaggtatggaggctcctgtggtagccctcccaagctgtgctggcgcctggacggaccaaattgcccaatcccagttcttcctgcagccgctctggccagcctggcatcagttcaggccttggcttagaggaggtgagccagagctggttgcctgaatgcaggcagctggcaggaggggagggtggctatgtttccatgggtaccatgggtgtggatggcagtaagggagggtagcaacagccctgtgggcccctaccctcctggctgagctgctcctactttagtgcatgcttggagccgcctgcagcctggaactcagcactgcccaccacacttgggccgaaatgccaggtttgcccctcttaagtcacaaagagatgtccatgtattgttcccttttaggtgatgattaggaagggattggcacacttgggtccctaagccctatggcaggaaatggtgggatattctcaggtctgaatcctcatcatcttcctgattccccaccctgcaaaggcctggaactggctgtggggctctgaggcatgctgaaggacaaaaggttacagagatccgacttcaaaaggcagggtctgagtctggcaggtggagaggtgctaaggggctggtccaggagtcaggcatttcaggacccctccaagcttctacagtctgtctgagcatgctaccaagcccccagataccccaaaactaacagaggcagttttgtctgagcccagccctcccacatgatgacccttaggtctaccctcctctctaaatggacatcctcgtttgtcccaagtctccagagagactactgatggctgatgtgggtaagaaaagttccaggaaccagggctggggtggaaccagggctggggttgaggcaggctcttgggcaggctcttgctgttaggaacatttctaagctattaagttgctgtttcaaaacaaataaaattgaaacataaagaatcaaagctttgttttgttttttactgatattggttgtttggagtttttgttgttttgagacagggtcttaactaggtatccccagctggtctggaactcacaaagatggacctgccttgttctgagtgctgggattaaaggcacgtgctaccattcccaacccaaggctttgtcttttaaatgtttacttttttccccttttggatcacaaaacaatgaagcattcttgcacagagaaaagtctagaaaagacatgccggagtgtagacagttatctttacgtgatatgattaaggaaacctttttcttactgtatcttaaagttcaacccagtgtgcttctcataagcagattagatagaccccagtaattcttaccatgttcaagataatatataatctttgtagacaactaggaaagtgtagaatgtctgtaatcccaccaccc

SEQ ID NO: 27040 - DNA, 1122 bp, Mus musculus
atagaaaaagccctgtatatttacttacatttagtgcctaaagtggggcacagaatccaagcttaaacaaaaggttcaggtattaaagaagtcctaggtggaaggtggtttcctagtcgcttgggaccaggaagtttcgagaagccaagtattctccgaagacaggagacctgcagcatctccacaccttgatctcactttggggaggcagataggcatgggctcttggctggccatagagtttgtactgcacagacctgactcctatgccccctggcacctgaagatcccaccagacagcatgctttggaagatgtacaagctgtaattgagccatttgaactcaaaatgtgggcagcaaaggccctagcccctgcccttcattggctgttggagcagtgttttgtagtacataatgggtttccacctttgtagcaatccttggctttagtgaacttgatgttccaccttcacagccaggtctccctttggaatgaatttgtggtgaggtcagcactactgcctgggggcagggaatggacgcagaggatctggactcaaggggcattgagttggttgcccaggctgccctccctcaaatttccattcagtgccttgtgagaagactctgacctgattgggcaaactgtccttacaggctccagcagggaagggcccctagcctgagtgggataccctctaggggaggaggcctgcgtccctatcagagcttgtcagaagctgcagctagcagatggtgtgtgcaccttggtacagtcgtctaagtgacagggtttgaagctagtagggtgccagaaggaatctaagactaagaaaatagatgtattctccatgtatggccacttgaaggaatgctaaatccaaggaccaagtaaatagtaggttttacaggtttcatttcaagctttttctcaaaagccagcttgccttgttgaatttaaatagctttgattggcaatttatttacaccccttgttttcagaacatgtcagctgaataaagttgaggtttatttagaaaaaaaaaaaaagactaaagccaatagaagtctggtaagactaaataaagtaaggggactggagagatggctcagcggttaag

SEQ ID NO: 27041 - DNA, 1147 bp, Mus musculus
atccagaaggcacagtattgtattcctgccctctggggcactacacaggctggagctgagtacaagtggggatcattttaaactataaggtcaccaaattaaaagtcggcctctttgcctctctttctccctctttgtctctctgtgtcactcattctccctgcacctaagaaatggttgaagggcggaaaggtactgccacactcagtcttattactatagtttttaaaaaacgataatgtcttgctatgtattcttagctggcttctctgtatagaccaaggctgttagaccaaagctggtcttaaacctggaatgattctcctacctttccctcttgagtactgagatttagttgtagattttgagcttgagttctactagaaagccaggaatagctgttgagtggggagttgtttaaatttggatcccagagttgagaatggtggcacatacctttgatcccagcattcaggaggcagaggaaggcagaactctgtgaattcaaggccagactggtctactgagcaagttccaggtagccagggctatttagtgagatctctgtcttaaaaatctgtatctcagccgggcagtggtggcacacacctttcccttgctctgagagttgataattgccattatgacacagaaaggcctaaaagagggaagaaacagatggtatctaaatttctggaattaattaattaatttttgagatagatcttctctatgtaaccatggtctcaaactcagtgatctgcctgcctttgcttctaagtcctgggattaaaggtgtgcaccaccaccaccaccaccaccaccaccactaccctgtttgcttgttttttctcttcctctgtctcctcacttcttttttaagaaaatatttatttttatttatatatgtatttttaaagattaaaaaaatattttaatatttatttttgtttaatgtatatgaatacactgtagctgtctttagacacaccaaaagaaggtgttggatctcattacagttgtgagctaccaatgtggttgctgggaattgaactcaggacctgtggaagagcagtcaatgctcgtaactgttgagccatctttccagtcccatgtatttttatatgtatgtatgtatgtatatatg

SEQ ID NO: 27042 - DNA, 1116 bp, Mus musculus
agtactgctgaaaaagagattaatatccactgtaagagagagagagagagagagagagagagagagagagtgtgtgtgtgtgtgtgtgtgtgtgtgtgtgtgtgtgtgtgtgtgtgtgtgtttgtacataaacttccattctaaattttttttttggtcaaggtttcagtgtatagcctagcctgcttggagcttgctatatttagcccaactcaggatccttctgtctcctcccagccactgggattacagatgtgtactcatggttggtgtgctcgatctctctctgtctctctctctttctctctctcttaagatttatttattttatatatgagagtacactgtagctgtctgcaaacacaccaggagagggtattggatcccattacagatggttgtgagccaccatgtggttgctgggaattgaactcaggacctctagaagagcagtcagtgctcttaaccgctgagctcagtgaggctctctttttacttttcactcttcttcttttgagaggatctcactatcttggctggcctgggacttgctgtgtagacaagctggctttgaactgacaaatctgcttgccctctactactacttcttttttttttttttttactttgtttttcgagacaggttttctctgtgtagccctggctgtcctggaactcactctgtagaccaggctggcctcgaacctgcctctgcctccctagtgctgggattacaggcgtgcaccaccatgcttaacttaaagatttttatttattttttaatgtgtatgcatgtatatctgtatattatacgtgtgtgtacctgtgaaagccaggagagggtagatccccaattttgaacacataatgtaggttctctggcagagcagcaagggcttgtaaccactgaatcttctctctaagccacccagactgactccctccctccctcccttcccttccctcccttcccttctctttctctctttctctctttctcttcccttcccttcccttctctttctctctttctctctttctctctttctctctttctctctttctctctttctctctttctctctttctctctttttctctttttctctttttctc

SEQ ID NO: 27043 - DNA, 1846 bp, Mus musculus
tatatgtgatcaatatctaaagacaaacacattttataaggcactctgcattttgatttaatgataagggtaaactattcttttcctgcattttatttatacaagtggggttagtttatgtagtgttagagattgaatttaggacttttgtgttctaggcaagcagtatatcagttgagctacatgcccagccctgaaacttggctcttgaattgtatttttttgtgtgtgaaacattgataaacatgtgatgttgataatttacttttgagcactttgttaagctataatttttaagtaatgactcatgaaatctgatggatatattgattttaagaactgtttttccttctctgagtcttgttgatagatagttctgtactttttattgttttctacctttctagtcgtattgtgaacagttttgaagatgattcccagatttcctcaccatcaaacccgaatggaaactttaatgtcgtcattaaagaagagcctctagatgattatgattatgaacttggtgaatgcccagaagggataacagtgaaacaagaagagacagatgaggaaacggatgtatactcaaacagcgatgacgatcctatactagagaaacaactaaagaggcacaataaagttgataatttagaagctgaccatccatcttataaatggctaccaaatagcccaggtgttgctaaagctaaaatgtttaaattagatgctgggaaaatgccagtagtttacttggagccctgtgctgtcacgaaaagcacagtgaaaatttctgaattgcctgataatatgctctccacttctcgaaaagataaatctatgttagcagaattagaatatttgcctgcgtatattgaaaattctgatgggactgacttttgcttaagcaaggattcagaaaatagtctcagaaaacattcaccagatctcagaattgtacaaaaatatactttacttaaagagcctaattggaaatacccggacatacttgacaacagtagcacggaaagaatacatgacagttccaaaggatcaactgcagagtcattttcaggaaaagaggacttaggcaaaaagcgaacaacaatgcttaaaatggcaataccatcaaagactgtgactgctagtcatagtgcctctccaaatactcctgggaaaagaggaagaccgagaaagttgagactctctaaggcagggcgaccacctaaaaacacagggaaatctttaactgctgccaagaatattcctgtaggccctggaagcacctttcctgatgtgaaacctgatctagaagatgtggatggggtgctctttgtttcctttgaatcaaaggtatggttgtaatgatcagctttctttttaaggtctgctaatcagttttgaattgaaaattggcttaaaatttaggacctacttttattaatgtatctatttgtgagtatgtttggggctattgagtgagtgttaaacatttggtttaattaacagtaatcatctcttaagatacttgctttgaaatagactttaaagaaatgtacctttgtgtagatctcattctataatttgttcaatgtttatctgattaaaaaagatttatgtgtgtctatgtatgtgagtgcaggtgccagtggaggccagaggtgtcaggttgtcctggagctactagagttgaagctacttgtgaactataaataacatcagtgttagaaaattgagcttgagggctggtgagatggccccgttgagagcactggctgttcttccagaggtcatgagatcagttcccagcaaccacatggtgactcacaaccatttgtagggatatctg

SEQ ID NO: 27044 - DNA, 1950 bp, Mus musculus
ttttaaaactttgctttgggtggaggacagtgtttgagttattttgtgtgtgtgtgtgtgtgtgtgtgtgtgtgtgtgtgtgtgtgtgtagcaattggtacttataggtggattgtacctttaagaaattgacccaggagccgtggattaaagtgccacctttaatcctagcacttgggggtcagaggcaggcagatttctgagtttgaggccagcctggtctacagaagtgagttccaggacagccagggctatacagagaaaccctgtctcgaaccccccctcacccctcaaagaaattaacccagtgggcacaactaatgctataagcacaatcatttagtaggagggcacagtgagagaatgaagattttttacctgcaaatttttatttgcagcagcgcggccctctcctggtggtgtgttcacacagtttgtgatgagcaaagttggtgccttacagcagaagatacccggagttcgcacacctcaaccccttacagggccacagaagttcagtatcaggccttctccagtaatggtcgtcacacctgtggtttcttctgagcaagttcaggtgtgcagcactgtagctgctgctgtcactacttcccctcaagtgtttctagaaaatgttactgctgtgccatctctgactgctaattctgatatgggagctaaagaagctacatattcttctagtgcctccactgctggggttgttgagatctctgaaactaataacactacccttgtaacatctacccagtctacagccactgtgaaccttaccaaaactactgggataactactagccctgtggcttcagtttcatttgctaaaccattggtagcatctccaaccataactcttcctgttgcttccactgcctccacctccatagtcatggtgaccacagctgcatcttcctccgtggtgaccacacctacttcatcactgagttctgtacctattatactctcaggaattaatggaagtccacccgtgagccagagaccaggtaaggactagttcttttcagctgctttattataaataaagctccttaattaaattttacagttgtaataaaattaggagtttctagtttagacattgtcatctgtaaatgcattgggctgcattcatagctatcttgagatgtatgtaggccacaatttatagatatgcctgaatacattttagagtttcagccatagtatgacatgttaacattcctaaatctttaaaattctacaaaactgaaccctaaaaataacagcttatggctagttgcaagattaggaatgaccactgtctatacagttctgaagccagattccagagtacagggatcagctgtcttcaagagattatctgattgatagattaataggactaaagttgaatccaaggaatactaaaactcgaaaacaaagtggaaatgatcgctgaaggacactaaatgatgtaaataggaccagacctctgagcattagaacagccattaaagtggcatgggaggaagggcaaactgctttatgatgagagctacagctacacatctctaaggagggaatttcatacccagctgctggggcagctactcttttctcttcccccttgtccttccctcctttctaagaaaatgtttctgcatttataagaaaatacacagcagtgacattttctgaaatggtatacttaacttactttgatgtttttataaatttttattttatgtatatagtgttttgcctgtttgtgtgtctctggaggccagctggcctgcctacctacctgccttcctaaaagaaggtatcatattcattcctagctctcattattagacttagttgataaaataacctggccaaaaaagcaagtaatagagggtttatttgggctaatggttttaagggtacagtcctttgtggtcaggaaagcca

SEQ ID NO: 27045 - DNA, 1135 bp, Mus musculus
tatgggttgaaaaataaattggaactttttaaacttacgcttaaggctcagaattgagttcaatctaggtaacacaatgagactgttgttttcttaaaaagtttaatttctttgaactagtccatttttcattgtctttattaaggaacaaagttaattggtttaagttgtttcttaccttgtttttggaagtagctacactgatttaatgttacttggtaaactcatgtcttagagaaaggtgtgttcttttttattcttcagacagttcagtgtatggaccagaaaaatctgacttatcagttcaagtagattctaaaacaagaattagttttaacattacagaataaaataaataacttgaattcacaagtggaaagaaactgtggtcgagaaatttgaaggactttgttaggagtgtataagatagaaagcctgtgaatagtgtatgccctcatgtaaacttacattgtaccttttaagtcagcctctctttagagtacactgacattaactggacatttgttttactaatttttcactttctttgcagaaaatgcctcaccttctgacactccgcactcttctgccaacctggtaatgactccacaagggcagttgcttaccctaaaaggccccttattctcaggaccagtggtagcggtttctcctgctctcttagaaggtggtctgaagcctcaagttgcaagcagtactatgtctcagtctggtatgtggtggtattctatggtttgtaaatatatactatggttggtaaagaatggtccattgatagaggacgtctttaaatctgatctgtagttacctagagctgttcttttggcatttgccttgttaaaaaatggtccttctagctggccagtagtggcacacgcctttaatcccagcatttgggaggcagaagcaggtggatttctgagttcaaggacagccagggctacacagacaaaccctgccttggaaaaaagaaaagaaaagaaaaaaaaaaaagaaagaaatagtcctcctagcttgatttgattggtggttaacctggagttggaaactgttttgttaataactctagtgacatttctaagcaggggaagaattaaaatggtgttcaagtgaaatg

SEQ ID NO: 27046 - DNA, 4535 bp, Mus musculus
gccttgcgcttgcaggcaagagctctaccactgagctatagccccaacccctcagctgttattctgacaaaagtggactaagatagactgggaaggagagagagaaaaagagattttcattactgcatctaatgaactctctctttaatttttgattttcagagaatgatgacttatttatgatgccacgaattgtcaatgtgacatcattggctgcagaggaagatttgggaggtatgagtggcaacaaataccgtcacgaagttcctgatggcaagccacttgaccacctgagagacattgctgggagtgaagccagctccttaaaagatacagagagaatctcttccagaggaaaccatcgagatagcagaaaggcactgggtccaacacaggtgcttttggcaaataaagattctgggtttccacatgtagctgatgtttccactatgcaggcagcacaggaatttatacctaaaaatatgtctggtgatgtgagagggcatcggtataaatggaaggagtgtgagttgagaggagagagactaaagtcaaaggagtctcagtttcataaattaaagatgaaagatctgaaggactcaagcatagagatggaactgaggaaagtagcctcggctatcgaggaagcagccctccatcccagtgagctgctgactaacatggaagatgaggatgacactgatgagactctgacttcactgctcaatgaaattgcttttcttaatcaacagctaaatgatgactctggcctagctgaactgtcaggttctatggatacagaattctcaggagatgctcagcgagcttttatcagtaaacttgctcctgggaacagatcagctttccaagttggacacttgggagcaggtgtgaaagagttgcctgatgtccaagaggagagtgaatccatcagccccctcctcttgcacttggaagatgatgacttttctgagaatgaaaaacagcttggggacacagcctctgagccagatgtccttaagattgttattgaccctgaaataaaggattctcttgtttcccataggaaatctagtgatggagggcagagtacttctggtctccccgcagagcctgaaagtgtatcttcacctcccatcttacacatgaagactggcccggagaacagcaacacagatactttgtggaggcctatgccaaagttggccccattaggtttaaaagtagctaatccccccagtgatgccgatggtcagagtctcaaggtgatgcctgccttggcacctatagctgccaaagttgggtcaattggacacaaaatgaatttagcaggaattgaccaggaaggccgggggagcaaggtgatgcctacattggcacctgttgtacctaaattgggcaactctggagctccatcaagttcatcagggaaatgagcttgttcatcctcatacaaaagccaggctgtgaggggaaatgaatttcacctcctttctctgtaggcgtctgtttgtttgtattatggaactattatccttgacttaattatgtgtgaatattgatggagaaaggaggtgtagggtgctggtcctggtgtttgaaattctgatcatgttaaaaatgtgttacctcacttgtggtgctgggtcccctcatcttctctaagaaggtgtgattccctcttgcccaaggaattcataacaagattctggctccatcaactaccttattattttcccctgagaaaatgcttgagacttggaattactatagactaaagtataagtcatagttgttggctccaaaatctgagaattatgatacagttgtgtgggaaaaaaaaaaaaaaagaacttttagttactatttcaatagtagggcatggtaggactgggcatggtagtgcacacttgtaattccagcacttagaagactaaagcagaaggattgcaagtttgtgtctaccctggcctatcaaggggacagacacacacacacacatacacacttgtgggggccaggggagtaggaagagagaatgttatagtaggtaggatgaatattatggaataccaaagtgaagggattttgtcattcagcagactgtttcatatccagaatagttcttcccttaccctttcagtcataattaaaaacctaagctttctggtaaagtaggaatatactttttacttttactattaacatacttattttcagagactaaaaaagacatacttctcccttatttcttggggtatcacaaagattcattcataataccagagatttctactcattgttttttggaagtagacatagaggcagcccttccctttcccaaatcatgtcactcaagaaacagctaaaatgaaaagcagtttctcccctaaccagagaccgtagccaaaataaaaatttgtggggctgggtatttcccaaatgaaaccagcctctaggtgcttgaaggttttgttcactgtcacctgcacaggatgtaaagaaaaggcgagtcagagtgagcaatctttaccagggaagtaaggcagtatttgagtcacaaagtatattttttatctgctatcatggcatcaatgatctgtagagctttttcactcattggctgtcagggtatgaaggactgacaacctgtaaagatgaagatatttatatttttgtatagttgttttcatagatttctcaaaggatgaagttttcgacctagaagagatttgtattgagtatagaaatgtttcctatctagtttgtaaataatcatggtgcatttgaggggtctctcgggaactcgtgaggcaagaatcactgttctgaaaatgtatagactgagatgtagctgctgcatttgcctttcttaaataattatattttggaatgtaacccgttctgtcttcaatgacaggatttgcttgtgttgtaaaaacactttaacacaagtgcttccggtgcctgggctgtgcctgggtgattgtatttcttttacactactgcgtctttatcctaagtcccactctgtatcctctgacctaggttgtgagaccaactttggaatgaatctagccagtgaattacttctatgtttgatttcctttttagattaactctgataatcactagattgaaatgatgaaaaacttacactgcaaatggcagtggtagtaaatctttcattggttttgcgctgcttgctctagacaggtcatcagcacttaacctttcctgtttactacaaaagctgataaagtaaaaacagtattcctcagcttctcctctgtcccttctgtcctttacccaactgactttatccaatgccttagccaaggagtgcagcacctgtcgcccttgctagcagctgtcctcagagacgctagttctttagcccaggtatagtagtttccagtggtcttattgcctgtttctttcccgagtgttcttctggcttcccagagcccttttgggttttgagagtcagacaagaaacaaaacaagggagtgaataatcctcaggaaacaatggaccattgtggcttccgaatacttttttctcttttctttcctttcctttccttttctttctttctttctttctttcttttttttttaaatttgaaaaagcatagaaaaaaaacaggtcagggtttattctttattggaagatacttgcctgtgtttatgaaagatgtacaaagatagagatgagatttggttcagggaaagctgcagatgtcattacaaactcccaagatacattgttcttaagacaaatttaggagctatcaggccgaatttgaggagggtttagtctttagaacaatcatgtagtcttgacaaaaataaaaaatctccctaaactcctaccctttagcatttcattaggagaaactgatctattaaaattatatgtatgattatgaaaagtgaattcaagtgagaacattggaggaacctggaaaaagctccaccctgactaagaagcatgatctcagtcgaccaataactcgccttttatacacctgtaaatacatggaatgtttttaaggatataattatgtcagatttagcattttcttttatatattaaatatatatctttaatttctgcttttgaaagtgattatttttttagaaataacagaagtttggcagttgaaaggcaagacatgtgaacctgaaataaaccaattatactaattaaagcagaatttggtgttgggaggtttgtgcctggttgaagaattctttatgccctcagacatatttgagagagggttccattgaagagatcttttctgaagcttcttgactggaaagctttcgatctgtcatttgggaagacctttggtattctagtccttgtagcatgtctcaattggaacttcaagattatgtacaatttgatggcaaatatttgctgttccatagtgagaatagtttcataataccactgtctttatctgctgccttggggaacaacaggacagaaacacaatcttatgtctggagacaataggtgttct

SEQ ID NO: 27047 - DNA, 1115 bp, Mus musculus
gaatcttggataagttactaaaccagactaagcttcagatcccttaactgtaaaatgatgtatcagattttcccaattgttctaacaatgaaatgacataacgtaattgagagattatggcacacaggaggagctgggatcgcgggcttttccttactgggtgcatatataacagtaatgtctcctttccttactaaatgtcagacaatagctaagtcttagcactctgccttggatgccataaccctttccttcttcctgagtagacaaaaatgccccccaaagcggaagtctaattctctccctctgtcccttcaggtctaccctgagatcaaggacagtcaccaggcctgtcttccccccagttcctttattacttgctcctcagacaacaccatccgcctgtggaacacagagagctctggggtacatggctctaccctgcaccgtaacatcctcagcaatgtgagcctcccgtttcatacttatgcccccatgcttatagattttgaccttgttttcaggaactggctccccgaatcttgatcattcagcttttatttggctggactctctgagcctagggttgattttacccagcatccctctgtgcttgcagccatcctgctggtactgcctgagctgtctcctttctcctttcccaccaggatctcattaagatcatctatgtggatgggaacactcaggctttgttggacactgagctgcctggaggagacaaagctgatgggtcgctgatggacccccgagtgggcatccggtccgtgtgtattagccccaatggacagcacctggcctccggagaccgcatggggacacttaggtaaggtcaagttctgagctaggtactgactgcctctcatggtgactgtggtagttagatcctcaagagcagcgctttaggagggcttgtctccccccaaagcttagaaacaagatatttattctgtaaaatgaaagaatgagcttacagtggtgagctcagaaaaagccatcgcagacataggcacagctatcagtcacacatccgcatgaggaagctcaagataaggggttctaagaaggacataatattgtttctgtggtgttcttta

SEQ ID NO: 27048 - DNA, 1119 bp, Mus musculus
ttgggaggtaagcccatgccgggcctcccctgggctccatctctccggagatctggaccatgtcagagacgatttccctgcagacttgataaggcattccgtggacagatcccgtcctgagttttggttctggttcctgtttttagggtcagagcgcaaagttcaacttgtggttgctggggcctgtgagggcccacaggatgcctctgcgggcactggatctttccacttccattatccagcctgctgggagcaagagctgaatgttcatctgcaggtgctttgacttgctcccaggaccctagggccacagcctctcttgtctcagcctgagctgttctccccccgccccgccccctcatactgctcctgtctgtcaggtcacatgggcctttgttcctttccctgccggtcttctgtccttgccacagggagttagttggtggggtcttagcaaagaaaggagtaatgactcgcagggtcctttctctccctgtccctaaggatgacccccatgagcagctgaaggtgccactacgaactctaccctcctcgcagctggtgagacttgtcttccccacgtcccaggtacatctggtcatcgagagaagctgggttcatgcacagggctgctgctggccctggtctgcagtcagcctccttcaggtcatgcccgaggcgatcagtgggtgcaagggtggaccctgtgaaagtgcttggggcccaagggttcatggggatgttctggggtgcaccgaggccacagtggggtggaggtacccagcctttctcattaaggtactcatggtttccaggagccactgatgaggctggaactcaagaaggaagaagggtaagagcctgtctggggaacgggagggcaggctagcacccaggcagggtggtctgtcaggccaggaggatgagggggagacggagatgcagcacctcctgagcgcatagggctttgcatcaggggcttcagcatggacaggctgttcttagtgtccgcacttggattggctacagtgtcatcctgcccagtacatcatcctgggaaactgagggtcagtgtcttatctagataagcagactggaggggaggaccctgcccgaggc

SEQ ID NO: 27049 - DNA, 1193 bp, Mus musculus
ccttagttatcttttacttgacagctaaattgtggccttgaactcactcttgtagcccaggctggctttgaacttgtactcttcctgacttagtctcctgcgtagctgggattagagacctatgccaccaggtccagctcatagtggcttctaatggtgttgggacaaacacttgcctggctgacagagcttgctggatcatgagaatcaaagttgttacaccctactcatctcagagcctctagtacctgctcacacctcagctaggagcaggagggatgttcaggtatggagaggactagacaccatgtttagggagggtggttggttcctaatctctgttctccctacaggtctaaaccttaagatgaatcctcagtcaacaccaatcctcggggctaccagtggagacacacctgggaaccactcgactactgacccaaaggtaccctccccagggctgctcaggaccagtgtgcagaacacagctcctgtcagaggacaagcaactgatgtcgcaagtcactggctatgcctgagatgaaccatggcttcattgcaagatctctgggcaaagatggcaacctgtgacaggaccggaacgtccatgctcgaggcctcttgggaagggacctgctttcagagtggaagtaacagcctggtacagcagatactcttgggacagtgccacaagcacctcccgtttataagcacccctgtaacatgtcaaatgttccgtgtcacagtgtcccgtctctaacgagccccaagtccatccatggatgatggccatagcacctctgcttgcagcttccagcctagactctgtgacagggctgctgacatgttagtgtcacttgtggaagtcccagacacacctttgtggagctgtgcctggacatcagagtttccagagtctctggagcagttggtgatgctggtcttgaactcggagcagaaggggaaaggagttaaagaccaagagtgacccaggcaggagcccagccagggtagctcagctgtcactccggcctaaactgtttgcgctttctccgccgctgcacggcctggtgcatggcctcccgcagccgatcctggttgttgcagatgttgtaatgcgtcagccgtaacagcttgtccacatcttcctggctgtaggtcacttttgtgtagtggtatggggagtcagaaga

SEQ ID NO: 27050 - DNA, 1177 bp, Mus musculus
gtgttccccacccgtgggccatggcccctgggagttgaacaaccctttcacaggggtggcatatcagatatcctgcatatcagataatttacattgcgtttcataacagcaaaaattacagttacaaagtagcaatgaagataattttatgattaggggtcaccacagcattcagaaggttgagacccactgagctagagtctatatcatgatccccgaagcagagcagcgactgacatgattcctactctaaaggatctaacagtgttaccaagatgtcaacaagcatttaactggctgtggtttggcggtcttatgcaggttaggttggagtcaggatgcacctttaaggaaaagatattaaacagagacttaagacagatccaagggcaggcaatactagagaagccaactgggtcctgaagaaaggctgggaataggcccagtgaaggaggctgagaccgaggccctgagaccagtggggcagtggagaaggctgaggctgaggccctgagaccagtggggcagtggagaaggctgaggcttaagccctgagaccagtggggcagtggagaaggctgaggcctaggctgtgagcccagtagggcagaggataagcagatcctggagaggcgcgtggagcttcagagcaaggtgaagcccctggagcaaataagaccaaccaaaagggtctgtcatgacatctgttggctcttaccagatccctctgctagatagcaaggggcacagttgtggagacgagacttgatccttagtggcttgggtaggcagggacacacctgggacctctctggttgccctcccgtggggtactgtccctacaccccgaccttggcttcttcttcagcttcacaggacccgactggaggagtcaatcgccctgtttagcttttatagctcctgtagggagcttcagtcctggctggagaagcagaccgcactgttccaaacattgcagccccagggacacaacttagaggtcatacaactcaaatatgaggtaagccacggaggtaatggagaccagagtttccaccactgaggcattgcttaacggttttgtcccagccaccatatttattttggtcctctctggggagggtccaaggctgtaggtctgactctgggggctagtgactcaaagtgagcgggatgt

SEQ ID NO: 27051 - DNA, 1906 bp, Mus musculus
tcaaccagggctatggggagggggccaaggagggggccgatgaggaagagtgggtcgtggctaaagacaagccggtgtatgacgaactcttttacacgctgtcacccatcaatggcaagatatcgggtgtcaacgccaagaaggagatggtgacctccaagctgcccaacagtgtcctgggcaagatctggaagctggccgactgcgactgcgacggcatgctagacgaggaggagttcgcgctggccaagcacctcatcaagatcaagctggacggctacgagctgcccaacagcctgcccccacacctggtgcccccctcccacaggaagtccctgccaaaggctgactgagggcccacagctggggtgggaggggtggtgcctgggcctgaagtctgctctgccactgactcgctgaatgtccgtggccaaagttccgtcctctccgtgactcggttttctcatatgtagggcagggagggcagatcccggacactagatgaggtctttatgcctctaaaatcctgaagtttctatcaaaatattgagaagagcagtatatagatatggagatcaaagaataagaagaaaaaaaaattatccaaagaagaatgtaggtgtgacacaggctgtcgaagtctgggcactcagggattgagccagggactcactggagccatcagagctgtgctggacagtaagttaccatgagcctctttgtccttcagggggcactgagaggcagcaaaggacctaatttatttttcttactgtgtttcctgctctatctagagaggaaaaggaacagaacagagagtttctgccttccatagattaaaaaccaaagagaagactaatacccaggtttgaaagaggatgtgccatgtctgtgtgggcccatctgcagtccccatcagagtaggcagccaggcaaggagaacctgtcttgtcccagcacctgctgcctgaccctgccaagcctccctcagttaggaattcataattcacaaactgtcagcccctggcaagacctgtgtgcccttcaaccactgaatgtccccaaagcttttttggtaggtggcagaatttaaattcaataaagcttgtcttgatttgtgtggagtcccagagccttcggacccaggtaaagcgagagcagccccatcctgagctgtgagtggaagagaccagcgccctggtgattgatgatgttgtttgatttttaaagaaagaaatgcatttcattgtgtccaggtatgtttttctcacaagatgtagcctctctgaagaaatctctgtaataccttttcttccaagctagacacctcacatcaggagtgcctatctgggccaggattggtctacttctgcctcttcagtgttctttcccaagcccacctagtcaggcgccgcaggggctgcctcctactgtaccctgctctgtggcccagcagaagaacactgtcaccatcacttacgaagtaggaatcacagcgcagcagtgaccacatgaccaacagcagcagaaatgaatgaatctgaacagcatccctgaatcttcacaaaaacatactccaatccctaattgtctgcatctggcaacctcagggtcagaaccggggatttaagagaaaatgctaagagctcacacccatttcgcagcacttgggaggcagatgcagggggattaccatgagttcgaagccagtctgaactacatcgtttgttttatggtagtctgtgtaaaacagaatacttacgccaccattcacacttcctatcttactttctaaataatggttttaagagaaacacagtgtttgctttactctgaaagcgtgtttttattaattggacacacacaggtgaatgtttgatcccggggctgtaactgtatttgtgtc

SEQ ID NO: 27052 - DNA, 1490 bp, Mus musculus
gggcctgtaatgttttagaattaccatagatatactgttataaacatttaacatagaaaggtatttgtgaaaaagaattgtttgagccatttatatagaatttttttggaatttagacctttttaagttatgtacttaaaataaatcttttcctccttaggaacgaatgatcacacactttgaaaggtcaaagatggagtaaataatgggaaactgccatagaagatggcttgtatcagggaagagacagcttgcgtgtcagtcttctgcactgctccgtgggattaaaggaggcaatgacatctgttcctgatctctgtgcatgggagctggggagaggtgtcagccaaggagagcagcttactgaaacatatccacgggatgagaaaaacctaccggcttctttacatcatcgacaccctttccctcccaaccccatcaacagctgtttttgcaagctacatgttgtccctgaactttctattccattgtttaatctgtcaaactaggaagtttaaagtttatgaaaggactgtgtcatttacaccataatttgtcatctctaggagcaactgcctgtgattttatttatttaggaagttggtaatgggagaaattatcatttatttttgagtttcctgagaagtcaagattacatcttgcagaagtagtttgtggggaataggcccttttgagttaaggaactatagatctatcagtgaccaagagggaatggggtgggcagaaagcgagagaaacttacatgtgattcaaaatcaagtgcaattttgtttacaaatggtgtatattaaagatttttctatttcagatgtgctttaaagagaaatactaactcttctgacatctgatattatgacacatcccattgctggcaatgtggtgcacactccaaaacttttaagtaccatttagtcagcctccaagggcagcattgcagtcacaggccatgcttggtttcccttcatgccattctttgggattacaccagatgccaagaggcactctgtgtacgtgctgtgattattcgccctgcaagagggattatcatgcttcagaaggggagcttacagagaggggacaggtcccgttgctttacaagcaggtattcttgcatgaagtggtatggaggccctagactgctgctgctgctttttttttttttttttttttttttttttttttttttacagattgagggttctagtttctgatgttggcttggagacggcctataacatcaccagggatgggttcacttgaagcactgtatttcagttttgatcgttttatccagttttgccttccctaaatttttgttctacatgaaaagttcatgccactttttaatataaaaattttaacaaaactagtgtctctctcatttatttcaaattttcccttcacacccttctttcagaccctagtagagactttctttccatgacttttactacagattatcttatttt

SEQ ID NO: 27053 - DNA, 3045 bp, Mus musculus
acatttaagcagtttctaagaaacctactcttctggaacaaatgacatacagtggtttgtgctgctagtttataggtgtttattaaagatgcagattttaattagttacccagtttgaccctaatcatacatatagtttattgattcagtttgtgatttttgttttatgttcttatgatggcttataatagattttttgagatcagttttaattcctccttttgaaataactgggtatttaaatttaaagttttctttttaaaataattatgtgcagtgtctcactattgatgtagctggacaaagctggctatgagtgcgacgggaaacacagtagtgtcctgaagtgcctggctgccctgcgtactgtattttagaattcagacattgtccatgatcagaagtccctgaagacggcacttcccagtaatcactccagagtgctcagtgggtgtcccctgcgcgtctacactcctggcttcttgagtagaaggcacaaacctttattccctttctagctctggctcttggaacctcatgaagagttgacaccttttgcgttgctccgttgccagcccccatcgttcctactgtcttgctgtgcctagagcagtggcaggccaggcgtccaggctgcttccacccactgcaggcaccctagagagggagctgggagaagcagctcgagtcagttgatcggcataggtggcaggcagagctagtgaagccggtgcctgtctccatgctcatgccagccgtagagtggagtgtggtgaagggaaagctatcattgggagtacccatcttagtggatcttagtgggatggctttgttcttggatttcttaaagacttgtgggtaaaactgaacaagttttactatctaatgctttgtttctagatttcaaacctcagattcttcagagcgagtggaccctcatgccacataccctcactttctgctactgggattgtggcctctttttgtccctggcctgatcagacctccccatagactctcctaggaattgatagaggctgtaggcaggtcctccctccccgcaccccctttccaggaaaggttccagtagttcttactggattcagaaaatgttaactaatctaggagctgacactagctcatgcatggccacaagctgttcacatgtggcctattgtgtgggaaaaattttgatgaccacgtggcttagatgtgaagagaacctttgtgtgatacagaggagatactgacagcatagttatgagattaggaaccctttcccacctctcccctccacttcctgtaagggtgtgcagaggaggcacacttttgtggtctgggaagtgattgcttaggaaagttcctaacgagtttaatgctgaccctggatcattccctgggttggtatgctaaggaagctcacgttccctgttcaccaaagggaatatgcaaagtgaggaggggtaggaccttatgctgcaaggaagaaggaggtaaggtgttgaccgtggtgaggaacatgcatgcagtctgagaggattagtacagactgctctgagcttcccttggtagcattgtgggcacctgcacttggctttccttgtttcgcaggggttttcggaagcagtgtgatgatgagttcaagcacaggtgggattgttttgggcactgggtcactgttccccagatgcagtgtgttctgaaaatgaagagccctgagtgtcttggctcctcaacaggagctgcctgtaggagggagaactgtgcgtacttcttaggtcgaccgtgacgtctgttcaccatctgcctccagtgccctcagaaggggcagctctgtcttgctgacatttgtttgactttgttgaagggaggaaagtaactaatacctgacaaaatgcaagacagttcttacaagttacttaaaggtttttaatgttcatatttaaaaaaattctttatgctgattgcaacagctcaaagcaaagaaaatcttttaaaaatctcttgtgtatattttcagttctaataaaataccaggcactttcaattattttgaaagtttttactaggttcaaaacacattttgacacattctgctagtctgtatacaggagcaaaaggagcaaaaaggagcaaaaacatgtcctgacatgagcttgagacgtcatggttagcattattacactcgttgctgtcgtgaagaaaatgattttcctgggagaggttgcagttggaggtttgaattcatgaacacataacagtctgaggctacacttttatggttgaagtgattgttgccagcaaaggttttgttgttggggtttttttgttgtttgtttgtttgttttcctggtagattatcatggcacaacttgaggacatgggcatgtggctgaggtgctgagtgtaggtgcacacttaaagaatgacacagcattctatggaagataattcattgaggaggaaattgaaatatattgtaaagtggggttgaacagtaagtaggtttgcttaagttcacatacgtttacttagcaaatttgttcctgttgcttcaaggaaggttctagaattactataaagactgcacttgccatacttgtggtggtttcacccatgtcctatcattgagagccttgggtttgagggagttggcctgataggaaggaaaggaggaagctgtggtgggtctcacctggttccatatgcagatgggtaggaaacctctgtaaaccaaacctaccacttacctccgcttcaactccagccccagggacatggcccagactggcccagaccagctcagcccagaccaggagtagctcagtgggggcagagagtggagaaggaaaggctgtggggggaagtagatgcccagagctaccccgaaccttggtttttcaatatggattagaagaaatgtcaggtgacatttgactgcaaagatatttctaaacagccttcttacattttggtataaaagctgtgaacttcataactttgtaagtgagatataaagcaagtacaagaagaaaataaaatact

SEQ ID NO: 27054 - DNA, 1249 bp, Mus musculus
acatgtacacacatacaataaataaaaataaatctaaatgtgtttaagaaaacaggtacctctcagcagagaaattttgaaatgtcatgagatatatagcatatcttttagggggataaaacacaatgagaacataggcatggtgcttccagcagtatgaagactgaggcaggagaattcctgtgtttgagagtagtctggactggctatatggttcaagactcagctgggttgcatagcaagacccttttcagaaaagaaaaataacagtggaagagtcctaagtctggcagagactgtgctggagtcaggtggttgttagggtcaatacagttcaggtcaaaggtagaaaataattttccgtgtagtttgcccaactaggtcagggtagggaagtcatgaacagcaaagaaggttggagctgacatacctttgggatttaggatgggcagtagatgggagggtttatagccactttagttagctgtttttgaatttttttttttaaattgcttttatggaatgatgggttgttttttcagaacaacaagcgacaggagatctttgaatgccatggccctcgggcagtcagctgcctcgcaacagctcaggaaggtgcccgaaaactgctggttgtaggatcttacgactgcaccattagtgttcgtgatgcacggaacggactgctgctccgaaccctggagggccacagcaagactgttctgtgcatgaaggtgagggaacggatgggattgatggcgtttctgctgctgtgcggtgaggcttagaacaggcatcctgtaaagagcacagtcagggagatcatagtcctttgtgcctgggttaaagcacaaagctagcaagaagcaaatgtattttattgtggccgcactctgtgcccttctaggatagttcatagttgtcctgcataggccatgaactcagcaatgccctggcaagttcatcagtgtctggtgagtggtaaggcatgtattttcagttagaaaattgtctgggaaacattatctcatgcagtttgcattcatctcaaaataggaaggaaattcacatttaccagtgtgcttttcaagttacagaggagacagaacttccgcagaagtgactgcgccatttctctttcaggtagtgaatgaccttgtgttcagtggctccagcgaccagtcggtgcatgctcacaacatccatgtaagctgtgcggctgcagtggaagggttttacatgggagtct

SEQ ID NO: 27055 - DNA, 1102 bp, Mus musculus
gctgggtaacatatttgggtgaatacagcagtagactggaagttataacattttttttattaataattataataaaaggtattatctaatttctattgctatgatgaaatgccatgaccagggcatcttctagaaagaaatgtttatttgggcttagagttcctgagggttgtagtccataatggtgggaactgtgtggctggcaatgggcatggtggcagcattaagaagctcctcccatcttgaacctcaggaatggggcagagagtaaactagaaatactgtgaatcctaaacatcaaagcctgcccctgctgacatactttgtccacaaggctataccacctaccctcccccagacagtaccaccaactggtgagagtatgcaaatacccatgacattttagaagctgttgacatttctaatgcaaaccaccatattttcccaattttgggagtactaatctgacctgtgcttgaccttagagtcgaaagtgtgttggtgtctttgagggacacacttccaaagtgaactgccttcttgtcactcacacctctgggaagagttctgtcctctacacgggttccagtgaccacaccatccgctgctacaatattaaggtgagtggctgcagagaaatcaagtgtattaacctttcatgtatatttatcatcatcctacttgtttgacttcctcatttttgccatagtttagcatgctgatacaatcgtgggtagatgggagatttagtataaatcatattttctgtttcttcattattatctgctgattttgtgctgtaacagcataccctattggtcttactttcatgtcatatgccagaattaatcctcctgacaatgtttttaattacatttatctatttacattgtgtatgtatgtgtgtatatctatatacatgtgtgtagaggtcagaggagttttttttctctttctgccttatggtccaaagaatcgaacttggactacaggcctttatcagctgagctatctcactggcccctgttaatttctttaaagttaaattttatgggacatagggaaataagtcagttggtaaagttcttgccttgaatacctt

SEQ ID NO: 27056 - DNA, 1149 bp, Mus musculus
gctcttcagtttacccagccatccctgcagtgatagcatcagagtcaacagagaactgccaggaggttagcaaagatctgaatttttctgtggagcaaggaaattccagaagcaaaggaaactctccctcttgccagtctcctgatcttcctggcataaacagaggtgaagagacagccaaaggcagcagtggatctgaagcctgcagcagttcttttctgagattgtctttcactcccgaaacgcctgcagagaaggaaactcagtctccagctgaccagcctgagcagcaggcagaatccacactggcatcagctgaaactagaggtagcaagaagaagaagaaacttcggaagaagaagacgcttcgggccactcatgttcctgagaacagtgacacagagcaggatgtgttcacggctaagcctgcaaggaaggtcaaaactgcaaaggcagctaaaggggcgaaagtgacaaccagccagactggtcaggagcaaggaactgccagagatgagccagacagcgattcttctctggaagtcctggaagtcacaaatcctcagttagaagtagttgccattgatacttctgaatcgggagacgagaaacctgacagtccatcgaaaaaagatgcctggatcgctgcagaacagaaccccatagaaacttctcgttctggttgtgatgaggttagctctaccagtgagcttggcacccgctacaaggatggtgttcctgtgaggtgagtgtgtgctgggcagcggcttcacgactcttctttcatttactcttttaagtagaattttagaatttctttataaatcttggctcttggagtcggcttggttttcttcttttggtattgttttggttggtttgcttgcttgtttgctttgctttttctttttatcatgttgtaaatttcaagcacatttcagatagaaaaattgattttttgagttagaaattttttagttttgccatctgtcctagtcttcccagatgccaagaaaattttggtgttgtttttcagtgtggcggaaacccagacggtgatctccatcaaagcatctaagcactcttcaggtaattgttgtgttcaaagcagccacagggaaagggggttttagaatatagaagtcaaat

SEQ ID NO: 27057 - DNA, 1185 bp, Mus musculus
aaacaggccagtcatgctgacacatgcacttactcccagcactcacgacagaggcaagctgatctctgaaagttccaagtcaaacgcatagtccctgtctcccaagcaagagatacagataaatgaataaacaagcaagagtctgactattgagaactatctaaaacttaagtaaccgactagaaaaccatggccgaaaaggaagaggaagagggcaaggactgtaagcctgaagctcagtctcagccaaagccctatgtgaggagcacatagacagctgaagacaggaccaggaccaaagccatatgtgtctagggggagggcacagacctttagatccctgctggttcttattttgaatgtttttgagctttgatgtcagtaagatccttgagactctttcacatgttgagatagaaagacaggtttgtactaagcacatgtatctttgaagacactgttactaaactggccttttgttttgttttgttttgttttgacagaacgttctcaggttgaccagctattaactatttccttaagagaggaagaactgagcaagtctctgcagtgcatggacaacaagctcctgcaggcgcgggcagcactgcagacagcgtacgttgaagttcagaggctactcgtgcttaagcagcaggtaacagctgagaagtcctagggacactgagctgcggggtggaccttagaatgcttagccaagtattttactttcagataactgtggagatgagtgcactgaggactcacagaatacagattctacaaggattgcaaggtatttatttagagcatgtttgatgaactgttaatttttgttatctgtcagggctaaagcaaataagttgtaggaatgtcgtacattttcctgcaggtctccatggtttcattctgtaaaaaaacccagagacttggatgtctcaaaaattgtaacagagctgggctgagtggtccaggccagtcatctccactgcttaggaagctgacatgggagagatgggagacaaagagcgaattcaaggcccacctcatctcagagaatcggtgatggagcttggttgttgggtgcttgccttaggtgtggtttacagagtggggttccagtgacagaaggagagggaagtggcagagattgctttggtgaggaatcagaaggactgagttcaa

SEQ ID NO: 27058 - DNA, 1139 bp, Mus musculus
cttcacattccaggcagagtgccagctgtttaatttttagttaccaagctgagattggctgttccccctcctctttgctccacccccaactttcactggaagagcactttagagctggagattaaatggatgtgctgtcaccaggctttctgagtgcagctgccatcatgggtgtgccccagagcagcttgtctttgctctgagccccctgccctgcctcccctttcaccatgtttccttcggcaagattttaagtacagcaattcaagaagatttctcctaaagcctattaatttgaagtgttttacctcttgattgctggaaaagaatcttaaatttattccaaagtaatttataagcaaatatactaacagtggtgagaggagcaccgacttgattccctctaaccttccactgtggccatctgcatacagagtctttcagaggcaactagcaatctggtgagtgtgccatgccagtggggagcattgaatgtccttcatctccctctttccctagggacattagtcatgagtgccgagtgtgccgggtcacagaagtgggtctctctgcatatgcaaagcacatttctggccagttgcacaaagataatgttgatgcccaggaaagagaagatgatggaaaggaagaggaagaggaagagtattttgataaggaacttgttcagttaatacaagaaagaaaagaacaaagtcggtaagttggtttgtttttagttttgctttttgagatagaattagatgtagacaacttctctgtcctgaggatgagcctctagagctttgtgcagcaaagagtacactctactaagtaagcctaagctacactcagccttgtgatttgacattgaaagataagtaagcctgactttaagacccttaaagcttaatcttattttaaatattaagttttgtttgagtttgctatctgaggactaaggactatgaagtgcttttttgaactgttatattatctgtctttaaactcagtcttgtttttagtcctgaaaactatggtcttggttactgtgtcttgaactgttcttattatccaatttttctatgagaaagccgtagagtataagtaaaatgaatagacatttcatcttttatcatttg

SEQ ID NO: 27059 - DNA, 1167 bp, Mus musculus
gagttcaattcccagcaaccacatggtggctcacaaccatccgtaaggagatctgacgccctcttctggtgtaactaaagacagctacagtgtacttatgtataataataaatctttaaaaaaaaagatgtatttattttatgtatgagtacactgtagctgtttttagacacaacagaagagggcattggatctcattacagatggttgtgagccaccatgtggttgctgggaattgaactcaggacctctggaagaggagtcagtgagtgctcttatcttctgagccatctctccagcccttaaaataattttttcactttttatttttccccaaacatgtgtatgtgtcttatgagtttatgcaatgcatatgtgggagtgtttgttagaagagggcatgggatccccaccacaggcctcccactggatacaggcagtagtgactcggccacccgacatgggtgctgggacttgaactccagttctctggaaaagtagcaggtgctcttaaccactgagccatttctccagcttcataacccaaattgttaattgaatatctacagagaaaccccacctaccaccctcccagacctactctacccccagcaatccttttggtttaatctgccttgttttgttttgaaggagatggatgaacacatgcgaagcatgttgcatcacagggaacttgagaacctgaagggcaggtaaggacaacagctctcttccctaaacttactggcatgggggtttaagtgctgatggtgcctgttaacttgctttgtaataatccgtcatgatgattgtcgtatgatggcattgagtcattgttcataattaatagcagtagatttggggcatttaaaaaagataagctgtggtaggtttgtgcatctgaaatctacacatggatagaattcaacacaactcaggcaagttgaactggtgtgaatcagctcgtaaacggacttattcctgcagtgttggtcttgcagctgggactttccataattttactttaggaaaattaatttcttgctgaaatagcctaggaatactgaagcttatttgtgtctgcagaaccaaataaagagatcttaggtgtatttgaaaatgttctgctaatggtttaaagttttaagatgtttaaaagaggcttag

SEQ ID NO: 27060 - DNA, 1393 bp, Mus musculus
ttaatcaagtcaaattaaaaagaaaaaaaaaacataaaaacgtaagtcaaaaagtatccctgggggagggggggctggagaaatggctcaggagttaagagcactgactgttctttcagaggaccaggattcaattcctagcccccacatggcagctcccaactatccataactcctgttgcaggggatccaacaccctcacacagatatagatgcagtcaaaacaccaaactacgtaaaataaaaataaatcattgaaaaaaaaaggattcttatatttgtctacaccaaatgccatatgtataattttctttcatgtttttagtacatggagaggttcacagccaccaagaagaaatttgcatgatattctccaggatcatgggacagacttggaacctctgttgaaatctgactgagtcaaaggctcctgatgttggatacactgcagagaacattttacttaatgactttttcctttttaggactatgtcagataagctgaaggaaagggatttaggagtaggagacaggaagaacccttcatcttgagccgtgtaggtcatggccagtgttgatcttcaaaactatcattagttgggctctaaggaacctgctgttcatgaagggaggaaatgctgcttgccatagctggagactttgagtttgcgaactgtcagctttcataaagtctttcccatcacctctgtgttaatacttcatattttttatgaaattctaatttgtgggaaacgtatgactaaggatgaatgtgtttgttcctgtacactaactcaatagcagtgtttacacttggaacttaggatgtacctaaatatgtagctgtcttgaagagacctttgtcaaaggagcaccaacacaacagccaccgagaatgttccccaaggctgcagtagcaaatttttttttttttactattgcaggtgccttattggtagaaggctctgaaagagctaaaactatatgcaaaaattatacaaaatttttgtttttagacaggtttttgctatgtagcccaggctggcctcagactcaaaatctcccaacctcacacctctcccctcccccacatgctgggattgtaggcatgcgctacactcagcctacttgtaggattttaaattaattttaataatcaagattttcctgaagctttgttaaaaatcatgtgctatttctggtaactcctcccccttttgtatttataactgtactaatcagattaccttcaagaaaaccattgctacaatattttaaaataacttatgtttatcatagttactctctgaatgagagaatattctaaataaaatatttttaatgaactttgtctggaagtaatgttaatcaattaaagaacttttaacctaac

SEQ ID NO: 27061 - DNA, 2155 bp, Mus musculus
tgtccacacttgtgtcatcatatgtatgtgcctgtacacacaaaaatagaaaaatgaaagtgtgtgtgtgtgtgtgtgtgtgtgtatgtatgtatgtatgtatgtgcacgcgcacatgagagagcgagcacattggagtacatatggcttcacttctttacatgttttcactctctttcttcagtgaagcttaaaaatgataactgtggggctggtgggttggctcaggggataagagcactggccactctaccacaggtcctgagttcaattcccagcaaccacaaggttgctcaccaccatctataagggggtctgatgccctcttctggcctgcagatgtatgtgcagcagagcactcacattgaattaaaattgttttactaacaacaaaaaagattaactatatgcatgatagtttattataagtgagttgaacattcttcatacagaagattgtgtgctatgattctgcattacatcttttaaaaccatttctgaattgaatgttcctgaatctgaaactgtcgtgattattcctgtgagattgtagattagctacataccaggactgtaaccctttgaagacttcgtaaagtggtggttccttggctgacccatctagaaacttatgtaataagaggctgagaagggctcagtttgaacagactgtacagtgtagtttgtgtgggatactttctttccttctgagagcctaggatgttggtccgtaccaagtagaaagtacctttggtactggtccctggcattgcagagcacctcgtccctaacagttttgatggtagatagcattcaacaaatgtaacaaagccgggtgtggtggcgcgagcctttaatcccagcactctggaggcagaggcaggcggatttctgagttcgaggccagcctggtctacaaagtgagttccaggacagccagggctacacagagaaacactgtctcgaaaaaacaaaacaaaacaaaaaaaaccatgtaacagctgagttgctgtactgagtcactgctgtgagtgatgacaccaagtctcataactcctcttggcagatagatcactcactgaacctggctgtgttaggaaataaacgctgaggaccaacagagaagaaacggagtcttcgtgtaaaagtttagaattctttgttttggtacttcctatatgtagccaaggcagaacttgaactcactatgtttcccagggtggtctcaaacacatgattttccttgcctctgccgccctagtgctggaatcacagacatgtggtatcatatctggctaaagtttagaggtttgtaatggaaaatactaatatattttacctacttagggttatttttattttattattttagggttattcttaagatggaggcaagtatacttaaaagtagagattgtaacaattgtctcaagattttctcactcatcagtcctgtaagtacttcgccttatgtttaagctaggatctgagttcctttcaaacgtgtgcattaggatttccttactgttttattctgcactgtgggagtgtagcaaacctgctcatcatgctcttaatacaagacttggtgcatagtaaagtagatgttcacaaggaagcagggtctttaccctacccccaacctccaaaagggccctgctaaaacaatagattattgtcttgaaagtctcccgcttttacaaatgtgccatataagagtggtgttaaagttgggtgtggtgacgcacgcctttaatcccagcacttgggtggcaaaggcaggcagatttctgagttcgaggccagcctggtctacaaagtgagttccaggacagccagggctatacagagaaaccctgactccaaaacaaacaaacaaacaaaaaaaccagagaaaccctgtcttcaaaaaccaaaaaaaaaaaaaagtggtgttaaggttttgaacatcacctagccaagttagtaaaatctttatttgtatttcatctcaatttttttaactattcattttccttgtatgaattcttgtgtgttttatgtgtaaatatattcattattttgacactatcaatattctttgtggttttgtaatttttacttttattaatgactcaagctgtaaaaataaactaatttcaactaaatgtggctc

SEQ ID NO: 27062 - DNA, 1214 bp, Mus musculus
tctctgtgctgcccatgctggtctgagactccctcccaggctcctggcattactggtatgcataagtgagcacccaactcaatactctggaaacccacttagcgaccacacatatcaggattcaaagcctctccataaattattctttacatcttaacaacgcataattctctgcaaattaattgaaatctgttctactctaatggacatgaagaccagctacttcctatgctctgtaaactgtttacttatcacgttctgtactcagcattatcgaccatctttgcatgcttgcgtcaatattctgtcattacacaatcgcatacaaatgcacatgaggtgtgcttgtgctgtactaacggcagctttcctcttggtccctgcagtgcagtcctttaaccattgttaggtcttaagactgtgcgtgtgtccagaaatgagtcttggtttagcacaacctgagtgatagaagcattagtgatggttagaataaaagcctgcattcctcaggatcttgtgcaacagttccttccactcgtctgatctcggaagctaagcagggttgggcctggttagtacttgaatgggagaccacccgggaatactgggtgctgtaggctttaaaaaacaaaaacaaaaacaaacaaacaaaaaacagttccttacaccaaaaggagttatttcccccacctctggcagaaaagacatatggctctccattgacatattcctacagttgcctattagaacccatgctggcttccaggctccttcagtccctagtcacaaacccatttcaaagcccacatgatggggtcctggcccttctcatctcctgtgcaatgttatcacattctctctgctctgggcccttccagatgcctctggatggtctctttcttatccacaataataataataaaaatacaccttaaccatggagcagccattctggtggtttccctactgcatccttcggatacaatcatgttctacggaagtatggttcctctcccaggcttctccagctttctgacattctcagagtaaagttccaaagcagaaggaatctattatctcttttctctccctccctttctcctccccttcccacttcttctcccttccctctgttttctttccaatctctctcctcttcaaaggcttagagtgttgtgtggtgtttgggattcaatgtactatgaaaaccaaag

SEQ ID NO: 27063 - DNA, 1069 bp, Mus musculus
gctgggatttgaactcaggacctttggaagagcagtcgggtgctcttacctgttgagccatctcaccagcccctatacatgaagttttattgatccatttatttataatcatctgtggctgtttttgtgctaccaaagcagggatgaatagttggagcaatatttaggccttgtgactcccaagagctaaaatagtatctggccctgctccaaacaaagtagtggtcttataataaagaaatagagactagaaaacaatgcccataggtggggactataggaaggagggaaaaaggtatcaagctagactgcttctcaatatgcagaggatttctagtttgaggtctcagaggagcatcaaagaggagtattcagactctagataggacattttcccttagtattttaagacaccatctgggaattggttatgtagttttatctcagtgagtttcatcttttgagctctgtggcagcacacagtctacagccttaccactacatctacttccctctggattgtccatataattgcttatcttagctgtgctgttactgcctgagcctcagccataagaacaccttgacccagttgcttcacccccttgggctctgttttccttctgcctctctccattggctggttcccatcccaaaccaagtttctggcattctggcatgaagtttcatcactgctctctacaggatgtgctctccctggcggccgggcctcgggaccctgaggagggagtttccccagagcatctggaacagcttctaaaccagatgggccagtcactgcgatgccgccaggtgagatgtgggaagagccacattggctcaggaccaatcctcagagcagtaagaatgacgcccatgtctcctttccccccatagttcctgtgcccaactgctgagcagcatctggccaagtgctctgtagagttggcttcccttctaggtatgtatggttcctcttccaccaggtccctcatgctacattccccaaaccccaaggttgcgtacaagcagggttaggagcataggatgtgctcttctgcctccattt

SEQ ID NO: 27064 - DNA, 1219 bp, Mus musculus
atgtggtccctaagagtagtcctgccttccgggtgcacactgaagcagctggcacttgttaccaagccaaggtgtaaggtacttaattttcacttaaaaagtattttaataggggaaaattttaacaagatatgcttgtaatacaggctcaaagattactcatgttagccacatagttctgtccatatggttagagtggatagatgggcattataattatgcagctgacatcaactgttttttaaaacatttcctgaaagttgcctcttccatgtcacttttttgaagggaagtggggatgggatgtagggtaactaaaattctttctgttacattagctaaatgatgctaaaagtagccggctttcttgctgtcctctctagtcaaacatgtgctaatagtaactgggaaagctaacagggcccagcctttttctttgtgaatttctctgctggcagtcatgctgacagagatgctttctgtctgtctttcagtgtgttgcctccttttctgcatgccgttcacaaactcatcaaaatccagagacaaaacgcctcattatgtgagaatgttttattttgtatgtagggaaaagaaccaaccaaagatgtttctgctctgaagaaaaggaaatggactaattaattatatcgtatgtatcagtagttacatttattattaagtgctgtcctgatacagagatgaaaaagtagaacctggtgtgatggcacacactttgatcctagcactctggaggaaggggcaagtggatttctgagtttgaggccagcctggtctacagagtgagttccagcacagctagggccacacagagaaaccctgtcttaaaaaaacaaacaaaagattaaaaaacatagtttgtgcttttacatgttacatttctttcaggttaaaaataaaaattggcagtcttaagccagctcttcactcaggagtatgatctagagaatcaagctttcggtttggtttgggttttcagttctttgaggtttttattgatggcatatttcatatttcagtcacaaatcatccaaataaggtaaagaacatgactgtagccataatagaagtagggtgtgacagaaattatcttttgggagacaagtacctcctggcttctatctacacaggttactaactcaggcctgtcctgtgcttatttcagtggagcaaagaatgaacacttagttcctaattt

SEQ ID NO: 27065 - DNA, 1135 bp, Mus musculus
aggtagaagcacatcaggagtccgtgcctctgcacaggaagcgtcagtccagcagtgtccgaggggaagaaactcaggcctgagctcttgtttatagctgcctttgaaacagaaaattgaggataggaaatagaatgggattttaggtgattttgcctaatttgttaatcttctactcaaaaagtatatagcaaaattgtttgatatttttatttaaaacttcctaaccttggagagtcattgcgcagacattcaaatataagaagcttgttgccaggaaaccattacctgggtatatttggtttgtgtgtttatttagtgaatctacacctttctttccactcattcctagtatcttccctgaattttacattttttaaaattaatgtttttacctcttatttttaacaatacaccctaatgtgtgttttcatcagcataggataatccaattacctttatttagtcaaaccttgctattttcgtttgagcaacagttcttattcttaactcctatatttttatctcaaaaatgaaagaaatgtctatctagagctattttgggcaaaagtatctggagagggacagagtgggacaatggctttcaaaggtacaagcacctttcccctgactgcacttcctcctctcaggagcctgcggaggagacagcttccctgggttctttctagtgtcagccttcagggtgatctaggaaagaataacacttcggaatgtggcttatacttttagagatttagaaagaaaatatgttactaaggcttacaatcagattttgtattttatacatttagccaataaggaatgaatatctgggaaataaatttagactaaatagttttctttcaatgtttttattacctggttcttgtgttgtttaatgcttgggcttcttagcctgacttccacatttataagaagacgtaagtataactagctagggcaggtaggaagcacatgaggagtccgtgcctctgcacaggaagcgtcagtccagcacagtccaaggggaagaaactcaggcctgaattcttgtttatagctgctgttgacatctaaatttcagtttataaagctgtaaggatgatcatattcgttctaatcttactctcttact

SEQ ID NO: 27066 - DNA, 1200 bp, Mus musculus
aagattggtttttattttgatacacaggcttagtcccttagctgacctctggcttttcacccttgctgttactacaaggtgtccttaggctgtaaaaaaaacagggatgaaaaaaaacgacttccaactcctattttagccacaaatcatggtgttactaatgacataattattacttaggccttgctaaatctgaggttaataattctcctttaaaagctgcacagcactcagaactgtgcatactggtttgtgattatacaaattcagtatagacatcgcttggtacagaggcactgcaagaaaaggtccagcttgaccatttctgagtttcctgtgagataaacccggtttgaaagaggttggtatcatattttgactaaaaatcaaaaattttttcggctctgcctcacctccccaaaaaatacccagagccacaggtgtgggtcttatcaatacccacgagaaaaatcgggtccatgtccacccaagccaaggttaaaagcccactcatctacagatcaaaaaatcatttgatcacctcagttaagcattgccttattttaacttaattaataggggggagagagactggagacgtactattgaaagggcaagcccttcactgcctcccacccaaataaaaaagccaattggccttgtactacaagagccggtcgaactccttctccctgtttcccacctatcatccaaaaatgcggaggaatatcaacttagtgttattcttattatagtgtatttcacatttgttcagtcaaacttagccagagttccaacaccctacttaaaattcaactagaaagttacctaccaagtactaattagcattataaagtcggagcctacagctccaggcttttcagttagttgtttactaagataagaaaggacagtcttagccagatacagtttaccataagaaaagttaagaaatcccatgaaagcaagttttttctttagccctagattccaggcagaactattgagcatagaaaatttttcccccctcaggccagctttttctttttttaaattttgttaataaaagggaggagatgtagtctcccctcccccagcctgaaacctgcttgctcaggggtggagcttcctgctcattcgttctgccacgcccactgctggaacctgcggagccacacacgtgcacctttctactggacc

SEQ ID NO: 27067 - DNA, 1235 bp, Mus musculus
aaggatcaaggaccacctaatgtaagccttctgcagtgcttatgcttcacaacttctttttgaggatgttttggtagacatttgcttggctggtggcatgatgtggcatggaatggatccagtgtgtaagactagcctcctgtgtcccatgctggccttgatctatgtaaccaaggatgattttgcaccgctaatcctcttgtgtccacctcctaagtgatgggattactgatgaggactgtacctggctgaccatggcaaaaaggcagcttctctgggtagagctgacagcagcactaagctgtaaacacaaacagttgtttaaagggtggcattgactggcacatcatgtccttttagcaaaaaaacaaaaacagcttccctgctaaaacttagccacaggcttttgacctagctgacagtaccagatgtgaaatccttcctgtggagtgtgtgttaaatccaatctaaaatggtctgttactcatataacactattctatattgttattattttattttattttggtttttttgaaacatggtttctgtgtgtaacccctggttctcctggactttatagaccaggctggcctcgaattcaagattttcctgcccctgccaccctagtgctgtgattaaagaaaggcatgcaccatcacacatgcccagcttggcacagtttgttttgttttggtgttggattccctgggacaggagttatagacagttgtttgctgccacatgggctcaaggaattgaacccaggtcttctagaaaaacagccagtgctcttaaccactgagccatacctctagccccacaattcttaataaagtgataacagacttgccactgttgtatcagtgatctcagcttgcctggccagtcggtcttactgcacagggtccaccactggggaagactgttggtgacagtgctctcctagcagcctgcatagctgcttctagcactgtgaaggctacctagtagggaggaagctttccagcccagttccagcttgattactgtatgtcttgtgtccaaagataattacatctttggctataagggcttgccatctggttctagtgggcagttagcaatactggcgataacttttactatttggggggggggggcttcaggagcgtccttgaccagcaacttgccaagaggtagcctatctctggcactgggatttttatttaatgatacgtcgtttctgggaacat

SEQ ID NO: 27068 - DNA, 1135 bp, Mus musculus
gagcctgtcttaaaaaaataaaaaggctaaggatatagcttagtggtaagcccctgcctaacatgcttggggccctaggatcaaaaccgtataaaatgttgtaaattggctaccatgcctttttctctggtaatgttgtatactcaggaaaatggtcctaatgggtcaactgccatttgaccctcatgcttactctgctatttcagttatgtaaatatatgcactatgtctttgtgatggctagtcatctgtactggaaagaccatgtgaattacagagtttttctaatgtagttgcagagagtcccctatccttctgaggaagcaacatgataatgtatagaatcagtaggctcttgaggctagaatattatctgtgttaattagctctgttgcttctgtttctttggttttaggttaaatggaatccacccttgggagctagatgcctgtgtagctgttttacctcatcagggttttgcaatgagtggaggaggagagcagccagatatcctcagtgttggaatcctggtcaaagaaagatggaaagtggtaagtctagagtgaagatgggacaagggaggcaggggaagggcggaaggctaacaagcatgttgggtaagaagctttggtagtccagtgaaaaggaacattttaaaggaataacacccgtgttgcttatctgcctaaagcaggcattttgacttttattcctgtgacttgtttcatagacttgtttcaaaagttccaaattttcctgacttactgtagctaatattataaataaaagtgtatttgaggaaaaaacaaattaaagagtttgaaagtacagtgacctgccttatcttgtttccatcctcaacatgtacataattagacttaggcaacacagtttctggttaggatgtttaatcttgtttctcctcctagtatattttgaattgttcttacatcattatgtatctttaaaagaaaaagacttattttttaatgtaataaatttttaatgtaatgaattgttcatcattatgtatctttaaaagaaaaagacttacttttttaatgtgaccatctacagagtttttcctttgttttatgatacaggcaattagaaccaggctttgtttgcataattt

SEQ ID NO: 27069 - DNA, 1227 bp, Mus musculus
aagacatagattaatgttttatgttctagaacactaaagaaatgcttgttcatccaagtgtctatttctgctaatatttccagaaaactcctttcccttcataactgtcctagttcatttcatatcacccacctggttaatgaggtcacattaagcatttgtggacatttctccatctggctaacatctctgcacctttgtatttggtgtttctcgagtgtagtttagcttgggttagatctgaaaagatgctgatcacctgtgatggtctaaagaggaattgcacaactatgcagtttctttcaattaaaaatttcaaaacatgtaaacatctttcttctttaaggaaatatccttattgtaccacctacggcttcagtcagaaacagatctaaatctctctatggagagtgctagctgtgctagtctggaaagcatccttccagtatagacctcaagtagattcaggagaatgtgctcattacgcattccttatacaaaagcctgttatcctcacctgattccagggagctctgtggagtcacaagttctccatcagttacatttcttaaggcagatttctgcagtaagatctcgtctcttggggccccatcctattgtctctcagaaaactcttgttttgaagcaaactctttgtagaatgggaatcagaaaattgccccagtgaatggtcataagagatgaaattagaacactgtatttaagccagttctgcaaccttctatggcttgtaagaaacaggtccttgatttgatgtctaggtgaaacctttcataaacgactgtttatgattaatataaacaacaataacaaaaaagcaacgtaatcaggtgtgtgtcctgttataacctgctgtggttgagccatcttgcgtataaataatgcagctctcctgagtctgtgcatagacctcttgattcttggctttaccgttttatatcaagaccttgtgagtagatcagttgatacttattttagcttttgtggtattgggtaatattgcagttgaaagatgtgtttggagattgtctcttcctttgcccttggctactgctgccatgtgtgtgtctaagtgttttcctgccttctgtttagtgaagaccaggaagtaaaaatacatttgataagtgatcagtgatgcacatttggggctaaatttgttgccatttttatggaatgaaaagtgggttttgcagtaagaaattg

SEQ ID NO: 27070 - DNA, 1170 bp, Mus musculus
tcccattgaaagcaattattagccaaaagaaatactgatttggtgaattgtaggttagcacaagcctgtacatctctccaaatttgtacatcctaaggtgcaaggcatggtgacacgtgggtctacagccttctttcaggttctaggttctgaagttctggaggtaggaggtcagcttgaaattccctgtgcctgagaggttttgccttggcctttgggtaatggttatgacaagtctgaggaggtcttttactacatttatctacaggtgttgccctatgacagcctgcacagtgctactctaggttactccattaatctgaagcagattagaatttagaaagccaggcttagccttgatagtggtcttgtcatgatttcctcatcttgccagttttctatttaaataaataaataaataaatagctcactctagttctgcccagaggttctaattactgtaagaaattagaactcacaattttgatgagccaacattgtctgcatccctgagaaccttaagatcatctcagaataaagaagtgaactatttctttttctattgaaatgataggtatatcctgattagcaagcctgtcatatggacagaacgattaagagcgcagttcctggaaggtttccggtcttttctgaagattcttacctgtatgcaggtatgataattctttggtgtaccaataaaacatgttagttttaaaaaaaaatccatctccttttccctcccattttatcttattttattttgagatttattcttactttacttgtatggttatcttcactgaatatgtctatgtaccatgtgtgtgcctggtgtcctgtgtgccagaagagagtgttgaatctcctggaacttgaatttcaggttgttgtgagccaccatgtgggtgctaggaatcaaacttgggacttctagaagagcagtctgttctcttcttaagtaagtctactttaaaaagacgtaaattatggttttcatagaagaaaacttctataatgtagtagaaataagatataaacactacttgttgtgtgtatgtgtgtgtgtgtgtgtgtgtgtgtgtgtgtgtatgtgtagtcaatggtgttatagttaatgcttgttgaatgcttacacatagtaagacttcataaatatccatagcttat

SEQ ID NO: 27071 - DNA, 1193 bp, Mus musculus
tacaagagcagtatttgctcttagccaattagccatctctccagcttagttcgtcaggtccagtatcacttaaatagaagacaaatacaaaaataaaatctggttgcctatcattgcctgcctgaaggctccaagcctgaatgcgtgtctctcccattgtcagtgaggtgtgaggcagcctgccaggaagaggagagtggagaaaaagcagagaaaagagcatctgaggagagaatccttaatgattttgttttgttttctggaaacaggggatcacacaatgttatccaatctagactcaagcttgtgggtgcgagtaatccatgtctcagcctcccaagtatctgtgctagcgttccctgatggggttctacttaaaatcatgtcctggatcaatatcacaatgttatttccctagagataggaaactgcatgcgctgctttagaatatatgactttttcacttgctttattatttgaatatctaccctttttttaaatagggagaaaaatgaacgatactattgtgtccttttcaacgatgagcaccattcgtatgatcatgtgatctacagtctgcagagagctctagattgcgagcttgcagaggcacagctgcacacgactgccatcgacaaagaggtttgtgaccaccgtgcggcttctgctgctgccttacgcccactctggcattcaggtgttaactgctttttacaaagatggttcattatagacttctctgggcatgtggtaactgttgcactcttgaactcacagcaactgtgattacctgagcaggattagatatgtcagtgtagcagcatggataggggaagggagcctgtgaggctccattcctccctggggtctggcagcagttagtggttgctgggggttttcttcagtgatattgtcactactccagtaaataactccttacccttaatcactcaagcagctataattaaactcagcaaattactaaataaaaagacacaaacatatgagaggatttgtttggaagagggttttagcatgagagagggcaggataagagatgataatgggggttgaaatgactaagtttagtatatacatgaaattgtcaaaaatttaaattttttgtctgggatttgatctgggattttgtccattctggataaatacttttccactgaactacatccttagtt

SEQ ID NO: 27072 - DNA, 1125 bp, Mus musculus
gcacccacatggtggctcacaaccagctgtaactcaatcccaggacatctgatgccatcttctggtctctaagggcacaacatgcatatggcacaaagacgtaatacaggcaagacatgtcataatacacatgaaagtaaataaaatctcaaaagaaatttaaaagaaaatattaatgcgttatattaaagttattacaacagaatgttaaaaatcttgagtgtgatggtgttttcaaaatttataaaccatatacctatttcaagtatatcataaactaaaatgatttcataatccagaaaagtgtagagaaaatggctggttagaatgtcaggtagaaagactatactttcagggatcacttctatagttcgttactagagaagtttctctggctacgtagagcacccgaaaccaggaggatgagacatacctcccctcctgagcgtgaagccggctctaggtgctgcttgagtgcagctgcctcttgtcattgatggttgttcttctgtccttcaggagggtgagagggagggaatgcagtctgagtggacttaaaaaaatgtcaggtaggaaacaatgattatcaaagaagagatgccacaaagcaaaatgcttagtggtgttgagttttgtgtctcttgcttattcccataaagttgttttgtaaaatatgcaatcagactcaaactttaaattttatttttatttattttcaatgtgtgtttatatgtgtggacatatgtgccacagtgtttatttggcagtcagaggacaatctgcaagagtcagttctctccctccactatgtgggtcacaggaactgaattcaggtggccaggcttggcggcaggtggcctaacccagtaggtgaacgtgctggccaagactcagttgtaacacttctgcttctctgtccatcactccctcaggaccatggtttgttggtgagataattgatggcaaattgggttgctgcttttcatttgggatatttgttgatggacatttcctgcaaggtggtctaacatttataaatggaattatacaggtaagaggtccccagaggaacacccaggccctattggactaaccatgtgacaggagctccagatcctactctgc

SEQ ID NO: 27073 - DNA, 1208 bp, Mus musculus
cactcaataaaggagcaactgttacttttgtgcaaggaccaatctactctggattgcttaagatccgaggtgctggtcctcttttgccggaccaaaccggtatcaggtcgtcagcctccgattcacctaaaaatgttctcaaataagaggatctacacaagttttttttttccctgcagaaaatgcctgtacaaagaggtaacttgagctctccaagcgctagctgttaccgaagcagctggcgtgttcccaggaaaacgtaatttggaaagggggggtggggggggggaaggtcaaaaaacctctcgcgggttttggcagagagcggtcttctcggaagtgacgcacccagaagcggatgagcgggagctcggtaagtgttctgtgtgcagtattgctgagcaccttctcgtcatgggcccgcgaggccgccagcgccgggcgggaacggtccagagcaccaacgacagcagctccctcagcaaacgatcgcttgccgcacacggatacgtgcgcgacccctttgcggcgctgctggtcccgggacccgtgcggcgcacgccgcttatccaccgcggctattacgtgcgcgcgcgcgccgtgcgtcactgcgtgcgcgccttcctcgaactcactagcgcgctcccgtcccggaccagagcccagatcctgtccttgggctcaggctccgactcgctttattttcgtctgaaagcggcgggcctcctggcccgagctgccgtctgggaggtggacttcccggacgtgtctcggctcaaggcggagaggatcgaggagaccccggagctgcgtgcgcagaccggtcctttcaagatcggggactcggcgtcatctctgtgcttcgagagcgcggactaccgcatcctgggcgcggacctgcgggagctccagcgattaggagaggccctggatggcgccggcctggacgccacctctcccacgctgctcctggccgaggcggtgctgacctacttggagccctccagtgccacagccctcattgcctgggccgcccagcgtttccccgacgcccttttcgtgatctatgagcagatgcagccgggggatgcctttgggcagatcatgctgcagcactttcagcggttgcattcacccttgcatggcctggagctgtttcccgtcgtgaaggcccagcgccagcgcttccttcaagctggctggactgc

SEQ ID NO: 27074 - DNA, 1497 bp, Mus musculus
attctgaaccacaaaaaaaaaaaagttaatttttacaaagcatcttattttggactcttcttgtttgcattgcagactgatgataaaggtgtttttgcgacatacctttctcaagaatatcaactggcagcagaaacatttaatttgaccccatttcaggtgtgggatctgtcctatgaatccatcaactacatctttgcttgtgacaacaccagatctgaactgagaaaaaggtggactcacttgaagcagaaagtgttaaactgtaatgaggtgaactacttttgattatacattgtagccaagatcttcctgccctgtgtatcctactcagttactgcccacttgaaatgacttcccttgaatttgggtagccaagtatatatggggtctaactccagccccttcaactggtaagttcgaggttttgcatggctgcacttccatgctgcttttgctggagggttgtttagccctcatttcctagtgactcttgtttttacacttagtgctctttagacatttgtgaccgtgaaccttctgagaagttgaaactctttgtcttcagggaaatctctgttttgttaggtttaatcagactccttccacttccttttaccctttcaagtattaacttttttagactgttgatgttaggtcacagtgcacacctgaactgtttgtgtgggtgcctagttgtcaggtgactgtagtaacaaagctagaatctggctttgcccttctcctaatatctttagaaatatataacgggggttggagtaatcccttcagtttaagaaaagaaaagaacgactggcttgaagtaaaaaagacacatagctggagcttctgatttaaaatcaggttctatttggcttccttgtggaagctaccaggacctctacagtgctaggactctcttaaaagatctttgtagcaatggtagcattgtggcttctagggttcttagatcaccaataatcccatgcccacatgatagcctacaggtatagacttatataaacacacatataccatggccacattagccgactttagcagataacaaatgtcttggttggtttttttcacaagctagagtcatttgggaagagggaccctcaactgagaaaatattcccacaagattggcccaatcagtgcttgatcagttagtgggcccatgccacagagggtgataccacccttagggacatggttctgggtggaaagcaaaggaaatggaacaaggcacgaggagcaagccataggcaacactcctccatggcttcagctttagttcctgcctcaacttcccaggatgacagactacaaattataagaggaaataaccctttcctccttacattacatttggttatggtgttttgtcacagcattaaaaacactaaaacaataatgtatgcttgaattgctcttttttttttttgtatagaatagaatagagtttgtttagggcatggggaggggggttaag

SEQ ID NO: 27075 - DNA, 1907 bp, Mus musculus
ccagagttgcattttggtcttctattgttcattaaccccctcctccaaatctagtaagtgccccatgaattgttcctacctgcccagagtcccaccagcctgggtatagtatttattatagtctagccggagcagtaactgagccaaatctgagttgatctggtgattccgaacactggaaagaatcttgaacaggagtgaagactggcgactaaagccctgttgagagacccgagctgtcagtgaccaggctagggtactgggaaccaagggggtctttggaaaagctttgcttaaatgtttgcaggaccacctggccttcccatattcccatttctatcagctcctaacatgacttcttagtacatgtccgtgagatgcatgactcccatgaaagtgctttctcgttagtaggaatttaacagctcatttaagattaatatattccatcacatactgggattgcagtgatcctgctttgttacaaggagataaatatagtctgagattataattataagtgagataggaggctggttcagggaaggaagtgggatgtgagaaaatgagcacaaagccagtgcatacttggtgggctgaagaaactattcagggctgaactatttctgaacactgtgaggcagcacattatatattcaccgataccagcgcttttatctttttatctcgtcatttctatgtctgttctggaaaacgctttattgacccggagcagactgcctgctccacagctggggggagaggtatgtattttcagtggctaggcagactcaccttcacgagaatgctcagctgggccgctccgcgctcatccagtggacctaggttctgactgaccagtgaacaaaaactgtgacagagatctaggatttcattcaggcagtgaaacacctatccaaaaatatagctggcgttaagaaatgaagaaatcgctgagaaatgcaaggtttgggaaaatagtttttaacagcctactacctcccatgtctgatctcagcagagacaccgcaaccttcaaagctgtttggccctcccaagtaacacacagaatgaacatcccttcttgggacagctggcttctctgactccctgcacaaaacctctgctctagtcaccattaactcctccttccttagacccactgagaatgctcttgcctttgagctctgagtgttgttccctgagattctcttctctttactaacagttcaagcctcattctctgtgaactactccttccccactgcagcctttagcggtctccacccttcttctgttgtagtacctgtgttgttcactggtgattgtcgggccacccgtgctgttgctgacttttgtatgtacatgtcttgttgttttccaactagattgtgagctccttaagggcagagccatgacttatacctctttgtatccccagtgccttgcatacagtaagcactcaataaagacttcaattatgatgacctgttgttctaacgtgctcttcctcaaggatatacccatgctatgcaagaacagtgccaaccactgagagtggcagctgcttaagtcactccttctaggtgtagcaagtaacagccccaaataccagagttcaaagaagccccataccatttatggttggtgcccggatgagtacagcttgctcaccacagagatgaaagcataagcactccagggttatctgagttgcacgctcaccttgggattggggccagcttgtgtgcttgcagttattggtgctgagaccccaatctgcacgtttgacttaagtgatttctggccttagatttttttcacaagttccaatatgtagtcaatgttgagtagctgtcagaagagctaaatgtgtgtacttgcagatggacgtacacccagagcat

SEQ ID NO: 27076 - DNA, 1213 bp, Mus musculus
gagctttattttgtggcatcactgtcaaggttatcccaggctacctaaaatgttatacttccaaaaacagtttaaagtaggtgagggcctgggtaaacagtagtgctaaagttgagtgggactgggaacagctctgggtatcaggagtttattgacagatgacctgctactgggaacatgaacatgaccagttgttaatgaatggacagtgactataaatttgctgggacggttttctataaaataagctgtcacaactgttggaagttattccttcctcacactcatcatcatcatccctgttagcgaacggcttctcattctctaaataaagccagcggtctcattttttctatagtgccaaatagtaaatacttttaggctttgtgaccacacttgtctgtctcaacaacttgtcttgtctgtgagcaatcaccgacaatagctaaattgagtatgtgtggctgtttgaatagtactttatttacaaaaacaagcagcaggctgttatctgcttttagaggtgaggtaacaaggtgggataatcctcctgggtagttgacaagtacgggctcaggctttcatagtggttggtagacagtgtagatgaagagaggactcagtgactacagactgaggcccggatgtttcattcttgtccagcttggagggaaagatgtcagtgaagtgttttgtttatgctgatgagaacattagtatgttctcagcccgtggtggctaggctatctgaccataaaaccttaactcatgtggcaggtctaaggtgggaaaactgggttgcagtgaaaactaaattgtttctaaatctaaacaatttgacctctatcctctttagccagaattgcccttttactagtctgaaagaattagaactcactggctcaattcttcagataaaggatactcaaatcttaaattttagggaaggataaagatagtctgtgtagttacaaggtacagaaagagggaaagctcacaggctctctgaagggttttctcatttggtggtgacacagaagctgacctgttcaggagcgtgattccgttcttacatgagccaacccactgtttactgtggttatcttccataggaatatagtaagtgttcaataaaccccggttacacaaatgaacccacccaacagatgtcttcaaaatccttcgtgtggtcagcagagggatatcagacccc

SEQ ID NO: 27077 - DNA, 1356 bp, Mus musculus
gtaaccggggtttattgaacacttactatattcctatggaagataaccacagtaaacagtgggttggctcatgtaagaacggaatcacgctcctgaacaggtcagcttctgtgtcaccaccaaatgagaaaacccttcagagagcctgtgagctttccctctttctgtaccttgtaactacacagactatctttatccttccctaaaatttaagatttgagtatcctttatctgaagaattgagccagtgagttctaattctttcagactagtaaaagggcaattctggctaaagaggatagaggtcaaattgtttagatttagaaacaatttagttttcactgcaacccagttttcccaccttagacctgccacatgagttaaggttttatggtcagatagcctagccaccacgggctgagaacatactaatgttctcatcagcataaacaaaacacttcactgacatctttccctccaagctggacaagaatgaaacatccgggcctcagtctgtagtcactgagtcctctcttcatctacactgtctaccaaccactatgaaagcctgagcccgtacttgtcaactacccaggaggattatcccaccttgttacctcacctctaaaagcagataacagcctgctgcttgtttttgtaaataaagtactattcaaacagccacacatactcaatttagctattgtcggtgattgctcacagacaagacaagttgttgagacagacaagtgtggtcacaaagcctaaaagtatttactatttggcactatagaaaaaatgagaccgctggctttatttagagaatgagaagccgttcgctaacagggatgatgatgatgagtgtgaggaaggaataacttccaacagttgtgacagcttattttatagaaaaccgtcccagcaaatttatagtcactgtccattcattaacaactggtcatgttcatgttcccagtagcaggtcatctgtcaataaactcctgatacccagagctgttcccagtcccactcaactttagcactactgtttacccaggccctcacctactttaaactgtttttggaagtataacattttaggtagcctgggataaccttgacagtgatgccacaaaataaagctcactcctctatttttatctccctttgtttgctgtactgctaaagtgacaagcctgctgacaacttcagagaagatcctatgtttatcatgttctgagattaagctcaaagaaacagatgaagacatcccagttactacaaccaaagagattcaacatttattttatcataaaagtccagcaaataaaactatgtacaaggtccatgcaaaga

SEQ ID NO: 27078 - DNA, 1402 bp, Mus musculus
aacagagtgacttatgtagttgaaggcatgtttgtaatgtttggagttctggaattacagttctagctagagttctttaatttttgattaattggtttacaaatgatgaattcaaggtttagcaataaaagaaacttgatatggacagctgatagcttgattcttttcattcttccttaggacattttcattccatcaccaagtctggaagaaccatcagatgatgtgaagaaaggtggaggtttacatagctcatctcttactgttgagtgttccaagacttcagagagtgaaccaaagaatttcactgatgaccttgggctctccatgacaggggattcttgcaaactgatgctttctacaagtgagtatagtcagtcctcaaagatggagagcttgggttctcccaggactgaggaagacagagagaacacacagattgacgatactgaacctttgtctccagttagcaattctaaacttcctgctgacagtgagaatgtcctggtgactccatcgcaggacgaccaggtagaaatgagtcagaatgtagataaagcaaaagaggatgaaacggaggacagaggtgactgtaaaggcagagaagacgcggttgctgaagatgtttgcatcgacctcacttgtgattctgggagtcaggcagttccttctccagctacccgttcggaggcactttccagtgtcttagatcaggaggaagctatggacactaaagaacaccatccagaggaagggttttcgggatctgaagtagaagaagtccctgagactccctgtggaagtcacagagaggagcccaaagaagaaccgatggaaagtatcccactgcacctttctctgactgaaacccagtctgaggcattgtgtctgcagaaggaagcccccaaagaggaatgcccagaagctatggaagttgaaaccagtgtgattagtattgactccccccagaaactgcaagtacttgaccaggaattagagcataaggacccagacacctgggaagaagctacttctgaggactccagtgttgttatcgttgatgtgaaggagccctctcctcgagctgatgtttcctgtgaacctttggaggaggtggagaaatgctctgactcccagtcctgggagggtgtggctccagaggaagaaccatgtgctgagaatagattagatactccagaagaaaagcgtatagaatgtgatggagattcaaaagcagagaccacagaaaaggacgctgtaacagaagactctccacaacctcctttgccttcagtgagagacgaacctgtcagacccgatcaggagacacagcagccccaagttcaagagaaagagagcccagtgactgtagatgcagaagtggctgatgacaagcagctgg

SEQ ID NO: 27079 - DNA, 1147 bp, Mus musculus
taatgtgactgcatttagttgtttgaaaagtccccatagtccgaaacaacaccaatattgtctaaaacttaaagtatctaatgaaccatatctcctaactatgatgttctataaagctgaaaagcaggtcatatattaagagagggatgggggcagaacaagtgcgacatccagcagagcaagcaccaaaacctgtagcccatgtgactgggccctgggcttgttctctgggccccagcagccttgggtgccctgtccccccttcccgatgccctcagcacagatgacctctgttttgggttagctccactgcagtttcccttggcagatttcccatggttttggcatctctgaatgttcctggattctccattgtgacttaaatttcaccttccaaacttcatgcagtggccttgaagggccttgtttcagggagctagccactccccccccccaatgcctgcactcagccacttctgaaactttggtgtccccaatttcagtgcccctcttgtttttacatctttcatgcctacaaaaacagtgctgtgtggatgatgctcccagctctgttggctctagatgtagcttgtccctcttggatcccagttgcagtggcctctgtgtctttgagagtgcccttggagaaacacatcccttggcagccaatttgcagcagggaacccttgtggtggcaatgtcagtttagcctcttttcctttcagatgagtgggtgggttttttacctgctgttgtcccactgaagaacatgaaaggtttctcttcaatggtgtgattaacagttagagatacgttccctgtacactctatctacatctttaaactcagctgcacattttcatagttttctattcttccactgctgatatgaatcggaacagtgaacagagtgctttcctgacatgcagtctcttctgttgaacaaattagtttattactttttctgacttccttagtgacatgtttatagtcctgactgtgctggaacttgctatgtagtcctggctggcattgaacttacatagatctacctgcctctgcctctcagatgctggtgctaaaggcatgcaccaccacatccagctagtccattacttatgaattcagcctcaagttcttaggacat

SEQ ID NO: 27080 - DNA, 1173 bp, Mus musculus
gtattcatgggtacaacatgtttgtctggtacccatagaggtcagagggggaatcagatttgaactgtagtacagatgtgagccattgttgtgagtgctgggaatgaatcctgggtcctttgccagagcaagaactgccaagttatgtctctctcttttttggggtgggggtggggctttctcaagacagtgtttctcagtgtcactctggctgtcctggaactcactttgtagaccagagtcaccttgaactctgggatctgcttgcctctgccttggaagtgctgagattaaaggtgtgcaccaccatgtttggcttcccactaagttttaaagcgatccaggttaatgcatcccgagtttgcagagtaggcagtaagtacttgtcaggtgatggcttgcagattgattttttttttctaagtaggtcactgattaccttctttttgggtgataacatttttttttaaagatttttatttttaatttttaaagatttatttattgtatatgagtacactgtcactgtcttcagacacaccagagagggcatcagatcccattacaggtggttgtgagccaccatgtggttgctgggaattgaacttaggatctctggaagagcagtcagttctcttaatggctgagccatctctccagcctccttatttttgattttagtgatttatttattttacttgcattggtggttttcctgcatgtatgtttgtgtgagagttatggatcccctggaactggagatatagacagttgtgagctgacatgtgtctgctaggaattgaacccgtgtcctgtagaagagcagccatgctcttaactgctgagccatctcttcaaccccagtacttatatatttttaaaattaattttatatataaatggtgtctgtgaggccaaaagaaggtgtcacatctagagtccgaattagtggttgtaagatacttaacatgtgtgctgggaattgactgctggttctctgaaagcagcaagccctcttaatctctgaaactcagaaatccacctgcttctgcctccctagtgctgggattaaaggtgtgcaccatcactgccggctgtctccctcttcttaaataaaacaaaaacccatgctgtcccctttgtgatagctgactgttcctgagcatgtggcct

SEQ ID NO: 27081 - DNA, 1435 bp, Mus musculus
cgtcctggtcctggctagcagcagcactgtggtgatgcaggacgagtcctttccagcctgcaagattgagttctgaatgacctgcgctcccttccctaaggatccactcctacagttcatttagagaatggctactgctgagtcctctggggttgagggaaggcgagccgggcaggggccatgtcatgttattgggacttggggctaagtgggaggtcctgtccttcccctcatctcttcctggggtttcaagaccaaaggcaatgaggagatacacgattctgaaaggtcatctgaagcctgaaacccctagagcaaccccctctcctagcattgccaaatgctggtcttggtgaggatgggtttcaaacagcacactcctcccggtggaggaagattaacaacagtctctcccccagaacctcattatttatttatttggcattccagaaaggattgctgataatttagatgatgcagggaaggccactgttagtaaggtgccagagctgcgccctttcctccatctgccatgccctagccactagagtctgggttccagcagctacctggggacatgtggctgctctattgtcttactgcgtcccacaatatctgaatgtctcaatccaaaacttgaagctctttagaccaagaactagggagaggaaaaaggagctcatctctcagccccttcttcatagcatttacagccccgggctgtacccagaccaggctacctgggcagcacaaagggcaaggagagccccaaccccagttgctccaagctccccaatcacttagtcttcacctaccccattccaataagcctcatttcttctcatcccctgcttggcttctctgcatgtggtcatctgctatggcctggtgtgtaatgggttaaacaataagccactgcctgacacccacatccactttagccatgtgtgactccctaacattccaatcctctaccatcctgcagctgaaatgggaacactggctgcctctctaaacctaaactcttggatagagtttctgggaggtggaggctggactagagaactgggggaggggagatgggagggagggaggaggggaaagaagagaggaaggtgagctatagcttaactcctccagagtgaggagaggctgagcattctactacaggacaggacctcgccccaagcaagccagtgagcagcccggccagaccctgctggactgagagacccagccgctgacagtccctggggcttgccttctttgccaagccaatgggaaaccaaaaggagctcacttcctgttcttcctagctcccctccctgccgctgtgctccgctcctccccacacttccttgctacagttcccagctgctgtaacagagccacctccacctctaacaataaaccaagttcattgcagatggtgtgg

SEQ ID NO: 27082 - DNA, 1199 bp, Mus musculus
aacagcctgacatttggaaaacgtgtcgcggtgcgctcaagtgcgtgcgcgccccaatgccccggagggagggagccggacagacagctcaagctcccctccagccctttcgcgggcctcacttccgcccactcagccctgacttcacccctccgccttccgcgccggcgcccagagcttcactcctccccagcgggtggcgctcagggccgctccggcttcgctgagccccctacttcccaccgaccccccgtccaggcctccgccacagccagaccggcgggcgttcgcctaagcgtccgccccgcctcgccccgcgcgcccgccaatcggcagttaccagctgttccgcccgcccgacgctgcgtgacgcagccaatcggcggctgccacactgcgggccccgagcaggcctagggggttgggacctcggcagcgggtctgcccgggccagacgcgcgagcgcaggcaagcggctgcagattgcgggctctcccatctcatttctccggtcccggccctccgaccgcgacccgccgccatgcgcttcagctgcctagctctgctcccgggcgtggcgctgctgctcgcctcggcccgtctcgccgccgcctccgatgtgttggaactgacggacgaaaacttcgagagtcgcgtctccgacacgggctcggcggggctcatgctagtcgagttcttcgccccctggtgaggccactttgcgggatcagggccggaggaccggctgggcgcgggagcggttgggcctacgcagcgcgggcgccctccactatctagcaggcctggctgcggctgcctcattgccagtcggtggggaaccgggaggcgctccgcccggggtggggggtggggtgaggacgaggtagggtggggacgggggcagatccggaaagcagaaagcctaaactccagggtagggccacgtccttacctccgcgttcttgcagcacttcctatgtggagggttctcccatcccctccccctccggtctatctttcagtatctaggtgagtcagtgtatgtgtccccaggtctgcagacaaggctggcatcccaaagccttcagagaggaggcagaggtcctcttttaagtggtgaggttctggggttttttttttttctctttttgtctccaccccattagagccattggtttctaaccaaggtcactctgtag

SEQ ID NO: 27083 - DNA, 1149 bp, Mus musculus
cttacttgttcatgttttttatatgcattggtgttttgtctgtgagggttcagattccctggacctagagttacagacagttgtgagccaccatgtacattgtagggattagacctgggtcctgtggaagagcttaagactacttcatttattacagtggatatgtgtgtgaaagtcaggtgacagctttgaggagtcagttttctcctactatttgggatctcaggatcaaattctactgagccatcttattggcccttaactggtattctacagaaagttaaaataacttttcttttttcagggtggccgtgaattaaatgattttattagctatctacaacgagaagctacaaacccccctataattcaagaagaaaaacctaagaagaagaagaaggcacaagaggacctctaaagcaacagccaaatgcaccactttataaaaggactcttacaccagagaaggcaaaaccagagaggacagaatggatatactctgaatcctgttaaattttctctaaactgtttcttagctgcactgtttgaaaatacaaggaccagtttatgtttgtggttttgggagaaaattatttgtgttgggaagaatgttgtgggggtggggggaattgagttggggggttattttctaattttttttgtacatttggaacagtgacaataaatgtgccccctttatactgtcgtttttttcccctcatgggatggagaatcagggtctctaaactgtaatacagtaatagatagaagtgtttgagctatgctgttcaatgctgtagctaaaccagatatgttatctcctataatcgcaacacttgggaggtgcaggcaagagatctcaagttcaagatcttccatggctacatagcaggttttgaggctagcatcttaaacaggtttgatctttcaaaaacaaagaaaaccagctatgctgattcctgtaacttgagactgaataggtccagttaccatctccaaattgtataatttattagtttctttctgtagctcaagctgtccttgaacttgtgatggtctccctccctggccctgagatactgagatgacagttgtttctagcctcattcatgtcctaaaggtgaatgcttactcttgccacacagccaa

SEQ ID NO: 27084 - DNA, 1186 bp, Mus musculus
tttctacaggctatgtccgtcattggagacagacggtccagggaacaaaaggccaaacaagagcggtaagtttaaagcacaccaccagcactaccggtaggtcctcgttctccaggggaaaaaaaagtttacgtctttaaccaatttctacagatctagggattacaactttgttagtggaaggaaagattccaggataccttactgtaaaacctccaggggaaagagttggcgcgtttatttgctattttcagtaaaccttgttccacccattttcagtgagtagctgggagtgttccttctgggagtttatagcagaggcagagaatgaaaagaaatgtataaatatttacagggagaaggaactggcgaaggtcactatcaagaaggaagatctggagttgatagtgagtattaattttttaatggattcacaagagaagtgctacctaatttgggctcctgaaacaagtggagaagaggctttggtgacgtgattttcccttttgcagatgacggaaatggagatctctcgagcagcagcagaaaggagcttgagggaacacatgggcaatgtggtggaggctcttattgccctaaccaactgataatgtgcttttttagacattctggactgactgactgactgaaataaagtgttctgttttgctgttttttttttttcttcagtttcatctcagatcaaatgcattatatattctattttattgtcagtttctatgttggaccttgatgaaactgtgtgaacaatcagtataaagaagtacctaatgttcaaatgcaggctcttatattgtgtgtgtgattcctctactgccatagtgtttctaataactaccacatgggaaacaaatttaagtgcccttttctaccaagccatcttgccagctctaagcagcagatactaagtggtatgttagtatcactcacctgactagctctttcttggcaatgtagagtacatttggatcctctgcaaaagatccaaatgcatatgtttctaggatagcttatgcacttttccccttggatctgttcttgtataaaccaggctgtttccaaactgagacccctccctaacttgaaagctgcttcaactaactctccaggctagcttatgagtatcaaaggctagcatctgttttgggggcttttaagttatcaa

SEQ ID NO: 27085 - DNA, 1198 bp, Mus musculus
tgtccgtactaactctcaatgtgttcactctcccagacaggcagcaccagtaacattttataatcgtgtgcgtgcgtgtgtgttgtgtgtgtgtgtgcgcgcaacaacatgccctcatagatgccaggatgcacatatgtaaatcagaagacaccatgagtctgttcactccttccaccatgttgagttctgggttcaagcatgtgagtccactagacaagcatctttacctctgagcatctcacaggattagaaccaacaactttgtactgaaattcttcccttctgaacattcagtttaaaaatgccaatgcacagctgggcagtggtggcgcacgcctttaatcccagcacttgggaggcagaggcaggcctggtctacaaagggagttccaggacagccagggctgtacagagagaccctgtctcaggggaaaaaaaaaaaagccaggggctgttgagttgctcagtggttaagagcactgactgctcttccagaggtcctgatttctattcctagcaaccacatggtggctcacaaccatctgtaatgtcatctgatgccctcttctggtgtgtctgaagacagctacagtgtactcatataaataaaataaatttttaaaaaatgccaatgcacagccacattaattctacatgcccagctagtttcctcataacagagcccccccaaaaaagaaatacggcttctgctagcagatggctgagagaacagagtcacttgagcttattggtggcaaggggggactgataaagctagtccaggaaacatggcaacatactgcctcaaggccagtctggtctggtcaacacaccaagttccaggacatccaagaagtacactgtaggcaagcgtcctactaacagattcatcctcaacccctccattttaactaagtcagaaaattagtaatatggggagcaaatcaataaaaataggtatattttcttatatatgcataaaatcaaaagaaattctagactcagttgaaatttaaggcataaataagtgctgtgactgtagttcagttggtagagtatttgcctcgcatgctggaactctgggatgatagagacttttaagagcctacatgcatgttgatgtatctggtacagggggaagccaagaagtattgtatcctctagaacaacagttacagatgttgtgagctgccat

SEQ ID NO: 27086 - DNA, 1145 bp, Mus musculus
aattaatactgagtaatatatgaccaaactgataaaggattgagctgaggagctgtctcaccgggtaaagtgcttcctgtacaaatgtgagtacccagcacccacagaaagctgggtgtggcaccgtgtacttaattccatagtgaggtggacagcaaacagtagagaccctgtttcaaatcaagatagaaggtgggaccaccaacaccagaggctgtctgatttctacatatttctatatgggtgatgggcctgtccctccacattcactcgaacacacacgcacatacatcacacatacacaaaatgaaaaaagaggatcccttgacatagcttttttaaagaaaaaaaaaaaagtgaactcttgcagtccaaatagttcagggtgaccttgagtttctgatcctgcttccaccttcccagtgctggggtcagaggtgaaatccacagtagccggtttgtgtcaggctcactaggcaagcattctgccacatgagattcatcttaggccttccttggcattaattttggaagatgtttttctaggggattactatgtaactgaggctagcctgaaactcatgatccctgcttcatcctcttgaatgctgggattacaggtgggtaccatagtgcactgtgtgacacccaaccattttgaatgactggtgtaccacagtttctggtgctgaaaggaagtagtgacaatgaggactgagcccctagcccttctcagtttacattctaggacaaaccatggtttgccttttctttttgatagcctttgttacctcctggacccttagaaatgattcctgaaaaccaagatgacagcagtgaactgttgaaagcatctttgaagacatgggcagagatgagccaggtatcacttgggatggtttacggcttttaggatcatgtactaaggaaatttcatgtatgcatattcacttagccctttggtctcttctaatgttgtagacaagtaatgagaagaccaagaaggggctgtctagtattaaaaggtaagttaaaattccttggcttttacttttgacctttgttttatactttgagatgcttgcaatataaaaggtgtaatggatactattataggaaaccttgaaaagtgaaaaaaaatcatc

SEQ ID NO: 27087 - DNA, 1556 bp, Mus musculus
tagcctcagattctgtagccaaggatgacctagaactgagcctcctgccccgacctcctgagtgctaatgtctcaggcacgttccagtacacttggcatctttcaacacttttaattaggctgtattttgcaaaattctaacaaattataaagctttcagtggtcattattaatcttttgtgacagaatgaaactattttgatgcaatagtaatctatagatctgtgacttatttagcttggggtgaataattatttctcaacactggactaggtcctgaaagaccatctaagactaattatgaaacattattgaatcccagagactgtcacatgctagacaagtattctacaattgactcataccccacctttgaaacttaaatgtttgttttgcgtcattcttgagactggatcttgctatgtagcccaggttagctttgaacttagtccttctgcctcacttttccaagtgctgggaatataggtgtgtactaccatgcccagccagaacttagttttataagctaagaacttttttggggatccttgtatctcagctcagttttacttgaaatctcatgatattcactggagaacagttggcttctttgactctggtctgcttggagctcgctctgtcccctgcctctgggcagctcctgaaatgggccaggacagcactgtttgaccttgcgccattatcttgttttctagtgactagctgtacagactgggctccagatgaggggtttgtagtttttcacatgaaaattttggagttttgatttatttaaaaacacagaaatataagactttttgttttaatcccacaatatagggctgcttcatattgtccgcggcaggtgactgtgatttgccccatgctgtagcaggggtgtggttgtgccagctgcagacagtttctgcaaatgcgtgacatttggaattctgggaacttttcagaggttatataaatgctagagcccccagtagacggggtggggtggttgttggttgttcagggggattggctgtgatttgttagtagttgtgctcaaagaagcagcaaaaggaaagaaattagattcagggatctcccttccccctatttctttcccttctatctctatcctcctctctctgttatctagtgttggggagagtggggggcgggggggggggctgggcggcgtggataaagggtggcaagaaaaaatccacaaagtagtaaagaccagctacagccctaaggtggaatttaaaataaaaattgagtcccagtgttgggtaccacttctatccagtctaattctttttccttttgtttcttctttgatcatgactattaacaaacagtaaccaaccaaacccccccacccccagcagccaataaccgctaacaatccttcttggggcccccacatttgcataccctctgaaaagttcccagagttccaaatgacatgcaattgaagaaattatctatagctggcaaaaccacggctctgctagagcacaatgcaaatcatagtcagctgctgtggacatatccca

SEQ ID NO: 27088 - DNA, 1174 bp, Mus musculus
atgaggcagagatcgaatgataatttttccaaaatctctgtgaggttcaggttgtgctgctaggaagatgagcctctgcactctttaatatgctcaggttctagaagaattcaaataaatctacaccatttactcctacacaggggtctcatttaaatttttctttcttctccttctttcgcatcctctttttcttcctccttttccccttcctcctcttccttctcttcctcctcctctacttcttctgcttcctctgcttctttttctgcttctgctgcttctccttcttcctccctgtctcctcctctttctcctcctcctctttctcctcctcctctttctcctcctcctccttctcttcttcctccttcaactatgtggcccttgccatcctggaactcactgtgtagaacaaactgcccttgaacttcctgggatcctctgccttccttgattcctgagtgccaggattgcaggccaccatgcccagctttcatttcgacgtctgtctcttccccgttctgacttggacaactaagaagggaactcaaaggcaatgttatttctcccataaaccctctgttactacccaaaaaacacaaagcctcaaagaccctgggagaatcacacttcagacaccccagaaagagaggctgggggatggctccaatggcaaagtaattgccacacaagcataaagacctgagtttggatcacccatgtttttaaaaaatgagcacttgtaatcccagtgctgggatatggagctgagaaggaccttggtgcttggtagtcagctaggctagctgaatcagtgcctgcaggctgagtgagagactgcttcacaaataatgcaagagcaattgagaaagacatccagtgttgagcatgtgcacacacacatatgcacacacaggaacatacatactaagaaggtagggtagatgttttgagctaagatctggctgaattatccaggctggcctctgactcttaggttcaagggattatctcacctcagagtctaagaagttgggacataacggcagatggtttgcaaaaagccagatgcctttcttttcataaacattcctttcccattcctacaaaggccatatagctacctatatctagcaataattttattgaacagtttactgctctgaatgat

SEQ ID NO: 27089 - DNA, 1226 bp, Mus musculus
tgtgtataagtgtgtgtgatcatcgctgtgtaagcatgtgtatgtgtattgctgtgtaagggtatgtatgtgtgtatcactgtgtgtgtatatatgtgtatgtgtgtatcgtcatgtaagtgtatgtatgtatgagaacacttcctttataaaacagtgtacaagcagatccaatagtgaagagtaagatgtcacttgcaacagggactttgaaagatgcttggtttacagagctgagtgttgatggaacactcagttgatggtgtcatgacggatgatggcttcctactcccgtttggcctagtgtgggtagctggtgcatttggttttgtgttgctttgctgtctgccagctccctaatggcctggagcgcaaggacctggggacagatgctggcaggaggcctttaaaggcagggctgtctagcagaataagctggaggagagcaaaggcggggagagagagagagagacctgccacaagttctttattccccctgggattctactctaggaaattttattttaaatcttggtaaactgaagagaaaaactgttttttctctcagaacactttatcaagatcaggccaataataactctgagagtctgggactccaggagggtttcagccacgacgcttttcctcttctgcctgcacaccgaccagacttcacagagggaataggtgtggataacctatatggatttcttctagaaaggtttcattcggaggaagtgagtgggaagtcttaagcgtaccgatggcacacatgttcatgggtgacttggatgttcctttagagcttttagctgagtccgggaaggtgcatttgaataacattttaaacaaagggaagcggttgtagtttagagttaggatctttggggtgctctgagtcagaaagtcctttctgggtccaagacagtaaaacatctcatgtagggagggaagtagatgaggactcttctccttagtaattcactgccagggtctagcccttctgggcccctcctgcccaccctttgtttctccgtgttcctcagtgagtaagagaaaggcagggaacagtcagctcaagggttaatagcattgggctgagtcagctttacatatttacaagctattcccagagtggttcacacttgagagtatgaagaagaatttaccaaagtaatatgtccttccacttataaagtttttttttttttaagatttatttattt

SEQ ID NO: 27090 - DNA, 3280 bp, Mus musculus
gaagagcagtcagtgctcttaactgctgagccatctctccagtccataagataatgcacagcactagctcttcagtgctgtgagttcctaacattttgctagctctgtctgtctatttccccggtacctgtcagaagtgactctgttctgtttgaaagttggagatgattggtgtttctttgagatggggtttcatgtagcccaggtagacctcaagttttctatgtggtccaggctggtcttgaacttctaatccttttgcctcaggctccctagagctgggattacaggtgtgagccactatgtccagctaagaatatttgttaaaattaaatcttacaaagtaatgatagactatttacacttcagccatgtggctaaggaacagagcactgtttaagataacaagcacatatgggataatgagaaaagattgctgaaaaactggagacactttgaagctggctctttgcagcaactttggaactctattcttgatacatattattttgcttgcagatgatgaagaacgagagcttcagatggatcctgcagactatggcaaacagcgcttcagtgatgtcctttaagtctaagggattcccgaaacccaaagtgctgtgcaacagatcatctctacttgtcaattttgacttttgctgtaaagatcagttgtatcagttgtaaagatacattgagatagatttaaggaaattttaatgaaggaatgtaccaatgtacatatgtgaactttttcatattatattatcaaagcagatactttttttggttactacacagctgggccaaaaacagttaatctttgcattttaaagcaaactaatgtaaatttcacattttattgagcctaatttttttttcacaaagagacaaacaggaacaaatggttgtacaggttatatgctgcacatagtataaccacaatgagaacttattcggctgaaaagtccacattactacatttttgttcccccataggtgtcctctactacccctcagttaacactcttgaagaagttctgaatagttacacagaagtggggaggctggatgccagacagtgggcaaatgtacagaatggccttctactcctttatcttacatgggccctgatgtgagtgtgctgaggcctgatgaaaagcctaggtcaccgttacatccttaccatatctatcagtagttccttacttggttcttgaagttgtggaatgcatggttgacagtgtatttttatttttcaagtaataccagaactgtttaactctggtcagcactggctaaaattctttctattttcagagctcaagctggtgaatacattcaccagttaagagtcagaccctgagagagactgaatccactttgaaatgagtctgcaatcagtacagcaaagctttgctggtagttttaatgatcgtatttgattagacttttccagaactactaagtaagggattttaacaggtttttattaatgaacagatgagtagaagtaccgtgaagtctgcagctattttattgaaatagctgaaaactttgtaataaaaaatgagtatttgtaattaatgttagttaagaacccaccaagctcatttgctagacttacagaattattttcagtgcattgtgtcttttggcattattcattaggatatataagctagctaatccttgtttactgatttcaagcacttttaatttttttgtgttccctaaaaattaaaggtgttgatcataaggctgttaatcccaaggctattattcctttttttttttttaagaagggctgctattaattacacataagcatgaactactagagagtgactgtagctcagatgtgcagaggcctgggtttgattcaaacactaaaaacagcagacaagtaagtagacatgaaaagtccccacactaaggctctaatccaaatactaacagaagtattgttcacctgctgacatctgaagtccttatagttcagtccaaagttatttaatggccaggaaaagatggaataatttattaaaatttgttttttctgctatctcagattatataccactgggcatgtatcacaactgcaatcctagtgttgaggaaacagaaacaggtgtgtccctgaggctcactgaatagccatcctggcctaattagcaagttccaggtccctgtaagggacagttgttcctgaggaacatctacacacacacacacacacacacacacacacacacacacacacacgcatatataaacaagttgaccctctggcttccacatacactcataaacacctgtacctacatgtgcacacatgtaactgcacacgcacatacccacacaccaagaaactaaacagttcatgattttgttatcagtaaagctaggcctctgtagtaaaaagtatggttcacattaaaatacagtcaaaggggagtgacatacaaccatgggcattagaaaggggagctgaacctacaaatgcctagtgatactccatacttgatactgtagaactgtacagacaaaatcataaagatgcctgttggttcctctgttataaaagcagtcacttgattttatggtacctatctatctttatatggaaaaaaacttcaattagcagcctagacattttataaactgaggaatcttggaccaattgataatatttctgactgtattaacattttagtgctataaaatactatgtgaatctctttaaattgtgacattctacagtctgtattagacatgctattttgttctgtttacagtgttttacttctgccttaagatttagggttttttttttattttgttatattttaatatattttgccctgaattaagtgttaatttgatgggaactctgcttttaaaaaaatcatcactttctgggttctaataaattaaaagttaaacttgtttcacagttttgattatatatatataattacatgaatataaacatttacatcttgacattaaaacttgaataaatgttatcatttattttaaggtaaattggactaaaagactagggttgggctggtgagatggctcagtgggtaagagcacccgactgctcttccaaaggtccagagttcaaatcccagcaaccacatggtggctcacaaccatccgtaatgagatctgatgccctcttctggtgtgtctgaagacagctacagtgtacttacatataataaataaataaatctttaaaaaaaaaaaaaaagactagggttgtttactg

SEQ ID NO: 27091 - DNA, 1994 bp, Mus musculus
cgtgctcaagtcctttagaaagtttaagtcgggtgtttgcatataacttttaaataacctcccacatgctcgaaatcacctctaaagtactcactaatatagaacagctaagtaaatgcactatgctgtttagagattataagacaatctcatagaaattatatggctttttaaaagtaatcttttcttcacacagaatgaagatgtccggcctcacatcagagacagatttcgattgcatgatttgctgcccccagattaagttcagagacttgtcatatcactgaagggggggagagaatgcaggacccttttggactaagacaaaaacattgccattactgttgaaattttgcatttttgtaccccgtcttgctttcttatctttggtgcccaataataatcaagggttacagaaagagactctcggattgaacacatacagtgggtaggctaaaacagaagcgtctgtagagtagacagctccagtgagactctatgtataggacatctgcagctcataacgaattctgtttctgccaccagcagtttgacctgtagttacacaggattttatgataataacagagatgaaagtggactttcattctctctctgtttggtgctctcagtgggtttgtagccactcttctgttacttcactattctcatttcaacaggaatggccagtaaaagttgttttatttttcctgttaaggtttataacctttttacatttctgacctgtattagattagaatctcatgatgcattccttttagttaaggcgcttcatagttttctggaaatagtcaatttttagttttttttttaattatacatttgaatggccgttttcctgctttgtctgcctgcatattgtatatttgtttaaaaatattctctacttttagtccatgttaagtttcatttaaaagatgcatttatattttgttctgtaatattctactgtaggtgaaatcttcaaaaatcaagagactgggtagttaagaatatatgaatgactaatattcaaatgatttgaatgaaccattgtgatgacatgtattccagatggtaatatcttgcaatggcacacgtttaatggataaaggtatacctcagacttcactgtgctcactagcctttgaggagaacgagttcaggcacctgttgggcttgattcggttactgctgcctttgggttttctccaggaaggaagtattcagcacagtgactcagtatttttactttgcatgggctggtagtacctctgttatgctcccagttacaatcagtttaaagctctgtgtaacagctgtggtacctaacggtggctatgcataatcctgtggcacagtacactcccgggccaccagtgcagtcaatgtgctcatagtggttttctatgctatatgaaaataagtcgtcacgccttggttctctaatgcagctaccacaagaggttgatatttttatagtggcgtgtaatctccttttcaggaggctttttatggaaggtagaatttgtaaaagtcagtatgctttgcctctcaactgcattaacatgccgcaggctcagactgtttttgtgtaaaggatgtcaaagaacggcactttttctaaagagaagtttgatattttgtatgcttgttaagaaagtacagtattggaaattaaaggtggacaattgataattgaggagtatgtcagttaattttttatgtatattacctgtttacttgtacaacttattgtacaaattacatgcagcttcattttcaaatgaatccttaaaataaggaaatctttttaggaaaacatttaatttttgtatttttgattttaaaggcatgagttgtcagttttcagtgtattaatgaagattttaacttttcatcaggttgagtgttttcttactatattatctgttgtgtatgtagttagcatattgtgtcactgaactgtttaaaaatctagcatgtagagcaag

SEQ ID NO: 27092 - DNA, 1234 bp, Mus musculus
caaaagtgtaaggccaaaaggccttcggttatcaatcattcactttcttattcctctcatgggctgtatttgcctaaaggtttggggggagggggctgcttttttttcagtgctgatgtatttgactatgccattgcttctcatgtcttcccttgagttgaaagcctgctaggactttgcataaaatacctaaaagttctcagagtaagaaccacaaaactcagtaccttatattcaaacgttgcttaaattattgaaatctaagtcacattagaatacattttcatattcatatttctgttatcttgaattgaaattccattgtaaatcaatttagtcttttagaaagtttattctagcatatggttttaatattagtattttaagataatatagttgactaccaaacctacctgctaatcagaatttcactgaggagcttttaaactgcacagcatcctgaagcctgggaagccacctcgtctatacagcaggcttggagagttctgtgtttttaaagctttcccagtgatttaaatagataactttggtatatcctgttttaaataatgtggtttgagaataggttgcaaaatttgaccagccatatttccctgtctctctgtctctgtctctctttctctctctggtagtttttttttttttttttttttaagtgctgggatcatatttcacagaacgtattcaaattcgtggaggaataatgaagattgaggctactgctcattgccagttttgtcattcatacttttaaattaagagtttgcatttatagaactctgaatagctgatcatttacatagctgaaggacatgtccctgaatgagaccattatatatattaactaaaatatttcactatttttttattttataaatctttgtagaaataagcaatgaaatgctactttcatcttttgaactgggatttttcaaggttgtgtccttttggcattaaggtaggggggagttaatattctctctacttatttccacatgaatcaatatgaagtcgtggacatttaaaaatctcaatttaatttctacttatttactatgcagtatagccgtgaacaagtaatgtagatttagttttctcatcttcaaatgccctgattaccctacctcacagggttgttgtggggataaataaaacttttatggaagtactttctttgatgacattttttcagcctttcaaaacaatggaattt

SEQ ID NO: 27093 - DNA, 1376 bp, Mus musculus
aaaggccaccatgaaagacgacctggcagattatggtggatatgaaggaggctatgtacaagactatgaagacttcatgtgacactttaccttctgctgtcttctttctttgcccacaatcccttcaacatgtagcacaacctcctttcctttcagttctgccaaatgctacaatcagaagtgcagtatctttgtgctggttacttaaccccttgacactcaggtgctaatgtgcaaatgagggaacttggatcttgttgccaaggggttaaaattgggaacctcagttgctactaaatcatagtttaaaaacaaaacaaacctaataatgttgtcattgttgctatccgattccatagcagcagtcactaaattggaaacaaaggttgcaacatgacaaaaaaagtgtagtatttaccagcaccattcagtaatacagccttaaccgtacctccttgaactacttcataacttgtcgagaaaagcagtttgcagcaagggcatgtgggatgcacctagtattaaaattgctttgtcttaaaattgaggtgaggatattaaaaacgtgtgaagaagactgcttatctcagagtgaagataactgtggctgaaaagtactagtttgatacttaagattttaatgaccaaaaccctccgacttggaagctgaagaaggtaaacttctccattattacagtgcaagtggtggactctccagtgcattgcctgtctagttatttatcagcctgtttctattgatggaggacttcatatgtgggagggaacactgtttctgtttgcctgattcaagtgtctgagaaacaaatgttctaggctgcagtgggaaaactttgaacagggttttggcgtttccttttctttataaaacgtgctcagcaaactgcaccagttacctacagtttggtaaattgttatgttaacaattatgacatctgcagtgttttataaagcaactaatttaataaaatcactattgtgaggacttaaattttgtgttatatcccaagagatagttgagagtacagaatgccactcatgggtgggggtctctactcactaaagctaatcaatgcttgatgtagtcacagctttgaatgtttgtgtcttcaacagttacagagccttcctactcttaattattttgttgtttagatgctaaggctcaattaagtacctaggactatttatttgtagtaatggagcctgttactaagtttattgctgtaagcataaattggattacatcttaaataatttacccaaacttgtgtacccctcaccccaggttttcacaatcagaacaaaaaatgtttttgatttctcttccataggcaataggaatctcaaagctctgt

SEQ ID NO: 27094 - DNA, 1376 bp, Mus musculus; identical to SEQ ID NO: 27093

SEQ ID NO: 27095 - DNA, 1099 bp, Mus musculus
atttcttcagcccttcacttccattttgacagcgggtctatgtagccctgcctgccctggcactcactgtagagcacatgtctaactgtgtaccatgtgtgtatccagtgcgcttattggccagaagagggtgttgagcccctggaataggagttagggtcggttctgagctgccatgtgggtactgggaattaaacctgggtcctctctacaaaggatttacctcctcccaaccgctgacccaagcctctaccatcactgccaatagatgcttgggtgccaggacaggggagagtgggcacaggagttcacttccagccttaggctgacactagagcttgtgtgctcttgtgtacacacacttgcagtatctctcctccacctcagggcccggctctgggtttctagagattcctagctagggagataccagttctggtcatcttaagtttgctcgcagttctacttctcagctcctcacgcagctgctgcatgtctaggttgtatatggcagaaactcagcagaggaacagagtggagcaagcctattccatctccctagaactgtgctcatgcggaggacggatggagcaacgtggcctgagctgtgcccttccttccccttcttcaccaccgtctaatttggggttggtttgttgtgtgtattttgagacacagcccttagccctaagtaaccaaggttgaccttgaactccagatcttcctacttctaagtgctagaattccaggattgccctcccacaccatgctttgcttttaaactatgtttttagacttaagctggttttttttttctgtttatttgtatcctgggctggcctggaattcactgtatgaatgacagtgctcttgaatttacagagtgctggggttagaggcgtgtgccaccacgcctagctatgtgaagttagaaatggagcccagggcttcatgcataccaagtaagcactcaactgcatgaactagatctgctcagtgtaccaaatgacagagtccactcatataggctgccaaagtacattcaatgctgtcttctcaaagctctcagaatgcctttttgttattttcgcatgcccag

SEQ ID NO: 27096 - DNA, 1099 bp, Mus musculus
gagtgtgtgtgagtgtgtatgtgtgtgagtgtgtgtgtgagagtgtgtgagtgtgtgtgtgtgtgagagtgtgagagtgtgtgtgtgagtgtgtgtgagtgtgtgtgagtgtgtgtgtgtatgtgagtgtgtgtgtgtgtgtgagagtgagtgtgtgtgtgtgtgagtgtgtgtgtgtgagtgtgtatgtgtgtgagtgtgtgtgtgagagtgtgtgagtgtgtgtgtgtgtgagagtgtgagagtgtgtgtgtgagtgtgtgtgagtgtgtgtgagtgtgtgtgtgtatgtgagtgtgtgtgtgtgtgtgagtgtgtgtgagtgtgtgtgtgtatgtgagtgtgtgagtgtgtgtgtgtgtgtgtgagtgtgtgtatgtgagtgtgtgttttcctaacacatctggttgccttgctttgttttaaatgtatgctttgagagggtcatgtggtgtatttgggtcattcacctcttacctcagttcctccacacgcaccctaccttcctacgtacgcagcttcatattctgtgtgtctctctcacctgtgtccacttagtgttggctgactacagctgagcctgaggcctgcctgtcaggacactgggtgccactccactggagaaaactgactcttccctctccctgaagcagccaaaggccaaatagctcctcagcccggcatgggatgctgtgcccacctcccctcctccaagctggaattttgtctagcttgagtttatgctggcctgtgagtttgtatgcattcctgccctgctgtatctggaaaacctgttctcttgaagtcatctatcacctgcagctcttaaaatcttttggtcccctctccacttgacatagatgtccccccagttgggggctgagcactgtgaagtctctatgctctgcaggttgaccagttatgggtctctggtaactgatgcccagtgtcgggggaagcttctctggcgagggctgagcactacacagatctgaagctcagggttggactccagagtcagacacccagcagccccagaggtccctgaggcaggcagaggcagcagattggatttggatggtgactttgtggtttccat

SEQ ID NO: 27097 - DNA, 1195 bp, Mus musculus
acctttcctttccttatggttttggaccagaggcctcataaggaaggaacaaaaaaaaaaaaaagggaaaaaagaggaaaaaaagaaagggaggaaagaaagaaaatttattatccaaatatagttgtatttattctaagtgtaggtaagattttggtgacttacaagaaaacaaaatatctgagcttttaatgttggttgcatgttgagacaacatttgggtatggctaacgtgtaatgctagattgggtttacccttctgtaacaggatggtaagcagcagctaggaagaactgtgcatcggcttgttaagccgctggcttctcagtcatctggttactgtgttggagaatgccctctttccagccctcctgctgtacctgcgaggtggtaaccattcagacaaccttatgatttaaagggtcctgcgtatttataaactgacacttctttaactctaactcagatatttttaacactatggatggcacgcaggtagcgcaagtggacctggctcttctcagagaagattctgagcagctggagcccgccagtgtctcttcctttacatcgctgagagtgtctcaggacttggatgttctggtgctggtcagctcagccagtactgcagttgctcttaacctacatttgtatttcaggtaggtagatggctcaaatttctcatttgaggtaaatagacccataaaaggtttaaaatatactccttagctttttttaaaagcctctttgctatgcagttagatctcattatggctcctacagtaagactgttaccatgcaagagtgtgtataaatgattgtggctgcctttatattttggcttgtatattaaaggtttggtttccacataggtggtattatgtaaaggttatgtcataaataatcaggattatgcagtgttaagaggctcgctttttatatatcacccctacttctttttgtttggttggttggtttttttgttgttgttgttttttcgagacagggtttctctgtgtagccctggctgtcctggaactcactttgtagaccaggctggcctcaaactcagaaatccgcctgcctctgcctcccaagtgctgggattaaaggcgtgcgccaccacgcccggcttcacccctacttcttgtcccatttaagagtagaagagaatggaattcagctgctgttgaat

SEQ ID NO: 27098 - DNA, 1130 bp, Mus musculus
gctgtagggcagaatttgcaagcctttctctttaaaggctttctcgctttccattggcagccggatttctgcccagatcccgcctttagtgctccccagtcaggacaaacaggtttttactttagagatggagcttgctgcccctttccttagctatccattcccttcctttcccttcttctgtgtagccttggctggcctggaatttgctctttagaccaggctggccttgaactcagagctctttccagcatcatacctactactagtcttccgagaattatcaccagagctctcagctcttgatgtctccctgtgaggatggaacggagtcttacattctttagcagcaactcctggtgcactagaaaacccgccgaggctgttttatttattcacaagaaggcaatgagatgtttggcacgcgaggagagcttaatggagacggataccaaataagaaagggggagtggaagccgggcgtggtggcgcacgcctttaatcccagcactctggaggcagaagcaggtggatttctgagttcgaggccagtcactatacaaagtgagttccaggacagccagggctacacagaggaaacccggtctcaaaaaacaaaaaaaattgtctttgtttttgtctacagagtgagttcagggcagccagggctacacagagataccctgtctcgaaaaaccaaaataaataaataaataaataaataaataaataaataaataaataaataagtggtctgcctgaatgtatgtgtgtgcacgactgggtgaatggtgtctctggaggatataagaccgaactggatcttctggacctggagttacagatggttgtgagctgccctttggctgctgggaattaaacccgggttttctgcaagagcaacaagtgctcttaactactgagtcattcctccggccccaggatggattttttaatgtattttttaattgaaatgctaacaaatttctaattacagttcttcccccagcctaacccctgccccccaaaaaactacacactgagtattgtagttgagattcaaagctgagaaaattaaaacttaaaagaagtcctcaggttcttgtaacacacaaactaatcaatagcag

SEQ ID NO: 27099 - DNA, 1223 bp, Mus musculus
ccggctgccaatggaaagcgagaaagcctttaaagagaaaggcttgcaaattctgccctacagcatcttgatgcagatgcatcaggaccacgtgacacatacattccttctttcactcctgcgagtgtcaggccctttgtcggttgctggaaagacagcggttttttgttttgtttttgttttttttttttttttcagagcgctcgcggcgtcctgcctgcagcagcgcactgttcccgttagtaacacaaaacacccgcgctccacctcagacttaaacttgctgttcgaggggtgctagccgggtcttctgcagccacaaatcccccacggcctccgtaggctgctttctctctttactctggcttgctaagtctgagtgaagtctcgtcccccgcctcccccctcccacctcgcgcgaccccgcctcctggctgtcaagtgcgcaggccccgccccgggcccgcgcttcgccttctctaggctccgccccagccccttactccagacccttggcggttggacgagcagaaccaccagctccccgccgggtccagcggacacctcgaagcaagagagcaacatggcagctccagctaagggcgagaacctgtccctggtggtgcacggacctggagacatccgcctggtaaaaaggggaaggagtgtgggaactcaggcagtcacccacccagctccggtttgcccctctggcaggctcagcagtggtacccactcccaagttctgttgctcatagagctggcagatagcccgtgccaagcacccctgactgcctgggtttacccagatctcagctggttaccgggaggtgggggtggggtaattgttatctatctctagagagagttctggtcgcgtgctcccagagcctagaccgggcgccaggcacgtgacctgtgcccaggaccgttgaaaactaatcaagccttcgactctaatagctgcaaactcacactgttgttattgctcttcagaagggtcagagggagacttccaggattaggatctacccagatcttctcttgtagacagtggaggacagaaaaaggtggcatggtggcatttaaaagcagtgaagtttctatttaatcctttttgtttggaactgataatatcccatagcagaattattatcatgagagggcctagcattcagtaagtgttaataatgcattttaactggggatatagcctggtgctt

SEQ ID NO: 27100 - DNA, 1615 bp, Mus musculus
catgccaaagaacttgtaggctttatatggcacacgtctgtcctgggatgagaagctggaaacatgaatggggtgactgaaaatagtctccataccctcagactgcagcccacaaggctcctgtcagaagcactgaattagaaataaatatggttgagcagtttctgagcttagtactttggggggggctgactcttttcctgaaggttgttaatggaatgtttgtgatctcttacaggtggccgatggcaatttccatgcttgcatcgaagacgttgaatgtaaagcccttagttacccacagattccccctggagaaggcagttgaagcctttgaaacagccaaaaagggagtggggctgaaagttatgatcaagtgtgaccccaatgaccaaaacccctagatgtgaattgatctatgccctcagcccactctctcagcatccgagagctaaatggctagaaggggaggccgtaaatgcagaactttcttttgaatggtaaaaataataaactcataagcggagagcctaagaggagtgggcatgccttaaggacagaagtagggacaccttgagggaccttgtagccagaatgagatgcttatactaaggaaagtctagcacagagagtctggcagataggtcctgggaacgccttttctctagtaccttccttgggtgaggagacacgcatgcctttgtgtgttctactgtgattgccagagagtggggctgacttatgaagaaatggattcattaacatggaagtggccccagggctgaacttttggtcagctgttcagagcacaatgtttctctagttaagtgtcatttatttgaggagaataaaaggaacttgtctggacccagacaaggaactgatctggaagaataagataaatcccagatgaggtaccctagcttacattccccagatgtggaaagtataagggcactcggctctgcccaaagactacctctgtctcagctactaagaattctgtccttacatttgcaaagtggaggcccaccttcccaacactgctcattcatgagcaggagcagtattggttgctaggcaaccagattttttttttcccaaccaaagatcttaaatcctgcctagagggccacaggagggcttgccccactcagaggattagactcctctcccagagtcactcacaggcaattatttcccattccactcagttctggctaccagaagatgctcccctctcagctgggtgaggctgctgatatctgtcggatgggtatcacagcgtaatttcatcatagggcttttctttataagatttgggtccaaatcacaccctttgtgatcttaagataatcaagaaatgcacagtaactgatgtaacttgggctgcagtctgtaatccacctcttcagctataagtaggggacatgttaaaaaaaaaaaaaaaaaaaaaaagactctgctggagaagatcatggcccagacctgagctttctcaaactgcttcgcataataaactgttgatggtgtccgactccgtatgtggtttgtgcctgtttaaggagtagacttaaatggccacaaggaagaataacaaagctttaagcagggg

SEQ ID NO: 27101 - DNA, 1170 bp, Mus musculus
aagccgagcgggagcatcaaggagagaggatttagccatcctaaatgtgggataagtgggagaggctgcaaggaagagagaagtcatgggggcggaaagccgaagctgaccggcattcaatagagttctgtccaaactgctaactcagtaccgagggcatccgccgcactctcagcaaaggtcctcatcggtcgctgatatagggtgcggggtggatctgcagccaggagacccactggggaacggccctgcaggcaggagaactctgcagagtccactggtaagggtccaggccccggagaccggcttccccaagacagtcacctcgggtccccggatgctcaggaggtctccggccacctccaacatctctcgcaagccccagattaccgaaccaaagtgaagcctagttagcggcgagaattcaatgcgcctgcgcatcgcaggctctgctaggttggagtcccgcccagcacacgggtcatttagtgacgcaggaagtgggaaggcctatgagtattgaagagcatattcagaagagcaatattacaggtccctggtagctcgccgtgatcgtatagtggttagtactctgcgttgtggccgcagcaacctcggttcgaatccgagtcacggcattgtggcaacaatggcacggcaaggggatccagtctttttttttttttttttttttttaatttccatgttttttacaagattcactggtttggtttgtttttttttttttttttccctcttactttgaaaattgagctactctaacgatcgcgcatctaagaattctttaacgctctaactacggcttcagatcgaacagtttctaatcccttccttctgaaaaaccgttatctaagccattcaacacgaccgaaaacagcgtccctgtgcccttgtagagatttcccgcacctccgtttttaattttaaaaatcgggtcgttcgtttgtaattacagactgcgtgtgaccaagtctaacagaaaggtttcttctcattcttcacgtcatccaccaattattgccattttccagtgccattatcttgccatgatagtcctagtgcaacaaatacttatgtatccatacgtgtgaagatattcctcctcttacataacataccgacacctccaactcccaaaaaattatgata

SEQ ID NO: 27102 - DNA, 1152 bp, Mus musculus
taaaatagtgattcgcatatgagtagattataggcatttaagtggctgcctgggcatttgtggcctttagatatgtctaggggaaaaaaggaaaatgtgcattttattcttaacattttcacacatcagttgagctcatttcttgaaaacatccttttaccataatatgggcatatctggattttcatgttgatatttggtaaaacagccttaaaatccatttgaatattgaaaaagttttcataaaaaaaaacagaagaacttaaaacttctgtaagtcttaactatcatattcatgtaaagtgggtgtacctgtaatctctgcacttgccttttgcagcaggggctagacgttgttcttcatgggtccacaagatggagagctggtagatttttacttgtttagcttgtcagaacccatagaggaaggacattaagtcagcagttagatcagggactacacagctgtaagatctccgtctttctcctttggagacacagtgagtggcacaacctctcagttaactgtgagaactctttgccctgcaaagaagcaggatctgaattggggagatgcagtgctaatcgtgcactgggaaacatcacaacataaaacttggcaattctccactgcactatattctaaggagtattttcagataattaattactgtagacattaacccatatttcacaacttgtgcccaatgcagtcttttgttttaggaagactctgtctgactaacaatcttgctgtcttaagaagcataccaagaatgcagttgagtaagacatacttaacaggcagaaccagaagctattgtaattcttacgggcagctatgttaactttccacagctaaaggttttcatgtgagcagattttcacattcacagcttccatccacattgtttaccagatcactagatgtcttggtttacagtgtttcttttcagtttgggatagaggttttcatttttctctctgacattatttcctgaactctcaacgttgtcttaagcccaggtggcccacgtgtcagtatttgtcttcaggagagccttcccacagtggacacagtcaagatcagagagaaacacgagcatcactctcagttttcagagagaactttcagccaatacttagaaatac

SEQ ID NO: 27103 - DNA, 2066 bp, Mus musculus
tcctggatccccattgctgtacacagagagcgaggcgtggccggtgccttatgccgtggcatgtcctgaaatgtttccagggttgctgtgtctttcaactcttgcttaactttacaattattatttgatcttaaatcatttggaaaatgaaaaacactttggctgttccagagtctgggttcaaaatgagcagaaggtctgagctccttgagaattgattttagtttcagtttctcctttcctgaaggcaggcctttcctgtatggccacactgatttttggcaattgctttttattgtttaaagagaaataccaattgtctgatcacgaatctcccagcaagagagctgctgagcttttatgaagaccataggcagtgtgtgcacactggaaacaccaggaccttagatgcaggctgggagttgatggcagacagatttttccagcccttctcctcagttttcccctgttgctgctgctgtagattttgggttcagggcaggattctatccattcctaatgctgtgcaacaatggtggacctgccagatcctcaaaggcatctctctctctctctctctttctctttctctctctctctctctgtgtgtgtgtgtgtgtgtgtgtgtgtgcatgctacaatgtaacaatgtttctgtacttcctccctccctccccactccccctttctttctagagacagcaggctctctataaagccctggctgtcctcaagaacctgtggggaccaggttggcctcaaacttaacaatccacctgcctcttattcccaagtgctgggattaaaggtgtgcaccgccatgccttgttctggtttttaagtagaacaaaatctgctgctgctcacatcatatgtaaatagtgtacagaagagagggcatgatgcctttactgttttctagaacttttttccctgttgttgtatgtaggagtttactctgtaaggcaagatgaagtatcattgttggaaatcaaaagtgcagtagtatactttctcgtcttagtgtttaataggaagcttgtttctagaccctattgtgtgtgagcagcacaagctacaaaggtgtctgattagaatgcgcatcttttatagcccacattacccttttagtaagctgggattactacctctgatcacatacggggcgatagagagatcgataaagaggaccagtgctcagaacctgtagcttaaagaaaggcataactttctttgaaggagcccgctccttcctaatgaatgaattgtgatcccacagatattgatcttgacttctgttcaagaatataatgagtctatttgaaaggctgtaacccttagtcacttgttgtcactcctagagcacaagtcaataggacctgcaggacaatgtcattaccttgcaaaatgttacaataaaatgcctgatagctgacgaaggctggcgattcttttcatgctgactttagaccagtggtggtgattgtttcaagtgctgttcctggacacttctggaaaacttcctcagtcttaaagtgaatctattctttgttttgcttaaagtttctgccagcgattctggtataccttaaaggatgaggcacttctgggtctggctgccactggcagggtttcccacactaaactgcatgtccttttcacctgggaacttaagaaagtgcagacattaccagttctgttgtggggccatagaagagttggagtgctccagattctgatgcaaggaactggtgggatagaccgtccagtggcttacactcataagcaatgcaatcgtttcaaagctacccagtaatttgtggaattaatcttaagaaagaaattattcactactgcttttgatagaatcagatttaaaactgaaccttagctagcaggaaattaagagtcctagttaatgaattggatttttttttcccgagacagggtttctctgtatagccctggctgtcctggaactcactctgtagaccaggctggcctcaaactcaaatccacctgcctctgcctcccgagtgctgggatcaaaggcatgcgccaccacg

SEQ ID NO: 27104 - DNA, 2446 bp, Mus musculus
cctcatctcttttccaaaacggacgctgcttatgctttgttgcacactgatgcacgcttagggagtgttccctctaactctcactgtgccgcatcgtttactgaacgcaggcttcccgggtgctagaaggaatctagagaaggttgggcctagcatccttggtatagttccggggtgtgctctagaatggtgaggagattggataaaagtgggacgaggctgtacactaatgaatatgttaagtatgtgaaggttggatcaaatcacaaatattattataactcataaaagctcaccaagactcagacagtgcaccattaatttagacacagattctagcatgaacatttttgactagttctttggagtctttgttgttttaaatctcctcagtcttaaagactacaaagtatggtttgtaaaaataaatgtctcgtgtcaaaattttaaagtaataaattagaagcttgcttctcaattacctaactgaagttggaaccacttttataaaagcttttctagtctggaatgctattgctatatcgagcataccaagctcatgtgctgcttcacacggcatgtttaagttacacctgcgttcttttccccattctgttcccctgaatcatcccctttccttttattgacagttgttacaaagatgttctttctttcttagtgaaaatccaagctccagcgttgtctctgctccctctctggctcggcattgctgccatagtttggtgctgctgcttctactgtgtctcataattcatccccctgccttttctgttttgttcctgtcctttcatcttagctcagtcttctgtgaacattgggtgagagaaaagagcctaacatgcatctctgactctgtcttaggaatgctgcctgctcagtggggtatcttgcacgacctcctgcacttccttcctgtcagcctgctcctctgctgcttgctgcacttgcatgtgttggctctgtgtgcaagcatgtgagcaggcctttgctagtgttcccaggcctcagtccagagcatacttatacccctgaatcatgtatgcaataaaagtgtcagctgttgcttcctgactacacatactattagattattgagttaaagcctctcttatcccatggggcccaaaccaattcaaatgctcctttctccatgtgcatctcccatctgagtgtcatcaaagtttattcagtctgcctgtatgaaccatggtattagcagtttatgtttgcttatggtgttcacactttgaaattctagctgatttcattctgtgtctgggaaatggctcagtgggtaaagcgcttggtgcacgggcatgagagtctgagatcagattctcaacaccacataaaaaagcatggcagcccacatgtatactctcagtgctatggaagtcagagacagacagatccctaaagttcactggccagctagtctagcctaatcagtgagctacaggttcattgaatgactgtggtctcaaaaaatgatgtgaagtctcaaagaattgagggctagcatccatgactgactctggcctccatgtctgtgtgttctcccttcccccacacttttagctgattaaaaaaaaaattattgtgagttccttaaaggccaggacttacttgcagttcatcatctctggctccatagtgtgttgtgtaaccatgtactaattactaactctcaatgagaactcaggtcttttagagtgttagatggcagggtgtagttgttaccttcagaaacctgactaagaccatgcaagcttagagaaagttgggagtaaccggaatcttcctgaaatattccactgtctgtccttgactggcgacgaatgaagagctggctctcatcctcccatcccaacagtgtctgctgttcaattctctcctccatagctctggcaaggcagggacaacagggactgcatgttttcatgacatgccggctgatcgtggtgtcaaaacacagcagcagaacatagagcccatatatcagtagcagccctgctccttcgtacctagacgtggaggaaagggctgtgcagttatccagtcattttaaacaatattctctaacaaaagcaacagtggaaaattcaaggaaccactcctaaatgcttttatttacccagttttggttatagtatggttacaaattcattgattaaaaaatctgcctctttaaaaagtaatataaaatccattgtctgactttatagattcctttcaagtaataggcacaaaatagtcggagagttaaaactaattaatagatattttttcagttcatttatttagcatactacatttctcaaatatttaataattagaaaataaaatactatctcttagattttctgatacagaaacatggtgtagaatacttagactgtgctaggtttttgctggagctttgcag

SEQ ID NO: 27105 - DNA, 1383 bp, Mus musculus
tgggctcgtaattgtgtaactctcctttcctaggtcatgtaatgtttgcagagataaagatggagaatggcaagtcaaaaggctgtgggacagtcaggtttgaatctgcagagtcagcggaaaaggcctgcaggatcatgaatggcatcaagatcagcggcagggaaatcgatgtgcgcttggaccgcaatgcgtaatttcaagcatggttggaacctttcctcatctgtttatgactctcctagtaaaagtcatttttagtaatgttgtatgcttacaaatgctgtaaaaatgaacttttacaactcccaccagctattaacaggatagtgtggaaaatgtactgtgagttttttgttttttgttttttgttttttttttttttttttttttgttctcaagtttgagtttctaaagacagcacatctgatcattcagtttcagtggatggacataccatttttaatgaaataagccattttgttattttcagtagcagagtttgtctgttccagttttcccgaccttggtgtaagctcacagatactttgttttcttttaaaatctttgctttgtatgtgagttaaaggaaagaaagggctcagacaaattaggatggattttggtttggtttaaattacttttctctgcttataaagaatagtaattaagtgttagactctaaagttgaagatgctttttatttgacctaaatgaagacatgaattttcttctttttgcccctctaccattccatctttccacataacactattaaaaaatatcaaactccacaaccccttattctattatttccaataattccaatttcatatagaactgataaagtagcaagtcctaagtataacactaggcagaccacccccaactttcggtctagtttccagccattaaaatgaactgctaagaacagaaataaaattgaaatgttgagagagattgttatatatgtgagtcccttgctattcacttctataggagcagatgcattcgtaaatgcagtcttaataaaccagggaagacctaggcatagcatatcaaacacattggatcccacgatgttagatatagccatgtctcctttacctgcagaagaatagcatgttgttaaaatgtgcacatcaatactatattttattaataatcttcataagaaaaacactggatactttttgttggttagttttagaaaactgttattgttagagcaagagtcttattgaatttgtatttccttgggttagtattttaaagtcttaacatttatttaataattgtctttatttattaaaccatttttaataaggtatacagcttacttgttgctttttattctcatttgacagtgaattaccatctaat

SEQ ID NO: 27106 - DNA, 1099 bp, Mus musculus
catctgcagagctatagtcaagtctcacaactattctctatttcataggagttgggtttggtggtctggaagcaatgaatagcatggcaggctttggtggagttggccgaatgggaggtaggtgaatgtactcaggggtatattatctttgctttccttagtattgagatacttcacacacatacacacacacacacacacacacacacacacacacacacacacacacacacacagcggtatagatactatagaagtcttcagaaggcacatgggcactagagaacacttgtaaacatgccaggaagggggaagagggatgggtagtgggttgtgtagtgagtgtatgaaataagttggtatgccacacactattttgaattggtaacttctgattttttttctcctcagtgtagcttagacatattcctcaatggtttccatgcattgatgtacttgaagaaaggttaatttgctgtacatcttttcagagctataccgtggtgcaatgactagtagcatggagcgagatttcggacgtggtgatattggattaagtcgaggctttggcgattcctttggtagacttggtagggttggctgtatacttttttccttttgcaggtcatagtcttaactgttctttttggtgtaaaaaaattgttttaaaagttataatttacatagttctttactagaagaaaacattttagggattttaatttcatggttctcttataatttacatagttctttactagaagaaaacattttagggattttaatttcatggttctcttttacggtattgtgaatattttaagtatttccagaaaattttatgtttagttatttgtgagtatagtaccttggacattttgaagtgtcattatgtaaattaattagtatattatcttttcatccttgtttaggcagtgcaatgattggagggtttgcaggaagaataggagcttctaacatgggtccagtaggaactggaataagtaggtttaaattttaatagaatttactgagtagtatttgagtgcttgcaaggagtttgtaagagtagttattgtagtacagtaatagtttgctt

SEQ ID NO: 27107 - DNA, 1174 bp, Mus musculus
atcctcttccttgactctaacccttttctggtaactccatgctactgtcactctctgggagttacttgtcggatattatgtttctctattacctgctactattcactttcttttgcagcttctatttgttaagcttttattttattttttcaacaaggatttattgttagtaaattcttgtaattatggctgctctgtaaatgtcttctaaggtagtttgatttgttagttcaatttaagatcaagttactttatcttagcactttgaaaatagtttagtcttctgctttctgttgttgctacttcataattcagataaggttttttgttgaattatacctttttttggttgtctcttattcatggagctaattttaaagttttggtccctggttgacagttttgctgcagtttgagtggaggttactactgactgagcttttgcagtggagaattatcagccatgcatagttgagtattccctttataaggcagcttcttccagtcccaggtaatctggttaggctcaccttgttgaagatcctaactgtattgcctctattaacaataaattttagtgctcaagacctgcactgttaagccagctgtactctcagcctggatgagattggcgaaggatgcgtgcagtcccacccttagttgagaactaatgttgctgaggaagagagacttggttttcttcagaaaacaggaacgcctctgttccaattgatgtccctgcatccatgcaaatgcagtactaagtgcacttaggaggcaaagcaacaaagaagtgtgtgaagttgggaggcagagatgcgggttggtggagggctgtggtaggggttgggaaggagtgggcaataattcagtcaccatttatttgtatacatgtgtgactttctcaaacaggaaattaaaaaacatgtcctgttaggtgttctttacatttttaaaaatgatttgtattttcatattttcttttatcttgatatataataaagtcacaagctaccatagaatcaaattttttactactttcatctgatttactcaaattttactctaacttgacaagtgggaaatttctcattttccatgcttctgagttctttgagattataattactgtgacatcagaattgacacaatggtgattgtatttatgagcatg

SEQ ID NO: 27108 - DNA, 1099 bp, Mus musculus
tttttccttttgtccttttagctatgctggagaatttattaaagtcatctttccttatttgcttttttaaatcaatatgtacagactgagatagcagagaagtttttggtgaatattttctctgagaatttcatacaatgtattttgatcattttatcctttttctccctcagctcctcccagatccattcctacattctcaccctcccaactctttgtgttcctcccaaatagcttttagaacctgagtccactcattctctctctctctctctctctctctctgcgggtgggggagaggggtagcatcctcctctgttacctggttgacctgccagggaacacacctttaaagaaaactggctctttctttcccagaagccatcaactgccagtagatgcctcataggtaggagctctgagtcccttttccctccatgttagaatgttggctagtctgatgttgtgtaggcaagcataaatgctgttaatgagctcatgaatgagaaagtagaatttctggtatgatcatttgcctacacatgatggtcctcttaatgtaattttatttgtgctttgttgttgatcttctacctaatagaagcacatttgtactttgatttgttttaataaaggatatttcttttaaaagttaaatgaacttaaatatatttgctataattctttacttggacacttggcattctgttatccccttttcccttcacaagtccttttcactgttcaggaagctaagagattatacgatgagtaaggagtgatgttagccagtgataataaactttcctctatctcagtctacctgagtttatagtagtgtgttctcgtagtgagagggtcaatctacaggattttatggactcactttctggataaaaataacaaaacccttagtcctcacagatgttagtagtttggtccagctgggttagctgctgtccaactttaagccacttgaattgtatatattcactgatgtatttgctggcagttaacattcactacacattataggatccggatggagaaaatgctcgccgggcactgcagcgaacaggaacatcatttcaaggatcac

SEQ ID NO: 27109 - DNA, 1898 bp, Mus musculus
gttggcagagcagacgtgaggtcctagtctttccggtggtagtcatctgggggggttggaggtggtgcgtcctatgctcagcctgcagtaggaaatgctcaccacttgataagcattcagattggaaaatcgggacacgtttttcaaattcttgcattttagtaaaacttgtgttcagactctgtagggcctaagggtgactttgtcagttgtaatctcaggaagtctttggcaaagtggttttgaggtcactgcagacccctgatgaacgaagctaacattgctgtctcctccagctggtgtcatagacgaggattacagaggaaacgttggggtcgtgctgtttaactttgggaaagagaagtttgaaggtgagttaagtcaatatgttcatggaaacattttgagctacctgtgtcagtaaaaaactaactctagttctcactgaacaaggcaggttacagaaaatgggtcagtacacagcgatggtaatctgtgttctgctttttctttgaagtgaaaaaaggtgatcggattgcgcagctcatctgtgagcggatttcttatccagacttagaggaagtgcaggtgagtactggaaactgagcggagaatgcctggtgtgtgtgtccagtggaggaggggcggctcagctgatgagctgtggggctagtgactggtagtcttcaagcaaggttaggtgtttagtttgagacttgattggctttcctcagaatgggtccgtgcagtgtgcagaggctctgactgccgctcctttcccttcctcctaataatgtctttcagaccctggatgacaccgagagaggctcaggaggcttcggctccaccgggaagaattagaactttgctggaagtatctcgctgtttcaacactggaaaccagaagctctaacttcggaagcatttggtgttctaggatgcaggaaaggagacctcgatcacatcacgttggaacgattctgttccctggttgaggtcgcctgtaagtctgcactgtgagcatggcattgacatgcagacttggtaaaacccagggtacagttagattttttgttgttgttgtattatttaaattatagccttccaaaaactgtttttgatcataattgctgtatcatttgtaattttttttaatccaataaagttgtcttttagcagatatgattttacataaactgactggagaacatggaggctgagtcaagaggattgcagtgacttaggctagcctgggctagtatgagatgctatctaaggaaagagggtcatgttaaaagctactccttgttcttctctgcactggtgctgtgtgacactgggacttagaagatctgctcaccccagattttgaacccacaaaaaatacaatttagagtttatggtactgtgggggagggactacaaacaggagcagaaatgacttaaaggtatcactgaaagcctgcccacccagcatggtgattgctccttaaagctgtgaaccgtgcagcctccaggcaactctgtggatcctagggcctcaccctgtgtgtaatggtggaggtccttcttccctgcagtggcttttccagcagtttcctgcccgacacgactgtctgccaccctgattgcttcccctcacagtcccactgtctgtgaatagaaatcttaaaggccaaaccaatgttagtattagcaacagatttaggagtgtccgaagataaaacaatgcaaggcatgccatccttcaaatgataatgctatctgcggctggacattttggctttttctgctagtgtaaacaaatcccccgtcccgccccgccccaccctgccaccaggtaattgacctgatcattttagctgagaaatgcactctttatcatcctaagaaaggct

SEQ ID NO: 27110 - DNA, 1134 bp, Mus musculus
tacagtgatgatcctagttcaaccaaccactttctcaggcttctcgtgagtagctcagctaccctgtcatgcgtattgattcctgaaaactgggacatgaatatccgctgaggttggccattcacgccgatgggctatcttcccagcctccgcacaggaacgcgcttccatctgatggactgttccgcgttggtcttcagatcttgaaactttgcttctccgagtgcaagcagtaggtttctgttgtctgtttggtgctagtaaattctcaaaatagatttattgatgcactgtaataaagacacgagttaggaaccaaattgccaagtactcagttcaaatacttcatttcaatcaaccaaagttagttcagtagcttatctcacttatgagtatggtgcagtacatgtaaattaagtgtgtgtacactgtaacgtgctatttttatcattgaaacatttataaactacaataataaagcccttaatgtgagggtttgtaatggtgcttattaagaccaaagacttgttaaacatctacaccaaatggtagtggattctctgagactggcccacttgtgcactgaggttggggaggacaaggaagcagcctcagccaccagaggatcaccaccgcatcctccatcacacagcatgtgcaatacgccaaaatcactctcagtcattcctgtcaacaaggggttaatgtcatgatgtcacaataaagtgatcctcccctccctccccattttagtttacaccttggttttatgttcttgtgtggattaaggctggaggggcctttctggaggtgaaataaagtctcctgggtttaaagtatccctgctttgttatctgtggcttctgtgtatgtgtgatgtaagcaccaggagaagaaatcacatcttcagttagtcccttcacggtggtaccgattgctgatgtttgttatctgactttcctaggaaaacacttagattacagcatcatttctaaaatgtgacctagttagtcctggggcttttaaactcccagatttaagaactcccagatataaaatccagtcattctcttcgagctgaacttcatgctccttcccctcacgtacacagcattggcaaggtgttccatcctt

SEQ ID NO: 27111 - DNA, 1195 bp, Mus musculus
tggagaagagctttctctgttaagcttttaaagatggtttggaagagtaaattgtgactaccaatacaagaatctaattaaagaatggggggaaatacattccaagatgtctttaattcgaactgaaaggctattgaaaaaaaaaaaaactttccaaattctttttggtgatttatacacatcagttatcaaaagctaaacttgaggtttaagattgagtattcatctaccccacagagtagtccaagtaaatgtgggtataaatgtagacgtgttatcatgtgtgctgtcatcttaaaatgtgttacaaacgcttctggaattttgactgcacatgtatcttcatgatttataaagctactgtgacctctaatttggaaaaacccattgtaatgattttcaaagtaaagaaagaaacaggatgtctttttaaggttttaagttcatgcattaaataaaatgtatgggaaagcccaaagacaaactttctaatacccttttatactagggaaatttcacttgctgttttgtaccttgacagatggtaagactataactgaagttcatattgtaagaactgtttgctaaaattgtcaagtaaaaagaaatcctgcctgtatctataaaaagatgtatgagctattatgttgtcaaactttgaaggttttaaacctacccagaagtccacctgggtgtctgatattcatattctctctctccctctctgcctctttcttcccctccccctcccttcttctaattatgcttgttaatctttatgcaccagcattggcgataataaattttcttgttctgtgtattttgctttgtctaatagctttgcatacatgctttatacaggattctcttgctgtgtgtgccacgcctccatcttgatatttaaacatccaatgcttacaatgtaaaccagtatcaaatatccaaaaaatgggttctgggatgttaaagcaaatttcagagttttctggaagacccgctctgtgaatgtgatgctatggcttaattgatgctgaagttccttgagaagaaaatgatgtattagcacgatgtccctgctgatgccaccatggcaaccaatacagaacagagctgagacagtaggataactcctgggtttctgtggggttggttggttggttttacagtcatcttgtttgagaggctgccgaggtgg

SEQ ID NO: 27112 - DNA, 1301 bp, Mus musculus
caagttttataatgctggcatttaatgcggagagatgaaattcttggctgatgttatagttttttttgtgaaagtttaggagcattgctctataaaaaatgtcagtcaactttattagtgtgctaaaggggacagtagtataccatccaatctaaactgttgtccagtatagacgttaggcactaagtatctgacacttcaattagacgtaaggaatgaagccaacagtgaggtggatctacacgggctgagtcttactgtctgcatagttaagaagccttaacttgtttaaagagatgacggaggttgcgaatgcctgacagtcttgaaaggagattgagaacttttcctactttgcatgatcgtgtttcctgcttggtgtcagtgactcagagagctcttgatctcgagttagtggcttttcaaagtttcttgtattttcttctcggctgggtgcaaatcatcattttagatttttgacgcttgtaccaaaagagaagttgaggagatcttgaaaacaccagtaacttaattttgccgtcggtttagaagttgagtgggtgcccgctcacaggcagtggctttctggccacaaatccaagggaccacagactttatacagggaaatggtcacttctagaggacagttcacagtttatcaaagggagtgccaccaccctgagaatattcctaagtatgcatcagtgtgtgtataatctatttcctctgggtaaacttggtcgggtggggggtatttgtgtatattgagtcccaggctctagaggaggtacaaggaataggaaagttttatttttggaagtaggtatgactctcttcggagttgtagacataaatctaatggtaagaataagtttattggcataagaagtaaaaactgaattttttttttttttttagtgtgtagatgtagttttactggcaataattagtgttagatttctatcagcacatgaattgcagtataaatcacaccccctgcttagccccctctggtaagcctctttgttgtaatgattactccttgaagactggtgttcataatagcttaattttttggttttaatctttgtaaatgatgtaatataatttcttttgactaaacatggaaaaataacgtgtgttatacattgaagtttttacaggctttgactggaatcatttttgaagagacggtattttatatgcttccagtgtttggaaaagaattagtcaaaaggaattcaaataatttaaatattgacaaattaatatccaaataacatacttgtgtgattttttta

SEQ ID NO: 27113 - DNA, 1114 bp, Mus musculus
tttttaattcccaacagactttttgtagctcttacctattttgttatgatctctgactttgcttttaacagtgtccaagtctatttccaagaattgtttagaaaatcagacttgtttcaacttactttgtaatgaaaaataatgactaaagagagaagaccaaattctaaagaaaaacaaacaaaaaacccaactaatgcctatttaaggttattttacaaattaaagatggaggttcgaaggaccagtgtttgcttgcatgcccatctccttcaggggtatctgtctgagttacagaagctgcttgtgagaagagctggaggtagcatcggggactaaaggccgaggccgcaagaccgaacagtgctgtgcattaagattggatgcagatttaatttggtccatgacgtttacttcagaagtactggtcattgtgaaagttgggatggactcaaacggcttgcaggagtcaggcgagcactggagcgtcaacatgctgatcttgtttgtgggaaggggtagatgtctgtaagatcaaacagtccccgtggtgggacttgccaagttctgtctaacccttgcctctgacctcaggaatgctcttgtacatagcatgtaaagttaggcaagctctgacaggccaacagtgcaggttgtaccagcgcagcccttccctgcagactcccagaagcaaggctgccctgccctgctctgctgctagcatttgctttaggaccctcctggtttgaggtgtggatctatttgcatatttaaacgcatccacattggaagtcatttcatctgttttttaatcatacatttctataccttcctcagagcaagaaccacagttagaggaagtcagggaaaggaattttgcagcctgtgacatgttcagggaaggcttggaagaagctggagaagaaaacagaaggttattctaattgtgctgatccttcagatggtttatcatatacaaatatatgcagaaattaattgtattcataattatttatctctgtccttctctaggaatgtgtgtgtttgcttgggagaatcctaatgagctgttttgtttgctctccagtcaccccctggattctgttgtcttcac

SEQ ID NO: 27114 - DNA, 1881 bp, Mus musculus
tcccaagaaaacagctttaatctccagaagaaaaccaaaacaccatgggatttatgctgtgttgacatcttgccctaaacatacaacaccatagtaatttgtcatgggcgacatgatcagagagaagatttttgtcatgattttaaaaacactgacacgctactgttggttaaatttaaacatgttgtacctgcagaaattctctcacaaataacctgcaataacttgaaattcatacccttttgaacacttccttttctcatgtataaatgaaaatgtttgctgcattttgcaaaatgtcaattctccaaaactgtgtccgtctatttctgttcttgcagctagtaaaggttagacaacccgaattctcagtggcacgctgtcacctagggctcaagcagcaaaataaacagtgcagctcagaaattatagcttggttcttgatgtgtttttattacattcggggttgctcttttgtttttagtatcttaaagatttcaggttattttgtcttcagttaagatttaaaagcctgagagcaaatagttaaagctagttatttgcttccaggtttttaaaattaaagttcattgatagagtaagaactcctttctaacagagcccttacatagaacttgttttgacagtgatactttaaaggattatgatgcttttttttttaaagactggtaatttctttttaaaagaatacgtgttaactctcagaatgtcactttagacaaatatgccagaatctagacagcgaagtgaatgttacctgcatagtgaccatgctgaaaggttattttctaatgccagcaacaaccattgcccgaagcctcttgggtttgctcttggagaattacagtcaaagttaatttaggtaactcactactaacttcatgtttacaccttgtttgaaaagattattaacaagcttgtctgtctttaccctaatttggccccaaataccagtttcaaagaaatacctaaatttagataatgtagaaagtatgcatctggctttgaaagcaatccccaaataattttcaagtattttgtgcagtggcagaatagttaggaatgaactatggccttcgatggtggcagaactcagcccatttgaatgtattgagttttggatgtatttgtttctttttttaagttcacattatcatatagtgtcaaaagaaggaactaagattaacataatgtgcttggttttctattgctcattattatgtaaacagttgagtggcagtgcagaaggaagactgtgtgactgaagagtggcaaccaagaattttgatcattaaatcagattttataaacagtagaaagagcatggacttaaaacaaggcatgcttatttggttttgtcaaaattttacgaaaatatgtgatatatatttatactaaaactatataatccttagatttaggaaagcagtcagttaatgtctagcagaataaagcagtattaaatacagatatacgttgaaaattgtagaaaaccgaaagaagacgaaagacaaaatgtcaatggtagggaataaaaagtttaagatattataaaagtatgtgtattttcttctattctacataaatcatttgtgaaaagtgtgttcacgttttttacaggagtgatatcaattaggatttatttttccaatacaatttggagaccctttgttacccaaataaaaatgacaagtttctgtgcctgtatcaggtgtgtgcatgtgataatcagaactcaaagggtctcagctgtgtgtcccatccagctcctgttaagtgctggttctgtgctgtcttaagtttgtagaaggcagtgtgcttgttaccctgtgggaaactaggccaactgcgtagtgaaac

SEQ ID NO: 27115 - DNA, 1140 bp, Mus musculus
cctaagctgctcatcacaaacacaatctttctgtcttcccatttcattcacccatatgacaatagggtcacaggacttgaatacttatgcctgggtctttacagtcatgttggtagcttgagcttagttcttcatgcttgtacagcaaacagtcttaccctgtccccacttcccagcctctgaaagtgcaaggtttgatatgggaaaatcatttctatcttactgtatactttattccttctctgttttagtttattttgttttccctgagacatggtttctctgtgtaaccctggctgtcctgaaacttactctgtagaccaggccggcctcaaagttagtgatctgcttgcttctgcctggaattaaaggcatgcaccaccaccaccaggcttcttctccaattttaaaataagatcaatgttgatggttgttttattttatataaaaatagagtaagttttatcctaacagtattcacttattacagtgctgtatgtgaatttctttttctcatttattatctctctcctactacacaggagtactctgaagacagtaactctgagcccaatgtggatttggaaaatcagtactataattccaaagcactgaaagaagatgacccaaaagcagcattaagcagcttccaaaaggtgcttcaaagtctgtttccagctgattttatgtcttgaagtgtatttggttttaataatgctgtatatgttactgttctcattgctacaaccaagtaatctgaccaaacccaggacgtgagtattttcttcagatcactgctgaggacgcagaagtccttcccagcagagaagctgtattgaccagagcatgttcctaggattctttccgtctcaggggacagtgtggtggttgagtgagagtagcctcgtgggctcatatgtttagatgcttggtccccagatggtgaagctcttcttgagcagaattaagtggtgtggcctcggtagaagaggtgtgtcactggggtgaacttttgaggtttcaaaagcccatgccattcacggtgtctgtgtctctgtctctctttctttctttttttttttttttttttttttttttttttttttttggttttttggtttttggtttttcgagacaggg

SEQ ID NO: 27116 - DNA, 1100 bp, Mus musculus
ttattttgggcaattaggggaaatgaagaccaaagaaaggccagtttataaacttggctatgacagaagtgtaaagagagagcatctttcacaaaatctccagacctccctgtaattgtgcaacaatggggataatagagtccttcccagggaggtcccacactgaccttggagaactgaaagggaaattggagggaaatcagatgacctgtgttagctcactctgacgatgacacagccctgcacgcaactagcagtggaaatgtaattagccacttggcgcctgtggcttgccaggctcatgccacacccagtcagaaagtttaaacccagcggctagagtggatcacaaatggcatgtggaacctgcctggcccggccaggagcttgtactcagtggctgaggcacttcctgcagacatcagcatttgctcactaattgccaacccccccttccagagcctgttttaatttaaagaaaaagcatcaagggcccagtgaatggaagagacaaacactgttcagtcttggacataagaggaagggggatgatttatgtagaaatgaggaataagttgttttggcttggaagggggaggggaatttgaatccaaccggaaacagtatggatgggatctgccagcttcctggaatttcccaatgtgctttttttctccttggatggtcaccagtaccggtttacatttctgtgagcaaagagattagtgatgatctaaaaaataatttgattgcttgtgatacatgttgcagacagaaactgggaggaatagtgactgctagggttgaagggagagtctttatatagagtggttggagaaggcttctctgaggaagcacactggaacagaagacctgaagggacaagcagacaggcacagcagggaaggaaggaaggagaggtgaagcttgagcggtgtggatatgacactctgcaccgaccccattagctgcgggaaggactcacactgcatgcaccctgtccgctgtggggaggattccagaagagaaaggggctcaatggatgtgacagttgactctgtcctagatatggttgaaggaaggttctagaccattgcaac

SEQ ID NO: 27117 - DNA, 1196 bp, Mus musculus
cgaagcccagggggccccgaaccggcccgcctggcttcctagagcggccatgatgcctgctggggaggggcctactagagtcgctgcctctgccacctcccccctcccctgagttggcccagtgcagccagctgtgagagctgccttcctttccctgccccacgtgttttctctctctgccccaccctaagctgctaaccatcaagggagacatctgcccacttaaaacttctgtcccaggtaaggagcacctacgagtctaatcaccaggctctgacaaatgggtatagaggtctagaaaaaggtgagcttagactgtaaggaagagcaaagctccagcagactcaggagagacagtgaaaatagagatgaaggagattagagaggtctgagatgagagagataccccgaatgagaaatatttagagtagaaccagtaagtaagaggcagagaaggcgtattatgagagaagagagaggcgagaggcagtagaaagagaaaacaggagggatcatagacaagaaagaaatttgactagaaacttggccacagtggtgagaaagaaagaaaagacaggatctagacaggaaacctgggcaacagaagaccgagcctcagctaaaaaggctcagctgtgtcagactcaagttatctatttgagatacacccttcaaggtggaaaacagtggctaaaagaagccagaaaaaaaactgtaactacaccaaggcaagtaagagaattcttgggtaccgctggtttctgcaggctctggatacctgggttggcaactttagctgcctgttgtaccccctaaccaaggaaggggaagtgtttgtgtggaccccagatcaccagaaagcctttagagaaatgaaaaaggccctactgatggtcagcctttgcctgacctaaccaagcctttcactctttatgtggaagagagatcaggggttgccagaggagtccttactcagactttgggactttgaaaaaggccagtggcttacctatccaagaagttagaccctgttgccagcgggtggttttcttgcctgaaagctattattgccatagctctgcttgtcaaggatgctgataagctcactctgggacaggaaataactgtagtggcaccccacactcttgaaagcattatccgaaaacccctgactgatggatgacggccaatgctcc

SEQ ID NO: 27118 - DNA, 1823 bp, Mus musculus
tttcctgaaactaaatatgttctagtacatcttatacttccccttcctaaccctgcagccaattccttctccaagggaccctgtactgctgcttctacagactctagacacctgggttggtgaccttagctgctcgttgtaccccctaaccaaggaaggggaagtgtttgtgtggaccccagatcaccaaaaagccttaaaaaaaaaggccctactaacggccagcctttgcctaacctaaccaagcctttcactctttatgtggaaaagagatcaagaaaagccagaggagtccttactcagactttgggactttaaaaaaggccagtggcttacctatccaagaagttacaccctgttgtcagtgggtggttttcttgcctgaaagctattgctgccataacactgcttgtcaaggatgctgataagctcactctgggacagcaaagaactgtagtggcacctcacactcttaaaagcattatctgaaagccccctgactgatggatgacgaccaacgctcctgtgacacatcagaactttttgttgactgaacgagtgaccttcgcttcattccacctgctgtcccactgtgtgagaccgcacctactcatcactgcgctgacattctggcagaagaaatgatctgaaggatcagatcagccttagcctgagggcagtagcctcacggttaaaggtaagcagaaggcagggacagcagtatggtggtgaacagaaagcaagtgatctaggccagcagcctccctaaagagacgttggcccagaaagctgaacttgtgactttaagacaagctctataaatggcaaaagaaaagtctacactgacagcagatatgcttttgccactgtatagagcaatatacagacaaagagggctgttgacctctgcagagaaagacctaagatgctgtggctaaaaaaaaaaaaaaaaaaatcaggtggcagatctaaccgccaaacaggtggcccaaggagcaatgatcctggcagtcaaggagcctaaagattattatgacatcagagagaccagctttagatacaccactgagcactatcaagttatggacattgcttgacccacctgggggccaagaaattcaaaggtgtggttaggtcctttgactacaatgttacaggactctctgacttggcagaagaaatagtcaaaagctgcaaggcctgtgctatgatgaggtaaaatttctaaaagaaatcttcccaaggtaatggacctgcctttgttgcccaggtaaatcagggactggccaagatattggagaatgattagaagttacattgtgcatgcaggccccaaagctcaggacaggtagaaaaaatgaatagaaccattaagggacccttaccaaattaacagcggagaccggcactaatgattagatagctctcctaccctttatgctcttcagggatagaaacacccctggacagtttagactgacccccctataaattattctacagggggcccccctccactggtaaaaatagcctctgtacatagtgctgacatgctgctttcccagcctttgttctctaggctcaaggtgctccagtgagtgagacagcgagcgaaaaagcagctccagaaggcctactcaagagaagaagacctgctacattagacgtctccaccagaaaaccttgagactctggtagaaaggcccttatcttgtactcttgaccaccctactttctacctttatgggaccccttttgattttgcttctgcttttaattataggtccatgtgtgttaaataggcaagtcacctttattagaac

SEQ ID NO: 27119 - DNA, 1664 bp, Mus musculus
tttaaaactgaattctgtaaatagttttttggttgtttctttttttactgttataaatgagttgatgaagcttgttgctgagatccagaggccacagcaagccactgttacggggaattctttttgatttcggtgcagacttaatttctcagaaacagaagttgtaagcgtggttgttgtctcttagaccaaatgtggaacaattatggtggactgatgctggaaatactctgcaaagagatttcgcccaggaacttttgtacagcttttaagttgtctcaggttctctgaaaacattttttaggaagcagaaattttatatttgttctatttcagctacatgcaagtagatttacatgtatatgaagcaaatatttttaaaattttgtttgtacatatcctgcatgttttatgattttaaaacacatcccttgcttaggtatgtctcctacaaagacgatgaaagttaccaagaaaaaaaccaaggcaccactgtcgttctgccggtcgttgagagtgagtaagctcacagctggttttactggcgaccatgacaatgttcttggagcagcttgcaagagaactcgaatctgcaaaatatatgcttttctgacaattgtattgtgaggatgtgagactgctctgtgccttccttccatcatgacttccacacgagcactttgaggcgctggattttaagataatgtttttggcaaactcagtgcatttgggtttctgaaatatttcatggacttactcccctcccctaagaaattaaattattcttatggaaattgcttttgtatgcagagcaggaccttttgtactcagtgaggctatgggtgtgtctaacgtaactttcggtattccctgtgaacgcgctccgggcctgtgctgcgactctctcacaatattgtcaattctgaaatgtatggacatttgacagactattccattctcttttgtaaaatgtaacttcaagctctttattattttgttttgttctattgctttatgaaaacgtttgcccctcccccaccccaggctcctctagcttatctgtataaagaaccagttacctgcgagactgtactctggcctcattttctattttacaattaaataactttccacatagctccatgcagactcatgttttgactgcacattcataaaatgtggaccatagagctcggtggtggagcaggtccttgacgctttgagactctggctcaaatcctgtcgcacatacaatctgagacacgttctgccatatgaaaccaattagactcctcatgccttgaaaagccccagagtggctgcctggaaatgtgctggttcgtgcctggggtaactttacaggagttagtgagggtaagaaagggtccgtgtcccagcctctctcacttgcctttctggggaccacaaggagcctctatagcagtgctcctcagcctccctgaggctgcaactctagtccagtgcatgttgtagtgaggaactgtattaaaatgtttttgttgctacttcagaacggatataaactgtaatgtaaatttctgatattcaggatgtcggatctgggacccctggggaagagtatatgaccctccagtggttgtgacccacaggttgagaacctctgctctatgacaaccatttta

SEQ ID NO: 27120 - DNA, 1136 bp, Mus musculus
attggacccggaggggtggtgaacctcacaggtctggtatctaaggcggcaggtattgagatgcatgtaggatagctgttaggatgttaagctagtaggtattcatcagtttaaggaaggactgttggagaatgagggtaaaagtaccatccactcttttggtctcctagttatttacaaaccatttgctaagataaacgaatctaaagaaaggcagtcttacatggtgtaaaacagtgttacctttcccaaactgatgctctccgatgttggttaacactttagtgagattggaagatgagtggggtacatgggattaaacaccctaaaatgtgaattctgttttcttctctcctagatgaaacaggagtatctgctgttcagtttggaaactcctctacgtcagtattagctacgttagctgccttagctgaagcttctgccccattgtccaattcttcagaaactccaggttagagaacaagggaggtttctgcattgactctttcactctgtcgagccctctgggcttagtacttttgaatcctgtttaagaaatctgttcagagtttattgcagtgttttgttttcttcaagagtcctacttataatttgtgttcacctctgcagttctttcagaattggttggctacacttcctgttacttgcttatatcttattaattaaagttactatttctgatttttatttttgtgtcagccaccagaaagaggcaaagtgctgatcccatccttaataaggaaactgcaggtcgcagtgctcacagaggctgaaagataacagggctagagtggaatgaaatggtgctcacctcacgtgaggtagggtggagcacccactgctcagcatcccctgagtgtggtcgtgtgtcccaccttgccagatcatgggtttacaagggcaagagcaatccaatatgaacggagcggaaggtcaggtcaggaggtatgctcctgaggtacataccaggtaaagaaataacagcctcagatttagttggtacatgctcagtttgtttttttgaggtatggggttttcgtgggctacctccttgggtaagagcatttgttctgcaaacacgaggacctgagtttgaagcctcagcacccatataa

SEQ ID NO: 27121 - DNA, 1197 bp, Mus musculus
actgtttgctatttagcagctgggatctacatatccgaaaacactacataatatccttctagaattaatgtataatttatatttatacatgattttataatatttaattctctaacattccggttgagttagagtatttcatgatgctaatgtctctgggtcacttggagaaggttgaaagagctttttcccattgggcagtagccgagcctgtctagacaagaggaagctagaggacccgtctcaggccacctctagaaccaagaactcaggagaagtggaaggcatgcattcatgggaggggcctggaacatagtcacttagcctaattgctagatgtcttagggaactcagcagtttagcctgtggcttgtgggcaggattttatctggtatagctgctccagctgtctaccatcttcatgtggacccagcttgagatgctctgcataaggcatcttgttctttctttctcaggccaccatgttaccctaaagctgagatttcgaggctttctgcttctcagattcggaacctcaatcctgtatttggaggatcaggaccagctcttactggacttcgtaatttgggaaatacttgttacatgaactcaatcttgcagtgcctgtgtaatgctccacatctggctgattatttcaaccgaaactgctaccaggatgatatcaacaggtaaaggaacatttcattctgcagtacactctcgagaaggatatttaactgtagtgcctggatgcagtactcgagttttgtatggttacaacatgccagactaggtaatcatttttgtttatttgtttatataaaagaattttgattttttaaaaaatgtgtgtatcttgagtgtggctatgtacaaactagagcacacacacaagcgtgaagatcagaagacagcttgcaggaactggctctccagggtagactccaggattacatcatgtcatcagctcgcacgtgagcgctttacctgctgagcttgctttgccatcggtgtagagacagggttcaggattagcatgtcagtatctcatcagggtcctgtgctctcccagcaaacagcaggagacccaggggcccagggtgagcccttcattgtgcccttttcagtaggcatagcctcttcaggtcattttcattttttgttttttcattgtatctttaggagtatgtgcatgtg

SEQ ID NO: 27122 - DNA, 1304 bp, Mus musculus
aacgcggcaaggcagcgctggtttaagtttgatgaccatgaagtttctgatatctctgtgtcttctgtgaggtcatcagcagcttatatcctcttttatacttccctgggaccacgcataactgatgtagccacatagagaggagtaggctgtcggcttattgacgtctccaaattgcagcctcacatctaatgcttacaaagataatggatcgctgcagctgctatgtagagggattccagaacactggggctgtgctactagcaccatataattcaggccagtgctgtttatcaaaagaaagaaagaaagaaaacagcctgacatttaacaactatcatagtacgcattccttacaggagtcatttatttcaaaacaactttttgagtctgccccaaagttaaaataattcattagtcagacatttattattctcttggtaccaaaccatcataacctccattttcctattcactgctccagcctcttctcatttctagccccagctcagtgcactctgaatgctctagaatgacctagctcagataggaatgtatatgtacatatttattgcactgttgcacatcagactgctggacacagtttaacatagccttctgtgaaagcctagaaaggattttttctttttcttttggcctcttctaggtagctgcaatgctttcttaaggaaatgacagggcaaaactatttttctgttggcttccggctgtatttgtgcactaaatctttattctaaacaaatggaaactttaattttttaaaaataattcatttacatctacattaaaatcttaatgaagaaaaaaatcatttgaaaccttgtacatgttttgtcttctttttttcttaagtgttttgagacagtctcactgtgtgtcctctcctggttgtcctggagctcacagatccgcctgcctcttgctttgtgtgttttacacacactattccctacactcactctggatttagtttcttattctgcaaattaggacttgattccactctctcctcgtgtggtattcagatctcaagagctggaagtcagttacgtaatcccagatgcctgtcagaattctgtagaagaatcaaggaagagtcctgagtggctgtgtttgtaacatgcacactgcactacggagcctgctggtctttctagagcagagacgtaagggagccctacccttccgtaaggacagcaacggggactgcacagtgggtcttagaggggctgctgggtttgttggtttgtttgtttggaggcttccatactgtgctgtttaga

SEQ ID NO: 27123 - DNA, 1877 bp, Mus musculus
atagccattttcacagtattaaccataacagtgtaatgagcatggggcgttttccatctgtggtacaagactgtgacccttttgtcacaagcgtgacaaaagcagggccttgtgcactgtgttcattaatgtactgtaaacttacataactacaaaattgtacacaccttatacgctgtctgttgctatattatcatatttacatggtttactgatttgtactccttatgtaataattaaatagaaatgtatggttattaagtttgtaatttaagaaaattgatctgacacattgaaaattaatgtagaaaatgttcttaattcttcatttgtaagtttctgactttttttcttttttttccttttctctgctgggattgtgaacatagatttgaagaggaatgactacacgcctgataaaattatatttcctcaggatgagtcatcagatttgaatcttcaatctggaaattccaccaaagaatcagaagcaacaaattctgttcgtctgatgttatagtgctgagtcattggtttttgcctacacttcacaaaagtgtaactgtcagttttcctttcgggggaattgatgatataggaagatgtgtgcaaaatgagcttgctggccccacacatagtctagaggtaatgttctcattgaaaaacgcctggaggctgcagatgacagctggaaagtgctagctggcagagagtcagtgctctcggctggtgaagggcgggaaccttgctgctgagagtggtggttctctcacctggtgcaggaccattaaccaaagtcaagtcttcagatttgattggctgctcagtcacagccattcagctaaggaaactaaattgcgcagctttttaaatggctgaagtcttcctcagtttgtgctctatgataatgatgttagctctcaactaggtgtttgtggccacgggagaactactccttacaattttgcttcacaggcatgttacaaagcctgcactgaaaaccgtttgtcttccctctctccctccctcttttccctgtagtattgaggatcaaacccagggcctcatgaagaccattttctaagagacattttatttaagaatcaactatagagtctatgtttatggatacagccagtttttgttaaacaaaacctgaattgtgcaaaagggttttttaacatttatcaatgttaagtaaaagaaagccatgataaataagaattaactcactgttcaatgggtgtttcctgtgaggaaggttacagttgtaacagcctgcagttgcatacatctccaaagatttacagacttagtgtatcaaatcagagtgtcatgtgagctctcacattgaaaattctataggaatgtgtcaatgtgaattctatttctggtacttaagaaatcagttgttggattatccttatacagtatagggagatcacaatacaactttatgccaataaaatctaacttaattgcccagatatttttgcatatttagcaacaagaaaagcttatcatttgactcaagttttatgctttctctttcttttcatttcctaggtactaattttaatttttatttggaaggagcagtgtaaagcttacttgtattcaatagtgtatctcatagatacagacaaggccgcagagataagctgttaaatagtgtttaatgttgatgtggagagaaaggtgtattacttaaaaatactataccatatacgttttgtatatcattaaatctttaaaagaaattaaatttattcttgtttacagatgtttaatgagtttactcattctgaaatgcatggtttgtctgtgtgtgtctgtgtgtgtgtctgtgtggcatgcaatgggggtcagaaaacaac

SEQ ID NO: 27124 - DNA, 1225 bp, Mus musculus
tctgaagacagtgacagtgtattcacatataataaataaatcttaaaaagaaaagaaaagtgtttgtctttaaacgtaagctcaataatattaaactgttttttaagtttgtaatatacatgcataaaatgtggtggtgtgcacacagacagcaaaggagaaccttgtgtcctgctctgttacttggtgccttgtatctcactgcacctggaaccaggctggtaactagcaaagcccagagctccaagtagcactgggttaccgttgcccacgtgctggtctcctcaggtttgcccaacaaacattttatccagttagccacatccccttcaaaggaagtgtatttctatttttatcacgtatcatttttttgtaaaattgcaactttcgggttatcttttattttttgtttaatattaaccatagataattacaaattcttactattctttgtcatttttttaaagttatgatttgatcttaaactgttcatttgtgttacaggcgagcctgtcacagtgtaccgtctggaggagagttctcccagtatactgaataacagcatgtcttcatggtctcagctaggcctctgtgccaaaattgagtttttaagtaaagaggaaatgggaggtggtttacgaagagcagtcaaagtgctgtgtacctggtcagagcacgatatcctgaagtcagggcatctctatatcattaagtcatttcttcctgaggtgataaacacatggtcaagcatttataaagaagatacggttctacatctctgtctcagagtaagtgtcagtgaacttgactgtaagctgtgatctgagtttcctattttaactttggaagtgtgaataaatgaaatcttacatattgataaggcccttcccttttctataggaaatacaacaacagagagcagcacaaaagctcacatttgcctttaatcagatgaaacccaaatccataccatattctccaaggtaaatgtttgcctttggtggggacttcgtattacttagatggcagtctttattggcactcattgttgctggtgtgtatttgctatgcattgctacttatcaattagaatctcacttacaatccccggtgatatctgacttttttgtaaggttccttgaagttttcctgttgtactgccattcagcagggcagtggtttgctgtagaagagtgcatgactggtgaatttagaaaatacaaca

SEQ ID NO: 27125 - DNA, 1187 bp, Mus musculus
cctcaataaatacatacataaaattgagctgtggagaaggggatctgggttatccttacatcccagctcacttctcacattagaacacctaaaatagtaagatggtcattgtccccaaacccaaagggcaagaaacagaacagtttttcttttcaagtggcaggtgtgaaggtgcagtttatgccaagatggagagtggggcctcatgtgtttcttcccaggtgtttggagcacagtggctactgttttactcagtgaaatgtgatgtgtgatagtagtttttttattatctttcttttttcccgataggataggttatgaaagaaatttaagattattatttgagaatgtcttagcataaatttatgctgtacaggtgctttttaaagtctgatttatttacaattttaggtcttgcttctccatttaagcccgttttggatacaaattactattattcaggtcagtgatactgaaaacaaaatttactgatctttgaagtattagagatttcatcatttgtctctcatttcaatgcagctgtggaaagaaataacctgatgaggttgtcacagagtattcccttcgttcctgtacctccacgaggtaaatcccaaaatcataaagtaaactgtaactggtctctagtcttaacttagaagaatgtgggtcaggacagactgaggaggattcctgtgaagaaatgccagctttgtgcaccttcttagcctttgagaagcacagagtgtgctaaaatatgggatagaaactattctttgttctatttcaaaacctggaaagttgacattatggggtgtgtgagacaggcggctctaaccagaagtctaacattttcctcgagactgttttacttgcttcctaaaagtttatcctcacgagctagcaagatgagccagtcagtaagaagatgagttctttctcaaaaccttgtaaagaagccaggtgcaccagtaagtgttgtcatttccagcactctggccagccggcctagcctaattactgggcttcaggccagttacagaccctgctccaaaaactaatatggctggctggctggctgctgaggaattgtaaatagtctagctatgacgttcccttccagcccctgcctgcttatgtgtgtctgtactccccacacagtggtcattacatgctacagtttgaaa

SEQ ID NO: 27126 - DNA, 1091 bp, Mus musculus
taggttttttttttttttgagacagggtttctctgtgtaaccctggctgtcctggaactcactctgtagaccaggttggcctcgaactcagaaatctgcctgcctctgcctcccgagtgctgggattaaaggcgtgcaccaccactcctggctgaacctatgatttcttaagaatatttcctaaggatatcagtgtatgtgtttgtgtggactgtgtttatggtgttttcatgtgtgtgagggtgcatatgcacacatgcagtggacagaagtggcattggatgtcttctgtcaaccttcatcttattcctgtagacaggggctctcacacactagccatttttacttgccttctttcccttcctttactctctcttttgagtcttttctcttttgcccccccccccccatattttagttttgagataattttagattcatatggagctgtaagaaataatcaaaaggttacatttccattcttatcttttaagctttatctcatatgttcttagacttttagctgtggtgtactcacaaaggcctttgcatggtggtacatgtctctagtccagcttctgtgacgtatgcagagtatagatatgtgagaataggtagaggaaagtctgcatttccattgctagttgacaaaatatgagaattggcacttactggagttaagtcttccaagtttgcccttgtaactatagttttggttttgccttatatttgcaaggcataggctgtatttttgagccattgatgtagtttattacagagacaatctccttcataaggcttacgcaatgatagcatttttcttaatgctattattagcagtaaatggaaactcaaatattttacttattacctattacaacattagaaacactctttaggataaattttgttgtaggaattaaattctcttgtttcttaacacatttctttttctttccttttttaaaaacaggtggccaatatgttctacattgtagtgataatggctcttgtattgcttagttttggtgttcccagaaaagcaatactttatccacatgaagaaccatcttggtctcttgctaaagata

SEQ ID NO: 27127 - DNA, 1224 bp, Mus musculus
aagagcagtcagtgcttttaaccacagagccatctctccagcccaagactttcaatagtatcacagctctcaagggactgagactagaggcatccttgggttatacatataagactttcaaaaataataaaaagcaaaagctagacatactaagccacaaattaatcctaacatatcttgtcagaaagaaagtcaattagtaaaaacacaaaggcttatcttcggttaatacacacattctagttgcttgaacagatttcagtgaataaatgttgagagctcttgttataggtgctcggttttttataaatatactggttattgctaacattcagtgttcaaggtaaagccaactgtttcacatgtaattttattttaatttttttatttaaaataaataagattaatttactgagttttctcatatttactaattaaacttttacccttttcaggaattgggcaaggagttcctgtggtggctttgatatttgaaggcgggccaaatgtcatccttacagtactggagtaccttcaggaaagccccccagttccagttgttgtgtgtgaagggacaggcagagctgcagatttactagcctatatccacaaacagacagaggaaggagggtgagtgtagagtatagcagattttacaatatagagtgttatagcttatccagtactgaattcctttgtttatttaatgagaatgaaaatctcagattcaataaaatgctttgttcagacttaaggcagtagcttgtctcatacattattggaatgaaagtataatcatcttttttattttttttttattcaaaagattattttgataaaaacatacctttaacctgatagtttaatttcacataatggtttctacaagtaaatactcatataaagtttttgttgtagggttatttgtacaagataaagacatagaaaatctaccaaaagaggtctaaataagttatggcatgtctatatagtggaatgattgcagctgaggaaggatgggacctgtgtattaagtcactctactcccctgtggcagcacaaacacacacacacatacacagaggcatgatgcagagtagtgtagctcttatgcaaggatgacatgcaaacttgtgaagcattccttcctttttttaaaaaaagatttatttacttattttatgcatatgagtgtactgtagctgtgcagatggttatgagcct

SEQ ID NO: 27128 - DNA, 1132 bp, Mus musculus
tacaaagtgagttccaggaaagccagggctacacagagaaaccctgtctcgaaaaaaagaaaaaaaaaaaaaaagtggccttcaaaaataaaattttcagcctggcagtggtggtgtatgcctttgggaggcagaggcagacagatttctgagttcgaggccagcctggtctacaaagtgagttccaggacagccaaggctacacagagaaaccctgtcttgaaaaacaaaacaaaacaaaacaaaacaaaacaaaaacaaaaagtatgttacaagaagcaaattctacatcagtttgccagtactagacttaccggtgtgataggattcagtttacatgggttttggacaattgcaatgggtttgatactgtgtggttttgttcatctgtttggttatcttacagtttttataagcttggctttggatcctatagccttagaatctttttttaaacaaatttcataaattgtaatgttagaaactactgggtttttctaatggtaattaaattttgtataaacaggtgtggcaaaacatgttggtgatgccctcaaagaacatgcttccagatcatctcgaaaaatttgcactattggaatagctccatggggagtgatagaaaacagaaatgatcttgttgggagagatgtaagaaaggttttttttttttctaatgtcttaaatttgagcttgtatataaacagaaataatgctagccaatttgatagactgtatcatactttcacactaagtttaaaacaaaatttccagtggtcttttttgatcctttggaatatgtctatcaatataaatgcttataatggtgttggtccttttgttttctgtctttaatgtagaatgttattttaacatgttttccatattagtatttgtaattgattttcttttcttttctttcttttgtttttgtttttcaagacagcgtttgtctgtgtaactgttgctgttcccaaggccaggctagccttgaactcagagatcgaactggtcattatgttagggattaatcttgtcaccaagagtaggaatcaaaggctagtgttttattcaaatagattgaagatgtgaaccggtttatgaatattcatcaggagcctattaaagtaaa

SEQ ID NO: 27129 - DNA, 1183 bp, Mus musculus
aagtgaggtctggtaaccacaagtgttctgaagtccatctcttttctcacctctaaaatgagtgagtgctccactcatttaaccactttgctagcttgcaacctgaaaaaaaaatttccttctgcagggcgtggtggcgcacgcctttgatcccagcactcgggaggcagaggcaggcggatttctgagtttggggccagcctggtctacagagtgagttccaggacagccagagctacacagagaaaccctgcctcaaaaacaaaacaaaacaaaacaaacaaacaaagaaacaaatacacacagatatatttccgtctgattctttgcaaaatctcaggtgtttttctagaaattagaggtgaaattatcttcaagttttgttttgtttttttaaaatttctctaagaaagtaccaggtgacaagtcatcgcagaagcgcaggcttttgtgtttctgtatcaacattgcacaggagacgtgagcagtccagtcgttcatgttaaggcaaagccagcttcttcaaagtaaaacaggcatactgaaaaatgggttagacctttgatatttgaactaaagttcacattaaatgcttttttgtttaattgttaacttttgctgagtagatgacaaagaagcgggactgcttcgttcttctaggtaccggatggggtcttttgtttacagtaaagctatctggcaagagataagtgccatttacaattctaactgtactttcacatcaactgtcaataaaatgcctgccaaaatacagctgttttagtaacatctgcattcccattcaagtcgcgatattcaaaagcaacagttacaattttatggagactattaaagaaaattattctttttaaaaccacattgaaataagatgatatctcaaaataatttggttttattaatttgtagctaatatcttaatttcctaatctaaacttttgctccagaaaaccatgaacacatctacaaatctgaattccaacttattggaaacattttctattttacccagccatcatattgtcttctatatggtctggagtgtatcagtgttagagtacttgcctaccatgttcaaagtgccttccccagcactgccaatgaaacaacttactaagtagctataaataacaaaagaatttcctagagtctctctaccctcact

SEQ ID NO: 27130 - DNA, 1137 bp, Mus musculus
tgtatttatgcctgtctgagtttaaagttaataatgtgtttgggatttttttgtttgttttgttttatgagacagggtttctcgggagcctagttgtcctggaactgtctctgtagacctggctggcctcgaactcacagagatctatctgtctgcctctgcctcctaagttcaggaacaaggtgtgcactacctcagtgctaggacttaaaggtgtgtgccaccatgcccagatgtgtttgggatctttacactgaattcctgagacatgtctagtgttcaggagccatctgtggctggtggccatcagtcttggaaagcaccgccaacagagggttttgttgaggcagttattatgcctcattggttttatgtaaaaatcatgacaagattaatattacaaccactctttgttaatgtttgacacttttttgtatcaagggaacattttttatctatagcacaaattaacttttttttctttttcaggattttgtgttgtggcaaaaacattaaagtgagcctgattttcctttccgggctgtgcatctcagttgctgttgtgtgggctgtatttcgaaatgaggataggtatgacaactctaacttactttaaatttaggatgcatagcgttatatcttttcctgaatcatattcattatgattattgtggatttttttgtttttattcaagaacatattttaaaacaaggtaatttgttttttcatgaataagttatttaacaggatctctgtatgagccccgttgctaacttataactctagccttaaatttgcagtgactctgtctcctgaggttacaggcgtaggccaccaaacccagcaaatgaacagatcttaggctaggagtttgagctcatgcagggaaggaaatcaggttctgccttagacacctagacttaaaatatgcatagtgatgctgtgtggcagtgttgtgtcttataacttcaacagatggtatccccactgatttccacaatgggcttttaaatgaaaaaagctgtcatgttttcatttctgttactgcaatctgataccctgccaaaaagcaatggcaaggtgaaagggttcattttagctcacagttccgggtgccagtcttttatagctgaaaa

SEQ ID NO: 27131 - DNA, 1177 bp, Mus musculus
ccattccataggtgaccccaggaggaggttttctcatttctgacaactgcattatcatttcttttttgtttgttttcaagtcagggtttctctatggaactctggctgtcctggaacttactctgtagactaggctgacctcaaattcgagagatctgcctgcctctgcctcttgagtgctgggattaaaggtgtacactactgccaccaccaagcacattattgtttcttagagaaaagctttcctgtcatttaaaggctattgtagttcaaacaatatcattaatatagtatggtggtacatgattgtcatctcagatgcttagtaggctgaggcaagaggtttacttgaacccataaaaagtttgaggttggcctgggccccccatctcaaaacaaaaagtagagcataaggtatgagagtggcagctgtctgttgtgtctctgtttcctcctagcaagtgagaggtgaacatgtgatcgactgttcttatgtctccctcccctgcctgtcaggtatacatggactggtatgagaagtttcaggacaggctcaacaagaaggtagtgctgctgacgggggagaccagcacagatctgaagctcctgggcaaaggcaacatcatcatcagtacccctgagaagtgggacatcctctctcggaggtggaagcagcgcaagaacgtccagaacattaacctctttgtggtggatgaggtccaccttattgggggcgagaatggggtatgcttggctttgtagcacagagaaggactgggccgcacccagtttgtgttgggcctgaaactagggactagggtcttcacaaagatttcagcctattgccttatttcaaaagagtgatctgagtttatatattatgttgcttagtgaaggtgtctctttgaggcaggggaactataattgggactgccagaggtggttcactaagggaagctcaggtagagggtgggagcctgggcctgaagtgactctttctcttcttcccagcctgtcttggaagtgatctgctcccggatgcgctacatctcctcccagattgagcggcccattcgcattgtggcacttagctcctcactctccaatgccaaggatgtggctcactggctgggctgcagtgccacctccaccttcaacttccatcctaatgtgcgcc

SEQ ID NO: 27132 - DNA, 1131 bp, Mus musculus
ttattgctctatctatgtgacttggcgtggcccgttcctgctttgtattatatgatactgttttctaaatgtttcttctgtttggctattctgtctattatacaaaggccattcattccctgatggattgcccttgaccctttattaccacgttgctatttattctttttaatgccttccctcacccattccacaggattttttcaaaaaatttttgtatgagccattgccagtagagtctcacctggaccactgtatgcatgaccacttcaatgctgagattgtcaccaagaccattgagaacaagcaggatgctgtggactacctcacctggacctttctgtatcgcagaatgacacagaaccccaattactacaacctgcagggtcagtgaactgaagagcacacactgccctccagggttttcatagccctagcgaggcagtgtcctgagacttccctcttatatctccacagggatatcccatcgtcatctgtctgaccacctgtcagagctggtggagcagaccctcagtgacctggagcagtccaaatgcatcagtattgaggacgagatggatgtggcccctctgaacctgggcatgattgctgcctactattacataaactacaccaccattggtgaggaccagtggcacatggcttctggagcctgttgggatgagatgtgctagccagcatttgtcagagagacgatagtgcaggacggcagtgcagcccaggcagttgatccttgttattgttattctgctcctcacagtgcccttcccccacgttggctcttctcacattcccttattttcttttcttttcttttttttttttttttttttttgagacagggtttctctgtgtagccctggctgtcctgttgctcactctgtagaccaggctggcctcgaactcagaaatccgcctgcctctgcctcccaagtgctgggattaaaggtgtgcaccaacacacccgctttttttttttttttttttttttaagatttatttatttttatttatatgagtacactgttgctgtcttcagacacaccagaagagggtatcagatggttgttgagccatcatgtggttgccgggaattgaactcaggacctc

SEQ ID NO: 27133 - DNA, 1197 bp, Mus musculus
aagactaagccctttggggacatctttagactgcttaaaaactcttaaggtgggctggcgagatggttcagtggttaggaacactggctgttgttcttccagggattctgagttcaatttccagcaaccacatggtagctcataaccatcttctgcatgtaggtgtacatgcagacagagcactcccacatcaaaaacaaaaaacctcttcaagtgttccggcaacttttagagttttaatctgagttctgttactctatttcatagccactctcacacttgcctgtggccatcaagttttacatgctcaagttgttggttttggtccttgtagaaacgtgaagagggctggtgggttgtgattggagacgccaagtccaacagcctcatctccatcaagaggctgaccctgcagcagaaagccaaggtgagtgtatgcaattgccctgcacctatccctggggctgcatagggctgcttcctcccaggtccccactaacctgatttctgcctgttctctctaggtgaagctagactttgtggccccagccacaggtggccacaactataccctgtacttcatgagtgacgcatacatgggctgtgaccaggagtataagttcagtgtggatgtgaaagaagctgagacagacagtgattcagattgagtctgaggcactgaacctgaaaacaggaatgtggactaggtctgtcaggctgaggtctggccattcaggccgctgctgtccccagtccacatccagttactgtcccactttggaccttagttcaaggtctgggtcttgtattttcaagtgtcatgtcaagcatgaactgtacaatatttggaggcatggttttctagttccttgagtcagacattctaataaataatttgaaaaaactatatgtccttaacagtgatactaaattttctttaatcaaaggtcatggccaaaaaaaaaaaaaaaaaccctttttggcactgaccttttctatggagtacataaagaacaaacttgccctctgattgggttagtctgaaggacaaaacaatggtacatagcttctcttcaaagttactctcatagcaggagctgactcccatcttggccagagaacaaaaggtagaggctcctcttgatctatgttgtaaaattctgtagccttccctcccaggaggcagcactggggtgg

SEQ ID NO: 27134 - DNA, 1222 bp, Mus musculus
gccaactgactgcatgtgccggcagggaaaatgactcaatctcatctatagctggagtaaacaggtgggagtaggaggaagagcctttgtagatgtggtggatcttagttaggaaagcttttctaagacacttagctgaggcctgaggtttaggaagaaactaggccagggactgttgaacacctgtaatttgccaggttggagaggcaggagtcatcggctaccccctgacatgtatgtttctctctcaggtgtcagctgacaggggccttggctacagcttgtggagatgatgccatccgagtgtttgaggaagacccaggctcagacccacagcagcccaccttctctctgacagcccatcttcgtcaggcccattcccaggatgtcaactgtgtggcttggaatcccaaggagccagggctcctggcctcttgtagtgatgatggggaggtagccttctgggagtatcaccagcctgcaggtctctgagctatagcttgacttgggagtcttgattcccacagaaaacgtcctaagacttctagtcgtcaagaagacctgaagcatccttgaccttcattttgctcaggactattcactgtttcccttccttgaggaagccattggagagagccacagaacagcagtatattgtattaaagttttgcttgatttagggcatggtgttacattttgggggtaaaatatatttataatcaatatatatgaataagagcttttgaaattgtgatctttatagaaataatccatctgtgctccacttcctgttttataagtaaggtcatttatcatttcttataacttgactattgggaataagctccactgtcccaattctagagtagttcttgcatttaaaacatgcaagctagctgtagtgttttcctagcactcaatcggcaaagacgggctatactttgctgcatagtaagtttgaagccagcctgggatgagacccttttctcaaaaaacaaagacattcaaaactagaggaatttccccccaaaaatgtaagtttgttcatagtaaaaggacacctctgcttttccttagaaaccctcatatgcctcttgagacattatgctgtgggcttctgaggatatgaaaagaaatgaactcctataaagaggaggttttcagtgagggacacaaaacatctacaaagtgagttccaagacagctaaggagacagtgacca

SEQ ID NO: 27135 - DNA, 1934 bp, Mus musculus
caagagactgctcctatcaaggaccccagtgaaggggactgagtgccctagcctcttcaccgtttaatgtgagtggttttgaaagaaaaaaaacaaaaccaagcaatagcagccatactctttctaaaatagggataaggctgttgttgttcagaaatgtagcccatcccttatggctctgcaatattttggaccatagcaccctctgagcctatagtcacgccttcccagtttccaacagtatgcaggctttctgtcctggctccttcttccaggcagctgtgactccctggggcctttctgtggaactagggccacatggcccccacggggctgagaactatggcctgctggctggccagcgtggtgctcctcagaactatggcactgagatgtaacctggcctcagttcagggacaggggccaagcagggcaggaccctccactctccacataggtactccacccagaggcccaccaggttggtgtcagggccctgtcagatgtgcaggcctggctgtagccttcagagtcaatgtggccctagactgtgacttggggctacagcttgctgcatgcccctcttccgttttggaatgtatgctggtcttgtggtgtgctactgggctgttactctaggtattctgtttgccttgggtccagtttttttttttttttgaggggggggggtgttgggtttttttttccctggtgatctggggcacaaggtaggtaagacctgagaggcctgcagcatggatccaggtaggcaagctgttcttgttccgttatgagcatctctggagtaatagtctagtgttagctgaagggaagatgaattccaatctctgccctcccataagacaacaaacattttgaacaagaatggagaatgaatacagttgttgacctgtgactacaagaagactgtcaactcgccattctttggccagaaagaatggtgaatatgtggacaaatgcctatgcagatgaagaccaagcgtgcccacaagaaggcatctgcttggagttccctgctgcaatgccaaagtgtgccccagtatgactctcccattttcccagacccctctcggaggcaagaaaggctgccaggtgatgcctgagcacaaagtcaaggagctaaattaaggctacctttctgtgaagttctgagctcatcattggcaggttgctgaagtgtgtagccagctctctctaacatggcacctgagggagcaggccagaagatcaggcaccaaacatgcatgccaaagtgaatgaggacttgatcctgcggaccgttccttgtgatttggaacccactttttactagcttcctgttcctgggcctttcttcctcctctccctgccattctgacactgatagtttgtcatataaaggtccctggttgtgtttcccccccaaggggaaaaattaaaatgcaaaacaaaaaccaggaactacaaatgagaacgcaaatgccagtggctgcctgtcatttctgttacaattctccagatgtttgttttcttcctcccagagaagcagaaggcattcactgacgaagcttgtaatatgaaacaaagtgaggagggacttggcatgcgcctgcaccacgcacatttggatccttgggagcctcccactcctggcacctttcacagaggaagttctcaaagcccacagctagatatagtaggttgctctgcccaaaatctcaactacagaccttgagccgcctctctctgcatgtcctgattagctgcagaagagctgtttcagacctctgctggtacttactgggagaagcctgaaaataaaaatgagcaagacctgcagagtcgctcttccaggcagttgatgggtgataccttgatggctacccacagtcttagttcattcattctcaacccatacactggaccccaagtgt

SEQ ID NO: 27136 - DNA, 1209 bp, Mus musculus
ggacctctctcctaggattctttccttagctcaggagatggactcagccacaaggaaacagtgaaatgagtagtctcctggacactttgggaaatcctgtgctagaaatgggaggctggatctaaccagaaaaattaccaacgtcttccaggtgggaagctgatggagctgggttggtgtgcgagagcatttcagggaggggctgttccctctgagggaatggcagtagtggtcaggttgtagtgtgaagtgggacgctgaaggcctatctgatgtttctcaaagcaatgggaagccataggagggtgcttaaaaaaagggatccagttttatggtgatgtggaggggctattgatattaagtaaagtacctgaaagtgtgagaattggggggacaggtatacatcatgtggaggaccctcaggcctggtaggaggagagaatgatcactgccaggtgctggggtagagagcccaggaacatccttgtcatatgcactagaagatgggatcaaccttgtagctcaagtgtgcctcaaaagagagctatgttgggtaaggacagcagagagaggcctctgaaaacacaaagtggctgttgtatctgggggaaaggtcattctctctagatgactccaaaatctccagctggtttcttactcagaggtacctgggccaggacagtatggaatacaaggttctgtggggagaaaaaaaagaactaataaactttatagcctttgttttcaaatagcctgtagtcttcctgtgcctttcttgtgggagtaccattgtaactagctcaggcaggacatacagagaagatgactccaatctgggtgaatctgcttgaaatgagacaaactctttggggatgtcagttccttatgagatgtggggaaatgcttgacttcaatcctggaataggggctctttcttcagaagagattcagagtggactggcttgtccgttatactgagtgggaaaacccaagcctggtgaggtgccttttccaaagatgctgaaggggaggtagaggccatctctgcccaatcatgtgtctgaggggttagttaataaaagaacttccaaagaggctgtttccggtctactctttacatggctctctcagagtgcaggacctgtaggtgtcttcatttgaactatcttgtcctgactatccctaaaaaatggcaacccgcttcctaag

SEQ ID NO: 27137 - DNA, 1185 bp, Mus musculus
ggaccacccgtactctctcggagccggaacccagaaccgcgtccctgccgcagatacttaggagggctcggggaatcagggcaagggggaccaaggaagctgcccctgggctgtgataggtgcggggtcacgtagggcgtgcaccgcccctcccgggactgtagagaacagggaaacaggccgggcctctcaggacaacggaacgccaccgcacctgaccgtgcctctcctccggaccgggtgagacgtccctaaatggctgcaccgccgggtccgagggtcactctccaggcgcccttgacaggccctcccgccacgccacctagcttgctaccaggcagcccggagcaagggcggaggagcactttggcttagccaatgagcgcccagggttctgagatgcgcccaatcagagtgcgggcaggacaaacaggttaggttgcgcgcactcggcgcgagaggcggacacaggcgcacgggaccgcttctgctgtggcctgggacggccaccgctttgcttcccgcgccctggccgcgggggccccgcgagttcccgccgtacacacagacgggcgggctgtcgggaccgagagggcctcgtgcaacggcgctctcctcggaagccacgctacctcagccgcttctgcaaaaaggcatgagggacggctcctggcttctggagcgtgaggtggcctcggggtcaacccgttaaggggactgcgcggacggcccggcctgccttcccccagcccttcctctccggggccccgcggcaggcgcgggaatccacagaggccgacatgttcccgaggaggccaccggccaccctggccgcctggctggcgggcgcgcggggcgggggcctgctgtccgcgctggccaatcagtgccgcttcgtgacgggcctgcgcgtgcggcgagcgcagcagatcgcgcagctctacggccgcctgtattccgagagctcgcgctgcgccctgctcggacgcttctggcgccggctgcgaggccgccccggccatgcctctgttttgatggcggcgctctccggtgttttcgtatgggacgaggagagaatccaggaggaggagttgcagaggtgagcctcttggctgcagttggcgtccctgttccgtagagaagggtgggcctgggcgggaggttggtgggcaccttggggcttga

SEQ ID NO: 27138 - DNA, 2344 bp, Mus musculus
tgggtcaggctgacaaaaaaaaaactaaccagtacaacagcttgactagattctgctgtgtcccaataggcatgccagatttcttggagaagctgcacatggccactctgaaagccaagaacatggagatcaaagtgaaagactacatctcggctaagcctctggaaatgagcagtgaggccaaggccactgctccatcccctgagcggaagaatgagggtagctgtggccctgctcggattgagtatgcttaaaggcctttgggataaggaaagacaggcacttccagccctgccttgctccttcagctctgctgcaggacagggacaagtcacacatgttagaagacatctgctgtaactgtcagtgcaagaggatttagaactggagttagatttcatctggagccctattgctctttaccaaacagaggagcatgacattgtggagttgtcatgttctcaggccagcagttgtgaaatccagtatcgtgcttacctactctggaacaacctctcatgttaggccagaaggagatgactcctatccgcctcctacgagaagcttccttgctgacattccaaatgccactgttggttatgcaatgctctggatatccttcagttctgtaggtcacttggagagtggttggcccctggttctcactaagtggttttttggagtgctcttggtaacagtcctgtggtggtgtgaacaattctggctgagctaagtgccttgtcctcaccttgctttatctttaaagacatgaagtttgtaccaagggatccttccccctgcagactaccatgacattgactcatctggtggaggcagctttcatcttaactggcctttctgttttcatgggctgtgctcactgtgtcatggcctctgccgtagccttagcccatttgctgggagcaccagagacaaactcctctagacggtagcttcctaaatgatgtcatcagtgttttgataggatcagtggaagtgtgcacaaaacatcttacttaaaaatagatttctttttaacccttgtagcaaatggagttaggtggttgagcacaactcttcccttagtcttgtttgttttggcactattttcccactgcagattgactgcgctgtcctggaaggataaaggtggtagatggtggttgtgccatttcctcagagttttcaaaactgtaagctgacatatgggccaacagatggagtcttgcccaataccagtatggtagggatggggcttttgtgacctcttggtcttgtaaagcatttctctccagagctgacatagaagtaatagacacagtttggataagatcacaaccagatgctaggtgcctggccttgctggtttctttatggtgaatagggatcaagtttcacatccttctctctcttttcctggaattaatagagctgacattttcttttcttgcttgctacctaccctgttgtggtgttaaaagagactaaacccaaggtgaacataatctttaaccttctgttgcctattcagttctgtgccaaggaaacagctaactccccagtgtttctgtcttttcggttgttggcagagcagagagtggcattgagaagccccagtgtctctcagtgagcatttttcccttcttcccaggacctgacaggaaaagaaaaaatctttatttgactttaacatctgtagctgactgcctgtgaatctgtgagcaagtgtaagcatgtatgtgtgcgtgtgtgtgctggggctcagggactgagcagttacgtttaccctttgttttgtgatttgactctgtacagttaacttgtgtcatcataatgagtttgctcttaactgtgacatttttatcaaaggtgtgaataaatgcataaagattggtacagaagagtgttcatttctggccacatggtgggaaactgtgctccttgtcatcctgatcacagacttggcatgggtcgtccgtcagtgggccttgttctttcttggcagacaatgggtgacacaaagatgacatcttgcatagactgtgacccctaagtggctagcttgggagctaacggtaaaatgcctgtctctactcaagtatcttgatctgctaactcatagctagaataagaaaaaggtttagttaagggaatctatgtcagatcttctatagacaggcttcgtagaagatgttttcttaggattttattgctgtgaagagacatcatgaccaaggcaactcttataaaggcaaacatttaattgggggtagcttacagtttcagagatttaatctattatcatcatggtgagaagcatggcaatgtgtaggcagatatgtga

SEQ ID NO: 27139 - DNA, 1201 bp, Mus musculus
ctagaagcatgggttgttttctcactcagcatccctctgggaggcaagtgggcacgtggatgcctcagtggaatggtctggaatcctggcctcgacctcactaaggtcctgatcactggcattcaacctcgcagagagcagggtgacaattgcctgccgcctacttgcagcagggagatgaaaggctttgcagagagctttgagctccatgggggaaatgcgctagagagccagcaaatgtgattatctggtgatataaaaatccctttcctgtgtgtttaccactgtgagccttcctgtagacttttgttctgtgcttggggtgtgtgaattcctaccccaaactggaagtgggttgaggtgcacggagtcactctttcaaattccggaatttctttgagaatgctttcttgtgcctgaaaaggtttgagttattatgctgttgtcagcttctccatctgttacctgtaacagagttttcagtggcttggccccaaccccattaggggataagctctttgtcattgagcaggcaaatcgttttcctaagctaaaaatacttacatcaaggaagcagtctgagatgagatcctcaggtggggtgctggggctagaacaggcagccaaggccctgtggactcctgggatagccaccctctgtggggtcccagacaactctctgaaccccatgtaacacctttggagacagaaggagaccccagctcagaaggatgtctcattagctgttacgaaccctcatggcgatacagctgtgcactagggtgtctctacctcctggttgtctccccgacttagaaattgctccccagagtgactggggatgcatctgggccttccccacaagcagcctgacttcagctttgggcaatagacctcttagcctcagggaaggggtagattgagccatgcaggctacaagctacacaggctattagcccagggtgggtttatcagattttgaaggtgctaagggagttttctcgggtaaagacaaagatgggtcctaaattgaattcctcttggagaggatgaatagcttggtccttggttggttgctgtttcgaggctaggacattgatttggggtgtggctgaggggttggtttggttttttgtttttgttttttgtttgtttgtttgtttttgagacagggtttctctgtgtgaccctggttactctg

SEQ ID NO: 27140 - DNA, 1105 bp, Mus musculus
ggatgactgagtggaggagcaacatgtgcctacagaaggcacgtgctgactggatgtccctctggcatgctgttggggtggctctggctcacaatgcacgtgatcctgctctcccctgctagggtagagtttgggttgtgtgtctgggaacatctgtcaaatgatggaggagagatcaaggctctctaggcccctcccatcagcaccttcccctctctccccagccagtgtggccagctccgcagtgatgagcacagccatcatggccacactgcttttgctgaagcaccaaaaggtaaggcactgcatggtgggtggggccagggaagggccaggcgtggcactctgctcaggcctgttttgcctccagggtgtggtcctgtcacagctcctgggagaattctcctggctgacagaggagacactgctccgaggttttgatgtgggcttctcagggcagctgcggtgcctggcccaacatacactgagcctattgagggcacatgtggttctgctgcgtgtccaccaaggggacttggtggtggtacctcggcctggcccaggcctcacacacctggcacgcttgagtatggaattgctgccaaccttcctgagtgaggctgtgggtggtgagtcagtgggtcagcaggattgggatgcatgtgcaggggagagggagggagcaggtccccttcttatgccatcttctctgccagcctgtgcagtgcgggggttgctggcaggcagagtaccacctgaggggccctgggagctgcagggcatagagctactgagtcagaatgaactgtaccgccagatcctactgctgctgcacctgctacctcaagacctactgctgccccaggtcagaccccctcctgtagctcagcaggaccttgggccttgtccttatgacctcctgtgatagtgactttggcctccaaacacctctggtcaggattctgccagcagccccttccccccatgggtgttctctgaagggcattggtgcttctcttcctacagccctgccagtcttcctactgctactgtcaggaagtgctagaccggctcatccagtgtggactcctagttgctgaggagg

SEQ ID NO: 27141 - DNA, 1158 bp, Mus musculus
gtgactcactgaggacgccaccctcacaacagtgtccaccaggatagcgtctcccttgtagacacatcccgtagagctctgcctttgtctttcaaggcacaacagtctgctgaattagagtcttctcaagctctgaggaaactaggtgtgggcattctttctattcttaaggctgatctaaaatgtccgggtgtctgcagtctcttgatgtgtttggacatgttctcagaccactccttgtgggagaaagggacctgactctagagcaaagtgagaggcaatggctatctctggctgccacactccaggtgagggatgtctgacctgaaagaagaaagtataattaggaaggacatggagaatctgcaaagtcagacgttctgctaggagatctcactttgtccccacactttaaagaactgagtgacatcctagagatggagtcccagatgcagggatgtcctgccagccaccaggagattcaggattctagcctcagtcagctttcactagctgatgttttattctccaacaaagtaggagattgagacctacaactaaattagatttggggatttttctatgttggttctcaggatggaacccagggggtttgcatgctgggtaagcactcttctaccagatcccatcatcagccccaaattggatctcactggcacattcagaaggactttggttatcccagccatactggtatctgaattcaccatttgcccacttaacacagccaaaatttcatactaaaacacaagcaaaagattagggggagttatttttaaaaattaaaatataaactaagagattatacaaagtttattataatgtttaacaaaatctgtaactgagtgctgactggggtagtcttatactttcaacaaagctgaaccctaacattacactaaccagcagctcaacacgagtgagcatcacttttagacaagaagaagaaagagatgaaggaaggaagaaaagaggcaaggaagggtgactaagaggaattgcccaaggtttctcaatgtttcagatttttaatcattaaaagaaactttcatacaatctttgtctcactcttttgttgttgatgctgctgctgctgctgttgctgctgcaaattactataactaaaaaacccagatt

SEQ ID NO: 27142 - DNA, 1123 bp, Mus musculus
atttaggtcttagtcaatcttttctcaaacaggcaagtctacacaaaggcttgccggtctactggccttgcacacgccttgcttgtagcttgtgctatggccctggagcagttgagacctgccttccctgactctccccccccccaccccccatcacacccctacttcccaggtattaaggttagggctcaagaaaaatgtacataaaaccaactttgagaataaatttgtggatgaaatcagctgctgggtttggggagtcagaatgggaaagatgcatacgctggatccttcagaaatttacagggcagggctcagtgttcctgtgtggagcttcaaagaccaacctcctaaggaccagaggcatcctcggcctttagaaaagacttcggcaaaggagattggaacatcacaaccgtaggtttaccttcagactcctcccagaaaccctggggaatcagcagctgctctgctgttgtaggggccgggaaaggacccagatggaggtctacactcatttctgtgtactctcaactcttcctagggaccctctgggcagggccagcctgcaggactcatcttggaagggtgtttgcatttgggggtctttgggttttttccaaggacagaccttgtgaaaagaaaaacaggaagtctaatgagcactctccagagttagctgggctctgtcttatcaccatctgggcatgtctcagccctttgccaagggcccctgcacgccaagggtccttacccgacagtccaaccatctaaataattaccaaaagggacttaactaaatctaactttcctccgtttgtgtgtggtggggggtggggatgggggcctgaagtatgttggagtggggctgggacatgggtgtgtgtgtgcaggcttagcttcgccactgtttaccggttactaattgccccaatgtcttgaaaagccaccatttctctctctcttttctttttctttagcctgggaactgtctgtgatcttcaccattgagtatttgctgaatgacctcgagcaaataaaagattgttggacagtgggaagtgtggagtctatcgctttgttattgttggcccatgcatctggccatctttttgttgattct

SEQ ID NO: 27143 - DNA, 1158 bp, Mus musculus
atcctaatgacctgcgtataatcccagcaacccatgtaaaaaggcagatatggtagtacacatctctaatcccagccctcatatagtgagagaggcagagaactagaaattgcctggaagcttgtgagccaactggactgtaatatgcaatgcagagaattgagaccctggcctaatgaagtaagagggaaccaaccagctcctaaaaggtgccctgatttatacatgtgtgcacgcaaataataatttaaaaaataaatacaagcttttggtgtgtccatgtttaagaagctacaagaagccatcatagaggctagtctttttgttgttgttgctatactttgaaaagttctaatgacttgattagtaatattcaggacttcctaattttgtttttgtttatatatttttgttttgcatgaaaggttagtctagtatgtgttggacaaaatacttgctcccagcaggaattgaggggtccaagtctttcatccatcagtcatcagacctcagagagttcaggagagaaaccacaggaagaaccttctgttcctcttatggtaaatgctgttaacagcactttgctgttcccagctgccaacctgccagctcttcctgttcctgtaagtggccagtcattgacagactccaggtaagctaagtgtcctgggaatggtagagatgtgagtggcatgtatcatttcttttcatgatctgcaatgtcatgttgtgtaagagatgaacaaacggttctggtttttaatttgtatgttaaaaaaaaattaaatattggctccaaatctttcagactaacttccaagcttattttacagcatttgtttacctttttacttttttattgcattaaaaactttcagcagtctctctgtaccttcagaatatatagctgaaaatggaaagtacctttgtttactggctttaactgcatacttgtaggcattattaatgcacagaaagctaattgacatgtgttctgatgtttcctctgtcttccttcagaagctatttggtataagtgtcaatgattctttgtgccaagatctatctccacactattccccaatttagaaggatttttctaggcttcaaaaaatagtaataccaaatttcttatttgttttacatttttgtctttgg

SEQ ID NO: 27144 - DNA, 1162 bp, Mus musculus
gacctaaacttcttctctatcctgaaatgtccctagacattggaggagggaaacccggcctaaactcatgcattgcattaaggaacactctggcctggtaactcctctgtctttggagaggcgacatttgtgcaggattcaggtagtttgagtctaaagactccctgtatttcttttacctggtgcttgcatgggtcgagggttaggttttatgctcccgtaggaacggtgcagaggcaagctgtctttggttccttccaccgagaggtgtgcggtggctgccgctgacagtgtagagccaaggtggcgtcttcagtgtagaagtattcgttttctccagaatggactccagagcttaagacagaggagatgaagccgcactagggagaggctgtgccttctgaaagattttcctgattgttatgcccaggcgctgtaccaagccttctaaaccttggtgtctactctgcagtgtggtacccatctggaagacttaggaggatggcaggggctcttcggggagctgttcagggagtcagtgggtccagagagaagctcagagggactggttgttggaaggtcatggagaaagcaggcagtttgcgtttagctgagtgctgaagggtcattcatatcttgcagcctatgtttgaagcctcttcgtcttcgtgtcagggatgcgtcaatgttcgacaaccccatttcacactcatctcccatagctgtcatcagggccgtctccatggctcagctgccgctcttatacccatacctgggccaggtgacatcaagtgcatgtcacatagtcctcagcacctgtgggcactaattatgaaagatgtccacttgtgggtattttggccatgggctaggttgctgggaaaggcctgtcagccctttagggtagctgttgaggggatgtcctccaagtgcccagcctaaagctaagacccctgcagatgggacagtgagtgagtggaaaccctttgtctgatcacaagaaacaccttttggtttacactgcttccttcccccttggtctgggacatgtgcaggcatgagttgattggagtgtacacagacaacaggagaacccagcatcagataaagtggagctaaaacgggggtccacacagatcagctttgataaaacacaagtttc

SEQ ID NO: 27145 - DNA, 1181 bp, Mus musculus
aattttcttctgcttgaaacatccttccaggaagaaggggaggggagccccaagacactaaataagcatcacgtgtcttaggaagctgaagcttaagagtcacaaagtgctttcccaaggttgtagaaatggaactgtatgggaacaggacagaatgggacagattgacttaccagcagagctccccagagaaggcctggctgcctgggagaggagattccctgactagtcaagcagcctgcaagttgtgtagagttgttacccatgatgatgtgggctttggtgatagagctgctttttgagtcgttcctgctcctggaacaacacaaacccctattcctacaagtgaccccaataaactcattatattgctaaagttggactttagcaatgtcattactttggtatgccagtgattctctggtgtttgggtgcatgtgtgtatagagaaaagctcctgtgtactgtatggatgcagtacctgtcagttaaaagctgatttgcctgaagctgaagcaggaaatagaaggtgggacatctgataggcagtaaggattctaggctggggaggagcaaatccacagaaagaagatggttgcatgcaggttcttatttgggagcttggggtcaggaggaaaacttggtttttaacagatgacactaaacatataaggcaagaaatccaaaccttttaatttcatactaaacagataaagtcctggatggaaagtgaataaacaatttgaggccagtgagcatgcagtgtctcagaccaaaagagcctgcctgcctgcctgctgccactgaaggagcaaagagcctgcctgctgccactgaaggagcagaggagcacttttaaggttacaacacttgctgaactttggcacacttttctgtggaccaaagaagacctctccctcactgtagctggtggggacctgcctgggaaacacctgcaacgggccacagggacaggggtcagtcatccagatcatgcagccagaattcagaggtttaaaaaacagccctcagtgaaaccctgatggcataaggcagggtttaccccgcctttccagagtggggaaaggtcacaacgtgtatctgtgcaaatacacaagagctccggactgctgggacccagagacagaaacagattcgcccatccctgtaaacctaggagc

SEQ ID NO: 27146 - DNA, 1097 bp, Mus musculus
gcattgatgggcctttttgtccgctggacggacaccaagaagagattctagtgctcttgagtcaaccatgttaggatcttcagataaactatttactagtctccaaaccatgctgtgggaaccagtcttaccatgcacagcagccagcctcctgggaaccacgtcaagggaagagcccgagaaacacctgaagtgttctagtatcaaaagtggcacttgtgactacaagggaaggctgattgcccaggacgttgcttcacctctgatacatgtggaatggagacacaaggggcagctgctttgagtgtaggtactgtccagcagacagacaatggagcggtgtgctcagattctttccccaaagggtactgacgtctgtccttctctctcttggtctaacgtgggagtgaaggaaaactgagctcagatgccaaacttcatctacactactccatcatagttctcaacattctggactctaccctatctgctacacccaaccctgctctggtctgctgctgcctgcatggattctgagtccaagagaatcagaaacaactcaatgtgaactggaaggtcttagcgttggcagagcttctgaacatgttgaaagcagccaagcacctttgcaatcacatgggcttttgtgtgttttcttgatgtttctcccattgacttagtcatcactattggtcacattatatagagcatcttgtttaagcttttgtctttttagctaaaaacacttctttggtaaacttttaatactgcaatctttttcctttagaatattttggagtgtacttttaagacttttttttttcttgaaacatatcagaattttaaaacaggaacttcataataaatttagtaagatttataagcacctgccagatcttaattcctgttcttttatactccaatgtttagctgagctgctagcttttctctgtagctaatgatgtctcaagtctctgccttgtgaggctgcagaccacgtgttttaagaactcaagacatgttgggtcatggtgtcatggtcacctcataggtggagggtgggtacctaaaacaaggacagaagccagcagctagtg

SEQ ID NO: 27147 - DNA, 1247 bp, Mus musculus
caccctagaaatgactgcggcacagaatcctgatggcagcaaagtgaaggcagcatttctgttttgtaaccaatggaactcagttgcatacgcctcactgtgcttaaaattcatgttgaaaataagacagataacgctggtgctgtccacgtgtcatatgatgtataaaacatcagttaaaactcacattttgtaaataaagatttttggtttgttttcaaaactattgattgctttggacttcagagaatagatggacaggctgagtttttaagccttataactttagtggttcaggttctgtactcagaagtgcaaggcttaaaaagccacattgtgaaaatggactttgtgctctccgggagcgtttgtgtgttgtctgttacgtaacagttatcttctctacaatgagtctgtgcttcccgtggtggatggatgacagacagcgttactgccagcagttttctactgaatgaagaattgctcagcatggagtactggactgtgcccaagccctgaccttggtgcagctgtgtaggctgcagctctttggaggtaatcgaggttaaagggcactctaagggggagtctatttggtagaatcgatgtcctgctcagaagaggaaaaagagatgattttctctctgtaccatgtgagaactcatagcacaactgctcacaaactaagaagattcccttgtgaggaaccagtcagacagtcttgagctttagcacctagaagtattaagcgataaactcctgatgcttgtctgtggtacttggtgtttgcagcctgtgcaggctgtgcatgacacctgctcaaaatactgaaaatacagaattaccgccacagaggagtgttaagaaatacggaaatcagtctatctgaactaaaggtctggaaagtgcttttgcattctgagtttcaggacagctcatgatgccccatgtaacaggaacaacactcctttcactccatttcaacctgtgctcacagctttctctcagaccagtgtgactgtaaacaagtaggaactgcagaatgcctactcgttaacttcccgcttgtttctgaaaaagccaatagaaattgctgcgttgggatttggtaatgtccatctgcctgcctgcctgcctgcagcaaggtaatttgtggctgaccttgagggcaaaatgtgctttccttcacttttagattagggattgcaattaaatggcagttggtgatgaacattcaatttgtatca

SEQ ID NO: 27148 - DNA, 1273 bp, Mus musculus
tataatatttgtggattgtcatattcctattccttcatgttactgaatgccagaatgtcctttaaaaaaaccaaacacctagtgagtatacagtcattctatagacattacttctcttataacaaggagactccaagatttatatcctggttagtggcatagacctatgcagtagtttttataatgtgaaagaaaattagaaatatcaaaatgcccaagtatttaagttatggcatgtccatatgctcttatatattggatgtagcaagatcatgctgtataaggctttttgtgtttgaaaattgcttataagttattaaaagggttaacatgtatagtagtgtctgattttcatctatgaatatatatatgtatatacagaagaatttctgagtgtgatgtctataggaataatatcagttttcagtaggtggtgggttgtatatgttagattgctccatagtgttctttttttttttaagatttagtttgaaaattacaaacatttgtaatcttccaagttcagatatttttggtaatgaagaaagttgtaacactaggtaatgtttttgtgtcaccagacagggccctataacctcgaaacctgcctgagtgtggtcctgctgtctcttgccatggtgatggctggctctgggaacctgaaggtgttgcagctctgtcgctttctgcacatgaagactggtggagagatgaactatggcttccacttggcccaccacatggccctgggccttctctttttgggaggaggaaggtgatgagtgtttttgttctgtttgtcctttaataaaagagttcatgagggagagctatatatgttatctgtttgttcactttgaaaactacgtgtttctcttgttggcttttttcatacaaatgttggaatttgtcatttttcatagtaaataactggatagaacattaattagaactgtattgatggcacctgcagcagaggattgaagtcccttgccatgttgtcttcagctattgctatacttatgtggtgccttgtgtggtagagattatgagcaagatgggtatttcttaatatagtttgtggcagttgcttctttttattaatttggaattatgaatacttaaaggttggggctgtagctaaatcataaagcatttgcctatcatggacagggcccaacctgtgaattcttggtgcaccaataaaaattaaaagagccaacaaggatgggtaaagaaatgttagctgtaagaattctttagtattttgtga

SEQ ID NO: 27149 - DNA, 1147 bp, Mus musculus
atgatagtgtttttagctgggtcactgtacatacatcctgtcttagggaagcaccatcatgtatgtgggctcttggtggaagtgctgtgtggtgcatgttatagttttagattagttattccatgggaaccaaagtaagtttttatctggatatatatcactttttttgtttttttccagactaacactgttgcctccatactaaacgaatcaaaaaactagcatttgtaggaactagacacttacatagactcgggtgataatgagatcaggatcgcgtggccaacctgggcaacatggtgctgtcccagtgcagaagagctcagcttgtatgacagcattgtttgacttcagaaagtttactggttatgcttacctctagtgtagagttctgttccattagcctgttttcccttctcaggctagacatacaactacctttcaaatcactactctaaaatccatcacacaggtgctctcatcagaggtgtcttcaggaactgaggcagaggaggaagatgatggcatgaatgacttgaaccatgaggttatgtcattaatatggagtgaagatttacgggtgcaggatgtgcgaaggctgcttcaaagtgcacagcctgtccgtgtcaatgtggtgcagtacccagaactcagtgaccatgagttcattgaagaaaaggaaaacaggtaaaatagttcatctcctgtccaatctgttacacttgagactagtttgctttcctttaattttttaactttgcttttttaaacattgtgtgtgtgtgtgtgtgtgtttgtgcgcgcgcgcgcgcgcgtgcttgtgtgcacactgaagtgtgtatgtggaggtcagaaaacaacttttgggagtcagttctttccactaggcttcaggataatccagctcagaccattaggcttagtggcgagtgccttttcttactgagctgtcttgccagcttggtggttattaaatgttatcttgctatggtttagaattacctgggagagaatttaatttgaggacttagaccaagttgatctgtagggaattgtcttacataagctaaaatgaagtaacttactttgaagttaagaatctaccttttatattaactttatatctaatgccagcaaaccatctata

SEQ ID NO: 27150 - DNA, 1173 bp, Mus musculus
tgctactattgtagtagttgttgggatcattttctgaaaattgatagaagaaattaagtacttactatttcaggaagacaaataatttatcactgtttgatgaaggaaactcttattgaagaataccaacctataaatgtaaaagaaatggtagaagcagaaatcatcttgtagtttctagtgtgctaatgttcaggcatggttgtaatggttattaccacagttgcagaaaaggatagtacatgacagcaggtattacatttgctaagtttaaagagacaaatgaatcttctcttcagaattgcttcttgtttctagtaaccaaatgattgggttcagcttaacttttatgtactctatgtagttgtaatacagggaaaagactgtgatttctactatattttcttttgagaaatatttaatgtgaatatttagatttagcattcagtttatagtaaacttgagatctaggagtgcaaattcctaagtagcatgagatttgaggaatggcttggctgttactcagtgacggctgtgtccagaaagatggttaagctgataaaggcactttctacaaagcctgacaacctgagtttaatccacaggacccatatgctggacagagcgaactgactccttcctgcaggttgtcctctgactgccataagtgtgctgtggtatacacaaataaataataaattccatcataaagaacagaggctgggtgtggctgtgtacgccttcaatcctagtacttaggaggcagagccaggcagatctcttcatttgaggccagcctgggcatagccatttacaggacagagtgggctctgtagagataccttgactcaaaatgaatgaatgaatgaatgaatgaatcaatgaataaagctagctggccagagctgaacgcctgtatttctagcacttgggaggcagaggcaggtagatctgagttcaaggtgagctttgtccacagagcaagttccaggattacacagccagggctacacaaagaaaccctgtcttgggaaaaaaccaaaaagtaaaaaacaaaagaatgggtgaaggctgataattatggaagctgtggataaggataaattctgttttctgtgtgtgtgtatttgaaaatttctgtgatcaatagtttaaaagaaaaaaagatagtga

SEQ ID NO: 27151 - DNA, 1133 bp, Mus musculus
caaaagtccttcaacaggccatacctcctaatccttcccaaacaattccaccaactggagaccaaacattcaaatgtatgcgcgtattggggccattcttaagcaaaccactacactggttatacctgaggttttggtacttgttttccttaccaagtagagttcatggccggacagcaccaggtgaaagctgtcaagtcaggtttgcaaatacataaccaaggtcttgagagacaactttttatagagatttcttttatacagttgcctgcaactaaatcagaaggctcacaaccacctgtaactccagttctagaagactgatactctcttctggcctctgagggcatctgcacacacgaggcatactctcacgcagtcatatgaatcaaaataaatctaaaaataagtaaatcaatagcaaggctaggcgtgtggctcagcaactctgtgcttaacctgtgaactgtcctatatttcatcccaagaccccaaagcagtacagaataaaaatacagaggcgaggggagatagcttagttggtaaagtccttgacttgtaagtgtcaggatatgagtctgatccccagagccaacatagcacaactttgaatgtgatagcacacacttgtgatctcagtgctggggaggtggtctcaggtggatttctgaggctcactggccagctacccaggtgagttccaggccaagtaaggcctgtctcaaaaaaaaaaaaaaaaaaaaaggtggacagcacctgaggagtgatatttgatgctgttctctgtacacacacacacacacacacacacgaacatgcattcacaagaaaaatataaataaaatacataatatatttatttaaagagagaatatatatgtatatggtggaaagagccaaggagattatattttaataaaagatgacttatttcactgaccttgcagaactcaaaatgtatccctcagtgttaacatttgtacagaatcaatgttgctttttaaaagttgttttcttttccacagtattaaatgtaaaagtgtttgttaagtgaaatggcaggtttgccttcattttttgaccttcacgagaagcctggcatgtctccatccatgcatcatgtgtgtgggaga

SEQ ID NO: 27152 - DNA, 1557 bp, Mus musculus
aaaactaacttagacagtcagtttcatggccattaagttgcctgatttggaaacaatttaagaagttaacaacatgtgctcagatgcctcttaggcggcagccacaggcatgccatgttgtgtgtctcagttttctctggacaaacgaatctgtagctgggctggcggcacactactggtaaattcaaaaccacgcctggtctacatagttctgggacaaccagagagagctacatagtgagaccctgcctcaaaaaaaacaaaaaccaaaaaggaaaaggaaagagaagaatctatgagcattccttccctcgccttcgagataacgtgattctcctgaatgctaacacagcactgttcatcttttgtaatgataattttatttgatttttttatactgaagtgacaatattggaactcgagcatgttcatatatttaatcttgtccctttcattggtgtacacaaagctcttgtttgtaaataccaccatgcactacacatcacggagtctgagctcgggaacacgtatgggcaaagagagacgtcttgagggtatgtccaaagacttgcaggccacaggtacacgtgctgctgctacttctgctgtgaacctggccatgtgactcccctacagcactttatctcagccccggtgcactgtttcttgtgagccttgtggagacttgtgagatatacaaacatctaaccttaccatgcatcaacatgtacttaaccagctctcaaccatatcttacaccttgttgttaaattatgtttataatgtatgattgaaagtttctattctaatattttttgaatatagaatgttctagacttgaaaggcacttgaatgtagagtgatgaaaatgtgaacgttttgccacgttcgtgaccaaagataccaggctgttggacatgtaatgtggtaatgacaggcagggtcttgtatgccttctctggaggacttctgccctgtgagttagaataacttgggataattgagaaaacatgaaaatgacaaggaagagcactatccatagcctatgatgattttttcactgtggcaccacaaaacaaaaggttttctttcaaatgcctactttctgagtttatttcctgcgtactcgtttcaaaagggttggtagtgacatatttctatagttgcgtgtccgttttaggtttgtcatagtccaccttgtaacccagctctgtgaaaactggggatgtcttgcacggggaggagcattgcagggtgtcactgtatagctctggctgaggatgggcttgcgaacctcttgctaagactctaggcatgcactaccatggcctgcttcacgtttttagtaccctgtcctcacagcatgaagtagctgactctcaacccacaggtctgcacttgagtatttctgcttagagccagcaggagctacacattgagcagggtgagtctgcagttgatggctggggaaatgcttctgacaccacctcaatgggatttctaaaaagcagggaagacaaatgatgctgcctctggtgtagctccagactgaaatga

SEQ ID NO: 27153 - DNA, 1097 bp, Mus musculus
ccaggacctccgtgcagctcctcaggctccttccccgtctgccccaagtctgcagaccacactgggacctcacaggtgctcagctcagcctccgttcaggatgctgctgtaggatggctctggtaattgagaacactaaggatcaggctccagttgtattcaagacttcttgttatacagttcatgttagatttggaggcatatgaagtttgcttgagacatttttttcgtgctttgaattaggttaatatttaaaaatctgcctttgggggtatttattacatttcagtaagaaacaggaggtggaaattgtaagcttgggagttggtaggatactcccatgcatttcctgttttttgtttgtttgtttgcttttttgggttttgtttttaatctgtcctgtgcagagtgccacctgtatcacggtacatcatgtttatactactatgtcaagattaagcttaaagtatacatacagagttgatttttataccctcttgaaggtttggagctattgccctggctgtatatgactgaagctgagagagatcatgctacgttttgtctctcgttctgatatttgtgtctttgtatggttgacagcatgcagtaagcaatataaaacaccaagccttacgtctatcagaaagaagtttaatatataaaattctgaacatataaatatatttaagtgacaatactagagttttaaggaagtgtgtactccaggacggggactccagggcggggactcaatactgtacttagaagcttcttcagaattagggaaacattcatttccttggggagaaagtttagaggttaaaaatagattctctattttaaaaagttaaattataatttggaagaaatttctttgactatagaacacagcaatttaaaggaattttgtttgaaattttgtatttttgtgccttaatatttggttttttaataaattgctttctgacatttggagattgtttcctgggattatctgttagtgctgcctcatgaaaatccataggggatgtggactcaggagatggcacgagatagagttctttaaaggagaggtgtagctcaaagtcagaaag

SEQ ID NO: 27154 - DNA, 1123 bp, Mus musculus
cgggctgtgccctggcctgtcagtgaaggcctcttgcttgtcaccatcccggtgggctatgagtgagcgcctgccaggggtcctgtggacgccagtgtatgctgctcactgcatgttttagaaacaaaagccgcaggcctgacgaatctgcaagcatcaaataagcatgagagagagaaaaacaaaaacaaaaccatgataatcttactttacttaaagggatgggtggatgggtgggtgggagggagtctctgaagagtcttgagtctcagttatctttggtttaaccagaattctgaatgccgctttgcaatttctctcccctttatccccccacaaccccctccccccacctttgaacctttgtagcaatcctttctgggagtcagagaaggtagaatccttttcctcacactcctcacctcatagctctccccatgcggggcctccttggctccaagggcctctgcaggagctggagggccaggttccattccagaaagggcccagtctgcatatgcatgtaagtgacaggagagacgccctctcagtgagggtgtgcctgcctgagtgagaaagaagtatttttggagctctgcactgcttcttttaagtgtccacaaaagtgtaccatgagatgttgtttctgggtcatgggtccattcatattttatagacttctagggagcccgcttccatggtggtgtcaggaagagtctcgtgtattcagggtgagcgtgtgaacaggcgcttctgaagagtgtcctggaaccacggcagacgaagcgaatctgcccttctccccagagcacagtgtgttctttgctggtgtaaccgtgtgcgtcttcatttgcatttacttcgtacactctacagtcgagtgaaatgtccacagaagacctgctgaagcacctcttcctcagacagggtgaggtgtgggcgcttgcggcgaggaaaggaaagatgagacaattttagaatgtgcaccagtgggtggcagcatgtgacagtatttactgaagcaaggaaagttctaactcatgggagcctggagttagagggcaaaggtgccagggttacctggaatgtgggtaacagaggcggcaccaagagcaaagttaaa

SEQ ID NO: 27155 - DNA, 1148 bp, Mus musculus
tccttcccaccaagtaggaagatcggctggctttgagccgtttcataccattatatggtatccctggcacagatggccatgcctggcctcccagtcactcttcatggtcagttggtgtaagtgctgcccatcacccagggttggggggttgtttggagatgccaattccacccatggcactgtcattagactgcacaatgtcacacaagccaaataacccactgtgccttagtgtctcgtggaggagacattacctgacccaggggctacctcagggaggttttgtgagaacaaaagagagtaagtggaagactcaggggcctttggtaccaaggttctcaatgccgaccgcatgctacactctccatgaagttaagtaagtggctaacccttcccacctgtggctaattgaatcagaacctcaggtaacagtatgccttgaggtgccttgaaccattgctttgggaaagagggcaacacattattatcttggaagaatcacttaaggattaggctcaaaaaaaaatactctttgaagcaagcaattctgtaagaacaatcagatgctgatatgtgtattcatagtctaaatattatccaagcagtgtctcagtttgcttctcgtccaggcatctgaaaaatcaaacatgcgttcatttacctaagcagtagtcaagtccttggtagcaaatgtacacagacactaatctataaatctaatcatatatattagagttatccattaattatgggagaaaagcccctcccctcacacttgacttcaatggcaattataaagtccattttgccaagaatatataagtgcctctgtgttgtgaaacagcatggagctggcctgcacagcagctgacagtgtgtgtcagtagctctgtgggatgacacatgcacaggacatcggggagcgctgggaatggtctgtgacccacagggccagccagtgatagtgatgctataaggtattcttataaacaggcgtggttgtgttcttgggtgaactcagtcctagtaccagtgtggcagggaggggacccatgaacaaaatgacaaggtgccaaagtgggttgcatgtgggttgtgggtgctgtcctgaggattcagtagccgatgtatgtgcctccaatcctgga

SEQ ID NO: 27156 - DNA, 1100 bp, Mus musculus
gttccttgtccctgtggagagttagctcagagaatggggttgaaggcagtctgtttttgacctggccctgggaatctggcatctctctttcctttcgtatctctcttggtgatgtaggacaggcctaattagtcatgggaggagatgattccagttttgaatacccagtaggatcattggactttgctgtttggccgattttaaaatcactgctttgctttggagggctggttttgcttgggcattaaggttatgagaggctcagtgcagcgtgtgtgtttggtttgatttttggtgggggtggcgaggttgagaggtagctcagtaaattaaatgtttggtggtggttaaaaaggaaggtttattttttaaaaaaaaaaaaaaatgtttgttttttttttctgtttcaggcactcgtgagcttttctgattatcagattttccaggagcttatcaagggcaaagaggaggactctttctttaggaattctgtttctcagatgctgcggattgtcatagaagagggctgtcactcacagaagcaggttcttaactatctgggagaatgcttccgagtgaagctcagccttcctgattggtaccctaacgtggaagctgccgagttcctgcttaagtatgtgtgctcttggggcgggggggggggggggggggggggggggcgggggggggtgttcatgcggggcagtgagcctggtgggaaggtggtcctagccgggaaggaggctttgctttttccaagtttgcaacagtgtccaagtaagacaatagacactggaagtcactagtgttggtaatttgttacatttacaaaatgctcactttgtctgtccatagatacacatttcctctctgttcctttgtaagttgtggggccctatttccctgtagcagtgggtttgtattacataaacacggtattaaaggagcagggttccagcaattgaggtgtggccattgttgctgaaaaaaattaagtcttatttttaactgagctggagtagctctgtgtggttgcttactccctaccatatgggtgagcacagctccagactttgtggcactattccatcaaggttgcc

SEQ ID NO: 27157 - DNA, 1152 bp, Mus musculus
aggcctgacagccatgttgcacttaggaagactaggcagcccccggtactaagtgttggtgtggccttgaacaaacattgaaagactttcctgcagttggagcacagagcaaaaatggccaaatatctacagcgggacactcacatttctgccatgttacctcacaagtagccatattataatgtctaagaggtgtatgtccaagtatggaaaccgcagataaggagggtcggcattattaggtttttctaggggaagggtattaaatgagcaggctttaggaatccgcgtgtgcccagccatcttctcacaggagatgggtgcttgtgtgttcttgatgaaacaatttacagttgtacaaacaataccaaagcatttgtgttgtcccaaataggacaaataggacagttggacagctaagctgagaaagccgttactgaccgcccttttttgtcctttttcccccaggagtcactcctgttgatacagcgccatgtcgaccgtacagtgactgctaccctgtcctgctggatggcgtcatggtgggctgggtggataaggaccttgctcctgaagttgcagacactctccgtcgattcaaggtgattatcagtctctgaggtgtcttccttaccctcctgagtttggttctcagcctttcctagttgatgaagtgtcctggttatgtctacagtggtcaagcaggcagcaggtggaagctaattccagaagtgcctcacccttcttctggtggtatcttgccttgtgtgaggagtcattgacagacacgtgacctctaagcatttattggtcatttctgaggtccctgtctgcttatgtaaccagcttgacttcctaggaatgtcaccagttggttaccgtgactgctccccagttgtctgccctgggaggtattcatctgcacctcttaggttggtcacgtgtagttagtttttcaggggtaacttgtggacccacagtctgatggttctcgctgactgatttctgatttccactgctcctttggttgctctttgctaagttgcttgtgactgtggcggttggctgcactcactctagttcacacaggccttggccgtcttcctgctcagtcccaggaagctagggttacagtcagagttctttatttct

SEQ ID NO: 27158 - DNA, 1261 bp, Mus musculus
ttggtgagatgttaaaggctgctggctacaacttctacggcaccgagagactgtatagtggcatcagtgggatggagctggaggctgacatcttcattggtgtggtttattaccagcgcttacgacacatggtgtcagacaaatttcaagtcagaacaactggagccagggacaaagtcaccaaccagcccctcgggggacgaaatgttcagggtggaatccgctttggggagatggagcgggatgctctgttggcacacggtacgtctttccttcttcatgaccggcttttcaactgctctgaccgttctgtcgctcacatgtgtgtagagtgtggcagtttgctttctccgctacttgagaagcctcctccgtcttggtctgcgatgcgcaacagaaagtacaactgcactgtctgtggccgcagtgacaccatcgacaccgtctctgtgccgtatgtcttccggtactttgtagctgagctggcagccatgaacatcaaagtgaaactggatgtcatctgacttgatccccgccatctgagctaggagataagaacaggaggtgtcctgtataacacaagtgagggtattatgggctcactctgggtctatacaagaatttcagtactgaagccaagaacaggcaggtgaaaattcaagacttctgagtctctgtaacctactgaagttggttttcatatctttttcaagacagggtttctctgtgtagccctggctgtcctggaactcactttgtagaccaggctggtctcaaactcagaaatccacctgcctctgcctcctgagtgctgggattaaaggcgtgcgccaccacgcccagcctcatatctttttttaaaaaagttatttttgtgcctttaaaaaatgacttaattgataatagatcatgcagggcagggcgccttctttctgggcccaggttcactgctccctgctttcagtagcagagggtgtctgttatccagagcaggccagtacaataaacagaaaatggaagccatatgtgtgatttttatttttatatacatagaaactaaagctagttcatgtatataatttgatgggtaaattggaatgtaggtgtggtctgtgatgtcattatcacagtcaaggtgagtaactagatctgttggtcagtgttgagtgctgcagtagagagagcagctcaccaagatgctaaccattttccacaggagcaaaggagctcagccttcttgaaaagactgaccccagctagc

SEQ ID NO: 27159 - DNA, 1110 bp, Mus musculus
atgttttctgggccgccgctgctgcagccaccgccgccgccacctgggggttggttgaggcggacggtggggtccctgccagagtgtggcaccgccgctgcgcggagaagaagcgggcagttagaaaatgggtaagaagagtcgagtgaaaactcagaaatcaggtactggggctacagccactgtgtcaccaaaggaaattttgaacctgacaagtgacctgttgcagaaatgtagcagtcctgcacccggcccagggaaagaatgggaagagtacacgcagatccaggctctggttgagaaaatacggaagaaataaaaaggtctgtctgttacttttgatgggaaaagagaagattacttccctgatctaatgaaatgggcctctgaaaacggggcgtctgtcgagggttttgaaatggttaacttcaaagaagagggctttggtttgagagcaacaagagacatcaaggcagaagaattatttttatgggttccacgaaagttactaatgactgttgaatctgctaagaattcagtattggggcccctgtattcccaagaccgaattctccaagctatgggaaacattgcactggcctttcatctgctgtgcgagcgagccagccccaactctttctggcagccatacattcagaccctccccagtgaatatgacacccctctctacttcgaagaagaagaggaatgtgtcttcagtcaacacaagccatccatgatgtcttcagccagtataaaaacacagcacgccagtacgcctatttctataaagtcatccagacccatgccaacaaactgcccttgaaggagtctttcacttacgaggactacaggtgggccgtctcatcagttatgacacggcaaaaccaaattcctacagaggatggttcggggtgggggggggggatccttggctctgattcctttatgggacatgtgcaatcctaccaatggcctgatcacaactggctataacctggaagatgaccgctgtgagtgtgtggctctgcaggactttcaggctggagatcagatttacattttttatggcactcggtcaaatgcagagtttgtgatccacagtggttt

SEQ ID NO: 27160 - DNA, 1544 bp, Mus musculus
cgtggggcggggcggggcgggacggggtggggggtgggggagcacagagatcgccctgtgccccaccttgcacagcgtttgggggactgaagacataagtgacgggcgggggggggggggactatgcggagtcccaggctgccctcttcccagagatgcgccgctattgttattttcttccacttcgtccccccaggatgaacttgcgtcctttctctaatccgccatggaattctgctccgtgcttttagccctccagagccaaagaaaccccagacaacagacgcccagacgcagcagcgtatagcagtaactccccagctcggtttccgtgccgtagtttacagtatttaattttatataatatatactatttattatagcattttgatacctcattccgtttacacatctcaaaagccgcttagtaattctcttattatttaaagaaccactacactagagaatggaatctactgtggcaacgattactagtaccctagctgctgttactgcttccgctccaccgaagtatgacaatctatggatgctcatcctgggcttcatcattgcatttgtcttggcattctccgtgggagccaatgatgtagcaaattcgttcggtacagctgtaggctcaggtgtagtgaccctgaagcaagcctgcatcttagctagcatcttcgaaactgtgggctccgccttgctgggggccaaagtgagcgaaaccatccggaacggcttgatagatgtggagctgtacaacgaaactcaagatctgctcatggctggctccgtcagtgctatgtttggtaagttgtagttataccttatgttcgctccagtcttgaaccttctctccgcaaggacgcactgcttatgtaacagttttgccatctacctgacaaaatctgattaattctgtttcaggttctgctgtgtggcagctcgtggcttcgtttttgaagcttccgatttctgggacccattgtattgtcggtgcaaccattggtttctcccttgtggcaaatgggcagaagggtgtcaagtggtctgaactgataaaaattggtatgttgaattttaaatggttttattttcgttgtgtgctgctgtgtgtcgtggagtgggagtgaagtggaggggcaagttgaagagtatcagaaatggagcacctaccatttcggggtcttgttaacaaaaacgtactttccagacctgacacttcattttgtattctattccagtgatgtcgtggttcgtctctccgctgctttctggtattatgtctggaattttattcttccttgttcgtgcgttcatcctccgtaaggtaacctttctacttgcgacctttcatgagtcacattcagtcttgttcaaactcactggtattcttctcagatgtgactggtatgtaagtatgtggctttgaaaagctaaaaagttctttgttctgtatacctcctgtatgttgtggagttctgtgaaagaagcaagtttttaatgccccagagggcattcaggaaggaaaaacttgagta

SEQ ID NO: 27161 - DNA, 1099 bp, Mus musculus
agtggatcgatggcgaggttcacagttgatttaactttgcactttggtaaagccttctgtcacattgatcggatatatagataagatggttgtgtatagtctgcagatttttaaatttaaggcggcaggacatcaggaaataagcattttaccttagtctgtttttctccagtatagtagaccctggggggcctgtgctcaggtttacagatggactttgggtaactcagagaaactggttatttgtgatattagttatatccttgttactaagaatagggagaaactgttgcctatgatggtaggtggcattagcttccttaggtagcaaatgtaggacagagtccagttggctttgtagaaattatggtgggaggctgttgctagcaccatgactcctagtttgtcttgccacagggtgctctgaaagagatctacatttacaacttttaaggtactgatcttcatgtcttacaggcagatccggttcctaatggcttacgagctttaccaattttttatgcctgcacaatcggaatcaacctcttttccattatgtatactggagcaccgtgtaagtacaaatcaagatgcttaaatgtgaattttaggttatttacaaaactttcattaaatgcccaatttacccctttttgctttacagggctgaaatctcctagaaggtggctggcctgcatccatttcagaaggctgcaggctagtgtatgctgagttaacctagataggttttcaaccagagagacctgctcacattctaaatcactccagacctttcctccttagtcttcacaggatccactgataatatgaccttctccctccctttcttgtgtctatgctaacaatgctggaaatgatgctggcctcaactactgaagagtcattagttaaatctgctcttcagtaatcagccacttagagccgcttgttagatgtcatttttctctcccagttggagccatttcgttttctaaagttctcagtttgcccccctaaactgacttgaacgagaagagttgggatgtgtaactcctggtctaattaattacacttggaagaagaatgtccgcagctagga

SEQ ID NO: 27162 - DNA, 1392 bp, Mus musculus
gactggcgactgtttcgaaacatttttatggcctggtttgtcacggtccccatctctggggttatcagtgccgctatcatggcagtattcaagtacatcatcctgccagtgtgacgctggggttgaaagctgtgtcagtgtctgggaccattgtacacattcctgttcctaggagaacgctcacagtgttgctgaagacaggcaagggtcttaaaggagccgtgggaaggaagtgtaatttacactataattgcttttgtgctaaatatgacttatctcaaaattagctatgtaaaatagccaggtttccattgattcattccaaggtcccttttctcctgggctatgaattcctgtacatatttctctacttttgtatcaggcctcaattccagtatgttttaatgttgtctgtgagataacttaggtgggttctttttaaacagccaggcagagccatttgatggcatgtactgctttgtcggcctcaccagcttcttccccaacatgcacagggatttaacaacatgtaactgaagcttccctccctcatagtctctcatagaaatagtcacggcactctgctccctgtcactagtggcaggttctgttgatgtgtgacaacttcttagagggccgagaatctttggcacagtggaaatataagtttgtagtaacctctttgcaaacagttcacggacatgttgctaagaagcagggagacaaagccccctggcggttgtggttattcttctgagatttctggcagtgtgggatgggtgaatgaagtggaatgtgaactttgggcaaattcaatgggacagccttccatgttcatctgtctacctcttaactgaataaaaagcctacagtttttagaaaaatttctcttgtgctttttgtttttcttgagtcctcagagtcctaatcgttcagcctcgtgacattcttaggaggctgtgtacacctcccaaatggaggtgctgccaggctcctcactgtcttctgtgatcccctaaacgatgtggcctcacacagcaccttggtggatgaggttgatggttcctatcctgagaattgctggacaatgcttttgactattttagtttcaaaatattataattaaactcatgactaggccagcagaaggctatgcccaggaaggttggtcactggagaattctcagtaaatgtttgcacttaccgtcaggcacggagcacgtcagtgcttggtgtgtattgtcagagaagagacatctggaggctcaggctggctggcggtagaatgggaaagatgaacttgagtgttaaatctggatgtgagggttggaaggagatgctgagaactgggacaggccttcattcccaggactgatctatggcatgaaggtc

SEQ ID NO: 27163 - DNA, 1870 bp, Mus musculus
atcagcattgtttccaaaaagtgagtttaatatctctgtcccctgttcatgcttctggaaggactatacacaggagagccagggcagcagttctgtgccttcctctacctggaagcacagctagcctgaccccttagccttcatttgcctactgttgttagctcatgatacatgaaagcagtcagtcagccccaagctcacctccacgggctccaagtgcaggcctataagcttttcagctgacctgcctgctagtttcccataagctcatgcggccagtggttttgtgaattttaggtcagttgtggaaaggttcctagttgcattggcaactttacaaagaagatagatgtccagatgttcctgtttcaatacatgtttggagcggcatcttaataggttttgagtaattgacagtcaacacaagaaggaatcttagaagtcattagtgcagtcaagctctgtgttaggcccggtttcctcacagcctgtaaatatttataagataaacaaatggcaactgtaaagcagttgacttcacatcaaaaccatcttcaccttcattcatagctttgtaatgttaacaccaccatcctgggcttcctgagcaccaggggaaagccagcgtaggctcacactgaagtaccagctatgcataagaaacaaagtacaagagcaggatgttcctggagccgagaaggttttgaacacctcctccttcggtctctttcagaatatgcgggatgccagaagtgcaagacatgaagcttatcactcccgtgaggcgctcagccaggatcgagcgcacggtggctcgctacccagaaatgctgcaggagcatgatgtggtggtggcttctcttaatgagctactggaagtggacaaaacagagtgtttcatcttccgtgaaaatgaggctttgcctgtgacactgggctttgaagtccttgaatcatgatcttttgatatttgtgggttttgttttgtttttttaactttaagtgaggtttttttcagagcttgcaagacataaatgcccttgtcaagatgacatgaaataaatgtttgctgagacctcaccatgcaggtggtagactctttggtctcagaaggaatgcattgagtttactctcagattgtatatccccatgagaaggcttttggttcatgtatttgttatatactttataaaagttttatagcatagtttttcagcatccacactacctggagggcaggcttctagagtacaaagggttgacttttgacaccagctcaccaggcggaaagtcaaactccacagattacagagacgtttgggctagccacatcttcactcagatcccagaaggtatttgtggagaccttcagcttctaccacagtgaccctaaagatgagggggacgcttgtcctctctgggtggctttcctctagtgaagcacagtccagaattgaggtggcagcccaggttttatttacagtcctccttttgcacttgttattgagaaatgcttcgagtaaagacaaatatggggacagagcctgctgcgtccattcctctccctaccagaggactggtagcctgaggaggccacgagcaccgcagagactatggcaggggatcttttctgcaccttggacaactgctcctggaaaggaaaagcagcgttgttttgtaaatgtaacataggaaagcctggttggcaatttttaaaccttagctttgttcctatgattactaagtactaagtaatatctaaaataaaaaccactgaattctcttcatctctgcctgttgttctctttattatcatggtgatggctttagtaagacatataggggtttctctgggaaaccccaagaggtg

SEQ ID NO: 27164 - DNA, 1120 bp, Mus musculus
actgtcaattaagtaaggagagagactcttgaaagaacatgaacttagatgagtgatagcaacttactgtggtaatttgagtaggtatggcccccataatttcatgtgcttgaatgctatgaatgccattgtgagtggcactattaggaggagtggccttgttggaggaagtgtgtcattggggaggtgggctttgaggtcaaatatgttcaagtcatgcccagtgagacaatctcctgctgcctatggattaagatgcagaactctcagctccctctctagcaccacttctggctgcacactgccatgtttcctgctatgacaataatggaccagacttctgacactaagtcagatccagtgaagtgttttcctctttataactgaggtggtcatggtgtctcttcacagtaataaaaccctaactaacacacttatgatgattaaacatattaacatgtcagggcatctcttccttttgtctttgtctcttttgataaactgttattttgttttcctgaaggttccaagaaagcaggtcacactagtccaggctgctgtggggaaaataacctttgctcagaattgagcacatatttactgtaattataggagtcaatcagtggatgattacagctcaaaaggccaggccatagagagcaagaggcgggagtgtttcatccctctgatctacgtgctccacaggaattttacttgcatgtctcaaggcggtgaattggaacgcggaagtaaccataccttctgtgctcctgcatgggtcttgtagaacgttcagaacttcctgcagctcctgtactggctggaggcaacaaaataaacaaacggcattaaaagcattcatggaaagactgagctaaggacttctgcttagtatcaaataaactttctgcaataaaaatgttttctttttcaatcccatattcagtgataaacacttaaaatgattcagttttaaagattcataaggaaaaaaatgaagaaactgaacatgtcaatttaacactggcatatctaatttcagtgaaaagatgtgttcaaagtttctttaaaccaaattcttttttcctaataatttatatcatatcattaaatcatatca

SEQ ID NO: 27165 - DNA, 1192 bp, Mus musculus
gtggctttgatttgggattacatgcatcccttttcatagtccaagccagttttggctttgtgcgtcatatcctattttgtgatgatggggattctgaccatttatacctcatataaagagaagagcatctttcttacggcccacagaaaagaccctacaggaatgagtcctgatgatatttggcagctgtcctccagcctcaaaaggtttgatgacaaaaacaccctgaagttgaccttcatcggtgggaggacaaagcagcagcgggaagccaagttcaccaagtccattgctaagttctttgaccacagtgggacattggtcatgaatgcatatgaacctgaaatatccagactccatgacagtctcgccacagaaagaaaaataaaatagccaattctaaaagctctccttctgctggatcatacgactcactggtgggtaggggaggagacagaaagcttaagcttggtcaagtaagaaatgttaaagatgcccctgtctaatccaccctagatgaatagagtttcctagttcagatatgcagttgtccttttgatggctgtagcctcatggtctgctgaatggttttctgttgctttccttaagaagcatttttgtaagagctaagcatactttttcctttgtgcttaatagtactttatacagtctagctttgtgccatgcagtgtttgaatgctcagttcttaagaactactaagaacttgctggggcacagtagtgttcacccagaatcccagaacttcccaggctgaggaagggggaatgaatttgaggccatcctgggctgtagagccaggccctgtcttggggaatgagtattgttaacttgttgctgactttgtattgacccctgcatcggcaactatttccttaaatccaggatacaacttgttaagtatgacagctttcctttacacaccatttttgtgggtatatatatatatatatatatatatatatatatatatatacatatatatatatatatatttgacttggggagaattattttttacaaaaattcaaaatagctttttaatttgtttaaaatagacatgcctgttactttttgtgctcttaaccaattaaagaagccagtggcatttttagttttatgttctctgttttccactcctatgttcctgttaatttgtttgtgccctttatt

SEQ ID NO: 27166 - DNA, 1843 bp, Mus musculus
gtaaattattgagaaatgtgaactgtgcagtcttaaagctaaggtgttagaaaatttgatttatgctgtttagttgttgttgggtttcttttctttttaatttctttttcttttttgattttttttctttcccttaaaacaacagcagcagcatcttggctctttgtcatgtgttgaatggttgggtcttgtgaagtctgaggtctaacagtttattgtcctggaaggattttcttacagcagaaacagatttttttcaaattcccagaatcctgaggaccaagaaggatccctcagctgctacttccagcacccagcgtcactgggacgaaccaggccctgttcttacaaggccacatggctggccctttgcctccatggctactgtggtaagtgcagccttgtctgacccaatgctgacctaatgttggccattccacattgaggggacaaggtcagtgatgccccccttcactcacaagcacttcagaggcatgcagagagaagggacactcggccagctctctgaggtaatcagtgcaaggaggagtccgttttttgccagcaaacctcagcaggatcacactggaacagaacctggtcatacctgtgacaacacagctgtgagccagggcaaaccacccactgtcactggctcgagagtctgggcagaggctctgaccctccaccctttaaactggatgccggggcctggctgggcccaatgccaagtggttatggcaaccctgactatctggtcttaacatgtagctcaggaagtggaggcgctaatgtccccaatccctggggattcctgattccagctattcatgtaagcagagccaacctgcctatttctgtaggtgcgactgggatgttaggagcacagcaaggacccagctctgtagggctggtgacctgatacttctcataatggcatctagaagttaggctgagttggcctcactggcccagcaaaccagaacttgtctttgtccgggccatgttcttgggctgtcttctaattccaaagggttggttggtaaagctccacccccttctcctctgcctaaagacatcacatgtgtatacacacacgggtgtatagatgagttaaaagaatgtcctcgctggcatcctaattttgtcttaagtttttttggagggagaaaggaacaaggcaagggaagatgtgtagctttggctttaaccaggcagcctgggggctcccaagcctatggaaccctggtacaaagaagagaacagaagcgccctgtgaggagtgggatttgtttttctgtagaccagatgagaaggaaacaggccctgttttgtacatagttgcaacttaaaatttttggcttgcaaaatatttttgtaataaagatttctgggtaacaataatgccttgggggtgttccattttgtctttgaagctctgtccttggagtctgccagttgcctgtcctctggggctgggggtgaggatgaactgtgccaaggcttcaaaacattctgtgtaacttggtctacgctaggttttacagaagttctgttcccttggctcagacagagtcatggttgcatcggttgtgctgaaaattcagacagactttctctactacttcagtgttgtgggggatttggacagttcacccacccgctcgctacctccgggaccttggctgtacaatagggtttaattgtgcccctcccaaggttccctggggattaaagaaaggatcaccccgtgctgcatgcaggtctgcattgagtgttgagctgtgcctctctacctgcccaatggggctgatgaccatggcataggctttccatggctaca

SEQ ID NO: 27167 - DNA, 1612 bp, Mus musculus
caggaaagaagagcaagaacatatatgccttgaatagattaggaatcatagaagctagagcgatagctaaatggtaatagtagaaccagcacgcactttacaaatctcgtttgctttttgttctcagccttacagagaatggatagaatcatacaccagttcaaaaaataaaaatacacaagaaggcctcaaagtcaactagatggcagcaaatgtagagtcttaaattcaaaccccaggtgcttgacaccagcccgaatgcctctgccatactttgacttagtctgtatgggtagaagtggactgcgggcatagactttgcttggtgccagttgtgtagatcctcatggcacagttatttgtcgccgtcttctttctttgattgagatagtatctgaatatccactcaagctctttcctgtcctttggtttaggagaaaggatcctgggctatgctgaggagccctgctatctctggtttgtcatggagtactgtgaaggtggagacctcaatcagtatgtcctgtcccggagacctgacccagccaccaacaaaagtttcatgctacagcttacaagcgccattgccttcctgcataaaaaccacatcgtgcacagggacctaaagccagacaacatcctgatcacagagcggtctggcacccccatcctcaaggtggcagactttggactgagcaaggtctgtgcagggctggcaccccgaggcaaagagggcaatcaagataacaaaaatgtgaatgtgaataaatactggctgtcctcagcttgtggctcagacttctacatggctcccgaagtctgggagggacactatacagccaaggcggacatctttgctctgggcattatcatctgggcaatgatagaaagaattacctttattgactctgaaaccaagaaggagctcctggggacctacattaagcaagggactgagatcgtccctgttggtgaggcgctgctagaaaacccaaagatggagttgcatatcccccagaaacgtaggacttccatgtctgagggggtcaagcagctcttgaaagacatgttagctgctaacccacaggaccgacctgatgcttttgaacttgaaacccgaatggaccaggtcacatgtgctgcttaaactccagggctgaacgtcttgggtgtttttaaactaggtgagtgctcttttgttattgtacttacacactccctgggctggactctggagttgtagagaaaattcagggccaggaagtaagtcttgttgacacagattggctctgaagtcttggcaagtagagataggtcagattatctgattacaaagtaagaaatgtagagaagtgttttaagaggaaactatatgaggctgaatctttcaagttcttcagaaactgtttcttattatcaatgaattctccatataaaatggtgctgagaggaatacagttttcagagaaagcactttgtcccaactgtgcttgcttgttcatggatccagttctgtccacatgggacctgatattggaggaaattaggatgtatagagaatagaccaatttgtcttagtgtggaatacagataatatagagaacatggacca

SEQ ID NO: 27168 - DNA, 2332 bp, Mus musculus
ccaaggggtgggtgggtgggaagagggggatgatgtaatgtggtctctttaaaacttgttgcttaatgtagtgtatgtaggttctcagatgctgaacactattagcaaaatcttacagtgggtgcttcaaggctgtaacagcagttattgatgagagtggagaaccaagaccattctccatgtctgggagaatggcctgtctggaatgggtcctgtggggtacagggaagctggagttaggaaaaaggtataggatttgtgatcagcttggtagctggagccaacatgccttaggttcccccttccacatcttcccttagtcacagggccttggagacaccagttttcttacgtgagaaggtaggtagaagctcagcttacttcatgaaagtatttagaaaacagtatacagtgctttgggctcagtttggtttgggtgttggctctatccattcacccactgatcaagtgtccattccttgcctgccttctgtcttccaggtcgatccttcgggacccacagtctcatcgtgtctcggacaggatggcagagggtacaggtggtggtgatctcctgacagctggacctcccacaatgtgaagctcacgcttgggctgcccactctacccttctctttctccttcagtagaataataattgtttttctaaacattaaaccatcaagacttctgaagagcagaaggctacactctggacaggcacctttttattgtttttgttttgttttgttttgttttttttaagaacattgaatgtggacaaagcttatgcatatagtcactgttaatctgttgagttcttaagttaggaagcagttttggttttctctttcacgttctgttttctttctttacacacatctcagttctgctttagcaccccacttcccacagaattctgtctccccagagtttggtatttctcctggaaagggatgcgaacaaagagctaaggaagcagcctctgagttgcctcccccagatgtgggagctgctgactcctgggaagggctggttggtcctggcctcagacaggatcagagatgaagaacctctcagaagaggaacaccaggggttggcccgagggactctagaaagaagacctaaaccatgggtttggttctcgttaagttcttgagagccccaggccacaccaggactccctgtagtgggcattgcttccctcttttgccctgagtccctgaggaaagaaaccaagagtggtcatcccatcacttggggattgagactccatccccactctttgcacaagcctatcttctattaggactgttgtgccaaccccctgtcaaacttggtcttccttggcctcttgtcactactatgagaccagtacctttcatcctctcctggattgtcttctctgtgtgctacaagtccagcctgtcacagacactacctaggtctcaagatccagttttgatccttgcagagtacccttaactggctgctgacatcatttcctcacagtgaaaggtgtgccctgtgtaccaggatccctagtgtcaccactgggtgacactgtcaagcgccatctctcttacccccagggacttcatgttaggtgatcaacctccatgtcactgttgtctgataagcagagaaaggacctgccttgaagagggaggtctgaggcagatgggagtgtccaggtggctaatagaggcccatgtagcagctagccatataaagcactgcgacacacattttgacttgtacctccttgcagtgttctgacagcctcctgagggaagatctcctccctccagctgcctcatggacccaccattctctctggtgttgccctctacttagacgcacctttggttgctccaaaacttttccagacttttcaccttgttctggccttgtgggatggggtctctggacaaggaaagaaggtatctgtgttcattcttgtttatacttcctaaactagcacagggtggatagagatataagaggtcagggggagctttccctcaagcaggggtcccttgttcctgcagcgtgggggaaggccagcacagctgaccctgacagctggccccgcttagcagcgctgtccacgtttctctttccagccttctggtaggcaactcagcaccaaagtttctttctcctcttggccagaggtcagctgctgttcctgtgggtacatgactgcaggtgggagccctaccttgtgctgcactgtgatagcatctcgtctccttgagtgactttataagcagcctcctgagcctaatcagagtggcccctgggagagtgggaacagcggcgtcccct

SEQ ID NO: 27169 - DNA, 2329 bp, Mus musculus
ctctttctctggctccagtgagagccatgtcttgagccccaagtgcctcctcctgctgttttcattcttccctccctgtagtccctgctatctatcacctgccagccagctgcaggctggccccaggacatgcttgctgtgctgtggctggtgggtcaggacccctgtgggctctgcagtcttctcagagtccagctccctgtccctcttggagatggacatccttttcctctgttacttccctcttctgcctctgtctggggtgcagacttgccagtagaagctctggggcatctgatcttgggtgcctccaggtttgttaaatctgttcacattctagaagtttgcagaactcttaacgtttgtccttttgggggtggtggtgaggattgcctgttgggagactagcctggcctcagttctcagttctgagcgcaggatagatagatcatagtgccttacttattccattgtcttcccctgtccagactcagccagaagcaggtggctgtcttctggctcattttgtcacttatactcacagtctcccacctgtatatagccacaggagaaggaaacctgagcccccagccacctcctgtgggctatagccagacacacacccctctcgcctgcctccgtggccctcacagcagctttagaccaggaccaaatgctgctgcccacatatgcacactgcctttgttcctccctgttcttagctctagccaggacgacactgactgcaccatccaaactggcaccagctaaccccctctggtcactggagaccaaggttcgggctctagcctcacctagcttatggggcactggggcagggagtaagaactccagtcccaccttgtagggtttgccctttggctgcctgagggatgttttaatgtttacttaaagaaaataccctgtttacagctggaggagaaacacgctcacactaggtgaaggtctgactctggatagggcctggcctcctttgtggcactgccagtagtaactgcagtggtggtgaaggcggagaagcccggagggagcagaggctcttgactcactcctcttcctaaccctgtggtgctgagaccactccctgttttcctcatagcctttttgcctcactaatccccatggtgtcatttccttcctccaagattctcagctctaacatatcactattttagaaaaccagtgttttgcagcaataaagttatattgttttgtgtgaatcttattccaagaagaggaaaagagcattgtgggaatctgttgatgctattagctgtttactgtttgagaagatagctcggagggatggatgaatatggcttttaacctttaggtatcttgaagagtgggaagagcaagagtttgactgctgtcctcccaggagggactgtacggccctcgccttactctgatgtgccccttcctgccctgccctgcccaccaggagctcttccatctctcttcctcccaccccatctgggggcactgggggggctcaactctaggcaggtctttgggttacccctccctgtgactggatctctctccctacaagacagctgctgggagtctacctccgaattggctgagattgctgcttcggccctccaggccagcagactctggaggctgaggcttctgccttctctgattccgagctcatgcacacaggtcagcacaggcctgactttgagggaaaggagccttgtctggacacatgctctggaaggagaacccagtaggtactggcatcttggctgatgtcggtatccacagccattactgagggccaagtctgctaccattcattgcctagggcccctagtattggggagagtgccagaacaagtgggccttcccccccccccccgccttttaaaatccagatgagatcataggaaaaaggaaacctatttaggggacttcccccccccccccccaacacttttaccccaagggctccttgccgtcaaaactggaggatatttcagttactcttaatgctcatgtgggtcaaacttggttttgaaagaggtttaaagccaggcacaaggttagtttcaaatactagttaatccaatttttttcctttttttttttttttttgcacagaagctggtaatataggacctatgtgtgaactttatatgaatatttttttgtacttggcttacttgggttgttatgataacatatttaagttccttgaacactgtggattccccctaatgtgtatgaatgactgaaacgttgtaaattaagggacgtttgtgtgaataaagttatttgatggggtcaaaaagccata

SEQ ID NO: 27170 - DNA, 1220 bp, Mus musculus
gaacagagatgtgttcatggctcaccccagatgaaggtgtctgagatcacagtagagactgtctgatgcccttgactaatttaggagtatctcttttgctggtcatggtggcctatgcttttaattccaagactcaggaggcagatagatctctgattttgaggtcagccaggttgtgagactttctcaccccctccccccaaaaaaagaaagcccagagggcatcttgactaccagccctgtgttctttctatgaagtcttcatagtagatcttaagataagtagtggtcaaattttattacttttatgtctctgatttttgcatttgtagtttttttagacgtagcttcaggaatgtctccaaatagctctctatgttcctgtagtcacttgatagctacttacagagtcgggaagttgggggcttgagttatagatcaggcactgactaaaaacttgtttctcttgctttaggtctgctttgatcttcacacagcattatgtcagtagctcagaggcgatgtggaccctgttccccagggtcaggttaccacagacctgtttgtttgttatgcagttcatggagtctccctggattgtctggtttccctttcagggctccctccctgggaaatgtgccctccaaggccctagactcatcttggttctcctcagctccttgcctgtttccttcccaaaaggctgtatgtacatagtcctttttctctgtggcctatgaagctggtttataataaactaagagactgttatacatacagttgatatattcatttgtcttctgagtgcctaatagttagaaaaggttaccttggaaatttaaatcctacttttagctgtttcccactagtatattactgttgggactaaaaaaattactaagaaaaggtgaatcagtatgaagctttttgcctaccaaatgtaaagatcagtttgatgaaataaatatcatcccttgggtatgaaacaaacactaaaagtgaaaatgctcttgaggggttgcgggtagcttccgtttaactttgtctcagggccgcacagcatatactgtaaccagacttgtttgtaatgggattgccagtttgtttggatgaagagatagtgagcagcattaagtcttggtacttagtgcatcaagactagtggtgaaccatggaggtgtttggtttcttggcatgcagtggtagttctgaagtcacat

SEQ ID NO: 27171 - DNA, 1143 bp, Mus musculus
tggtggtttgtttggggtgggctctggcgtgaggtcacccttgtgaaaagtcagcctgtgtgtgtgtggaatctcttccctttattccgtctgtttctcatataaggtgaagggtggattgtagtaggccttgaggttgaattgtacactgcgtgggtgtggagccagtatcactcacttctgataaagaattgttcagcctgcctctttctgtgaagtctaaagctgaagggaggaaacaaggtagaagctgagacagccaggaaaggatttgccattggctatggaagcatctttgccatggctggggtgtcttgctgcttgtcctgtttcctggtcttcgtgtctacttggcttggtaggaaacagctatctatattcatgtgagatcacttagcctggggtactgacgtgttttagaaagtttatatactatttgtcagattacgtaatacacagccaaccttggtaaacctaatgttccctaccttctaataacttgcttatttttcttctaaaaattcaactttaggccaaagaactccaaacaagcagaaagggaagagaagcgagtccttggtctggtgttgcttcgaggggagaacctggtctccatgacagtagaaggacctcctcccaaagatgtaagtccttcccgagtacctgttgaagggaggcccttatgagagccaggctctgtcaggtactctggctttgcatccctttacagatagtaaatgaaatcttaaaacagctaccttgccagtgagtggagagacagctagaatttgtgactttaacgcccatgcccagaggaatcctaatcaatatggcctgaggccatattggttacccagcagttctgtatatgtatgcaacaacatttagtaaaaagggagaggaaagggaaaggggcaactgtaattatctcaaaaaaattaacagtccttctgggtactttggtgcaagccttcagtcccagtagaggcaaggggatctatgatttcagggctacatagtataagaccctgtctaaaacaaaaacaacaataaaacagctccaaataatagaatttatgaatgctttatttggtagttacagaatattagcatttattattatttattacctgtgcaccaggg

SEQ ID NO: 27172 - DNA, 1200 bp, Mus musculus
gtggacacttacagtcccccgagacagacacaacataagcaaagccactatagtctgaggaagatgacttttttaagggaagggagactagcaggttacctggcagaagtctaggctgaagctgggcgataggaagagtctcaggtaaagactgtgtggaagacagttggaaattgttgagagattagtctggtggaagacttgggggagggccagaagtgagagagtgcagaagagctgagcctccctgatgcctgttctcctcacagacggtgggcaagagcagcaagatgctgcagcacattgactacaggatgaggtgcatcctgcaggacggccgcatcttcatcgggaccttcaaagcctttgacaagcacatgaacttgatcctgtgtgactgtgatgagttcaggaagatcaagtaaggagagggctgttgggcgggagaaggaactgaggaggaagtggatgggatgggcgggccacatgctagtgctcttgctctcctgcttttgatttaaatgggaccgttggccaccaagacatatcttccttcgtccagcaaaccttgctctctgagtctagcaaagtggaagaggtgaggagggctgctaggcttttaattactctgatttgcatgcccctgggtactggggtaaagggctctcatgttctccccacaggtgtgtgaggggggagagcttgattttctggcctcattacctatttgtaaagctgtagcctacagggctctcctaatgcggcctggtctgaaactgctttaagaagcctctgaccctcttcagggtaagtgctctgctccccatgtgggtttggggccagtcatttttgttgacattttctaaaaaataaaaaaaataaaattaaaaaatggagatattttctggtttgctgcaattctgtaagttacaagctaactcaggcccttaaacaaagtggtctatttcagtcctgttttatatattcaggacatcttgaggctcagcaagatggtgagccttgtcatatgacactcttgtcctatgcagcattcatattatggactgactgaattcccttaagttctttttgagattgttttcttttgtggcccaagatcaagtatagaataaaaatgcagagatttctgagtgcctggtaggtgttagagtgggaccagcagatcagtgtggaacttcc

SEQ ID NO: 27173 - DNA, 1194 bp, Mus musculus
tttaaaagaggattggcattccgatcccagcacccatgtgagaagcttagcatccccataaatacctgaacccaggctctgcgcggggaaaacaggaattgctgggctttactggctcccagcctagtgaagtgtgggctccaggctcaaggacagaccctgccttacagaaatagagtaacacacacacacacgagagagagagagagagagagagagagagagagagagagagagagagagctaatatcactgctgcactacagaaagcccaagattaggtataagttagcaattagataattttaataaaaagtttgtcatctaggagtgtgctaaactgccaccttatcaggcttacaaggcaacattcagaaagttagcgaagtcattcttatgtaaaggaaaggcatccttaaatttttttctttttttttctttcttttttttgcttttaagatggggtctcaccatgtaacctagactaatttcaaacttgaaatcttacatccacctcaaggttttaataagctttcttacagactgaggtggcctacgcctgtagttccagagcttgggaagtagcggcaagagaatcaggctcagggatagctggactacatatggagactttgccttaaaacaagtctccaaacattaggcagagctcgcgaaaggaaggactgtaggagccaaaggggtcaaggacacaacaaaaaacacagtcagctaacctggcctcctaaggactcacagaaaccgacagtcagggagcctgaagggctctgacctaggccctctgcacacatgttttggttgtgtagcttggtgttcttgtgggattcctaacagtagaagcaagggccgtctcggaactgtttagcctgctttggggaccctttgctcctgttgggttgtctggtgtagccttaatgtgaggacagatgcctagtctcagtgcaacctgagaagccatgcttgatatccctgggttgcttatccctttctgaagggaaagaggaggagtggatggggtgggaggaactgcagtcaggatgtaataaatgagagaagagtaaactaaaggaaacatttaaatctcctttgctacacaggtgcgcatgggcattactggagttgtccgggataaagacacagagctcggcattgcggatgctgtcattgccgtggagg

SEQ ID NO: 27174 - DNA, 1172 bp, Mus musculus
ttggaaccagttcattagggtgctgggctgaggagaatcctctgcaaataagcaaatacacacatagactccaggagaaagctggagtttttgcagtgctgaggttcaaatccagggctttgtgcgttcacagggaagttacttaccaagcactagctcctttgggatagccccattaattccaccatggcgtaggtgctgcatcttctttctgggacatcccttctgactgtgagcctcggggttatttgcttcttgcctgttcatggctctggttttccatctcatgggcctccttggtacaatactccagaatgggtatattgttttaacgagcggagactatgccagaaaacacagctgcccaaggttgcccgctggcaggagctgtggaaatgggggtccatgtttaacacagtgcatgtctccagttgtatctaccagggagggctggcttgtgagtatgagagccttaattcctttcccccgatcttgagccagcatcgggtctgagcagcttcaacaaggcattccatatctccaggtatttcctgccaattcagacgcagagaccccagtgttgaaccttctgccagagcctcaggtggctcgattcattcgcctgctgcctcagacctggtttcagggaggtgcaccttgcctccgggcagagatcctggcctgcccagtctcaggtgggcagctgggcaaaggctgtatgggcagggcctggttcgagggacattcttcactaggtactgaccttttatctggaactcacttgccaccagatcctaatgacctgttccctgaggcccacacactgggatcttcgaactctttggacttccggcatcacaattataaagctatgagaaaggtcagatatgacttctctgaccctggaaggaggtctgcctatctccttcctaccagggcaaactgtctatgactacccatgagtcccctgtctttgtgtcccctttcttctacttctctcaatctcttaagttctgttccagttaccttgtcatgacaccttttctgcccccacccccacccccaactcctgtgcctttttctggatcatactatattgctcccatctgtgtggatctgtaagtctttccatggttacacatggtctgtgtgtaaccgcctcgtgctcctct

SEQ ID NO: 27175 - DNA, 1180 bp, Mus musculus
cagccaagagaggagctactgcatagtgtgagagtcacttatgtcctttacttaatggtccctccaggctagcaggagagcccagcaagcctaccattcttcttcttgtaggaagccttccccacacctgtccctccttgatggctgcttccaaccccatggctggagttggttgctgtaactacccttttctctgccttctcttaatgccctaagcttcaggcaaaggtaatatgcctttgacagttctcaaatgtccacattgtggaactagaaggccctgaggttcaagctgaatatgatggagtattctgtccttatcacacaaccttaccctcatgtagctcaggatggaagagaagaaatctgagagagcagattggatgttgtattttcagaaggcattcagctttaggagggccctcaggcccaaggatggatacagaaagctaggcccagcatggctaagggtataccagagcctcccaagaacaggcgcaggcccaggaacagcaggagcagcgcatcctgcaggctgagcagtcccgaggccatctttgttggagagaggggagctgcttgctgtcctgggccttcaccagccccctggctctgacccattgggagaagtctgtgtcgtggcaggttggcacctgtgggcctgtggagagagaagatggcagctcgaggcaattgctcatttgtgtttgtgacacctatctgacaggtggcacttacccatagagcaggtcaaaaacaaggaagctggtcagcaacaggagcagcagggctaggccagccgttgagaagatggttcgaattgtcactcctagtgcccccagccctaggatactgtccaggagctgggcctggctgaagtcccagggggggcacatgactcgctgaccctactcagtccctctccaggatccagacccctgggaaggagtgggatggctttagaagggcaagggtgagctgagctgggtcctagaggttattaggaagacctagtgctaagagattagggatcagggaagagaggagggccttggcagacactcaagggttagctctgtgagtaaggaactaagctttttggggatctccctccccccactcccaccccacatcttcaccaactctcctcacctcctcccacttgggtgaccattctaga

SEQ ID NO: 27176 - DNA, 1159 bp, Mus musculus
gaagggctggtcaacaagtaggaaggcattgagaagtcagtttatctggtttcctccttggtcctgccccagacacctgctggcttagccccaggagtgagcagcttcctacagatggctgtatccttcacgtatcgttacctggcactcttcacagacacaggctacatctggatggggacagcatcactcaaggtgtggttctaggacagcaagggatactgtgctttgtccaaggaagatctgttgtggatagagccatggcttttcaacagcaggatgactgttgaacagcagatgctggggcagggccatgacatgctgtgctgtttcaggagaagctgtgtgagttcaactgcaacatccgggctcccccgaagcagatggtctggtgaggatagaggcgttcttaaagggtggggttagagcatagccttgttgcctgggacagcctgagtcatcctgtcttctggccagactaagtggaacataggccttctcttctctgctgcacttaaaggagaactttgtcctctatgggccacttgactggtagtgtaagagcgagacggaaacagataggtcagcatgtggccagggaaatgggctccgggacacagtgtgttcaggctgtccccaggaaaaggggtgcaagcaatgcagaagacacagctatgggcccaatatctcgagtatcccagtagtgtatatgctattgctcataggtgtagccgtcctcggagcaaggaaagggctgttgttgtggcctgggagaggcggctgatggtggtgggcaatgcgcctgaaagcatccagtatccttggacacatcctgtatgggctgggagagggaaggaaaaggaggttaccctatctttggatgctcttagtagccttgactgaactcaggtttgtgctcgatgaggactcctacttagtgcctgagcttgatggggtccgcatcttctcccgaagcacccatgagttcctgcatgaagtcccaggtgaggctcccacaagcataccgtggggctctgggcaggtgctcctgatccaaaacaggatctgggtattaagggcagaactgagaattttcatatgtcatttctactcaaaaactcctcttctagtggccagtgaagagatcttcaaaattgcc

SEQ ID NO: 27177 - DNA, 1205 bp, Mus musculus
ttgaagtcagggaaaccgtaagtgagaatggagcgctttttaacacgtaagagggattcatgcacttgagagagtccacccacctctaatcaggttgtcacgatttgttcttgggttgtggccgagagatctgatgggtgattgtccaaggaagagcaatatgatggtcgaggtcacctagtacagttgtgctggacgattggtgggacactcaaagagaccctgggttcttttgacacccgtggactagagacagtgcaggcagccagctctgggagagatcccacaaagccaacctttctcttcctgtaggaggaggcaaaaaacttcatcactcgggagaacctggaggcacggatagaagaagcgttggactctccgaagagttacaactgggccgtcaccaaagaagggcaggtggtcaggaactgagcacagagacttctgggggcccaaataagcacagtgcttgcctagggtctgtgtactgggataggaattggtacatcccaggaggatggctcagccgtttccagagcaacctcagtcactccaggctcggcactcaccacctgactgggaactcccagatgtccctgttctggcaccacagacaaactcagggcagcattaaactctgggaagttcctatcgcacagaggatcggactggactgtgtcccctctagaagccaagcttgtcttgtaagtctcttggagtcgtgtgagccaaatgtttcctgcttttataaataaagtattggagcccagtcttgcccatttactggctatagttacagtgctaatgaaagaggaaagtagttacaccagatgctaacttgcttgtaaaatcaaaggcgtttgtccctaattatttgagtctttaggtttctagccagaagcaagtttcacctaactgagctatgagttaggtacctgctttgctcaatcctgggattttctggctagggtctggtgtgtccaagatccaggaagcaaaaagggtgccctgtttctcctgatggctctccagcagtgacttctgtaaccaggccctgtcctgatctatcatattttgaactactcagcaggtggtagactcccaagctaaacctgcttcttccagtcagttgctgcccttctgtgtgtgtaagtggtagccagagggcagccttggtgtcattcttcaggactctcaccttggtc

SEQ ID NO: 27178 - DNA, 1106 bp, Mus musculus
caatgttttgaccatattcactcctcctttttttctctttcttctgggtgtgtgcatatgtgtgagacaaggtctcagtatgtagccctgactgaccgaagatgtttactgcccaggaattatattttatttttgttttttgacgagtaaatattagactacatagtctcagtctgactgtgttgccaagttctaaccttgagctacttccagatccttcatccccaccttctaagtgctggaattatgggagtttgccactatcccctacttggccagaggtttgtttatttttaaatccagagccacagcaagaaatatattttatttgaacaagtatctatgttaactatgtttgtacaaatttgaggcaagctttatgacataataccattttctggtattttgtattttcttccattgtgggggtgggatgggggtggggggaggaggggagttgcacacatgccatggtacatgtgtggagatcagagcacaacttatagaagtcaattctcttctttgatgatatgggtcacagggattgaactcaagtctcagacttccactgctgcctgattgcaagctatttctttgagcagccaattactttagctgtgatctgagtttcccagtttttactttgtcaccatatttggaaaaagaggctaaatttgtacgtattttaccaagcagaatttacaataaatttgggttgcaaggcaattttcttggcagggctgggaaagctgtcttcctagactaggctctttgtctttattttatttttaatattgatccccacccttttattttcctggataaagcattaaggacaggaggtttttgaccttgaaagatcagtgtgttgaaactagataggtagctagtaaagctgaggtaacggcaggcagatgtcttgagtttgaggccagcctagtctacaaagttccaagacagccagtgttacacagaaaaagcctatcatgaaaaaacaaataacaaaaaattgtattacatttcctgagagaggtgcctgccacagtaagtatgtgtggaggttccctgcatctaccctgtggctcctccggcttggcagaaagtgc

SEQ ID NO: 27179 - DNA, 1182 bp, Mus musculus
ttacggtttaagcaagtgggagtcagccttacagatgatttgatgaatcagttgctgaagggaaaagccaagaggtatttccaggggcaaattgagttagagactggccagccacccatggagttaagaaagaagacaactgtacccttggtgaactctggttgcaatgggacagatagattgggggatgggatggttggcttgtgccctctagcccacatgcagcccccattagtgaagctagctatccagttcacaaacaagaaccaatactgctatggttccagggctctacttggattgcacaatatgaagaggaggcagctagttcaaattgggtaccgtgtggtagaattaccccactgggaatggcttccactactaaaaagaactcgcttagagaagctagcatacctccatgagaaagtgttcacctctgctctctgaagggcactcgtggacatttatcctcataaaaggaataggtgcataccttctacctgtaagttgagcatccttaaccagaaaatcaaagtcaaatattaaaaaacctggaactgagtactgacagatgtcagatcaaggatattcaagtggtaggtagtctatgtagataccctggacttcaaatctcaaacacctctagtctcaagtatttgataccgggattctcaacctgtcctccaagtaattataaaagccacagtgtaggtgggtaataaccgtctgttgagtagccatgggtgcagtgcctgtagcaattatatattacgacaggttttgtgtaaccctggttgtactctagttgtatgttttgctcagaataaataagcatcttcaaaatgacattgatccacaaagtcttactgcatttttttttctgtttctgttagtcttagccttgttacaattattttgaggaggtggtttttaaaaaataactattatgtgtgtgctgggaactaaacttgggttttctgcgagagaagtaagcactcttaaccactgagcttaccgtcagcagcatcataaaactagacccagaagaatatagcccagtgttgtggtacaagccttcaatcgcagcactcaggaggttaataggtggatctctatcagaaggaggccagcttgatctagatagtgaattcaagcctagttagggctacatagtaaagccct

SEQ ID NO: 27180 - DNA, 1180 bp, Mus musculus
ggcatctggatggatatcatgcgcaggtttcctgtgtacccaatggacttcactgatggtgtgtgcccagccagagcttagcctttcaggccaccaggccatgtgtatgtgcctgccgtgcatccctggcaaatgctgtctgtcttgcattcctaggcatcattgggaaaagcaagagcgtgggcaaatatgtcaccaccacactcttcctctacttcgcctgcctcctaccgaccattgcttttggatccctcaacgatgagaacacaaacggggccatcggtaaggggctgggggtggtagggatgtgccaggtaggactctgggcagtgatgacctctgaccttaccacctctgcagatgtgcagaagaccatagctggacagagcatcggaggcctcttgtatgcactgttctctgggcagcccctggtgatactgttgacaaccgcacccctggccatctacacccagggtacagtggggttgaaatgggaaatggtcccagaccccacctcagccctgactgtccatcctgccctgcttgtatacagtgattcgagtcatctgtgatgactacaatctggacttcaacgccttctatgcatggacgggcctgtggaacagtttcttccttgcactttatgccttcctcaacctcagcctgcttatgaatctctttaagaggtgattggtcctgggctacagagtccagagatgtgggtctgtctcatgtcaaagccctataaccccagggtagtgtgttctccaagaggcggaggtgggctttttaggagtggtcccattgagcattctttcatggggatgggctatataggagttcagggaacccactaattacccatacacacattaacctctttgcaggtctacagaggaaatcattgctctgttcatttccatcacgtttgtgctggatgctgtcaagggcatggtcaaaagtgagtccaaggcaggtgtgctgtgcatgcctttaacactatttgggaggcagaggcagaggcaggaggatctcagacagttttcaaacagctaaggctgtctcaaaaaaaaaaaaaaagtgagtaagtgctgagaaggggccctgcttgggagatgggagctctcaactgtggtctgctggggcagcagagaaggtatcaagctaagattgttcttcc

SEQ ID NO: 27181 - DNA, 1227 bp, Mus musculus
attattctagtaatactatttataccggtatagtaatttttgagtctcagaagctaagaagtaattgaccttctagtgattgacttaatgattgcagtgttttgctctctgtgtcagttgcaggacgtgagtctgagtctgtggaatgtctacagcaggatggaccctgcgtctctggagaacatgctttcagaagtaaggagccaaagtgtactcaacataaccatgttcagttatctaggcaattacccaccaaaggggtttaactggaagacgcgcaaggcacatcttagtttgctttaatcagagtggagcatctcttcccatcctgggagagttgaggcttctcggtgaggaaagcctgctgaggcagctgtttcacctgaagactttttggttattttttttccctcaaggggagagatattattctggacttcggtaaaaacaaacaatgcggaagttgtaacaggaaagattaagatgacaaaatgcttaaaaagatcaaagtttggaagagaggtgccagacttgtcctattgcctagacatcctgcctaggttcctgcacgtgcttagcagtatccctgtcccacaaagctattctaggtagtccttgaactgggtgtgtctgtgctcgcctgaagccttatgtacagaaacgtgttcaccctagaatgtcattttctgcctctgagtccttaattgttcatctgggtgtggtggtgccttttctcccagcatccggaggtgctcaggctgctggagctctgagttcaaggccagccccagctaaatatagagttccagaccagccctgaccacacaccctacctcaaaaaagataaagacaaccaacaaaatcttgctgtggagccagtgggatggctgagcaggtcgaagcacttgttgccaagcctgggggcctgtgttcgctccctgacatccacagagcagagacccagtctcacaaaattgtcctctaacctataaaataagtaaatacatggtcatagttatcagagatgtgtcacttatactttgtactaaccattttgaatagggtaggataggttattgtcatttatatatgtaaacagtaattagaaaacaaaagaaaaagagtgatctacttggaggctgcacaaagaaaattagagtcgtctccttctctgcacaccgccccttccctctctagcactgcctgaggttacgtgatcatctggac

SEQ ID NO: 27182 - DNA, 1086 bp, Mus musculus
tggctctgtcttcctacagctgctcgcactgacctgtgggaacctgtgggtcatccccaggctgaatggagtacacactagaagagggatgatgcctagcattggggcagcatctgctcagcacatggaaagggacctggttccatctcccctgggcaggagttggtccagcctcctcccagacccagctggtggctgtgaggaggtggggaatgctaatgagaatgaaaagcacatgggttgatgggaagggacaagattaccacgttaggagggtgagcagccctctgctatgtgcccaggaccctgcctggacattgcatttccccatttatggtgctccgtattctggcattatgcagcagcctcacacacctgtcctctccttcttcatgtcctacagttctgctatcacctgactagaatagccctctaggcaacagtgctcaaatgtatgagtttggagaagttaacaatcagaagaacaaaaactgtagtgtttcacctttaaatgcagtgttgaagagggagcctttctctaagccctgcactaacccactcctcccaagactcttgtggagtgacagttccaagctgaaccataaatcactgatgcacaaaacactgctagaaggctcacctctcaaaacacgactctttgcatcactattaaagagcagaaagttctagaaatgatcccagcctcatcccctatacagttaggagctccccacatctctaccaaaacccagcacataagtatctgcgtggtctagcctttcatctccgtaacaagccaggggactcttggccaaaagaaagaaagggaagttgcactagggcttgtccgtccataaggaattcccctctgctttgctcaaaggaccaaatttctttggccaaagaagttgcttctatgttagtcccataccctgaagtaatatgtaccatggctcccacctacctgtttatgctctccctgcccccagggaaactgtttattctttcaaaagaagcaaacagcgttcatttctgctcctgtaatggagaaacagccagctcccctgcatcccttacagccaacag

SEQ ID NO: 27183 - DNA, 1322 bp, Mus musculus
atgagaccggcttcaatagattcttgaagctggcagggtctttccccgaatccccagctaatgccagggagaggtccctgtggaataaaccttgtgtggtgccagcatgcagccagcacgctctaactcgggcctaccttgcagaccggcaccacggtacacccatgctgctggatggtgtcaagtgtgtgggcgctgagctggagtatgactcggaacagagcgattggctcggcttcgactgaggcctgggaccgtgcctgcctgcctgcctgcctgcctgagcccctgagccttaaacttcacctgctccccgacatgctgtgtgacggtgtggcttcctcacctctcccctggtgggcatggcagggctagaccttgctcatgccccccaccccccacttctgccttcattccttccaccaccctgcctctccggtctcctcccccacttcctcctctcccatgtgcctgagtctcctaaccgaagaaaagggttgagccccaaggaggctatctgagaggagggacctggggtggggtttacctcttccaccccaagccatagggagctctattgggaggggacaggtggctgtctgtgtgacattgatgccccattgctgctgctactgtcgtctccccttcttcacctctgctgccctcatctcccttctccactgctggttgtgtggtgaggaggtacagttcctagcccctaccccctcaggtctgtggtacttggtttttaaatgactggttgggatagagacctcaataaataaaaactccggtagatttcagaggttagcgggggttttttgttctctggggttggaagcccacccttatccttcatagatgggccaacaagatcaggaggaaggtactgcgccacactgcggcacctgtacgaggacacggatgccttttgggtcttgggactagttgcttgagtggggaggtgtctaggacgtaaagcagtcttcaggaactcagggatgctggacaggaggagagcgacaactccttgccatgtccctttgatctgtgtagctgacaaccgtcttctattattcatacactaatcccacttatggaggtccctgctctggtagttctagaaggctgttcttttccttaccttgcaaactttattttcaccttaggataagttctcaggcagggaaagctgtcttacgccatggttggcaggaaatgtctgacatttcacacttggagaaactgattggtcagatttcctaatggtatactgatatgtggcagagctggaaacccccgcccccttgccacagtaactc

SEQ ID NO: 27184 - DNA, 2630 bp, Mus musculus
gagatcccgcgcgcgctccgccccgcgccgcgccgcgctccccgctgggcacgtcctgccgcccgcgccgctcgccaccgcccgccgccgccccgcgagccgctttgtctcgggcggggcgcgcggagaggccaccaggtgccccccccgccgcgggcccgggccccccgccccggggcggcgacggcggtgccgggccccggggcggagggcgcgccgggatgggccccaagcggcggcagctgacgttccgggagaagtcgcggatcatccaggaggtggaggagaacccggacctacgcaagggcgagatcgcgcggcgcttcaacatcccgccgtccacgctgagcaccatcctgaagaacaagcgcgccatcctggcgtcggagcgcaagtacggagtggcctccacctgccgcaagaccaacaagctgtccccgtacgacaagctggaggggcttctcatcgcttggttccagcagatccgcgccgccgggctgccggtcaagggcatcatcctgaaagagaaggcgctgcggatagcggaggagctgggcatggacgacttcactgcttccaacggctggctggatcgcttccgcaggcgccacggtgtagtggcctgcagcggcgtgacccgttctcgggcgcgaagctctgcccctcgggccccagcggcacctgccggcccagccacggtgccctccgagggcagcggtgggagcacacccggctggcacacgagggaggagcagccgccgtcggtagctgagggctacgcctcgcaggacgtgttcagcgccaccgagaccagcctgtggtacgactttctgtcggaccaggcctcagggctctggggaggtgatggaccggcgcgccaggccacccagcgccttagcgttttgctgtgcgccaacgccgatggcagcgagaagcttcccccactggtcgcaggcaaatctgccaagccccgtgcagggcaaggtggtctgccctgcgactacactgccaactcgaagggtggagtcaccacccaggctctggctaagtacttgaaagctctggacactcgaatggcagcagaatctcgtcgggtccttctgctggccggccgtctggctgcccagtccttggacacctcgggcctgcggcacgtgcagctggccttcttccctcctggcaccgtgcatcctttggagcgaggagtggtccaacaggtgaagggccactaccgccaggcgatgttgctcaaggccatggcagcactcgagggccaggatccctcaggcttgcaactgggccttgtggaggccctgcactttgtggctgcagcctggcaggcagtggagccctcggacatagcaacttgctttcgtgaggcgggttttggaggtggccttaatgccactatcaccacttccttcaagagtgagggagaggaagaggaggaagaggaggaggaagaagaggaggaggaggaagaggagggtgaaggggaagaggaggaggaagaggaagaagaaggggaggaggaaggaggggaaggagaggaggaaggagaggaagaggtagaagaggaaggtgaggttgatgatagtgatgaagaggaggaagaaagttcctctgagggtttagaggctgaagactgggcccagggagtagtggaagccagtggtggttttgggggttatagtgtccaggaagaggcccagttccccactctccatttcctggaaggaggagaggactctgactcagacagtgatgaagaggaggacgatgaagaggaggatgaggaggatgaagatgaggaggatgatgaggatggtgatgaggtccctgtgcccagctttggggaggccatggcttactttgccatggtcaagaggtacctgacctccttccccatcgatgaccgagtgcagagtcacatccttcatttggaacacgatctggtccacgtgactaggaagaaccatgccaggcaggcgggagttcggggtcttggacatcaaagctgagctgctggacatagctgtaccccagcccagatgggctgctcctgcccaaggcagagaactctgggcagctgctggagatggctggagaagcccagggctttcagcaacgcttcgccaggttccaggctccaggctctgagacaggcccaggggctgaggtccccctcactgctgttgcctctttctcagaatcctctttcctccccattagtccctgggctcagggcactggatgggtggggagctgtccggtgctaccacaccatgccatcagtgggctagatcacagcagcagccagggttgggtcctggaagctcttggccagagagtgcctctccccctgccacccaaccaggtctttggtggggggatcccaaagccattctggaaagggctccagaggaaggtctagcctaggcccccacaaaactagcagcccccctcctgcatctctaggctaaaagaagcacagtgtaacttagggcgggctcccgagcctgcctctgcctgctttccacctccccagatccctttctctggcccagtctttggcccttggttttctttccagattggaggtttccaggaggccctccaggggcgtgaca

SEQ ID NO: 27185 - DNA, 1188 bp, Mus musculus
accgtgcagctaacgactaccccagcctgtactacccggagatgtacatcctcaaaggcggctacaaggagttcttcccacagcatccggtactatgggtgggatggccacagctctcctggcatggactgtagggacagggtccaactaggctttaggccccacccccaccccagaacttcctctttctcccatactgatgggctctcttcatcttcccatcctctagaacttttgtgagccccaggactaccgacccatgaaccacgaggctttcagggatgagctgaggaactttcgccttaagactcgcagctgggctggggaacggagcaggagggaactttgtagcaggctgcaagaccagtgatgatgagcctgctgccatccttacctcgtgaggcttgggagccagtgggtcccatgggcctgtgaggccacctaccttatagaggcctcaggtgctatagggggttgggggcatggtgtggtgtcacatctgtctgcccctgtcctcaattttcctgtctcactccacttattttctgtatcttggtactggtcccagcttaaagagctgaacctgagggtggatgccagctgaggagaagtctgttgtgttcagtgggagtccttttacagtcttttttccttgtttgtgttgactctttgtcttcccgctttttggggagagcctcagcccgttaggatggcacagtagcttcttgcatggcctggatgcaggatgctactctgctacacagggctgtgtctactctcctctcctggccactgcatagacttatgctctccattggaagcataagtgctttctcttctgttgtagtcttacctgtagctttcatttttttgtctgtctgacacactgaccgctggggaggcttccttgtacagcttggggctagagattcaaatatcacttactcgttaggcctggcttttgttagcccagaaagggatcttgccctttaagacccccagggctagagggaaggcctgactcaggagcctctgggagccccatcctcactactgtgaaccccagagcctcgctggtcagcacttgctgctgggcaatggaccagtcaccgagctttgctgtttgatccttctctgcccttccctgttttcctttctatatctggcccagaagacctcttgtatgtg

SEQ ID NO: 27186 - DNA, 1608 bp, Mus musculus
catggtccagaggagaatgagtattcgtcctttagaatccaggtagacgaaagccccagtgctgatctattaggaagccctgagccactagccacccagcagccccaagaagaggaagaacattgtgccagttcaatgccctgggctaagtggcttggggccaccagtgcactcttggctgtattcctggcagtgatgctgtaccgtagtaggcgcctggcccagtgaagcctcagctgtatgctgttctcttgctcagttctgccaagcatgttctctaggcttgggctagtagaggctgagtcagagaaacttaaatatggcgaggtccactgagctatccaggtagatagctacaccaagacgtcatcactgttgggtgggggagagacattgttttatcctggttcatatgtcatcttctggtcttcagcttttggaggcactgtgttacctccattgctcctgacctgcccacgtggcagtgtaagagttcatgctctgtgctcctaaggaggtatctccaccagctttatccctgttggcccaagcctgaagatgaggaggtatcgcactgttgacaatgcccctcatctcgcccagatcttctgaaacacaagcgtaggtacactgatgagtgctcccatagcatcttatgccttccaccggcagcctggtctaaggccttggcaggagagcctgggagtaacagagtggctggtctctagggagctttgagtgctctgcccctttgggccctctccacagccagtcaaccctgagggtgagtctggaggttctctgtggactcttaagaaagccagaagcaactgccaggcctgaggaagcccctgggagggagcttttctccaacctccttaccccctcctcgcttctccactcctggtctccattctctccctatactggatgatgagatacctagtgggcagaactcaggctgggcttgcatcagttccaccctttccctggcctttagcagatgtctagcttctctagtcttgttcccaatgtagatagcgggcagctcttccttttactgggctcctctgagtttgaaggatacagatacttgcctagtacttatctcagagggtgtgagtacaagttcttgccctcctgccctggctggctgagctaaggtgagagtgtgagaggcagagtgcatattggtaatggcagtctttgagagagcagccttcatctccatcatgcttctttctcctccctggtcaggtgtaggcctcacctctgtgcctcacttttcttacctgtgagatggggtgagtatgtgtgtgtatacacacacatacccacagacccacgcccacacccacacatacatgctaatatattctcacctgtgagatggaaagtatgcatacattgatgctaatatattctagttttatcaggataattaaaagagtttatctgtgcaaatcttgtgagttccaaatttcttaaaggatggatacatgttatcaccaccccaccctagactgtttctctgtgtagccctggctgtcctagaattcactcggtagatcaggctgaccacaaattcagagatccacctgtctcttt

SEQ ID NO: 27187 - DNA, 1190 bp, Mus musculus
ctggccatgctagtgaacagttgtgcataggtactagttttagtgtgttgccattctagtatagctttgaaagactagtctcaataatacaacatgtagccctacagaggttacccacatggcgagatttaaagactggccactaagcatctcttaggtcaagaatgtgtaggaagtctcagaggccttccctgttctttgcacattttgatgaccaggccagcattcaatggcacctttatctcagctggccgcttagatgccaccttcagaaagaggaaggctttggcattgtcaggttccaggagtccaatgtttatgtgttgccttcagctgcagtaggattcatagctgtgttgaagggagagttggaagaggtctggacaaggtgaaccagaacccagggaatggaaggagcatctgtacccacacccgggtactcttatttacacacgtaagaaaacaaattcctttaggaggatgactgttggctggagtaatcagtgcttcgtaagcacccatgcacagacgcacaggcaacagagccctgcccacattctttctctggtgaagaattcccagaagcccaagaactctgacttctctatccacagcaagtcccagagggccctgctgttattgaattcagtacagtgccactccacttcctttcccttgctagacaccttcatttatgggactctgtcagagatgagagatacccatcatgggtatgctccattacatcatcagggaccagtgtcttatcatgccccctcagacctggggaccttttctagaaattcccatgcaggcaagattcaaaaacatgactcattatatcccctaggaatagaatcactcagatcctacagtccatattgtccatagatgcactattatacaggtgagtgctgacattccccctacccctgcaaaaggaaagtctgttggccaggagacatgtagagtgaaattttttacaccaaagcattcctgcccaatatgtcaagatctctcatctgctttaatagtaaagtaacactctataattagtacagtctcagggatgacataaccatgtgattataaccattgtgtatgtgccaaaagtcagaaccctcaggctgggtgtgatggggtaggggatatgaacctttaattccactccttaagaactccattgaggg

SEQ ID NO: 27188 - DNA, 1216 bp, Mus musculus
agtcctagagcgcttacattccttcctctgagctggaggtggggtgaaggttttcatttacagtttttggttttcagggttgaaacttaatttgttagcttttaagtgttcatagtatagtttgggcatgtctgcacagaagagttagtttggctaatactttggtattttttttattagatattttcttcatttatacttcaaaatactttggtatttttttttccattttttattaggtatttaactcatttacatttccaatgctataccaaaagtcccccatatccacccacccccactttggtatttttgatttacatttttttcctcaaaacattttagtttaaaattttatcccttagaaaccaaaccacagcatatggaataagttgccagtcaagtaaatataagctttatttttagaaaaaggtattttgacatttttttttctttcccatttagtttttccatggtttggcttggatattggaggaaccttggtcaagctggtttattttgaacctaaagacatcactgctgaagaagaaaaggaggaagtggagagtctgaaaagcatccggaagtacctgacctccaatgtggcttacggatccacaggcattcgggacgtgcaccttgagctgaaggacctgactctgtgtggacgcaaaggcaatctgcactttatacgctttcccacccatgacatgcctgcttttattcagatgggcagagataaaaacttctcaagtctccacactgtcttttgtgccactggaggtggatcatacaaatttgagcaggattttctcacagtatgcatcttttagcttatatacaatttatggaaatttgatgtttaaaatgatgccgattaaaagtggtagaatcatttccatttctaatggagcttgaatattcttaaggaaatgaacatatatttaaactaggcagtcaggagttgattgtgtagcgattgttgggtagtgtacttacctggtatattggtatatatcaacatagcattttaccatttctttagtatgaaaacttttgagtatgggataagcataaaagtgggataagagtaggggataagagcctacaaggaataacatcaccccatctcattaaggagttaagaaacaacattttgaaatttagtcctggcatagggagatggttcagttggtaaggtttggaggatctgagt

SEQ ID NO: 27189 - DNA, 1926 bp, Mus musculus
atatatatataagattaattaaaaaaaaatcttacttgtggtctgtcaattttcagggatattttggagccgttggagcactcctcgagctgttgaagataccctgacttaccgagaggacttcctgaaacctgccacagagacatctgtggatttttttgttttgttttgttaagagactcaagttttatgatcgtgtactactcaaatcagagcaagaaacaaatgtatttttctaagacatcaagataaattcttaaaattttgtctaaggacaccccatcccacccccgtctaggcagtatgaggatttgctgtttatagggtattctcagggcagcgttattaacccctgaggtgctttggaatcccagcatcacccacttgggcatacgtggagctttctggactcccaccagcagctgactgcttgtcctgttgaaatgtatgtgagaatctaaccgctttcatcagtatgccttggaggtcatctttctttgcgcgctggatcatgtttagcctatgttaacatactgaaaatgggttatttcaagcttctgaaaacttggcaggattgttctgcatctgatgttaagagatggcctgcattgtagctgaaggcaagggtgggcctgttcacagcagccttggagctggaatggagacctcgagctctggctgggaaggattctgccattcagccatgggttctggtgccagctctggggcaacagaaggctcttgttggtttggactatgggaactaggattggatttggctggctagcctgcttgatggttctcagttcccacagggatatagttggcttttattacatactttggcccattaggactaagggttccattgtgctggcagcacagtacacggggtgttgcagggatggtagttttccctcctgctaatccctgctttgcttctgagagatcctcaaaactgcacttttattagaaagtttctccatctggggcagggctgtgttcttccctgccatccctcaggtgactcctatttgacagttgtgaccagtgctttgtattcatggttctgtcttcctacattgaagctcctcccacagtgttagacgaacaagcctcaggatcacagagcccaacaggatgtgtggtgctgttgtgacccacaccatcactgtctatttctttcctcagttgtgctcagcccagggtcattctggggatgggttctatttcctttaaatagtgtctcgggtggtgagggctaacctcaaactcgacattaatactgtatagctgaggctggcctttgaactgcagatctagttgccttcacctccgaagtgctggattataggtgtgcgccactagtaaactccataaatacaaagggtttgtttcagagcctcatcttttccagttctcacctgcttccctggctgctgtctacactctgacagttccactttcaagctcaactgagtctcgccaagctgtcttcctgttgattccagcactatttgcagaaatacacacattccacctcacaaccacttctgaactgggagccacttgcagtgtctgttagaaccatcttgtcttttcttagctgtccaatccaggtcattgttttgatagcctaaagctccacttcacttctcccactcagaaaggaaggtttgtggccctggagcacaaagtagcttgaactaagatgggaggaggctggcctacgcaaagaggtaatgtcttgtgggcatcagtggctgggtctagggggtgcttgaagatacctagtttggttttagaacgcctggttttgagaacccctaaagcacgggtcatttgggtcagagacaacgcagaggatgtatttatttgtgggaggagttagtgaaccccagagcacaagaaaataataataatcgg

SEQ ID NO: 27190 - DNA, 1155 bp, Mus musculus
gggagtccaagagcaaacggttatagagatgggttacaaggttgcttggaggtagctccagggttacgtgtgccttggtgaagccatgggctaaagctgagttcagagccgctcaccacctggcattagggttagggcaagttctgggaatgtggcagactgtcaaaggacaaagctatatacatcaagccaccacaaatgcaatgcatggtgtggtgtggcctgatgcctttcccccatcagtgtgccacaccttacctcgccctagtgcaaaagttgacaggtccaaatacaaagtatttcaaaatttgctctttatttacacgtttgggtcgattacatgcatgttttatttttaaacaagtgattagcaaaaaatgcattaaagttttaaaatagcaattaaatatacaaaaatatagcttacaaaaaccaatgtttaaaaatattctgctgcagaattcttagtgtacaaacacgtctatgaaacctgaggctcagcatttcataaaccttttttgagggagttatatctagtaaataagccccatagggctaaacgacaagactaaagtgccattcctccaccttcctggacatgtcctcagacagaggcaatggccccaagccgtcacattctccaccacagcctggaaggagaggcatggacggcgctgagggttcaaccacatgagtcccttaacactggtgaggtcatgatctgagctacagcgtgtctttgaaacagcaggggtagcttttcctgatcctgtgaacaaaggaacgaagaatttggatacgtgctgagctaactggaataaaagcatcttgaaataatttgggttctaaagctgaacttgaaaactgataggtcctgttaatcttatttaaaaaacctttacctggcattttaggtccctacctctaagattaagttaaatactttgatggtcccatttaagcaattttttaaaaataaaaatttatttttatgtgtatgagtgtttgcttgcatgtacatgtttgcacctggtacactcagatgccagatctgtaactgaagttacagattgaagctgagggtcacaaggtgggttctatgagctgaacctgggtcatcggaagagcggccagtgctctgagccactgaacaat

SEQ ID NO: 27191 - DNA, 1614 bp, Mus musculus
agttttagctgcggcttctcctgtccttggattcaaccactcaaaagccagcatcaccaaagccccgtatttctagaggcaagattgctcattagacttgcagataggttgaggtggttggtgtgcaacctgaatagtcaggggcattggaagaatcctgggtgctttgctctgctcaacctgaatgaggtctcctaaccttttctgctcagccactcttaatgtgatttcttcccaaaaggcattccttgggctggaagctgcagctgcaaagtatgtttctcatctcccttcttggccactgctcccacttctggcacctgccagccacagcaacccaatatttgctcctgatgtctgggtcccccctcagtgcttcctctgtatctgcagcattggcccaaacttacaatgagatcactctttccacaccattcctaagtttctggtaaccttttgtgtggatgtgtgaggatttgggtctactctcaagaccactgaactcttatgtgtctttaagtagctagaggattgggtgtcactgtggactgtagtgttagaagtggaacaaaacctatctatcctacctgggtcactgtaacataaaaaaattgacacctgcagcttttctttgtcaagtgtaatttagtttggcctattcctatttaaggttcttttaacatgtacttgcctaaccaggaagtagaacaaaacagccatgtagggacaggtagcctctgggcgagatctgtgctgaggaacaaggggcctcccaccattgccaaacactgttcttgacaagacttgacaaaaagatctttcccatggctctgttccacagcatgctatctctaacttggaatagccactctaagctgtgctaaatacctacaacacctactttctgagaatttgagactatatagagacgttcctgagagctctatacagaaatgcttggactagtttgaattggttacttgtgcttttctgtaggtcaatctctcagaccctcctttctttagccaccacctaggaactagcaaggtttctagatgatctgccagtccagtctggtaggcacaggcacaggggagcaggagctgctgatagcacataccttcctggtcacaaactcaggaacttctgaactatgggactaactcctggctccaccacagtctctctttgagacaggttctgtgtactcccagttattctgaaactgtatagaccaggctggcctcaaaatcagaaatccagggccttctgcctctgctacaattaaaggcagagcaccatgccgagcctccacattgaatcttgacttgctcagtcttccttgagtctttgaataggtaatccttataaaattcacacatcacaatagttgccttccttgaaaaactatcccatgagcactggattcatttttgtttctttagtctccttttatgggaatgtggggtgggggtgggggcagaggctatacagagagcttacccagaagtgtattgagtgtattgtgtgtgaaaggtaagcctgaagtagaggtttttgcatttacattcctttttatatggcttccttcacagatccatccctcagtatccc

SEQ ID NO: 27192 - DNA, 1164 bp, Mus musculus
gtaggaaagcccctagaacatttgtttggtgtttgatgggggagggcccagcccagtatgaatggcacccctgggctggtaatcctgggttttaaaagaaagtaggctgagcaagccagtaaacaacactcctccatgtcctctgcatcagctcctgcctccaggttcctgccctgcttgagttactgtcctgacttctttgatgatgaacagtgctgtgaaggcataagccaaataaaccctttcctctccagcttgtttttggtcatggtgtttcaccatagcaataataactctaagtcagacaggcttctgagcccttggagctcacacaccactggcttccttactgaattcacttataacagatctgacattaagttactagctcttccttctactgcatgtttggaagtaatccatctgcccatactgttgggaaaaaaaaataagatgtattgtgactgcttgtcaaatatgaagataacactcttttttttttttttacaaaaacaacaaactttgacatttccttcaactttcaaggtagagctgataagatggggtctctgataaggctatacacactgggcttggtaaaaacagcaactgcaagggccagatatgctcttctctctagataatagaacagctgttccctagaggaagatggcatgtcttctggagtgacttatgccaacatatgccaaagtgggttgaaaggaaacaccaacacccagcttccctcaagcaagcctgcagagaaggttggcagttcactcggagtgatatagaggcctgctctgccgtcctcagacaaatggctgaatgaccttgggcgagtagctaaaaggttcccaaattttgtttcatgctctcatctgagggtgatggtgccgacctccgtttgtgtgaatttaagataacagaagaagtgacaaaatgttcatggtaggttctctgcaaatacatagcttctctacctaagaatttagttcacaattcacactataaatagttgaaatccaaaccatgaacaaagggttttctgactattgatgctgcccttaatggatttctctgtggtaaccataagggagttaagaaacatctagcttaagaattacatcccacttaccagtcatgtctttgggtgagttgtgt

SEQ ID NO: 27193 - DNA, 1103 bp, Mus musculus
gccttgcttggattgaactaggagatcttgactctgaggagagccagccctgtaaaaagcttggtcctcctgtgacgggagggatggttaaggtacaaaggctagaaacttgagtttcttcatttctgtctcacaattatcaaaagctagaattagcttctgccctatgtttctgtacttctatttgaactggataacagagagacaatctaaacattctcttaggctgcagataagagaagtaggctccattccaaagtgggaaagaaattctgctagcattgtttaaatcaggcaaaatttgttcctgaagttgctttttaccccagcagacataaactgcgatagcttcagcttgcactgtggattttctgtatagaatatataaaacataacttcaagcttatgtcttctttttaaaacatctgaagtatgggacgccctggccgttccatccagtactaaatgcttaccgtgtgacccttgggctttcagcgtgcactcagttccgtaggattccaaagcagacccctagctggtctttgaatctgcatgtacttcacgttttctatatttgtaactttgcatgtattttgttttgtcatataaaaagtttataaatgtttgctatcagactgacattaaatagaagctatgatgaacacctggcggggtttgttctctctccaatgctccgagtccactgtttatcgccagggtggcttgggctcatttcacatccctgtccctgaggggcctcgggtcttacctctggtcctgtcttgtttccactggctttgcatcttcccctaagttatacttagccctgctgaaacacaaaagcactcctggggaggaggggtggggagaggagacaagggggtggggagtagagttctcctgctcgggaagaggtttgtttccttttcttttcaatgtgtatcagtgtttttgcctacatatatgactgttcaccacatacattgccctcagaggtcaaaagacagatcagatcccctggaactgaagttacaaatggttgtgagccactgtgggtttggggactcaaactaggtactctgaaagaacagccactgcttcaa

SEQ ID NO: 27194 - DNA, 4500 bp, Mus musculus
ttggcatgaacattattaaaaagtaccgatgcttcagctacctgcccatcagccccacctttgcaggctacacttggaaaggctttgggaagagtgagaacagccggagttcagacaaagattcccaggccacagtatagcctttgctgtgccctgtggcctggccacagtgaggcatgtatctgtagttccttgctgaataacaagaagatatatgtttgtatatctacatggcatcctgcacctcagagctaagacaggttgcacgtcactcttctgttgtgggtggtgattgtgtccaatatggtgtctcgcttgtgtccttattggtcccttaccctttctgtgtccattgctggccatggtcactgaacttgaaatcacagccctgccattggagtgggcgtttggaatccctagtgctcctgctttcagtcccctctgccttccagtgatctctttcctacaagctgcttcgaggtccaggggcctctgcttcttaaacactatgtcccagtcttctcatgtgacctcagcctgaaccctgtggagacctcctctggccagggggccactggtgtcctcactgtgttgggattctgttatccctgataccccaggagcctattgacctgactgagaatagtgacatgtctgtcttgtgaccagatatgagtgtgcataaggtcctgtctagccgagactgactgggggggactgtataggagactgacggggagcagaaaggtcctgactccctccctccctgtcaccctggacccgtccaggccagcgcaccttctttcttactagtctgttttactggctgagacaccctatttggcattttcactgctggctggtgtgatgggtgtagagtgcccacagatgagtctatggatgtcttggctctgctgtcctgtacttgcgtgtgttttattcctatttaatgttattgactatagcggatctttgaaatcagtgttttccgtgtgaatttccaaccttgcaccccgttccttgtccttactcttgactccatccagaaaagaaccagcatctgcaaacgccatgggtgccgtcagcgagcgaagcctctcgtgtcggctgataaaagccagtggcagctgtcgtggctgtgctttgtactgctctctaccatgaaagtgtaaatactgtaatgtctaatctatttatcacaactgactactggaccagggcccagaaatgtgggtcaagttacatgtgaatttgtttggtgaagaagggaagctgggatggtaacagagcgtcaccacataggatgtgccattatctagctaaagtcattccttccttccttctgtttcaagtcattgctgccagatctggcttaataagacttggtgtggcttatcaggtcacatgtccaccacatcttgattcttgcaggagggaagatttgatcccttagagaaatagcctgtgggacttgttaaagaagatagatagtaagaaaagcagccattgcgtgccctctgtgaagagttctaacttggagaacaaatctctcagacaaatgacttgtactaaatttggctttggtttccaagccaagggaaaagctgaagacatgagtaatgatcttgcttcatgagattgtacctcttaagtggctgcggacctggctaaactgtgggtggcagtgggcatccccatcacccttagcaaggtgtggttctcagtgcctgtcattgatgtgtgttcccgtgcccaggctgtctcagtgtcatcatgttgccaggtctttgtgtttctgcagcccacatgatccttgagagttttgggtttcggtaacacctcagggccactgcattgttttgccaaaatcttactccagattaagtacagaacttggtttctaaccgtatttagttttatatgtgtattcagacagttagagttttggaagcacactggtgagtagctttttgcccctccttccttagcaagcccgtttgattgacagctctcctgctctgagttcactctgtgcctccatttgcattttgcttagttgatccggtttctctgttctgacaaggtggaaaactggtaagcatctcagatctgcagtattgtggtggtgctccactgagcaggagtccactcagaagcatgagaacggcctgtaatccaggccgtgtcctgccactatgcctgtattgctgagtgccacccaagtcctctatttggctgtagtctgctctggggctttcactgtcagtctggggcatgggctgagcaagtatttgtgtggtcaaggaagtgctatgccaacatctcccattggaaacagggtttctcctccttgcttcatcagagccaacctttgatattcttggaggggacaggaggtgggaacacagagggagtagcctgcgaatgtgcctccagtcagtgggatactttctgcaccactctgagtgattgttaccttgtaaccactagtaagctttgttcatgcagctcatagtcctcccaaacatatggggaatgtgtgtttatgtaccagatggggagtgttgaggggatatggtggctctgtgatctgtttgtccatttgtgtccagtgttgacctgcgttactggaacttggagctaccctgtttggttaccagtggactgttagaaagtatttcagatacgagcatcttacagggcattccatccctagttctcacagtgaacacctgcctcctctctctcctgagagcaagcatttgtgtcagccacaggaagcagaagtattaagggaggaagtgctggtagctgccctgtggggagactccctaggaaagtaacgggcaccaggcttcgtgactttcattctcatttataagttagacattcattcactagaacatttatgctcagaatcttccttaagagggtgtccagtattaactttgattgggattaatccaggcaaaagaagagactttatcagagagtggagtgaagcattgtgggtactacccgtgtcccatgttcacagtaacaaattcacatgcaggatttactttatactgtagaatactgactttcatgatgacaacttgatttatgcatgaatatcaacagtatttccatatagtaaaataacatttctgcccaggataatagtcacagttttccagggagggaatgatataattttcatgacaatgtcatgtgctgatagaatttctccattgatgaacctctagtatgtgtgtatactttatttacccatgtgtatattttatgatcatgatctaagctgttaattctttcattcatgtccctgctgagacactgatattagcaacttagagttggtgagtttaatcttcagtcataccagctccaagagatgaggcctcagtccagaacccatcttcatacaaaagcttcagtagcctgtaggcggctgtacttggaacagacatttggctgccagtagcaggcctggcatggcgtgacgggaggggcctaattacctagctgttgctggacaccagctgtgcatacctgagcatgcccagtgcatgttgggtccatgcacaactcctggacccgagctttcaccaagctctggcctccagggagctgtgtctttctctgtcccattaagatttgggcacagataagacatcttccactttccatccttcctacagttagagccccagtagtgcgagaaggccccatatatggcagcattcagctctcacccaacacttgtgctgggcttcccttcagcagcctcccagacctccccattcttccaggatgctgtctgccaggtcaccactctgatacccagcgttctctggttgctctctgtttccagtgattaaacacccataaccaacgttgctgtctgctgccactgacagtccagtgaatccttttctgtctgttcctaacaacttttatttgacacattaaaaaatttctgactgtccttaagacagtagagatgtctctcttttatttgagtttgtgactgactttgcctatatatctttctggggttttgtttgtgtttaatttttattttgcatactgagggtatttggggtggggttgttttttgagatgtgtaattcttttatggagtttttaaaaagaattttcatattgttttttctaacatggcttcattaaacgtttaagtattttaaaactatgtaatatttggaccagatgttgtgaataacagtagagaaagctattttattctgtatttttaaaactgttccgtacaaataaaagctctcctggatgtagttctgttgtcatttgcctctttcttgggctggaattcaattaaaagtcacaagtagtaaggttcttaagaaacagagcccccgacacacatacagcagaggactgctgggtctggccgcagtaggagaagactcgagcctaaccctcaagagacttgagaccccagggagtggggagggctggtgg

SEQ ID NO: 27195 - DNA, 1202 bp, Mus musculus
tctggttgtgtccttatggtgctgtctgactgggtgcatagtctctcacttgctgtgagctggaagatgggccagaggcatggatgattcagggtgaatgtttcatccaaactgccaagtcggtgacatcatgacctttagattacgccatgccaagcagcacataatagctggttgtagcatttcccacaaataaaaagtttactgcctacgttactaagaaagcatcttaagtagtgtggtgaagtggaaggccactgcaaacccggaaggaaatgaccttgaaagacatcatttctagtcagcttcactgggtgactagactcaccatagacgtggtggcttggattcctttgtaccacttaccagccatgagaattcagccacactgcctagctcctcaaagaccattcccccggatgaaaaataatatgtagcatgttaatgagtgttgtgcacggtagtgcctgccctgctggtgccgtgagctgtcattattacctgggctctggaagggaggtagaagtttggtggagcagcgtgtccctgatgactattacaggattgggtgtgccccctgctcacacaggcagcgtcctgacttggatggattagaaaacagcagcggtcattcgacccagctcctcctgaggcctgagcccgtccagcctccattgcatgtttgctggggcagggatgctgtccatgtttccacagattactctttatcgttgttgttttaatcttcaaggtgtcagggattaaaagactgcctgactctttgctatttttggatttaacaaattttgttccctctacactgttttttggtgtgtgtgtgtggggggggggggtttcttaaaacagggtttctctgtgtagccctggctgtcctgaaactagctcttatagactaggctggcgttaaactcacagagacccatatgtctctgtcttctgagtgctgggatcaaaggcaggccacatcaccatctgtcttctctacacctctttttatttgaccatgagatatgctagcctggcacattccccataccacaggttgcccattctcttccttgatgcttctcctctctaggctggtggctaacaagggtgaaaggagtcaggttctcaccagatgttaggggaaggaagcgccttccacttcacacagctttgagactgttacccagtagcag

SEQ ID NO: 27196 - DNA, 1224 bp, Mus musculus
ccaaactggggaccagttgagattatgtctgagattatgggagacatctcattccaaccaccagagatatgcacctcagattctaagaaatgcaattaattatttacagagtcttagaaactagagcaattttaagactccatggaaagaaagacagggtttcttcaagccatctgtttagctgatgtcaagactgagtacttgctaggctgagttagttatcttggtggtcttgacttttagatgcatgcaatacttaacattttaaaaatctttattgccacataaagtattagaaatggttttttttttttttttaataaataaagccaaaaccaagatttcaagatttgggcagagactctggtcagggttggtgctcttgggaatgaggcaatgtcatgggagtcagagccctcgttctgagaattatctctctgaggtactcaaaggacagaatggctacaccagcagaaggtggttctgggcagtagagggttgtgctaagtcaaacggagctaacatctttccgggcagtgactagcccctcttttctcccctcaattccagagctctcttgcagagaccctggacagcactgggagcctggatccccagaggtcggatatgatctacactatagaagatgttcctccctggtacttgtgcatattcctgggattgcaggtgagatgattcttctagggtgtgtgacctctggcctagagcttatactgtttaccggctaaatgtttaagatagtcaatgtttaatttttattttattatttttagtctgtgtattatgtgtaggcacgtgactacaggtggctgtggaggccataggtgttggagtctcagtgcctgatgggggttctgggaactgaactccagtgtcctgcaagaacagtacatgtgattattaaactgctgagccatccctgtagtctccaagttttattttaactaagatttattgtaaatgtattttacaagaattgtgtataagaattttcaacattaatttccgaacagcagggaaaaaaaagacctgggaagtaaatgctcagggagtgaaaaatgatacagggggggtggggtgggggtgaggtggggggtgggggctgcaggggaagcggagcgggggaggggaggcagcagaaacagaaaggggtcagtagccttggcctcctacccggccttagctatccacaatcctggcaag

SEQ ID NO: 27197 - DNA, 1149 bp, Mus musculus
atgggtcgtggaggaaactttggaggaagaggtggctatggtggtagaggtggtggcagcagaggtagttatggaggtggtgatggtggacataaaggatttggaggtgatggtggcagctatggtggtggtcctggttacagcagtagaggaggttatggaggtggtgaccaggatatggaaactagggtggtggatatggtggtggaggaggaggatacgatggttacaatgaaggaggaaattttggtggaggtgactatgctggaggtgggaactataatgactttggaaattatagtggacagcaacaatcaaattatggactcatgaaggggggcagttttggtggaagaagctcaggcagtccctatggtagttgctatggatctggaggtagaagtggtggatatggtagcagaaggttttaaaataaaacagaaacggctacagttcttagcaggagagagagcgaggagttgtcaggaaacctgcaggttactttgagacagtcgccccaaatgcattagaggaactgtaaaaatctgccacagaaggaacgatgatccatagtcagaaaaattactgcagcttaaacaggaaacccttcttgttcaggactgtcatagccacagtttgcaaaaagtgcagctattgattaatgcaatgtagtgtcaagtagatgtacattcctgaggtcttttatctgttgtagctttgtctttttcttttcattacatcaggtatattgccctgtaaattgtggtagtggtaccaggaataaaaaattaaggaattaaaaaaaaaaaacattaatagcagtgtgtacttccttcctgggttaactcaagcaggtcccctgaggctggctaagagtacagccaatataacatcatgagagacggttgatttttcaatgccacaatgttcactgaaaacacaagtgttaaagtgtgtcctacgtatactccagagaagaactgcaggcaggaaacactcttaccgggagagtaaagaaattcgagtgcttcgcctcctcttcatatttgccttccgtggagcccccagcctccactgacttggatgccgtgttcttgccgatacccatcatcaaggaaggctgagcaacctacacagcggttggcctgg

SEQ ID NO: 27198 - DNA, 1158 bp, Mus musculus
gagatgacaggaacctccatctaagactccagtgtccctggtgctgacgagctgcctctggtcttaaactcctggcttgactaagccctccctgtaaccactccaggccaaccgctgtgtaggttgctcagccttccttgatgatgggtatcggcaagaacacggcatccaagtcagtggaggctgggggctccacggaaggcaaatatgaagaggaggcgaagcactcgaatttctttactctcccggtaagagtgtttcctgcctgcagttcttctctggagtatacgtaggacacactttaacacttgtgttttcagtgaacattgtggcattgaaaaatcaaccgtctctcatgatgttatattggctgtactcttagccagcctcaggggacctgcttgagttaacccaggaaggaagtacacactgctattaatgttttttttttttaattccttaattttttattcctggtaccactaccacaatttacagggcaatatacctgatgtaatgaaaagaaaaagacaaagctacaacagataaaagacctcaggaatgtacatctacttgacactacattgcattaatcaatagctgcactttttgcaaactgtggctatgacagtcctgaacaagaagggtttcctgtttaagctgcagtaatttttctgactatggatcatcgttccttctgtggcagatttttacagttcctctaatgcatttggggcgactgtctcaaagtaacctgcaggtttcctgacaactcctcgctctctctcctgctaagaactgtagccgtttctgttttattttaaaaccttctgctaccatatccaccacttctacctccagatccatagcaactaccatagggactgcctgagcttcttccaccaaaactgccccccttcatgagtccataatttgattgttgctgtccactataatttccaaagtcattatagttcccacctccagcatagtcacctccaccaaaatttcctccttcattgtaaccatcgtatcctcctcctccaccaccatatccaccaccctagtttccatatcctggtcaccacctccataacctcctctactgctgtaaccaggaccaccaccatagctgccaccatcacctccaaatccttt

SEQ ID NO: 27199 - DNA, 1214 bp, Mus musculus
agctaagagcactggctgctcttccagaggacctacagttgattcctagcacccacctgacagcttacaatttactataactctagttccaggggatccagcctcctgtcctctgcagcacaaggcatgcatatggtgaaggcatgcacatggtgcatgaatacagacaaaacaatcatatttatataatgaaataataaaaatttaaaaagacagcgcattataaaaattaggaagacatatccttgagcctgccactatggacatttttgtgtgtttctttctctgtccgtttgctctcccgtgtaatgttttctctgcttaagccattgtcattaaataaatgcagattatattcctacaccttatgtgcattgatgctggaggcatcaggtccatcattgtctttaatgggcatttgccaagtgtatcaccagctcagcttgtctatcatccctgggatttgcttcattaaatacacttccttatttctttttcctttttaagattgatttattttttatgttacgtacatgaatgttatgcctatgcatatgacagtgtcccatgtatgcagtggaggccagaagaggaactgcagtcgctgattgtgtgctgcctgccatgtgggagctgggaactgagctttactgggagagcaacaagtgctgttaaatactgggacatttctttggcacatcttccttatttccttctttttcacttggttggttggttggttggttgcttgcttgctgagacagcgtctcactatgtagccctggctggactggaactcatagagagccacttgcttctgcccttgggtttatcaccaccactccttacttaattctgttcctaatcttgttttttcttccttgcctaatgttttttgtctagctacttcccagttgtcaagagtgctttatatttgctcttaatagccatggtttttatagattgaatcattaagggatcaaaatatttagaatagggatggaaagatggctcagcaggtaagagttcaaactggtctcgcaaattttccaggttcagttcttgatatgcatatgatggctcacaactgcctgtaactccagttcaaggggatttaatttatcccttttctgacctctgctggcatgtggtgtacataaatacactcaagcatatacatgcacataatatcaaatattttaaagttttagggc

SEQ ID NO: 27200 - DNA, 1293 bp, Mus musculus
atctcctggccctggctaaacttgacaagtttttccacatgagtgtgcatcatgtaagagttgtgaagctaactgtctgggaaggcagcctgttctatagtggaaggtgttaccctccttagagctgaacctttcttttgtcttccattgtctgcttggttttgtagcataatgggaaatgtattgtctagtttcttattactaagtaatttatttttaaaattacctatcttatctctcaccctctcctctaccattatatcctagtaaaattaaagtatctgtcttaccttcatatgctcctccaccttcatatcccagtaaaaccaaatatctgtagatccatctctaattggctttttttacattgacagcaacctggaatttttaaaccatgaagctgggtattatgatcccagtacttgggaggcagagccaggtggatctctatgagttcaaggccagcctggtctacatagagttttacgacaactagggctacctagtgagaccctgtctcaagaaaagggaaacttcctctggtttctccatagtttgcctactacaaaactcaggtgaatctgtcctttgtaggtcaagagattgtgtgaatcatacctcaaggactagactttggctgtttcttcgtaaaactgtagataagtgtacttagagtttatagccctactgctggctggtactatgatatcattctgctaaagattacaagacttggccaagatccctgaaaatgtattaagtcaaatctggttctcagcttataaaaagtgacaattttttctaagtgtgtgtgttgttattgatttttattttatgtgtgtggacgtttgcctgcatatatgcttgtatgaggttgtcagatcttgggattacagacagttggaagctgccatgttggtgctgggaattgactcgggtcctctggaagagcacacttagtgctcttaaccactgagccatctctccagctcaacatgtttttgttttaattaaagtgtcataattcaaattatagatttaaaactatttaactttaggtatgtttttgaaaagcgttctagtaaatcccagtatttaggattacctctggtttcaggtagctggcctatgagtcagacttggctttgcagtcggtttttttcctccaaggttacagacttgggcatccagagttctagaggtgtcatcagctgggatgtggaaggctgtgagaagggaagttttgggagaaagataacttctggatgcattgaaactagatatctacacctg

SEQ ID NO: 27201 - DNA, 1099 bp, Mus musculus
gaacatgctactaatgcaagcttcaaaatgtcagtagctttgactgtcagggactacacatttgaaatttccatgtactttgcagaatagatggtttcttggattttatgtgaatttattgtgaggatttttgtatgcattcatttaaaatgttgactgggttttgagttaatagatatacacacaccctttgactgaaaccatgttgaagatatcttcatgaagtttgtatatttgtctatgtatgcatcccaggaaaacattaatgaggaagggtctgcagagcacgtgaccttgatcaactttctcctttctggtcttgcagaacacataatctcctaagtcagttttcttcctgggtttggtgaaagagccatccaaagaaggaaggcttgaatgtctccgggagaacctgcctttctctgcatctgtttttgtagagaggaggcagtgacagtgcccagaagtctttgaggttttcatcccggaagcaggagcatcctggaactgtgcagtgactgtcacagagccccaatcttctgagacccagaccaactccagcttcttctaggaaattctctggactcttgcagcccacttccacatctcctttcttccccttgctcctgtggaaatcactgtccacggccccgttaggtggcgtctcctgctgtcttctcagcacatgctctctggagttggattcctgacttagatttcttcagctgccgcaggggttaggctcacagggttggctttggtcatgcactcctttcccatggctggacccagttcccagcacctgtggcttgtcaggaggttgaggttgagttggtgctaaatcagctgtgaagattagcaacgacttgggcagtgagagccaggcctctgacttagtttgatatgcttagtgactgatgtgttgtgaagcacaaagaaaatcggcctgtgttttattttagtgctgaagtaccaggtaaaatatgcgttaatgctacattaacacaaccctagtgtttcatttaaaaatgcgtaggatttaagaaaatcaagtggttcaaatatttaactttttgacatacctcagaatggtaattaa

SEQ ID NO: 27202 - DNA, 2011 bp, Mus musculus
ccttgacacctctcgttggggcttctgcaggcatctctgtctgagagcagtgggggctgccctctgtagagctgtgagagcagtgggggctgccctctgtagagctgtgagagcagtggggggctgccctctgtagagctgtgagagcagtggggggctgccctctgtagagctgtgagagcagtgggggctgccctctgtagagctgtgagagcagtgggggctgccctctgtagagctgtgagagcagtgggggctgccctctgtagagctgtgagggagaggctttctgatcagatgaacatctgtccaagccaaaattctgcagagggcaggtgagctttgcttatgtagtttgctttcaccatatagactgagagaagatttcagacttctttttctcagaaagcatgaagaatttatgaagtatggaaaagaagcccttacatattccagatgtgtgcagcagggggcactgtcccagccctctctgccccagccaggcacagtggcctctagagggtggtcctgtagaccgcaccttttagagtcgaggcctctgtggttgtgccgcgggtttgctgctgtgctgagtccttctgggggagccctaagaggtggggagcagaggacttttgctcagacaccctttgcctggaagcccacttgtgttgctgctgtgttgtgtatatagtattctcgagatgagcgtatgtgtgtctgtttaaaagtcaccttgtttcctacatgattttagtcatacccaaacgtcctcagaatccctacatcctgcttagaactgtggccggcctaatctgtcaagaggcttggctcttcaagactcagtgtccactttatcaaatgtgaccggtgtagctgtagtttgtactttcctggggaccttctgctggggtttgtgtaagctgtgattctttcccttcctaataggttgagcttgacatggaaaggagcagttggcagggaaggaacttattccccaagagtggtaactaacccacagccctgctcggtgtgcccaccgctgagaggctgcagtgacttccccaagtaccgtggtctgtgctaatttgttttcagattagtcttcctgtggcctccaacactcagccagccctcagagtgtccgctgtgcgcacgggggcggggcggggcgggcagctccttgtctctcagctttgactgacttgtccgcattggggatttttgttctcagctcccaggccgcactgaacacagtgttgctgccttcagtttggttctggccatgaggcccctagtgggagctttgcccttagggctgtcctctgacttgccctcaaagttcaccaattcggcaactccatggagacggtcgtgtcactctcagcccctgttgctattaagtcatgtcatgggcacccggaaaaggaaatacactgaggtgtattttacaattgctccttaagattctcagtggagattaggagcaacactgcacttctgatagaaaaatggccttggatcactaaactaggtagagaagggcacaccacaccccagcgccccaggagccaaaactcacgctcgggcagcagcagctgaggcttgaggaagctggtgtcctaagacactgaaacccagtgctcattggagctgccagccacaggtttctattctgagttctccagtcttgtgaaagaggagaatttcccagtcaggtagccaggagaacagtgccaccctgcgattgtgccaccctgtgattgtatagcgtgttgtttgttccagtaagcaggcaggcccagagactgctttctcagcaccgcacagatctcagtgggtcacataacttgctttacactcatcttgttgtgtcagaaataaagtgttcgtgcttttccttgtcaggagtcccgtgtttgtcacttgttgtgtggttttatgtttcccgctgtgtgagcataaacactgtgcagttttcctgcttgccagcctgtgtgccatctgttct

SEQ ID NO: 27203 - DNA, 2556 bp, Mus musculus
ttctgctttataaccgcatttaaaatgtattcttaatgtgctgtagtgtgtgtgagccggtgtccagaggtgtgaaatataccatgtaatctcacacaggtggactgtggaaccgtttttatggattttgcccctgcttgctttcatcctgtaacctagcctgtattatacaagaaaacttgagcaggacatttcaagagaatatgttggcctaattgttgggttggctgggacctgctctgaagggatccctcagttcaccgattggcaagccaaggtcagtccttgctgttgatggagctgggaggaggagggacctaaggactcaggacagagcatctcacgcgaagttctgtgtggcagtcaagtgttcctcgtggagtcagcctgaggtagatttccaggaaagccttttcctcgttaccagtgtgtgatgtcacaactgaaacttgtgttagtaacgtctaaggccatgttgcctttgtctttagagtaattcctggctgtgcctaccactcctgcatactgtgcttatgtgcgtgctgcgctttgatggggaggagggcaggtccctgtgcagccagggttcttgctccttccatggcaggatgagaaggaaggcctaagaggctggccaggggcctggtgtagacacagtagaagacagtcaactatgggcgcattctgtctggagctcccagaaggagctgtgtgctgctggagaggaggctaattgttggttcagactcctccgcttgggtaaaagactccccttatcactctcctcacagttgctctgcatctttaaagagtattagcttctgcttccggactcagtctttgttgagtgggccacttccaggggtgtgcccggggttaggcaagtggcagacgagggttcttatttgaggctttgctaggctcatctgctgtgtcctgggtagtccactcatattcttgcagggtgagtccatgctcaggagaatgcggtccacctttctatgtactctagcttccctctcttcaggttgatatagcgacattacctgggctctgtgctgtcctgtgggtggaggccattatcactgggctgctgctttcctgggcaagccactctctatttttctgcaaaggtcaaaagaccctggtgttgggggccctttagagggtgtgctttggacgctgacctcttagggctttaggacagagggacgatgttgagtctagaagggcacaatatgccagagttttatggccagtgatcctcaaatccattggctgtttgaagaccctgtcctcacttctccttttttcaggtgactctctgcttggctctttatcttactcttcagctaatgaagtagcaacagtgtgttactaatgattgcaatcatacagtgcttaatatgtgccagacacagtgccaagggcttgcatgcattatctcctttaatccacaagcagctctggcgaggtggtattagcccatcttacagatgggaaaactgaagttctgtgctagagattgagaacaatgtaaagacttgaggcttaggtagtgctctatctggtcaggctataggctgcgggcagccttcacttccaaccagccgctgtgaggatttagtgagctaacgcatgtaagcatttagcaaggtgcctggcacatagtaagcactcaataaatggtagtttttttgttcttttaaactgagctcagcgagtttggcccacactggtgggctgctgggtattcagccaccacactcttcactgcttggacctagttggtgtttgtgttctgtaaagtgagcacgttgtcctcccaagagaagcacttcagtggtgcagtggtaagagcccacagcattgaggccagcctgactgaaggatgatgtgaggctgtttgtcacttctgttcttttccccgtggttgagactgcccacaggaaaagggctggctgctctgacatggtggggcgtctcctggggcctggctcgctctggaccctgctctccccagccacgttctgtagtctgttgtacatctcaggaaccctcggttcctccacggatggacgactgcagaatagagcagaatagagaaagtaagcctgaagctgagtgcctcagccacaaacctaaaggagctgcctgtgtctgacagcacagccattccatctcttccgtccgtctgtctgtctgggttgttttgttttgttgttgttttgagacagggtttctttgtgtagccctgactgttctggaacttgctctgaagaccaggctgacctcgaactcagagatctgcctgcctctgcttcccaagtgctgggattaaaggcatgcgccaccttcacctgggttttctttcttaaaggaacaggttagagcaagtgaccgttgaggacaggtgatgtgaatgtttgttctagatttaattcagttttctgaatggacacagggagttgggagtatgtgtgtgtgtgtgtgtgtgtgtgtgtgtgtgtgtgcgcgcgcgcgcgcgcgtgtgtgtgtgcttcaccttgattgagt

SEQ ID NO: 27204 - DNA, 1099 bp, Mus musculus
accgtcttagccctttgttttccttactagagtatctttcccgcacccctaggtttgtattctggttctactggcttttctcagtgggacaccaaggtagaaagggagtaagaatggttttccagtgagttgaatgtgcacacgtttatgagaggcctttgggtgagctttctgctcattccttggtttgtcttgggtcccactgggcaggtgtctagcactgagagggagagtgtagacaagggagccacggaggtactggaggcagcaattcctcatccagctcagggactcctgacagccaaggggacagcaagaggacccagagcagggaaaggggtcggggagtcacacaaccaaaggtagactcagaccagttcagtgctcctggtggccatagggaccagaaagcagcttaggaaatctatccattggcccttttagagtctctgtgtgaacccaactctactgaacttaaacaccttccaaacagtggcaggggccacagtggcagacagggtagagtaccccaggcagtttctcagcctcgtccgttgtgtggagggaatactgaattcagttatctcacctgactgctttcctgccctcagacctggacactgggcctcagcccctggccgtgtggaatccatgggatcctcgggactccccagacaggcgtgtgtgagtgtgttctgtcatgcagcctcagcccaggctaacccagtcagtgttttcaccacgtctgacctttctctctgcacttaggattggtgtccacttgtagatttctttcaacacagtataagaatgtgatatattgtatattggaaagtatttaccttatttatatacctgaatgttcctattaaacaaataaacatatactaaattctagattgtgcgtgttttttgatgggagaagcccttttaaaacgattttatgtgtatagatgttttacctgcatgtatgtgtgtcctgttgcgtggacaagccagaagagggcatgagatccccctgaagtggagttacaggtgggtgtggggaattgaacctgggtccccggaagagcagccagtgctattaatcactgagcca

SEQ ID NO: 27205 - DNA, 1134 bp, Mus musculus
agttggagcgcctgaagcaagaattgccagagcttaagaactgtttgtgtcccactgttagccacttcatcccttcttctttctgtgtggagcctgatatccacgtggatgccaacggcattgatagtgtggagaacgcttagttcacagtgcacagaggacatttaggggcacaccgctgccctcatgtttagttttcaccatcgagcactgctgttgcctcttaggtttttcagtccaatgaagcaataatgaagtattttactatttcattacaggtcccgcaagaatatcaagtatgctatttgtcacttgtccaggtataattaccaatcagtctctgtacaataagaaaatatactgttaaacatttcagtgagatatctaagcctataatggtgaatcttcattaaaagttggaaattaacgatataaatatctcatacttaaagttcaggcttttcatttgattaagtcttaaatcttcagtgcttgagaaaaatgattgcataattatacctgaccatggaaaaactaagtacctcaatgcatgcatttgcactggtggctccagctgcacaggtctgtgtcatccatgtacataggtatctttacatggttgataggaacacgcaccattttcctttagtataaacctcagattgctgccatttctcacctgacccaagccagcctgcagatgaacctcaaaacttgtctcataaaccattcaaagatattaaagttccagaatgctgcagggtaacttaatgtataaagtatttgtaagaagtatatattgcatatatagtagtgtagatcagaaggtatcaatttgactcaatgcatgctttaggttttaagcatgagattgtacatgtttactgttaagtccttgcatctggtgctaggtgagggagatgttaaggacataaaatattttgtcgcctaaaaaacaaagtctgttttagacactttgagtatgcttatttagtgtctcactacctagtaaacataagtgtctcactacctagtaaacataattgctgtgtgttgcatagtagttaaattcccatgcagaaaaataaatgtcctgaattctcaaattggtattctttattgtttaatatatat

SEQ ID NO: 27206 - DNA, 2804 bp, Mus musculus
cacttccttctgaacgtactgtcctatgaagaagcagtcttcttaaaacttagtcattgtaaatcatcaagtgatttgtcatctaaattctgatttttattatattgttgacatagtttgtaagaatgcagaaatgcataagtgtcgttttttctgtcttggttaggttctgccagatcggagtcatcccaaattattgatgagtggcggtggagggtaccttctgtcagggttcactgttgtctcagacagccttcgggcagaccccagcctcaagtcctgcacaggcgctttagacccacacaaggctgaggagccagcagctaaaaaacagaaatgcatggaatctgcctcttaactcttaggagattaatgtttgttccaaggcattctgcagctggtaattacactttaagtgtcatcactaaaattttctccttgtcctaagagtgtgtgtacacctgttcctgggaagaagtaagcctttcgtttgcctctgttgcagaaggattagtcagggctgcaactctgatggacagtaatggattggtacagcagtcctgtatcacagcaggctcggtacttaaaggatctgcagattccttgggaatgtcaacaccttgaaaatgttgatgtgtaagtctttgtttatattttaagcaaagatgataatacaaactagccacaacatggtgagcagtgaaaggaaatttcctctcatccactcttcctcctaagcaatatggatgtgtgtgcctgtgagatttacagtaccaaaacgtctacccttgccctgcaatgaaagaagcttttttttagatactagattttgttattttaatagtcaatggcctgaggaagatccaggtatttcttttcctgcctctccttttttggtacatagaaagggtggtgggtgctcctttgcggtgaaagggtctcctcagttctgggtgaagtgattggaacttctgtgtactattaaacaattgggtttttctctctctagacacagacacacagaaacctgtatcagtgttggtatatatgcatacacatagatgtatctatatgtcagcatggacagaatgtactacctgtggtgggacagagaaggaatacacgtttatttgaactgtggtaaagacttgtgcaggacagagcagctcttggtgtgttgctgttactcttgtcaagtatgtttcaagtgccttctggggatttctcacactggtctgtacatgtctgctggtgtgaggtgggtgtctttatctgctctgaaagaagtataatcaaattccttaaccatctccattgtaaggaataaaaatgtctagagtaattgaaggctcttgttcccttgagagtcttgtcctgttcactaggacttgtgcggtgttcttgtcatcatagaagcctggccagcgtggagcatcttggaagataaaaatgctttcctaataacttgtgctgttctgataaaggctgctgtgattaccaactttggtttttattcctttttctctaaacaattgcttttaaagaataaaattttcctactctgagccataagtcattaatgatacaatgctgcatttattacattgagctgacggtgacaagtctgtgtgtgacgacacatgaagtcacatttaaggagaaggtaagattggacagatgagactctccagtaggactggtcactgttaaaaatgatctcaactggtgtccaggacttgttccattctctgaatcatttaatctgccctccaaggttggggggcctctaaggtctgagctactggcagatcactagcaaatagcttgaaaaatcaaaaatagaggaggggagatttgaaggagtgagctcaggttgaatcgaagtatgaacccatgaaaataggagagtgtttgcatgctgtttggaaatattgattgtgaacactgaagcagtgcaaatgctagagacaccatcctaaacccccagcatttgggccttcatcttatgatgcttggtgtgtggtgccaggaaggagagtggacctaacacctggaagtagctctaggataatactcatttttacttaaaataaaagattacatgagccagcagtatggcttagtggatgaaggtgctcgctgcctaagcctgcgattggagttcttcagaacccacatagagtgaaaggacagaaccagctccacaaagccacacccacacatcatacacgagttagtttttcttaagttacaaattttatttgggcttaactatgagcacaggtcagattataaggaacaaactgttagctatcctgttaacatttattaggtacctacagccttttgaccctttatctttgattcgttggaataaatattttaaccagatctaaggtttttcaaataacaataacatgatacctcagagttcacagttcagtgttctcatcccatgtacttcaagctctttgtacatgttttattgtatgtgtgtatctggtgtgtcagtgatggcacagacatgtcatggtgtacatgtaaaggttaaaggataactcccaagagtcagttcccctttgcagccccacattgggcgccacctgtagctgtccagcaaccatgcatgaactgggtacctgaaagggaagctggaaagggctggtggggagaagaattaagccaagacaaaagtttctgaccaaggctcaaactttaatatttacactgtatttatacagagcccatagacccgtcctttgttttagctagattatgttacaaaacaagttcaacagatagtc

SEQ ID NO: 27207 - DNA, 1150 bp, Mus musculus
tagtgattgctattattgacatttccctttgctctattcatatgcatttagtgctaaggaagcagagtaggtacttaactactttgatgccaacactaatgctttacatctccagtgataatacagagccatgcacaccagcgggccacttggcatcaggcaggcctgatataagtggcttcctgtggccacgtggcactcgctcttggtcttccctacctgtcattcttcttagcctgcaggcactagcggctctactcactagtcaggtcttcctaacctgcgggccttagctgttcgtgctcgccgctgccgcgcgggggcgccggtgagcagagcggctgggtgtcgtgaaaacgtcgtgaaagctgactcccttggcggttcaggccacctgtataagcggaaagtgccagagtgtagaaattagtatggagctgtccatacggcctcggcaccgctcgacttctctagagaagctggcagccggtgccaggggcgtctgagttctcgactcttggactccgtggaggccacacggccatgttggcttggcgcgtggcgcgcggcgcgtggggccctcttcgcgtggccctccggcctccgggggcgcggctcggcaggggcggctcccgcagggccctgctgccgcccgcggcctgctgcctcggctgcctggctgagcgctggcggctgcggccggccgcgttcgccttgcggctgcccggcgccggcccgcggacccactgctcgggcgcggggaaggcagccccggagcccgccgccggaggaggaggtgccgccgcgcaggcccccagcgcccgatgggtcccggcgagcgccgccagctcggtacgtgcgagggagggtcggcgggacgcaggtgacgggctcggcgctctgtcgcgacactcacccggtgttctgggaagttacgggcagccagggcgttcgatcttggtgaacttcaggggtcccccgccgggtacagtctctggccaagttgaaacccactgtaatccccttgtgtgcacacccgttgctgggaggtgtgtctacacgttgcataggtaaaaacaaccatcgctcgtctagttaatctgtttttaattttttgaagtgaatcttcagggttaagttcggcggaacc

SEQ ID NO: 27208 - DNA, 1186 bp, Mus musculus
gccaggcagcaccccctgtacaagctgacacctggcaccacctaccatgtgtgtgtactggcagccaacagggctggcctgagccagtcacagacctcaggctggaggaggtcatgtgccactttcacaaccaagcccagctctgtggtcatcttctggggactgtgtaccgccagtggcctgttactggttagcaccctggtgctgtctgtgtgtctctggaggcagcgctggaagccacacaggcagttctacgacacacacctggtggccttcaaaaacccagccagagctgaggaagtaactcagtgggagtgacttcctagcctgtacaaggccttgggtttatccccaacatccaaatcagacacatttgaggccttgattttccttccagcaaccagattaaacaaaccagccttggccacctgcagaggctccagaacttcaattatccccgtgtctcctatttgaaatacatctgcatgcagaaacatgctgatgcctaaggacaacatgagcttcaaattccctgaagccaccatgtctcaggctcacacagaactacactgtgtcctcctctgttgaaggaatgagtgtatcacccttcctcctatagttgttctcactacgcctgtcttactagctcctgtcattctgtgacatcctttacattggtcagtactccgtatatccctcagtaccaagtgagatactacactgaaggagatgggataacaaagcagttgtaagaaggaacaactcctttagaaatgccatctctaagtttcttgcatggacgttcccttgtggcccgattttagcacaatgagttctgttggccttgagctgatagccaaggtaagagctattgttggtttgctaaggccttctggattcttacttgtatttcagggtgtgtcaaaacatgtatttccagagttacagttaaaactggccttctggtaacatttgtgagacacaggcaatttgcttccaagtctttctgtatttcacccatgttggtctcaacttagatccttctgcctctgtctttccaaatggtgggattataaacatttggagcggaggcaaaattgaactcacaacagtgcttatttctattgtaaggaaaagttgtttgaattcatctctcatcttcaaaacaggctgtagcacaaacacc

SEQ ID NO: 27209 - DNA, 1220 bp, Mus musculus
tgttcccacctctgtagcaataaaagagccaaaaaggcaaggtggctcctttgaacacacttcacactgatgtaatggagatttgatttattccttttgaaagatagtagtaagctgtttggtaaaagaaaaaatgctattaagttcaattttacccagtttctttaccaaagtagaggtaagaattctgtctgtgtgaatgactcttggtgaaaattcttcactaatctacctctcaggtaagttagtataatctctaagtatagtaagtgggattctctttaatcctgctaatttaacattagttgccctttggaaaatcttttgccattagaatgtagagtgttttagtgtcactggtggggccctttcctggaattgaatggtagagaccatatgatagatgcagaaaatatcagtggtgcaaaagaacaaactgtcaggctcatgaagttataaatcattgaaacagtgactgcctttttagcccatgctctctgcacatgtctcaggcacataagagattacaggttggctgcttgattattttgactaatagcaatattgtatagtgtattttgtttctcatatccttaacatctttgtcaaataaggtgacaagccagctgatctgcggactcttgtatttactggaaaagtagttgtcacttgtctctttttaaatagtttactttgtatttggggttttgtgttttgaagcaaggtcacgatgagtgtcccagctagcctcagatttacaactctccagacttagaatttcctaggagtgctgtgatacatggcatgcacttctctgactagcagctgtattttcaagtagcataaagtagaatgattaaaaaccaagtttctattgtctattaacctttgttttaaaactgtagatctattcttatgagttagcaggaagataagtctcttgccaagtaaggtcaattcaaataatagcctcaagaaaccatctacaactgtgagagctgggagaatgaccacatttataaaatgaggacaataattcagggtttgacaacaagtcagagtttcgtgtctattaaaatgggattttgataaaaataatttttaatgtgactctctaaggtatacttagtaaatagtgtggtagaaaataaaattgggagatagtacaaaaattatctctgcattacaattagatacgttggctactatttttaagggga

SEQ ID NO: 27210 - DNA, 1748 bp, Mus musculus
aaggtttattttcaatactttgttcatataaaattaaaggaataaacaacttaagattagataaacatttaatacatttttgtgtacataataaatttaatccagaagtgaagtgcatgaaaatgtgattttctaaaacaaaaaccatgcttcccttccattgccatacctgctatttaattgtagattgctattttctggatgttaaaatctggtgaatgagatagcaattgtggaatgagggtgtatagtgctttatgcacagatggatagagaaaggtgccttgttcttcattggaatatctgaaaattccattacctctttttatttttttcttaacccttcacctccttaaccatgctgaaccacactgacttgcttagaatcccatgggagcgatgcacaggcagttcacttttctgttgttgttattgtttggttttgaaggctaatcatggaacatggaagagatgtctcattcactacataggccattgtgctgtgtggcagtcactgcagtctcatcctgtacataggatctgtacctgttatttataataactagtgcaatggaaggcaaacaagcttgacacagatcagctttggacagctgaaaagctacactttgaccttttagggccaactcctggctgataattaagatattgccatgtggtttgagtatatgtaagcttgaataagtgcactgtgtaacatcttttggggaggagattaaaatgctagttaagggaatatctgccatgtggcttttgcgagtttggaaacaatggaggtcaaagggaagttttaaagaattgtaaagggtgaaagatatttcagcattaaaatcctaagcatgaagtgagggaaagagagagagaatggagcttttgctggtgtgtacaggttttctgtgttcttcctcttagtgtcctgctgttattcctgccagtattgtacatttgtgattgactagcctgtcaaatcattcaactgtttggaaagtatttgtgtaaatctttgtgccaacaagaacgctctcagtgttgtgtctctttacctcattgacttgatccttgtgagattgtagcttctgacagaagccaaggtggagtctcatgaaacctgctaggtcagttctttgagcagctacccaaagcaggagactcaactgagaaaccttggacagcttcagcctagcatgttgacctcagaggcttattctctaaagtttcgtgtagactgtgatgttcacctgtggctttgactcatttctaatgtggtttaattttatttgtctttggaaagctttgtagaaatgcaatttttatactaatgacactgttcatttgtgagtcagtatattataaaatggtgtgtttttttgtaatagttttgattgtttagcccagtgtatttattttccattacctatgtattctgtgctctcaaatagatgtgtagcaattgaaatgagaaatcagttcatcatttcaagtactacattgcctgcattacaaattctctgatcacagaattgtacataaccctgagcctatgtactgccatttgattgtcaggttccatttgtgtcaaaacctaaagatagtgatgaccaagtgaaacagagtggtgtattgctttttcatatgaatattttcacataaaagcatttgtgaaagcagttgaaaatattactttgttaaaaaaagaattttcttctgtgtttattctctgagtgttcatt

SEQ ID NO: 27211 - DNA, 1064 bp, Mus musculus
acttcttcaagagtttctccagccacatcctttgtttttctgaacccagagtgctctaagccttgtcactgtaaggtatttttataaagctgacttcaggtctgtggtggttagtttccatctcaagaaacctctctggaaccactttaataacaactgaaaaggcatgtcggctttgcttttagtgatgtgcttttggtgaaaaaacaaattgatgaaagtcaatttcagtaggtaaaagattttatttgtttctatctcccttgatcctctggagaattgtgtgattataaatctctccctgctcaatccaatatcagtatcaaggaacccagattccttattaaataaaaaaaaatctctatctcctctcttaccctctcaagtctgagaataaatccataaaattagattctagctatatgaaggatgactaaattcaatcttattcccccttgggttgagtcagaataatgagtacaggtttgtgaaactcaaaatgtttcatcattttaaaaaggggtatgtagtgtatttctctggctgcttagataacgttttctttgcattagctgccaacaggagggtcattgttagtggaggttcagaatctgccttcctgtactgcacaaggctgctacaaaccttgcacaaagaaagattttattgtgacaatccattctttatgaatgtttttgtttcatctttctaacttagttaactgtcagttcaaggctgaggccatcacagaactggagaccttactgcccttccatgtttctgcccttctgatacatccttactcaaaagtgtcatggttctgtggtacttttcatcttcctaatagagctgagctgcaccttctcttctgccagtatatttccttccttccttcccttgtaatccttccttgatgcatggagtgtttaagcaatagtaaatccaagttcagagtggtgggaaagggacgacttgcatctctgttctgtgaagtaccctcctccaaatcgacatactgggttttaatgggatatttgacaagagggaaagcttgaaggattaca

SEQ ID NO: 27212 - DNA, 1196 bp, Mus musculus
agcttgttttaatggtcaggatatgcaaaaatgcataggaaatagagtgcaaatgtattactactatcttcaataaattttaactgagtaatttcagttttattctgacagtaataaagctctggttatattttagtttgtatatttacttcacttagttatgttttgtttaattcttattttcttctaaggagaataagagacaaattatatcatgttaaagctaataaaatcattgttaaaaggtcttaagaaataatattatatagaaaaactatggttttagagagtgggacaaagaacattaaagcccagcagtaacaatgcccatggctttgttttactttaaagggaacctgtctgtttataattttgcaaggcaaataacagttgtgtcctgaaattttgtgttttaagaatttaatatttttctggaaatgattttatttaactttaagcaataactaggaccataattaagttttaatcaaaatgaaggcttgcttcaaacaccatgaaagtgtttgatcacacacacacacacacacacacacacacacacacacacacacacacttactgagacgagacataagggggaaatcacatcccctttagagatgattgtattttatctgaaggaccaagagtgttaattaacttactaaagcttaccttccactgaagagagatctcttgtgaaccatttaacttttgcactttgaaggaaaggaaaggaattactcagaaggaagtgagacggtccaaatggaatgctgaattttacaaacacagtcacagactgttggaaattggagaagagtgaacggataacaggattcgaaaccaaacacactggtggttatggcaggacattggatttcatcatagtccatatagtgaccgaggttgaataaccttgactttcaaatcctgttttggtagttggacttcattatcttggtgattctagtcattttacaatgttttgtatctggtcatttactgtaatcacattttttatatctgtacagtgacactttttgcagttgtggggtagtgtgtatcactgtgcatcttgcatcatcgaaactactaccatgatactatccatcgataatattaatattacttgaaaatagacaaaggtaaagaaaaggggtctatatgatgtgcagttttgtgcctttatgtac

SEQ ID NO: 27213 - DNA, 1165 bp, Mus musculus
gcaatatataaatatataaaataaaatatataaaataatatatattttataggtcttttgactactttgatttttgtttttgtttgttgttgtttcttttgtgtggatgtgtttactttttaaaagaatgaacataaagttgggtaagaaggaagggcagggagaacctgggaggagtagggggaggggaaaacaaagtatattgtccaaattttttctaattaaaaatataaaagatgaacgggtgttttgcagggctgtgtttcatctcagcgatcaactggttgacctatatgtgaggtgagtggaaatcccctgctgcacagagtgaggctcaattttgtttttaggaagaacaaaatatatcatttaaaacataggaaatgttaagtatttcctaggtttactgtttgacattaaatattcttagattaataataaatacaacattttaaatgcagactttgcaagccgagtgtgatgatcctgcttagaatcccagcatttgagaggctgagccagcaaattgacgtaagttccaggacgaagaatgagattctggctaaaaatgtcagagtctgaagaggtgcctcagtggttaaaattgtatactgctctcgtagaggaccagagtgtggtacccagcacccaggttggatgggtaatacatccatgtgtgcaaacacacagataaatgtaaacttataattaagaagaaaataaaatcttttttaaataaacagacaaaaaaattacccttgctgtaaaatatctcaataaagttatgttacctcgggtaatagcataacaaggttaaaaaccttgattttgaaaaattaatcatctttaaggcaaaaactatcagaacagcctcagacttcctccagtcatgcgccttgctggcagtaatgtatacaatgatcctaagaaataaaagaaaatgaaaacaagccttctacacagagctgagcgatcctttctctatacagcaaacatgcagacatcttgacataaaatctttaaggaatatggatcttataatcccttttaaaagaagttattctggaagcagatgtcaacaaatgaagatatgaatggagaaaatgcaataaatgagccattgctgaaaccatttcactgtaagacttagattaattcaaatgcc

SEQ ID NO: 27214 - DNA, 1142 bp, Mus musculus
ccaggacgacttaaggggtatttataaaatggtgtcaatcagtactacttaatgagtgactcagtataatgtgtggaatgacttgttggttctggtttcagccacatagtagattccgaggccagtggggtttttgttgtttgtttgtttgtttgttcagcaaatattcattaagcccccactttgtcctaagttcctttcagcaccctgggaattgcaagcagatgaacatcggtccctgccctcaagaaagcatgcaatgattttgtggcatggcagagagcaacggggatcctaagtgttcaactctctagagagagtgcttatcacatcagctccacctgtgatgggatattacacatagataattaataaaataaaaaggttatatttttactttggccaacacttaaactctgagcccaaaatcattgtcttgctttggggaacatggcgtagatacattcaagcctaggcaagaatgtgcttctctgccttcgacattgtctctggcgtctctgcctttgtgagttcagcagaaaggaggccacctcaggaagcagtcaaaaggagagtttcacttctgattttatcgccagcatcttttacagatctacttgttttttatttcatgtgcgtgtgttggcctgtatgtatgtaagtgcacggcctgcaagctgggagatttaaggggccaagagggtgatgaatcccctgaaactggttacaaggttacaagtcatcaatcatgtggatgctggggactgaatccaggtcctctgtaagagcaatcacttagccactgagccatctctccagccccttgtcattcaaaagaagaacaaaagcacaaatatcaacagacctttcgctgttttcaaggagccgactttatggagggaaaatgttttcacctggttcctggatggtacttcatctgtaattttccagagaacgtaaaccttctctgcagttgacttggctccaggcctagccagagaccatctcagccaacacttgctccatctgttgggtgtctttgtacagtgaaaaacttgtcccaccaacatgtcatcctgcctaatcctagaaaagatgttctttagtgtttgaatctcaggtggctctcagaaatcctgcat

SEQ ID NO: 27215 - DNA, 1101 bp, Mus musculus
agctaggtcccacctcctaagggtgctatggcctccaaaattggcaccaacggctggggatcaagggtttaaatcctggtacctgtagtaaacattttagatccaaaccacaaccataacagtatccttattctaagcccagattcttctagcggtatagtccacccccatccctcatctgtcaatcatgtatattctcttggctccagcaggtattctttacaatggtgctgggttgtttttgtttgtttgtttgtttgtttttgtgtgtgttgttgttgtttttccccttccatgtaggagtttacagttttcagagagacacacaaacagctactttataactttacatctttgcctatgacttcattcttcataccagctaaagaaatctgcacaaaaaaagcctttgagcattatttatataaaaaaaaacctcctccacaaatccccagggctttcacgattaatttctgtttccctaatttgccgaatgcaagccatccttggtctgaactgtgctgtgaaattttaactcctttatttgtataacctgtagtaagcattattaaactccaagaagctaaatgctgtggctgctgtgtgcttgttgactttgaactcctcaccctcctcaccgctcttcagagactctggatgagggcggggctttatccctcccagcccgcttagattccaaccccagtgcgggtgggtgctgcacctctgcctccatgtcaactgctcatgttttagctacaacatgacttgtgcccagaataaaatgggtgcatgtctgggactaaatgagtgtgtccttaatgagtgagtggtaattgccaacattgcaaattctgcctgtggagtacattagagaagaggtgagtgagcgagccaaaggagcgtcacaggtaagagcaggaagccatctacacacttacaggggaatccctgggtgctgacagatggcccagtaaccattttggaaaggtgatcagtcatctggaaatgctgcggtcattatttctctatcagaaactaatgtcataatagcaaaccacgcccaaagatgttccccacgacacagtccatctttcatct

SEQ ID NO: 27216 - DNA, 1202 bp, Mus musculus
actccagaatttgggaaaggtacttgaatcaagttagggggatgctggagccgtggggtgggagagtatgggtggggaagcactctatatagacaaaaaggaggggagagggcagatgtgggatagggggttggtggaggtggtaacggggaagtgggataccatttaagatataaacgaatggaatcattaaaaaaaaaaagttaggactgaaccaggacaggccacaagtgtttctaaaggggatgaatgaacacttactggtttttgtttttcttttatgtgtttgttgtcctagcaaagtggatatgctttcctgtggtctacctcagccaatgacctccaacaccagctatggggatttctcttttcgtttcgttgtggaatcatttctgcagtagactccagttgtgtgtcccgactgtatcaaaacagtacacgatcacacaggagcagggctctgttcctaagaccatccctgccaaggctcaggtgcttttacctgggcttagtacatgttggtcaggcttcccccagcctctttcttggatttgaataatttgcccaagtgctccacagaactcaagaaaacatgtacctgagctccttggagatacgcctagggtgagagctgaggaaggggacgtggaactttcatgtcttccctgtttgctccaactttcgggaacttggaagtattcagctgtctggaaactgaagtctgcccttctgggtttctatgaagacttgattacaaaggcacagctattgatagactgggcctggcttggccagagtctttgtgcctaccaccgtagcattcgtctctctagactgtgagacatgctacttctgaaatgatgttgagggtcataggaactagttagatgtactgtagatccgtagtctttttgtttgtttctttttcttgggggtaattagaagacaaaaaaggcagtgtaaggttagagtttctgtgatctgctttggtaaggaaaaactctaatttctcttgcctactgtaggctgggagttatgaaccaggaagtgtgaatgaaaactaaaaaaaacatgtattcatttatttaggtcacctcagggttttgaacatatgcacttatagcaatagattgacaacgtaaaagatactgccacaccactctttgtcaccttaataattaaccccatctgttgtcctactg

SEQ ID NO: 27217 - DNA, 1469 bp, Mus musculus
aattagttgtacgaaaggaaagcaatgctatcctgaaagtgatagaattatccaaaaaaaagtcacgtgacactaaattaaacagtttgatttgacatcatctaagtatctggctcaagttcttttcatgtggtttttcccagaaatttgtaggccagattttcccagatttttgtgtaccataaaagtttcttgcaagatcctgttgaaagaacgattcagatcctgtggcttttaagcaacctccaagactctgcatttctgaaaataacccctagaacttctgcggctgccggtccgcttgccatttatgtaataaggatgggtttagcaggaagagaggctagggccagtgggaatcttcggaagggaatttccatgcataaggctgtgtttctggtgttgtaggcgaaggagatgcagcagatggtgaaattggaagccgagatggaccgcagaccagcaacagtagtatgaaactccagagtgcaaactgaagctggaagaccatgcaacaccagaagatcatgcccagcttccaaacacagactccacagacaaaagctgttttctttgtgtttcttttatgtatagacacggtgttacctgaaaccacatggactggggatgaccaaacgctcttatatttaacaatttgagtattgaatttctttggccaaccaaaagtagctatgtacacatacacacacacacatacacacacacacacagagagagagagagagagagagagagagagagagagagagagagagaaatcccctattcctgacaggcagagttgaatcatgatatatgacttaaacatgtttgctatgagacagcatcacaagccagtgggcttggtgataacaactctgctttgtggtgcattaggacatgtttgagctgctgctgctgcaaaacaaaacaaaacaaaaaaattagtgcattagtaacttaatagtaagcgcatgcactagaagaaacacctctgtctccagttcattagcagaagtggccgtctgctatacaaatcacttcgcagaattttctacacctaagttacctcatcagtaagtgccatgtctttaccatgccataagatgctaaccttcctgtaaatgttgcagaaatcgttaggacaatagagacacaaaacggtgtatctgtgccaagctcatcaatgctcccagggggactcggcaggctcgtttcagaaagtttacagctgaccctgctttgtaggaattgcttctgccgattccacatattgcaattcactctacactataaggatcgtcaagtggttattggcaaatgtttgtaaatgtgaccatgtacaaagtatttatactccttaattctcacagttatagctcaaagtcatctaaatattaccacacgacaagactagtgagcaggaatcatagacgtaatgttttgcatgatgcacaagcaccaattat

SEQ ID NO: 27218 - DNA, 1184 bp, Mus musculus
aacttcacttgtatacttgtgttcagttattaaaaaggatctgaaaagactttgtcttaggaagcttacagttaggtaaaggagagaccacaaggtccagggttacatggcctctagtgagctgagtatgagggtagaagtgtagctgtggccaagggagaaacaattcaattgaaacagacccaaagcactctaaggaacaggtgggtccactgttggatgttgggctatcgataggatggtactttaagagagagcgttccatccttcagtatgtgtaggaagaagtagaagttcctatagctccgtcatcaaagacatttgctatggaatacttggccagattctcttccttgaaaggatttgtattctggcattatttattccttgaactaccattcaatttaggatggtagaggcctagaaatagaagagaccttgggggtcaccttgctaattgagaggttattttccaccatcctgtggatcaggaatactttacatgtggggcctgcactttgattcagtaggtagaggtgctgaagcataggcctgccactctctgtatcccacaagttggcaggaaatgggagattcctgacagttgtcctatggcctccaggtgcagccatgttgcacatgtgtgcatgtgcacacacacacacgagagagagagagagagagagagagagagagagagagagacagagagagagagagagagagagagagagagacagcagagacagacagcagagacagacagagtctgggactgagaaaacctctctcaccccctgtactggctagttttgtgtcaacttgacacagctggagttatcacagagaaaggagcttcagttgaggaaatgcctccatgagatccaactgtaaggcattttctcaattagtgctcaagggggaaaggtcccctgtgggtgggaccatctcagggctggtagtcttggttctataagaaagcaggctgagcaagccaggtgaggcaagccagtaaagaacatccctccatggcctctgcatcagctccagctccctgacctgacctgcttgagttccagtcctgacttcctttggtgatgaacagcagcatggaagtgtaagccgaataaaccctttcctccccaacttgcttcttggtcatgatgtttgtgcaggaatagaaa

SEQ ID NO: 27219 - DNA, 1198 bp, Mus musculus
cagtcctgacttcctttggtgatgaacagcagtatggaagtgtaagccgaataaaccctttcctccccaacttgcttcttggtcatgatgtttgtgcaggaatagaaaccctgactaagacacatatttttgcctttctggagccactctggtattctcttctcccctgaagctacttcagaaatactaccaaatgcctcttgattgctagctcagcattttgttttctttaatctcctttctgagacttctgccctgcttattcttgtctcactactacttgtagtctcctctttgttgtccttgactggtgtgtgtgtgtgtgtgtgtgtgtgtgtgtgtgatctttgtagatgtgtcctccccctgcaccgggtaaaatgtgctaggctgtggatctttcttaccttttggacaggttgtcctcagtatatccccacatgacttcttccctgaaacccattttgttttgcattggaaatagtcacttagagatactcattggttcttctctaaagttttgttcattgtcttatcagctctccataaaccccatgtttcttgccagctaccatttatctaagatgaattcacagaggtgaaacacacatcaccaccatagctctgcacactacgtcaatcaccagacgtctctgactctgtctctgaagtatcccttggctgtgtttccatttgtcattttcctggactactgaggaaactcactttctcctcattggctttgttaaaagcttaagccaaaagtcaagttaatggagttcatttaagcatagaacaattcctgaatgaggcagtgctccaaatcacaagtggttcacagagccctccctggcaatgggagtaaatggctttataggatgaacatgcaaacaaatggaagaaaactactcgattaggtaggcattttctttgagtataacttaatggaaattctccagttatataacagattggttacttggattcctgaaattggcataaaatgcaactaaaaattaatcagttgcaattaatgcatctaaggtaaatttgttgcttgcttgcttgtttgtttacaaaaaacctgtgcaagggcatctttgtaaaacactgaatgtttttattgatgtgggggagggaggccatgtagatctgggcatgaagatacatatacttataatcctagtgtttgggatcc

SEQ ID NO: 27220 - DNA, 1180 bp, Mus musculus
tagtttctcttgaaaggatgggataggctttttcccctgggaatactgatggaatttttttttttttttttttttttgtacgacgtcaggtgttgaaacacttccttgatagcatcactttaagtttaagacacattttaaggactgactgaggcagattaagaattgctctagaacaggtttctttctttcttttttttttttttttcctctttctttcctgctttagacttgaaaagagacaggcaggcgatctgctacagagcagtcagttttaagggaacagactgagctatatgacttatgtagccagaaagtgactggttgaatctcattacaaatatcaaattaattgtgtgaagttggaagcatcccaatcttactttgtaaattctgatttattttcaccattcgttatgtaatgctgaaccacttgtagacttgatttcgttgttgttgtctactgcatttagggagtattctcataagctagttgaatacttgaaccgtaaaatgtccagttagatcactgtttagatttgccgtagagtacactgcctgccttaagtgaggaaatcaaagtgctattaccaagctcaagatcaaaaaaaaggcttataaaacagagtgatccaggttcaccaccgggactggggagatacttggtgtttgttctattagtgttatatgaacagaaaatacatctttgatgtgttgttcctggcaataaattttgaaaagtaatatttattaaattttttgtatgaaaacatggaacagtgtggagtcttgtgagcttatggaatccttgctggtttttccatcctgtggttgtttggcactgctcattctgctccatgtagcatctgaaaggggtgggggtgtgggtgggggtggggttgaagcaaacagcaaaatttctgagttctcaaaaaacccgtgaggctgctgtgtaggtgcgagctgtggtgggggagcccccgattctcttgtcatttgacaagtgtgaatactgctgacatagtgctactggattgcagtgtggagatgaatggtttcggagcactcacagggaatgcccattgcacaaacagtggtttaaacagcttggatttggcattgagctgaaggagtgagacttggcgccttctcactttttggattggattaatagtgattc

SEQ ID NO: 27221 - DNA, 1137 bp, Mus musculus
actctgtatttagttccttatgtgtatggattttatgggtaagagtaacctgcatgttgagctgcatagtgtaaacatttcagccatgatctgcacacagagactgcatgctagcgaagcattgttctcatgcacttgccttgtctttgaagctcactggatccacagtttgttattaggaaaacttaatagcacagtttcaactcattttatattgagttctcagtagtcagtaaccaaaaggaaagaaaggcttgacctcctggatggtgaatcctgtttcctgtaggttcagccattaataggcatgccttagaaaaatacacccttttctaccttgttgagggtctcctttaggttgtttgctctttcctaagccctgtgaaaatctttggttttattattttttaatgtactcatttatttgttttgttttgtctgttttgaattgctatctcacttctctgtatcagctgtttttgttctgttctgttttgttttgtttttatgtcatattcctgttcgttactgagggactaactctggaccttggctgctgttatattttaagtctctgcatagagaagggtttctaataaaaaccacctcccacttttttaatgtttgttaaaggaaaatgtaagtagtttaaagtcaaatgctttgaatctgacttaggctgagctacctgcctaaatagcctggaaatccaccaagttcttaatctcactatcaacagtgcaaatgtggagaaggttcccagaagcaccttcttaggaggagggttcaggcttcaaggagctgatggcagctggcgaatgtcagccactgcccttccccttgcttcctgtcctgctgtgaagactgggttgagagctgctgcttcccctcgccctccctggtagatcagggccgcaagactcttgcgtgcttgaagtgctgcagtgtcttggaaatgaactgttctcaacggggccaggagtggagagaagggtgtgcagtcgagccatccccacatgacgccacaggacgccagcacataattagtaaatgcatatagctgctttatttgagtataagttccagttaatttgtcacttcccattcacgaagtgtttgtgtgagatccgttcatgt

SEQ ID NO: 27222 - DNA, 1810 bp, Mus musculus
tgctgttcttttacattcgttatttctgggccttgcttttatagtctttgtatttcaagttcatatatgtgttactcactaaacagttcagactcttgatgtaaggaattagatatttgtttaggccatgattccaactacaaagcagacttatattctttcaggttagaagacaagataccagaatgcagaccgcttccttcagaagtgatgcaattggaaaatgtcattgttgatagaaagaaaggttgcaaacttgctaatttgtactctaatgggtaaaagggaagcctgaaaatgcctatacaaccagcagtcagtttaccagtgagaaagaaggatatacaattcagaaaagccactctggcctggtagttttggaccccccacaaatacacactcacacacacactattggtttgttcttaagtcttactgcataggactcccgtttctcctcccccctcccctgttaaaagaggaccaaacagttctttagaggtatggtatggagtaacggttttgtagcactacttgtcagtgtgataaagtactttttatgctttttcttttaaatcgaaacattctttatctgatgtttgaccatagacgatcttatttgttgattatgaacaagcttctggactgctagaacctggcctctggccatcttaaagtgccaatatatgactgcagggtttttgaaaaatggttcggagtgacactgggttataccgagtattcacctcatcagcatcacatgcagttcttatttgtccatgataccatacgccaagagggaaaagctcgcagacaacttctccttttccatgatggctcctgttggcttagtgcctgtggccctggtagtgtccagtgtagtcacttgaagctgaaatatccatgtgtttctgggcagcttttctgctcagtgtgatcctgagatggctccctgccacccagagtgtggtccctggccgcctccttctcctgctctgtaagccaaagttgacttatctggagcaggggctagtcctggggtgtgtgtgcctgcgcaatatgtgcatgcaaatgtgcttgccaactcaggaactgcctcctccctgcctggctagtggtgggtgtgtcagaactaacctacacaccccctgccggtaccagcaatgcccagtgaagtgactgcttttactctctgggcttctgggccatttcttcccttggagatatgggcttgtggcctttggccagcttccctggtggaggagagcactggattatgggaaatgttttaatcattttgccattacatacatctgttaacatagttgaccaaaagctgttattgatgacaactttccaaaattatctcttaattgcttcctaataaaggggatgacaggttgtagttttggcaaagcatcaatgagataaaggtacattgtcaattaaaattacttcaacaaaggtttttgctttacaattatggttaaacatttcagtaactcatagctaccatacaaattggtatggtacatgcagagtgactagaaggcacttacttttaagccagaggagaaggaactttgtttagcacagattgcatcctgtaagatagttgggctgggtgtgatagccttaaaggggcagtgtctatccccaactcactcttactgtgactgagccaccctccatgtggctgggcaagtgcagttcactgaggatggaagaacttaactttctattaatcattattatgtttccaaaaagatatatccactttctgacttggcctatgccaagaactgtgggt

SEQ ID NO: 27223 - DNA, 1921 bp, Mus musculus
aggggtactctgacattcagagggcacctttaacaccccctccgtatgtaaaaaaacattcgagagacccatggggtggttgctctaaccaaagggatagaagtatgcttcgaacccatcccttctatgtctgccccgggccccaccgaagtcagtccctcaatccaacgtgtagaggtaaggctgacttcttttgtaagagctggggttgcgagacttcaggtacagcccgctggaagccctcctcgagttgggactatattagagtaacagccaactattccctagcgtcttatgtacctggaggatttgacttagacgagtgtactgactggtgccatccgctccgtgtcaccttcactgaaccagggaagagagctctgggatggacaaaagggtatacctggagtcttaggatttacaaggaaagatatgatgagagattattgttcactatcagattaaaaatagagaccccctacaatcccttaggccccccaaccaagttcacacccctcacccatacaattactcagcctactccaatgattgcggacccccttaatatggtcgctatcacccaacctcccactcctcaggtacctctaactattacccccgagattccttcaagacagaagatgtttaacctagtgagaggagccttttatgcccttaacagaactgatccaagcgctactgaggactgctggctatgcctgtcctcgggtccgccttattatgaaggaatcgccttcaatggaaatttcaacagaaccagcagccatacttcctgctcttggggtacaggacaaaaactgaccctgactgaagtatccgggaggaatccaggtctctgtataggtaccccaccttccactcacaaacacctatgcggacaaattcagtccgtgtccagaacggaagctgattactatcttgtaccttccccggttagatggtgggcttgcaatacaggacttactccctgtgtatcaactaaggtttttaattcatctcatgatttttgtgtcatgatccagctgttaccccgtgtatattatcaccctgcatccagtttaaaagaaagctatgcgggccggcggtcaaaaagaaaaccaattactttaaccctggctgcattcatgggaataggtatggcagtaggagtggggacgggagtgtcagctttgatagaaggaagacaggaaattcagtctttgagagatgctgtcaatgaagacctagcggcaatagagaagtccattgacgctttaaaaaaatctttgacctccctgtctgaggtagttttacagaacaggagaggtcttgatttgttgttcctaaaggaaggaggactgtgtgctgcccttaaagaagagtgctgcttctatgcagatcatacaggaatagttagagactctatgcagaaactgagagaaagattagagcgaaggaaacgggaacgggatgctcaacgggggtggtttgagtcgtggtttgaatcacgaccatcttggataacttctttaatttccgctgtagccggaccaatccttatgatatgcttagctttagttttcggcccttgtataataaatagaggaatggctttcatccagagtaaaattgatacagtaaaactcatggttcttcaaaggcaatatcaacctatagttcaggtagatgaagagttaggggacaccaatctctaagattctatgattagaattagtctaaacagaagaagaggggaatgaaaggaaataaaactgtaattcatgtaatgtatgttaaatagcccaaagagttgtttgtgagctttgaaacctggggctgagaacacagcagaacagaccaggacatgcccgggcaagcccatcgcctccctagctcccacccctctgacctaagttaaatg

SEQ ID NO: 27224 - DNA, 1224 bp, Mus musculus
atttcttaagattaacaaacttcagaacatacagaacataacaggatgtggttaccgtaaccttgctctgagtcaagtcatttttctgtgtcaatgattagcagacatattacagtaactatgaaatagctgacaggcatggaacataatggctacagctatgctggtggtacatggggcaggtcagatcataacattttgaatgctctgtggagagtgaagcactttcacttactatattccttgtacctagaatttggtggctaacttttagtggtcttaatttgggtaagattaagagtgataattagtctgagtaataaacattactcttcttaagtctgtgaaatttgtaccttaaggcacctgtgtccgacttgccggcctcaggtcacatatggccaggtgtgaagccccacataaccacagcttcctgccacggtgtcagtgtgcggtggaaatgctggccgatttctatgaactcggagcgtcgcacatgttttacacctttgccgagtttatggtttgtttgagaagctggttttcggtgaatactgtctcctcttggtttcacaggcaattgagaagctacaggctggtgctcttgctacagatgcagtggctgctgctctggtggaacttgaggtatttcttttctcttttatattttctaacttacttgtgcatttacattccttatttttaaatggcattgaggtggtgagctagtcagccataagtcatataaccagtgtttctcactaatactagcaaagctatgtaagattttattttcattgaagacattcctgagtagtaaaatagttggttaattctttgttcctcttgtttttgtaggattcattgctataaattcattggtgataggtattttcagtaagacacttttgaagttgacacctccaaaatgagatatatctttaacaaatatatgatttcagcttcctagaagtgtctaaagtgggaagacagtttttatcacagatgtaacagatggaggtcctgaagccatatgttgtgtgttttgtgaaatcaactttgttccagtggattttcaggatagttctaagttttagtggtcattgaggagttgagtcgggagagaggctcttggtagtccatgagggactctcagtttccgtgactctggagtagtagtgagttcgaggcctttgacaaggctggaatgtggacaggagggat

SEQ ID NO: 27225 - DNA, 1181 bp, Mus musculus
gtaccagcagtgcttgtgattccaaaatgtcccagaagtcagctggtttgcgggggaaatgaaggaatagttacactatgttgacttacttgactatgggtaataggaagacaaaatttagactatgttggttttttttttcttttagtatttgtttgtttgtttgtttgtttgtttgtttgttttaaaagacaggctttccctataaccctgggtgtgctggaactggccaaacagaacagactaacctcaaactcagtgaacctcctgcctctcgggctctggtaagggtgtgtgctgccacacccagccaagatcagaactttttatagtaaattattttgtttttatttcttcagacaagcactgttgctggacagagatttaacttgtaaacttttcatgttttgtcgttattatccagttcaataatcttaaatatctattttccaaaatatttgtgcatactttttgtaagtaatgtatatgttggtaggaagaaatggaagtaatcttgtgctgtttttctccaggttgactccctttgcacagttggatggaaggatgctcttttcctgatagaagatgatgatcttggagaatgatcatggagaaggggatgaattctggagaaggactgccttccagatcatctcaggcatctgctgctaaagtaacagtcaaggagttagaaacacagcagccctgtaaggagaaacgagggggctttgtgctggtgcatgcaggtaaggctttgcaggtgaggtgggatagaaagggaaataacattttccttttcttgctttgaacaacactgaggactgcacttgtgtctgccagaggagtctgttagctattaatggagtgaaggccttctctacaccctgcttggaaagttttacaatgagacttcttccaatgtcttccttatttccctttaccttacatacacaacatacatatggctagttcagtatgtaaaaaccaaagtaatctttatttatttatttatttatttatttatttatttatttttgagacagggtttctctgtgtagccatggctgtctttgaactcactctgtagaccaggctggcctcaaactcagaaattcgcctgcctctgcttcccaagtgcccggccaaagtaatctttaaatttccatccatccctccatcca

SEQ ID NO: 27226 - DNA, 1167 bp, Mus musculus
caaattgacagtgaagactggtgctaatgattggatagctctcctaccctttgtgctcttcagggatagaaacacccctggacagtttagactgacccccctataaattactctacaggggcccctctccactggtaaaaatagcctctgtacataatgctgacatgctgctttcccagcctttattctctagtctcaaggcgcttgagtgggtgagaccttgagcgaagaagcagctccagaaggcctgctccagaagacctagaagccccacatctcttccaagttagagattcagtctacattagatgcctccactcagaaaaccttgagactcggtggaaaggcccttatcttgtactcttgaccaccctaatttctacctttatgagaccccttttgattttgcttctgcttttaattataagtccatgtgtgttaaataggcaagtcgcctttattagaacaagaattaatgcagtgcggcttttagttttgagaaaacagtacatgccctaaaggatcaagtgtgtcagggagaagatagtgtctagttctaagattagaactactaacaagtaggaggggggaatgaaagtataacgtaaaaacaaaattctaggcctttaggctcaggtttgggaatgtgacctctgtgacttaatgctccaaggtatgtcaatcataaaacagatagcaacattcctccacccacccgcttcctgggttcaaagagtgttcattcaaagaaagttaccctgaccattgccggaacctgctatgcaaatgtgctattgttaggggctcttacaaactgtcttgaaagataacctgcacaattaccaggtattccttgtgactcttgtgactttgcacttccttgggactcttaacttgtatctttggtattttccaacaacaccctccccacttccttgagttgtggtttcttcctttaaatacccccttacccagctactcggggcgccaaggtcctctacccctccctgtgtggtgtatgaccgtgggcccccgagctctcttgaataaaaatcttcttgcagtttgcagcaaaaaaaaaaaaaaaaagattgtgtagtacttcactacttcacactaagagataccctctcaaaagtagagatagtgatggttagaaacagaata

SEQ ID NO: 27227 - DNA, 1100 bp, Mus musculus
ttccagcacttaggaggcaggagcaggaggactgagcttcaagattatccttggctacatctttggcaaattggaggatagccctgtctaaagtagatggtgccttatcataaacaacaccagaggagtaaaggcagtgtctgtagcccactaagtctgcggttagtgacatcaggtctgagtcctggctataccattccacatcctttcctgtccctcacctttcctccctccctctcctcctcctcgaaaagttagatatgctctctcctggtgagctgcacttattaattttgttttgggctcaatatttgtttgtaaaaggagacaattttgttataaaatcggaaagggattttgtatgtaaaaagcatgctagaggacacatcccatgccctaaacagaatatttttaaatattactcattttaaatagaaagtcttccttttagcttaattctctctttacattagcctcatccattcatttgcataacgagtctgtatagttctttctgtctactaggctctgtaccaagcatgattcaagtattttctttgattcttaaagatacttttaatgtgaaattgagttataaacaacctaaaagcacccccaagaccatgctgctgggaagtaacagctggctggcttcagaaccatcgcatttatgttgcatacttgcttgtgtcacatccttgctttggttttcctattcactgtcttgtttcttctcagggagattgaagaagtcttgtgcaagctcgctctgctttgccttttgcggagctccaggcctgccagaggtagcatgtttttgtcaccagggtgtgctgtgattccaccaatcagaacttactgcaggtgctgtgaagctggctggaatctctccatgtctctgctgctgcttagggatcacaggtttttcagcttagagctttcttatcacctgggcaactgcggaggaccccccaagtcattttcttcctgttctaccacccgtccatgctcattggcatcctcctgtgaagaagggaactggtgtatcttgctggcaaatggctgtagcatgcctcaatgtttccaaagagctctgtcgt

SEQ ID NO: 27228 - DNA, 1101 bp, Mus musculus
gagtccttccctgacttccctggatgatgaactacaagctgtaagataaaacataacctttccttcccaagttgatttggatcatggtgtttaatcacagcaatagaaccctaactaaggcaggtgatgagctcgtctctgccacatgttcctaccaccatgatataatgcctaagcctgttgggtcaagtgaccatggaccaaaccctctaaagatataaaccaaagcaaatctctcctgcctcaagttgtttctttcaagtatctggtcacagcaacaagaaagatagctaatacatactttatcttatattggatttatattggccacacaattgtttgctaagctactttgttacttaatgccatattgagtttaacattctgggttaatatgtattttattcctatatcatagattctaatgatttataatatttcattgtgtctttacatttattcttagtattatatatttatgtggttttctctctgtgcccttcagcctttgcctctcttctccattctcttttctccctctctccttccctcccctctttctatttctggctctggttctctctctttttctttctctccctctcccccatccctccctccctcctctccctctgcccctccctccccctctccctgtccatctccctttctctcccctactccctcccccttttcctttcttggcttggcttggcttgtctctcttttagttggcagttacaaaggatgcagctgaatgcgtattactgtggcagttctggtagaaacaatagaggcatgtgactgaagcctgcctgtgctgccatatcctttcctgggactttgagttctcactgaaatactgcagaaagactttagcttagtttctcatcgctttcaatcgctgttcttggcattcttctcccttttcctataatcctacaagatcctgcaaatccttccattgagtttccatattgcccaaggcagccgttgcccattcctgtttactatcaaaaaatctctagcaaatgcaatcagggaacatgtgtaggtgatagaatactaatctgacttttcaacactttaaactaattaaag

SEQ ID NO: 27229 - DNA, 1071 bp, Mus musculus
ctcgttggcatctttctggttcttcctttgttaggtaataatgatggtttgaacctggaaacttgagtgttgcattacaggacataggtttcattgcggttctctgatgggaaattgtgataccctccctcttgcagcaggcacgttctcccattggattcctgcctaggtgaggaagaacctaaactgtgtaggctgtgtctgcagcaccggtgctggttcagtgtcaaagcctttaaattgctattgcatatagcagtgggtcttccagccctggctggcctggacctgagcagatctctgccccttagctcatctcttaggctgaacatgctcctgaggcctggggctatgtgtgcacatgtggtggtgaatcttggaattcctgctgtgtcccaaatactttagtttttcgttgatcctcctgtttctctcttccatggaaattggagttttcttgattctactctttcttctacattgtgtaactatacctgtatccagggcgaaggatttaaaggacacggggaaggaaaatacagccaggggagcctgctccaccgccctgggtccaatagctcagagacctgctgctgcttccacttgccaccagtgatctcctggcttcttatccagactaaagcagaggttttctcctggagttctcacttcataccagtaagcatgtttgagtttcctcttagtctgagccaagaataaaaaaatggccattgtcagtttggttgcactttgatatccaaacccactctaatctccatagcagtattaaatgccacaaagcactgctgatgttaatgataagcttgtattgaaaacactcttttagtggttttttcttttttctttgtttctttctttgtttctttgtttctctctctctctctctctctctctctctctctctctctctctctctctctctctttctttcgttttcttttcttcttttcttttctctctctttttttttttttgaattgaaatcagccaagattctaaaatgattgactcctagttgacagatcttagtaccgtccctggtgccttagt

SEQ ID NO: 27230 - DNA, 1195 bp, Mus musculus
cagggaataagcaggttgcttttacacagactcccacactggtagtttccttgaaacgtgtactaattgcataacagtaccttgaagtttttgtttttttgttttttgtttttattaaggggaattattgtgtatcttatgcccagttggtgtttgctctgctgaatgtagtagctgggccatatgtgaacccacatgaatatgggatcagaatgcaaacagtttaattttgaattgtactggtggctcactggcattcatggctgggatggggaacatattaatggtggggcctttactcctcccaagcttcttaagtaaccgagaatataataaaatgcaaacaggatcttttcccggcttaaggttttctgagtttaaattccgtggagaagcatgctacttatgttttatgccagagtgaatcagctgagctgcttgtctctgcaagattatagcggtctataaaagagttttccctgcttctctgcaattccttgcatgaactgcagagagggtgaatttggagtaggccaataactgggctattgcttggcaggcttgcaatatggtaggtttgcaaaatgagtttcctgtggttctctgggtcttcttggccagggcactgggtcctctgctttttggaaagcctactccaaaacctgggaagttgcttctacttttcctatgattacatgactatgactataaccacaaccacaaccacaaccccaaccaccacaaccactactgctactacccccaccaccaccacttcctcctcctcctccacctttggtggtatcttccctgttcttggcataagaactaatgtatgggatatgatattatttatggtctttgagacattacttgtagccatggaatataggcttccttatcaaaagttgttttaagccattccatgaagagttgttttaagccattccatgattcaaaactctagccagagacattgaaacatctaggatttgtaatgtgccagatcagaaagcgcacctaggggttttgagtaacttatatgtatggctcaaaacaccattcgatcgatgggcacagtgttgtcattatataaaaggagaaacaaggaactatgtttaaaagatcttgatgaccaggctcatatcaagtatcatttattcctgcaagttgaaaggtatgcaaatcaatcttg

SEQ ID NO: 27231 - DNA, 1151 bp, Mus musculus
gtaatgggaagattaaagtttaactacatatgggcttgttttaaattagaagaattacttcctggtactcattatgtcttctagaagcagttggaataaaggaaattgaaattagagaaatgagatgtcatgttttcaaatgtctcactacaaaataatcacaataaatgtctataaaagcccctttccacaggagggaagtgtatcttctgtttgcacatggcaaacaacatttctgtgtgtgtactgggtgtgtcagcttcctcataatgtgcaaagattaccagcccgctataaaattcctaggcgtatttgctcagttctactgggtacagcttggcacatcgcaggtagatttggctcgtcttttctttaaccaaggaatgcatttgcagcatagttttatggccctctggaaagttgggatgtcgttttgccttgagctagagttaaggaatatgccataatctaacctttcacttaacatagatgggactctgctccaacaaactgagctaactgacctggactgcattacaagtgtactctactacttggtaattaggaaaaaaatacttttaacaattcagctaaataggttggacatactttgtttttttgaaacagggtttctctgtgtagccctggccatcttggaacttgctctgtagaccacactgccttcaaactcagccctacctgcctctgcctcccaaatgctgggattaaaggcatgggccaccacgttgtttgtagccggtttaccatgaaaaaggagattgtagagcagccattcttgagtctgcttttgggtggtaaaacccttttgaggggtggtagtttgcatatcagatagttagttactttgcagtttgtaacagtagcaaaattacagttttgaagtagcagccaaaataatgttatggtggtggaatgtcataacctgaggaaatgtgttaaaggaaggattaggaaggctgagaacctctgcctgaagggatcaatactgcctgcaaatcacttttcatctttaaaattagtaattttgaagtgttaagtagtaaagtatatcggataatgatcccttttatcaaaaacaaaaacaaacaaacaaaaaaaacaatgacagttttgggtgttatcaccgtagc

SEQ ID NO: 27232 - DNA, 1854 bp, Mus musculus
acggaatgtccacttgtgtttctggttgctttcaggcagcattacatttgttgacggggtcagtattttgttgcatgtgcttatccatgatttcttcccgcaatcggattctgttctggaaaactgtaaattagttttggtaccttagagaaaggaatacgctgctgcataatcctaaacagaatttgttcttctctctaggtataaagcatgagtatcaagcaaatgggccagaagacctcaatcggacctgtattgctgaaaagctaggtggctccttaattgtagcctttgaaggatcccctgtgtagaccgccagtcagtgccacgagttgaaagcttccatactgaacactatcctttcactatataagtaaagcaaatatattaggccaggatctcactgaggaatttgtcttgtcatcttttagagtaaactaaaaattgtatagtgtctgcaaacactaccctacctaaatccagcctctaaggtctcactggtgtggaattaaactcttattggccaaatgcctgttttcatgaggtgacttgtaaagattttgttaagctcaggatttttaataacacagttcacaaaacagtacaaggcagtatgacgagaactcatctttgctaacctcagcagttactttgtttcttttgtttagaaaagtgattgcaatccgtgtattttgaccaaagttctctatttttccttgactaaaacaagataatgagacataattttctttataatgtgtacaacacctaatatacactaacagcagtaagactaagccaggcagtcttaaaaaattctatcagatgtgtcatgagactgtttcagactcatgtctgcttaaaattcacgctgaccttgcagagcaccagagcatggggctggcatgcaggaagtgccctgtatctgcagcaggaggctctgggctgggacatggcttagagtgactttctgtcttagaaatcatggtatatcctcaggagaatgttccgtgtctcgcaacaactaattatattgcaaattattagggcttcattgtaatctactttattaatgaaaaatgacaaagcagtgtactgataagccaaggtgcttttgatctgtaatttcttctctaaaactgctgcatctggtacagtagactgtggaaggtgttgattatgtttcctctggggcctggtaggatgctaatccctagagcagtttaccagctatgtgtgaaattgaagcaggtaccatggatgacacgggactgcccaacaacacttggaaatgattgttaacatcacaggcatggcaccgaacactgtagagatgcacagtcagttgaacttagtagcaacgctggctttgtgtaataaaggaagcatttgtaacttaccctttctttgtgtggttatttgtgtatgagttggacgtaaagaatctgccttctgtctcagtttgtttttctgttgctgtgataaagatcatgtccaaaagcaacttgaggaaagagttcatcttacaacttccagaatccatcactgagggaagtcagaacatgaactcaagagacatgaaggaatgctgcttactggcttgctcagtttgttttcttacatacttcaggaccacatgcccagaggtagcaccgcccacaattggactgagcccttctatgtcaatcatcgctaagaaaatgtctccaaagacttgctacagggcaatctaatgggggcatttttgcaactgagattcccttttctcagatgtatcaagttgacacaagatgaaacaagccagtctaccgtccttaggcagtaagccttccaggttttggcatttgctaggat

SEQ ID NO: 27233 - DNA, 1174 bp, Mus musculus
tccaggtgcttggtgttgcatttcttgcatttatgctgctcacagcccagttctacctgctttacacagccagagcttagacttggcagaagtcatgtggccagcagatggcagtacagggccgccacggcagtcctcctcagaccccttcccatcctccagacagttaactcttcaccctttttttcaggctgaagccaccaggtgtgtactcaaaacaagccttggtaacctttgttctttgacgctaactgtgtgtcagggtttgaatctctgaacaaaaccctaggtgctttgagcacctttgtgtaagagttcttcaaaacccaagcccccattttcttgccctcttcccacttcttctctgtccctctgtccctttctacctccaaacagaatgtaaatagatcccccagggaagcaagttcactgtgagctgctagctggcattcttctggaaatctccatttagtgactgctggctgtggcagtgctgggtcttcagttactgtccaggcttctgtggtcaagcccatgataaagccatggtctttctctgtgggctctaacgaaaatcttgactgctgctgaaactgtctcgttggtcttcagcccctctgcctgaaagcccaagcagggagcttgctttccatagttgtcttaataactgttgtgatgtgtgcatttttttcaggtataaaattgtttctgttgaagtttggagaaaagaaaaataagtataaagaggaaaatagtcatttagtctgtagggtaccatttaatacacatatattcccagtttggttatagagtattctttcctccatccaaggggaaagccgtaataaactctccacagcttctgtgcttgctgccagggcactggaaaccccacatgtgtctgtgaccatttagggctcagatgtagctgttcgtcattggcttgcatgctctgggaagggccacctgatctgggagtgaaggctctacttaccatgctgcccagagcctgtcttggctgtggatggaagagggcagggtgtgttctagttcctttgagagccttgtactttcctatagatttcttggtcacagtttataaatgtctggttggggagaggctgtggtgatgttagacagtccttacctttgttattcccaggatctttggttg

SEQ ID NO: 27234 - DNA, 1253 bp, Mus musculus
cgtggtcgaggccgcggggctcgtggaggtaaagctgaagacaaggagtggatccccgtcaccaagctgggccgcctggttaaggacatgaagatcaagtccttggaggagatctacctgttttccctgcctattaaggagtctgagatcattgacttcttcctgggtgcgtccctaaaggatgaggttctgaaaatcatgccagtgcagaagcagactcgggctggccagcggaccaggttcaaggctttcgtcgctattggggactacaatggtcacattggtcttggtgttaagtgctccaaggaggttgccactgccatccgaggggccatcatcttggccaagctttctatcgtccctgtgcagagaggctactgggggaacaagattggcaagccccacactgttccatgcaaggtgacaggccgctgtggctctgtgctggtgcgtctcatccctgcccccagaggcactggcattgtctctgctcctgtgcccaagaagctcctgatgatggccggtatagatgactgctacacttcagccagaggctgcactgccaccctgggcaactttgccaaggccacctttgatgccatctccaagacttacagctacctgacccccgacctctggaaagagactgtcttcaccaagtctccttatcaggagttcacggatcatcttgtgaaaacccacaccagagtctctgttcagaggacccaggctccagctgtggttaccacataagggtttttatacaagaaaaataaaagaattaagtctgctatatatatatatatataaagaggccctgactctgggcttaccttcttcagcacctgccactttcccaagctcttcctgtctcctcctctccccactttcagccaccaactgagtgtgtatcagattcttggagtcactgtaagaagtgaccagttttcaacaatcaaaatgtattcttagacttcagggaccatgagtcccagagcaagaggttccagggtcatgctgtccccagaggctcccgagagagtcttctggtttcttcctgcttctggtaactccaggaggctctcagcttgggcttgagtcagtctaacaataagaaattgggctttccccctctctgacctgttctctgcccatatgcaaggtgattttaagtctttaacttaattattctactttttcagataaggtcacattcactggggacttaggataaggatgtgtgttttgaatta

SEQ ID NO: 27235 - DNA, 1811 bp, Mus musculus
gcaacctggacaggcggccttcatcaagtctgcctcagttttcaacattacagaacaaagtgtttagggcaatttgggattggggtgctgtagaaggagaggccaccggatttttagcctggagccctctgactagcaggatgtgggtggtgctagggagttgtaacttagaggttcatggaggagagtgtcagcttggtttggtcacttttcagattcagagttcatgagaaagctgtatctgggtttatttcattaatttcttccccctccccctttcttttagaacaacgtctccctgttgcagagctgcatcgacttattcaagaacaactgacctgtctactctgaaggacaccaatgtgaaagccagcatcacttgcacttaaatcattactgcaaaagaaatagctttgactagtttaaaatcatgtgaataaatattttgatttctaaaaatcttaacacttaaccatgttggtttaaaaatattttcattgcatgttacttggacataactaatccttttcttatgcatttaatacctcaaagtaggtagaatctaacagattctcctatagactgtcaggaattactaagaaatggtatggagatgtgtgccttctggaaatgagaagcaatagcctggcccatgtctgtctgaacatttcctgtgtctgctcctacagacatgtcaggtgtgaattacagcaaacagtgactgcttgtgggcaggtggcagacactcttctttatttaggtagattttgctccctcttgtcaagatcacttcagatgcttgtacggtaacaagcaagaagatctcatatgtctttttacatcctttacagctccatttttgtaactgggatataaatacttgagagaaaggagaatctagagttctgacactccctgatggtggggcatgtgtgtttgtgctttggatgtttttataaagtatataataaagataatccatgttaccatatggagtgcttttgtagaaaactagacctcaagaatgctggcagctccacaggtggaaagggttcattagctgccctcttgtaacctttactaacatcttagggattgagccagggctttgtgcaaaccattgacagtgcttagccctcagtactcctttgaaacaggatttggctctgaacccaggactccactgactcagctttacagcctctggagttctgcagttatggtataccaacatatctggctcagtcccaggtttgaagactgagtcttggctctgtttgctgtatatgaatacttgggggggggtgggtcctatctaaactggtttgtttgtattgattccatagcacaaattgatggaagtctggatttatttaagaaaagatttcacaacaaagtctggtttctgactgttttcttacctgtcactcctagactgctcacaatggcacacacaactttccatttcagtggtagtgggtacctggactctagccacatgattatgtgatcataccttggccttgttcctctgtcaagattggttgttgcatgtaagggtcttagatctacctcctgtctggaatgcagccagctgaagcttattagttggttgaacccttgcacagttgtaggtagacttgtttatgcagtgttccttggttggtcccagcaggcacagactgaatggaaaccataagtatacctatactatcgaggctgccattgggtgggttctcacaggatgtcaacataattcagctggcttcagagtaaggcttcctgagtgcttgggatcccagacattaact

SEQ ID NO: 27236 - DNA, 1320 bp, Mus musculus
aagtattcaaaggtagtgtgattacaatcttgtgattatctcaggtttttgagaagacagttttcattctttgggatcagaaggaaacttcaggacagttgtaagcttaagtaatatctagcttggaaacattttctttttggtctgattttcctaaaatgactttttgttgccaacacattaccacttcttggtttttgtttgttttcatttttaagtttgtgttgacacttgggagtttgtcttctcccatgtgggtcctggggatctaatcaggcttggccacaagtgccttcttgctggcccaaacacctatttgcttttttaaaaaagattgtgtatgagtgctcttatctgcatgtacatcttcatgcaggaagagggcatcaaaactcactctagagggactctggaggagaaacccccccccccccttaagctattgaaggtctaaaagggagaaatggagtattttgcaattatttgaaaatagtccagataactaaaaatttcttgattcagcatagtacctgggcttgcagccgtgtgaaatgatgattctgtttatccattcgctgagtacgctgctctgaccttcttcccagtctcggttcctgttctgggagcttggggctgagtagccaccagccctgctctctgcagtgttctattgtggattgcttgtgtgctggcaggctactactggtaagaatggctagtgtcagcagggatggctcctctctgggttccatctcaccaagatgagtggtgcaaatctgatcacttcctgcagcccttctagttccttgttcatgttattttttacatttatttattatgagtttacacctcccacttgttgagccatttaaagggagagttggtatagtgcttgtgggtgggtacctcagttgcttgttaggttttagtaacacagaagttgcccaagaatacatacagatgagtttggaataggagtaaacaatagaactgataatttgatttaattctaacatttgaatttatttaaagggcaaaggttatggtagtagaatttctcataggactattcctaagtatatgtgtttcataactatcatgtaggtctttcacatcttagtacttcctttggagaaaaaaaatctgacttatgaggtgtctgcttctttttaagaagattatgccggcagtgatagtgcacgcctttaatcctggcacttgggaggcagaggtaggcggatttctgagtttgaggccagcctggtctacaaagtgagttccaggacaaccagggctacacagagaaaccctgtctcgaaa

SEQ ID NO: 27237 - DNA, 1242 bp, Mus musculus
aggcgtgcgccaccacacccggctcttgtgtgattttcaatttgatggttttaatatagaaaatgtcttaaacctaacaccacttttttttttttttcagatacgaacagaacacacttttaaactttccagactagagaaaagttagaggggcgaagtctaaaaatgaaactgcctctgaccttctgcaggctgcttagcaggttaaacagattttctgtaaaagcaagccctcctgtgagtttctccactttctcttatttgtgtagccagaagaagaaaaactcttacgaagcagtagaccaagcgaagtactctcgtttagtacgctctgtcttgtccagaggcccggcccagactccagagtcgttgttcaaggaagatgatgtactgtatggaccagtgagtaagcataaggctgcagagccggagccacaggccagagtcccacaacactgctttcctatcttcaatgaagagagaaccgggaaaccacacacagatgcttcttcaagccctttgaagatccctttgcaaaggaactcgatacccagtgtgacccgcatccttcagcagaccatgccacctgaacagagcttctttttggagaggtggaaagagcggatggttctggagctgggagaagacgggtttgcagaatatacttcaagtaattatcttgcttctggttatgtgtggtcactggtttttaggagatagagcattcctgtcagaagaatggagcttaaaaaaaaatcttactgaggaagtactttcaaatagcatttcatgtctgctaatttgcttaatcttcgtagatactattaactgtagttcacacttaaagaaatggaaataacagagatcaaattatttgacaaacttgcataatttataaacaacctatcaattcttttccatctcttgacaaaagtctagggtttttttggttggttggttggtttttggtttttcgagacagggttctctgtttagccctggctgacctggaactcactctgtagaccaggctggcctcgaactcagaagtccgtctgcctctgtctcccaagtgctgagattacaggtatgtgccaccgctgccctgccaaaagtctagtttttaaatagtttttcttgctcagaatgtaatggttacccattgttctactagtcagtatcatttgactagccacaatccagaactcccaatccccgcttatagtttggtaaattgaactg

SEQ ID NO: 27238 - DNA, 2063 bp, Mus musculus
ttcaaaaagaatgtttttaaagataagctaggatgtggtagtgtatgctttaatcccagcactcaggaagcaaagttctctgtaagttcaaaagcagcctaacctacgtaattctaaaacagccagaactacataatgagagccatctcaaaaaaaattgcattattgagtttcacaggaaactgaatatagctgggcatagttgtacttaccagcacatgagactgaagaaagagaatctcatgttcaaggccagcctataacacaaacaagaccctgcctacaaattcaaaaaaagggtgaaattttgtatctaagggttttccatttaaagataatttttgtataatttaaattatttctattatatgatttatatagcatttcattttaaatcctgctttggtttggttttggttagctctgtttttatttttttctccatttctttttagatgtgtttttacaaggcaaacagttccataaagccttggaaagcatactgtcaccccaggagaacctaacagggggagaagagcacccccagtgtggctacatcgaaagcatccagcatattctgacagaaatcagtggtgtgcaagctctggagagtgccgtccagcatgaggccttgaagtatgtagggctgctggactgtgtggctgagtaccggtaagtaaccaggtacatacccgtgcctccttcagtcactgtgggtgaatgggtgggccaggattgtctatggggctgctgtctcttaactcctacttcaagatgtgcttaaggaattgtggccttagccgggcatggtggcgcatgcctttaatcccagaactcgggaggcagaggcaagcagatttctgagttagaggccagcctggtctacagagtgagttccaggacagccagggttatacagagaaaccctgtctcggaaaaaaaaaaaaacaaaaacaaaaaaaggaattgtggcctccatctttttaaggtaaaaaggggagagcagggcaggaggtaggagaggcatgaggcataccgaggaaagccacctcctctgtgccaataggaaaatcaaactggtcaggggtatggcttatcctccagcctgtcccaggccccaatgtggctcctgaacgctcttctctatttcctctttaaccactgttgtgttcttctggctttcttctccccctcccccatgctttttttcctgttttcccaaagattgtacagtgatctgttggccctgaacatcaactctcttcctggcttccaggcagtggctgatatgataaggactctgaaccagctaaaacttcctatcgcttctaagttgctgctgttactgtttttcctagtcattgcagattccaagagttgctgtcatctgcagatactccattccaaatacaccatgagagcaataccaggatacgagggaaagagtgtggaatctgggtgacggttgaacctctgcctacgtagtaaggttttagagacaacagtcgcactgtgtagctctggctgtcctggaactcactacatagaccagtctagcctagaatttccagagatccacctgcctctgcctcccaagtgctgggactaaaggcgtgcgcccacatgcccagcttctgaacttaacttttatggatgcccatggatctgacgtcatttctgaccctgactttgtttacttagcatactcttttattaatccatgttgttccaagtaacagaactgccctctttgtttctaattatttatttatttattagttggttttttttttttttttttaatggggtctcactacgtagcctggactagcctagaactcaacatgtgtatcaggctaacctcaaagttatggagatatgctagcttctgcctcttcgagtgtctgggttaaaggcttgcaccaccaaacctggccccacattctgatcttctaaatatgtatagttagtaggtatagtatcacaccagaatggatcgagtgaggaagtatctgtctatataggaacttttaggcaagggtccaggttttcttacttctatg

SEQ ID NO: 27239 - DNA, 1215 bp, Mus musculus
ttaacacaagctgaaggtgtggtgggttgggatgtacccaccgagaagccagagagtctggaggtcagcgcctgactcaccagctgcacgacctctggctgtttctcacctgagaggaggacactgggattggcagctgcccagggacttctgggctcccttgcaaacctctgtgtccctggcaggatgcccagtctttgaattgagatcagaaggccaaatgaagcatcatgtgccacacatgtccctagagttctcagggatgggaggggccctgcaccctcagggtatacagagagagagagagtgagcaagcaagcacgtaggcatcgccaccacagtttcctagaaggtgttttatacactctgtgtcattaggaaaaacttatttcagcctaaggaagcctggctgcctagagagctggggcaggcaatacatcattggctaggtccttttccttaccagagaagccccagcagcaggaagcctgagtgtggaagtcaccgtcgctagggtttgggtatctatttctggtgtcagcaggccatggactacaaaaaatactgttgtggaacttgttaacaaagaggaacaatggtaaaactttttttctgtgtttgataagtaacaacaaaaaaaaaatcattggctgttcttgggagacggttttctgttttataaagtaaatctagtagcattaaaattataagttacacaatcacatttagttttcattagtcttaaaaaaaaataaaagatatttaactgattcctagtctttcagtggaccagagttctgttcccagtacccatgtctggcagctcacattgtctatgaggtcagttccgggggacccagcacctcttctggccttttgaggactcgtgcacagacatacatccacatgaatagtgagcttttttttctgacttctctcatctttatttattttctcacatgttacaccctaaccagtttcccatccctcctctcctcccagttcctcccccagcctctcacctcttctctccccctggttcactcctccccagttccccttcagaaaagggcaggcctcccggggatatcaacctaacatgttatatcaagttgcaataagactaggcacctccctcatatgaagcaagccagtaggaggaaaggggtcccaaaagcaggcaaaagagtcagagacagcccctgctcccactgt

SEQ ID NO: 27240 - DNA, 1808 bp, Mus musculus
ataatggatactgacttgctgctatgaaaacatttatttatgaagacagaacacaaagcagattgagtttaataaagtttaattgggaagtctcttcttcagtaagtaaaataccttgaaggtctggaaggcaaggaaaagaagccagcaagcctatgttgaccaagtactgagataaaggctggaacgagaagatgttcactagagttgcttcattgaaaactcatcggggttattaccaccatttgtttggttgtttttgggttttgttgagaagaaattacaagtggtgcagacaggaacagctgatggcatgtgtgccatcttggggcctgggtagtcaagtgggcattcctttttcatgccatctgttgctcttcaccccaggactctttcaggggagtgtgcctccataccgacctcactcccaaatgctgttgtacaggacgtgtttccacatcactgttattccatgctaaaagaaatagtctcactgttccttttttgttaaggctatcacttttctctgtatgccttaattgtattatttcctgggtttttttccagattctcattccatgcctgtagtgtgactctctctaccactagtgccaaattcaaattttacagtctaaattccaggacagccagagctatatagggagagacccagtctcacacatacaaataaaaatagaacattgcccttcattcagtctctgagggttggtaaccagtatttagctggtgcccttttctcttattcttcaaaacactggtatgacatgtctgagcagaaagccatcactgtgtactttctcagtcctggctgttcggccctggaaaacattaattggcgtgctgttgtacagaaggtagcctctgaaggatctcagctcgtggattgtctctttctaaagatttatttatctgtaagtacactgtagttgtcttcagacactccagaagagggcgtctgatttcattacagatggttgcaagccaccatgtggttgctgggatttgaacttgggaccttcagaagagcagtcagtgctcttaatccctgagccacctcaccagcactcccctcccctttttgttttgagacagggtttctctatgtagctctgactgtcctagaactctgtagaccaaactcagggatctgcctgcctctactgcccaaggactatgattaaagatgcgatacccgcacctggctcttttttccatttttatctctcttacatatttaattttctagtaaggtaagactagtgcttatttgataggtcaggcagatcggacattgttaccatgccgcacctcacaagaggtggagggaaaaaaaaccctgtgttttatatataatctaacacttaaaatagctggtgtcattgaatgcttactcttatagagctggccatagacttcatctgataaaagtgaactagtgagtttgattttactcaggtaactaatgatgctattcacttagagcactgtcagaaggtggtagaactcagctccacagaggatcccagtgcaaaccctttaagttggtccatgcttttggcttatataaaaaacttagtacgatcaaacaaccttagacacgaagtaagctgagtatagtggaaagcctttaatcccagtacccaggaggcagaggcaggcagatctaggacagccagagctacataaagaaaccctatcttgaggaaccaaataacaataaaagagagaagttatcttctagccagcctggtctacagagtgagttccaggacagccagggctacaca

SEQ ID NO: 27241 - DNA, 1330 bp, Mus musculus
cactttcagttcccacagaacttaaatcttcctgaaaagctactaactatagcagtaggtttcctgtttgataagggacacagagtttgtttacctatcctgttgatgcagagagagagaagaatccaggacttgacggtcatggtggtgtgtccctgtaattacttcagagaaagcaggggatcaggaagggaaggctagcttgaccctgtctaagaaaagaaagaacaagacagcccaggtctcctgagtctcattccaaattttaactcaataggtttagcaagatgcaatctacttctgaggccccagtacttataaacgtgaggaaggtggatcttgaatttgaggcctgtgtaggcctagtaaagtaaaaccctatctcagaataaaacaaaacaaaaccaaaaaacaggttttcattcaacttatatgagtgacagtttttcctttttgaaataaaatttttctcttactggagaaagaaaacatgattcgaggccccgaatgttattagaactcaaaactctagctggtctttcaggctggctcaagagagtaatctcacacttgggtcttgatcaccgacatccctgaccccactacatccccaggtctttctgacaagttgagagagactgacatctatggatgttcagtaaggagctgtatgggcagatatctgcatagcctgtcacctgggtatcagctatatatgactggcaggattaggtcatggggaagtactaaaatatagacacataagcactcatgtccttttttaactgggggaatatgtatgtatgtatatacaatccctacatgaattatggtagctggcaacagcattgtaattcaaagatttgcaaatgctgcaagataaagaccaggtcatccatttgtgagttggaggtaaacatttttagattctctatgaatccaagaaaagcctaagacaaccaaaatgaacataatagtaaaggtggaagacaagggagcaacctgtactgtgttattaagttctaagtgtcctcaaaagaacctttttctagaagaccagatttcaattcccagaaacgacatggtggctctgtaatgggatctgacgccctcttctgctaagtctgaagacaccgtgtactcacatacataaaataaactatgccaggttaattctatagagttcagcctcttgtagagagtattcaagcaacactgccgagtcttctcatattcactcacataaacaacccctttttaatactactttttatattgtatatattcaatgtataaaatggtttgatgattccatttccactggtttata

SEQ ID NO: 27242 - DNA, 1253 bp, Mus musculus
gttcaattcccagcaaccacatggtggcttacaaccatctgtaatggtatccaatgccctcttcttgtgtgtctgaagagagcaatgatgtattcacatacataaaataaataaataattgaaaaatgaagacaaaacctaaatctaaccagctaaccaatcaaagaactgtgttcagtaatttgatgtactatgttttttaaactcaaacactagggttattgtaggagacactttggtgaaaagatatttgggtttacatatcataagttgctaggttgttttgcacagtgaagtgaggcaatgtgatgctgtgtttttgtgtgaatttgaagtgatgcctttagttaattcttaatgtttctgggcctagtggtatgttttaaaagcaggttttgcagaccatcttattttctctttgttccttttagcaaattaccattgggcagaatcggatcctgaaaaatcaagatgctaaagcccctacactgctttaagaattcgggactcaaatatgaaaagaaaatcagaaataagaccctgggaacctgaatatccctgcagaaaaacaccaaaggaccattttattttgtgtattgctgtggtctgattggggtagtgggtgctgtgggatgggagagtgcttgtgggttcacacccatgccctccccatggagagggggccattggttttcttgctttctaccatgtcttggcttgcttttggaacaggctggcctagcatcatctgtcctcatctgtggtgtactgtgagtctgtgatccatctccagcacatgcctgctgtccaccatttccatcattgagtcacaagacagggctggtgttaggcaaccaataataacatattgtatgagactttgcatcttgtacattttctcttcttttctaaaaataaataataaaaccataaatctcaatgaactactttattattaaattctgctgtgtctgtttaatgatgttttctgtagaaatgtgttgtgtcttaatccactggatgtattatacttcatttcagataaggccttgcaagtggctcccataggcctctggttgcaaagtcagaggctgtgttaatttatgactgatagcattctatttggaaaagtggtggcagggaaggaaatgcagatgggccaggaatctttcttcagaacggccagagcatcctaattgagaatagatgcagctgcgcataagcacttgtcctgcattggctctgttgtggat

SEQ ID NO: 27243 - DNA, 1200 bp, Mus musculus
aactacggactgacaccacgggaaagatggatagagtgacatctctgtatctccgatatggagtacggtcacttgtcttcaaagtgtgtgaagagtgacatttgtatgtagtcagtaaagggagcatcactaaggtcaagagcaagaataagcttccctgtcagacagggtagggtacccagatggggtgaagaaatggcagaaaggctagagtcatcagctaagttcatccagtgtgtgtgtgtgtgtgtgtgtgtgtgtgtgtgtgtgttggagtgaggcacatgtgcacacagcgatctatgcaggcatgtgtttgcatgttcttggatgtgtgaccagggagcacacatgggatttttctccccagccactatgagttgaacccaggcccttgagtattaggccagggttgtactgctgagtttcagcatcagcctgtctttatttttatttgaggttgggttacactaagttgcctgggctggctttaaattaatcatcctggctgagcctctcagtgctgggacctttgctcccagaatgtgtagctctcggtacaatttttaaactgttttctggctcaaccttttaaaagttgtgtgtgtgtgtgtgtgtgtgtgtgtgtgtgtggtgtcgtatgtgcagtgtgtgcatgtgatgtgtatatgtggtgtgtgtgagtgtgtgtaatgtatgggggtttggtgtgtgtggtgtggtgtgtgtatgtgtgtagtatgtgtagtagtgtgtgtatggtggtatggtatgtatgtagtgtgtgtgatatgtgtgggtagtacatgtgtgtggtgtgtgtgtgtaggctacttcctttgggacagaatcttttaccaccctgaagttcaccacttcagtagatcggccagccagggagcctcagaccctcccgtctgtcttccccacactgggattgtcagtaccagcgacagctcttggcatttttatgtgtctcctgtagatcactctcaggcccttgcatcttcaaggtgctgcgttactagcgatagaacctccagccctaacctgcagagttcaagagtctctatgccacctagctgttcccggagcacacagcgagcaggaggaagcacaggagttaggaggacacacggtgagtcactggagcacaaggagttgaggaactcacccagggtgaaactccaggttaaataa

SEQ ID NO: 27244 - DNA, 1170 bp, Mus musculus
tatacttttttttttttacaaagagcctttgtgtttttatatatttcatagaaaattttatagcagttgcaggtaaactgtcaggattggtttttaaaatatttttgtaacttttaaaatattctataagtatgcatgtgatttaacatttaatatttgaagataaatctcttgctggatttgagagtactgcattttagacgcctcatagataatctctcttctataactggatattttcggcaaatttgtggggagagacttctggttgtcttaaagaaatccctgacgctggccacaggctgcctttgaaaaatcgggtgtactgttgttacattgttgttacattgttcacttttagcggtgtattgttacattgttcacttttagtgctggtgtctgtttatgtttttaagcaatcgaggctgagaattagaagagaaatgaatgtagagagaggtagagagagaaacacagactctaagggggggactgaggaatgtagtctgcaggttcaggctcttcgcaagacgttggaaaaggagtcagtactgtaaaatatgtgctgcggtgagctttgacaaagatctgttccatatgctatctgctttggggaaaagtaaatcaaggataacgatccctctgacccattttgtaagccgacactaaggacatccatttatttggaggcagaaaccaagtcatgtataatacgagtttagttgagttcaatgagatgttgatggggagagaatgcactaaaaccaaaaccaaaccaaaaacaaaacaaaacaaaaaacaaaccttctgtatttggttggggcatggtagagctaacattcacacactagcatgctgggttccatcctcagtgtgacaaataatgagcaaaacaagcagaaaacatggatgtatggtgaagttagacttatgttgtataagatgagtttatggacacacgtattccagaagggtcatacatcagtgtaatacagatcattgcaaaacaaaagcagaaagccatgttactatcctgtgtaaggatgttcaggcatctgatctggaggacctcgtaccctgtacaaggcttttgttgtcccagaaccctcccttggcacatgctgggttgtgcttccttttgtaaatgattttcaatggaattttgcacat

SEQ ID NO: 27245 - DNA, 1099 bp, Mus musculus
tcttgggttggtaataactctggttagagacctaagagctggagagtagggattctggcaaccatctttgattgcattcagcagctcttgttatttagggtagaaaattgaaatgatcaagtttggtgtttccttttgtcagttagaaaagcaaatattgtgttttcataataaatgtcttttagcaaaattgctaagggtcactcatctggtgagaccctccagagagccacttgtcacattagtattagtaggtcagccatctgtgataaaagtgtccctaattaccacaaagtgtggtaagactctctgggctcctgcagggcctggccagaacccacccttctctacatgctgacctcccaatgtctataaagagggaaactgatgtttatagtcttgttgattagactttcatgctgtaaaaattaaaaaaataaaaataaaaaagtaaccccacaaaacttggatgttttaaaaatagccagaccttcagcagactgaagaaaagaaatgtagcctggtgagtgactcccagagtcctcagcagccacactggcagatcttgagagccccaggaatgaaccctgactctgccaaatgctgtttagtaggacccttagccttataaggagatcacacagctccagagagccatgcaaaccctgtcttcctgactgtcctcaggtgtcccttccttttctccactgacctgtggtggaggtttgatgaactcactaaaccttcctgtgtgtcttacatgtagctgtatcactccatacttcctgaaggggatgtcacatctaagggaaactcacccagagacacccatacttgtatttgcacccagttctatgtatatgacgtactcggtaagcaaacatttccttagtttcaggtctacaatatttagtatgtgtaaatagggagacatttgatcgagatgataaattaagttatagcatgtcatttgattgttctgaggtctcttgttatttaacttcccagagctgcataactaagttgttctgaggggcgtgtggttgggtgaacctccaaacctgctcccccttgtcaggagtgtacatgtgcactaggg

SEQ ID NO: 27246 - DNA, 1948 bp, Mus musculus
tatgggcaatggagacgcctgaagtctctaggcagaatacagtagcaaaaggtttggggcccacagggaaggggcaaagggcacttgtctgtatcgccgaatcattttcctttcatttatactcccaagcttgattcccaaaagggctgacaaaataactgtgtaattgttggaggaatttcctccatactgattttgctaatcctcatgttaggatttatagtttactcaaaatttcatcattatggaagctggctgtccccagagtcttttcccacaggaagtttcaccttcaccattgaaccttttccacctggagctgaggccccactgacttaagattctcctgacaactagagttctttcaggtgatgttccgacacagagcgagcagagggcagggggcagggggagtgaccatgcatgaaaatatgggagtatccacatgagagcactaagcagatggctagcacccttgcccaacactgcctagcccagcaccacacacatcaatacacaagattagtgcctgctccagctccagggctgacccaacacccccactgtgtccagtactcctgaaagctcatctgcagtcctcttcctgactgctgttcagagtccaagacaggcctcagaaacagtacttgtcacatgagttttagggtacagattccaggcaatagatttgatccttacacacacacacacacatatcaaattttatatattggctctaagaaaggcatgttgtgccttttagggatgggaaggaaggaaggagttaaatgtgccccttactggacatgaccatcttggaccttagaatctggcaactaagcattcccagggaagacttctgtgtggtcactcacacacccatgcttctgtcctggccctggtgctgtctccgagctccagttttgcttcctttcctgctctacttcagagcaaaacagaagatgcagcagagaccttcccttgctgcctggtcctgctacatgacgccattcccagggcacatatctagatgagcccttcactcaaagctggaaagcagccatagaggatagactcaaggggctcaggcatgggagagtgtcctggctgtggccacctctctaccttcctctgccttctgatctcacacctagcctgctttcacttctctcagcctgcttacccacctcatcagtgtccattcccagagaagccagccttttatatctactacagagctgatttggctgctactaatcttggaagaaaaaagaatggagccagaagccatattcagtcttgtatagtgagtgagaattctgagagtgagatgttctaggagcaccttcccactgcagggagaccccgtcctcctgctgtgaagggaatacagcagcctctcatgccaggcccacagacagaagcaccacggtcagagagagcagggcattgcaaagcagaaaaggggccctgtgtgctgtcttcttagggtccaggatgttcacttattggaggttgatggtgatagaagggaaatcggctgtcatgacatttcccattgtgtcagtgaaaccttgattcttatctgtgtgtctgtgtgtctgtctgtctgtctgtctgtctgtctctctctctctctctgtgtgtgtgtgtgtgtgtgtgtgtgtgtgtgtgtgtgtgtgtgtgtgtgtgtgtgtgtgtgtgtgtgtggccaatattgctcagacttctattattgatttgttacttacctggctcctgcagaaagcgcttcccaagtcctgggcactaaaggcccccgcagcacaggtcataaagtaccttctgcaggaacacttatcttcaggccccataaacccctgtggtgaaattcctgccattttggaagtctttcattttcttctttttcagtcgtaacagaacccagggccacaacccaggtcccaga

SEQ ID NO: 27247 - DNA, 1196 bp, Mus musculus
caaatctcacagagtttacaatctccatggtagagatgaaactctaataaagaggaaaggaggagaaatgaaaaaaaaaaatccaaaggacatccatgaacactatggtagaaatggatccagcaaaagaaagccaagcttctcttaaaagtagaaaggaaggaagataaataatgtaggatcttggaagcagaggatgggtgattcaagaaaatgaagacgatatgtaggagagtggagtgaaggaagtttgtgtaccaggcactctaccatggcacaggcatgtggaaagaataatgccacgtctgtgaatggcagcagaggtaatgtggaggcactggatcatttaccatttacaaggccttgcagaaagttctcatggaggaacctggtgggacaatactgtgctctttgacttgaaagccctcaacttgctctgaaaaagtttgtctgtctggaagacagcctgtgtattcatccccagtcttctgctgcaagtgcattctcttatctctgcctttactcctgctgagtttgagcataggctttttttctgttttgaatcctcaggttccattctttgggcccctgttcgatggagcgatcgtgagtgggaagctgctgccaagccttatctgtgccacatgcatcaatgccagcagagcggtgaagtgcctcatcccactctatcagagcttgtatctttttgctgtaaatgtgtaacttattaaccctccccagggtgagattcctggcaagctttcaggagaggtaagtgggcttcaggcccaggctgcagtactgtttgttgatttctatgaaatacagtgatattgtgctgcatcgaatatagagtttgttttcctagttggttcactagtctgtgtctgaaaggctgcaactgccgtgatgttcaagctcatggcttctcgggatttttcccaggttcagtctcttctatctagagtcacatttcactgtgtggaaagagggatgtgtagcaagttgttgaaatcttattcggagcgtcagaaagcagaagcaaaggaaatgactaataaatcagaaactgcacacagcacctgacaactgcagagggttcggaagtatggaggaaggagcagttatacctgactcaggagagggagtcgtttcacgtttataagtgttctctcaagcactaattggcaagtaca

SEQ ID NO: 27248 - DNA, 1176 bp, Mus musculus
taatgactaccactgtacatctccaagcaggaaatcctgaggccattagaacataaatgtcatgtttgaacaggcagattctgaataaggccttcaagggttcctggaaagacagtgttgctcctaagaatgtatggacttgagcattgcagtgagcatgccacatttacagtattagttaggacttcagacacagggaacactattctgctacagattgaatggcagcattgggtttttatcttgagtaatatttagaattttgagaatgtttctactttcctttagatatataattctaaagtataaattccagtggtcaggaccttgtaaacggcacaagcaatatcactggcttagaggaatggacaatggcttgctgaaaatggatagctgctctgatgagggttttttttttttttttttttttgcctgggctgaccaggcccgtgggaagaaagaaccctagtgggaatggtaactgtatcacccacctctctggcatgtagtccctggtcatagcagaactctgtgtcacggcaggaacacatgatccatagtatggaggtggagtgagtgggggcagggtatacatggctccagggatgtgttaggaatgcacactaggtcacttggactgctttctcttcagtacctagagcactggtggtggagaaggaggggctcatatctgcaggatctccacaagttgcttttcacaagtccaaagaatggtccctttttgaaacccctgtcaaagctgcttcttccatgggcttccatgtttccttctccccaaagaaaactcaccagacccatccacgtcctccaaacttttcgctggtttgtgagggtcgttccctcatcaggtctggccttcgtgggtgggccgtacagtttcttggacattgatgtgtgagtggtgcccacagtgcaagacagagctcacttaggtgaatagccaagtgagcacactgttttttttatctcatgagagggtaagactaggtttattttctctcctttctgaaaatgtttgtgaatcctaataatgtaaatgcaaacttctcttttcagataacgtggatgcaagcgatcttaagcagttctttgagaccaactattctcagatatatttcatcttctatgaaaattttataacactggaaaatagtt

SEQ ID NO: 27249 - DNA, 1128 bp, Mus musculus
taatgccaaatgactttgtccatgttcccattgcttgtttttcaccaatcacgaaggcagtgtatctgtaacctctgcaatgtaaaatgaactttgtgcactcgtacgatccctgtctctaggattcaggctgtctagacttgagaaaggtgagcccagggccaccacctgagctgaaatgctctgtgtgtgatacctgagaatgattgctttccaatgccagttctgagaaaagagattatctgtaggccccaaatatttttctataaatatttataatttggatttttattttgttgataagcactttattcctgggcaagcctgagtacttcttcaagttgtttataatactgatctttggtctccaaactgagcaaaataggtataactatagcaaattgtgtctgtgttttaaagttggatttcttttttctttttttttttaaagatttatttattattatatgtaagtacattgtagctgtcttcagatacaccagagtagggcatcagatcccattatggatggttgtgagccaccatgtggttgctggaatttgaactcaggacctctggaagtcagtgctcttaacggctaagccatccctccagcccctaaagttggttttcaaagtagcaattgattccatttaaaccttgaaaattttaaaaaataacaaagttactaaactactaaattaagaacaattaatatgtagacgtagtaaacagttacttatcaagttgtcttatccttgagattttaaaaattcaatttggaaactttgttttgttttaattagtatatgaagatatgtgtgcaattgtgtatatatctgctgtgtatttagatagtatggtataaggtcaaggcttaggattcagtaggaaaagcagatgcttaaatgatgaaatttttgcacagtgtttagagccatacagtggaatgggaaggagctatggaggtggtcaccattcagggaggaactccaccaagcctcctggaggtgttgggagtgcttacaaaggaaggtcagggctgagttgggatatgaataatagataaagggctttgcctggtggataaagagtggataaggacattggtggagaacagaactacaa

SEQ ID NO: 27250 - DNA, 1139 bp, Mus musculus
tacctcatgcaaaccatattttaaatcaaatatgattggtaagtatatgttgtacatgctcaaagaatactgcacatactatttaattatcatcaaaatagcccaggttgacctcgaacttctagtcctcctgccttacttagtttctcaagtctgagagtagggattataggtatacaccaccatgactagcttaacaccgttttaaaacaaataaagggataaattcttctaaattgttatatttgtttttttcatatcattgttcatttcttcagtatgttaataaaaatttctaatgtgtttcttcacattatcagcactgtgttaacatcttctcatagatgtggtgttaattttcatttttacagaaactgagacacattcagtagcttatccaaggtcagtcttccatgtttctcgttaccaagaaatgttttagtagaacagaactcatcagactatttcctctgaacataatataaagccacagcacatcaaaggaaatgaaagattagcctccacttctggggctctatctgtagttgcagcagctttccttctggtctgtacacatggaaggttggtctaggactaccatctgtatcctcttccttgctctgctgttttatcattttcttgttcttatcctatcctcaccaagaactgttattaccctgactttgtgaacccagaagtaagagacattttgtttgggtttttgtgggctgggtgggtagttttagatactttaacatcacccctgaaagaaaaagttaaagataagcatttatagaatcattaattcattgttatttagggaatggaactctttatttttggaggtaggatctcactatatggccacattggtctgtaacttgcactctttctgcctcagcctcccaagtactagtgaaggaaaccgttttattctcctaagcttctttagctaataagtggtcacagcttattgctcatttctatacccttgtcattctcaatagtcagaccttacaagacagagtaggaaccatttttactttaccaaaagattatagataatagatggtggtagtcttatgagagtcaggtttttctaatccttagtttagagcatttccagtgtactattttgg

SEQ ID NO: 27251 - DNA, 1335 bp, Mus musculus
gtaggggaagggaatgaatataatcacaatacatggaaattctccaagaactgatacaaatataaaaataaaccccactctacacacttacaagaagcatttcactgttcatttgtctgcattttagggagtttcctagatgtggttgttattaatgctgtggagttagtgttcaataattcaaactttgtttgggtcttcagctttgtttgaacacacacttttgaagactttacatgggatgtaccttaagaaagagtctgcttcttcatgaggaggtgctcttccacggagagtaaatgtctacgttaggtgttattaatccagaagataaattctttcttttgtttactttcagggatatcccagagaaggacggaaataccctttgccaccaccctcgggaagatacagttggaattaggcttttgtaaagctttccacattccttttaccagtctacatttttatgctatttgtggaaaggtttctttctcaagtagtagtttttaataaaactacagtactttgtgtatttcttttatctgtgtgtatatttttactgatctgatctcactgtttcatgctgctttccagagatgtgtatggcataatacagtgggtctgaatttattattgcttgtaaacacatttgacgaaattaggagtcctgggttttcattatggttaaaattcaaaacagctctatgctgattttaatgcacattaataattaggtatggacattgagctgcacattctgcagacgagcatatattgctcaacatttctttgaaaacatttcattaaagtacttgacttacagaaatttgtggactttagtaaaaaaataaaaataaagctaaactttaaaaatgttggtgtctggtgtctgattatctcagctgaaagtcttgacttacggtgcctgtgcaaacttatttacagtgccaacttagacagaagcagttcctacaattaaatgtcaagagccagtcagtgtcaaggtatgtcttaagaggatatgattagcacttcaagagcagcatttattagtattttactaataaatctttgaatatttacattttaacaaatttcatatttgtggtttagttttaagggcttctaaatctcttatttagggatcatttttaaaaattcaagttgaagttttttagctaaagaatcaatactcagcatattttaagtgatatttcacagtggccttcagtctggatcttctccctttcgtttgagcacactcactccctacgtgcatgtttagagttgacacagctattttcatttcattaccaaaacaaacttaggctg

SEQ ID NO: 27252 - DNA, 1178 bp, Mus musculus
gggtgtctatgtgctgggttcagtccagagccttattgaagccatgctgttgtctccctagttagcatcaaccagtgaagctccacgttgaagcttcacgagtctccacaagatatcatcccaacacacacagaagaagggagccagatctagcaaagacagatatctcttattaaccaagccttccacagctaagcgcgttgactccaccctctccacaacatccaatcagagctccctcaaccggatcttctaggatagtgcctaacccggaacctacactgtctttgccgccacacctgggcggagccaagttttctactggctcgcgtagctgcccgtcgcggggaggcgggagtcgacgggaaccgggatgctagcgcctgcgcacattgcagcttgcggcgcgcgggaagccactaccggcgcttaaccgttcctcgcctcctggacgtcggcttctcaggcggagcctctgggaggaagaggagaacaggagagaaactcttctggcccgggaccgcgaccggggcggaacccgggaccgagtcgccttggcggcgctgaccgagatcgagcaggtaagtgagcgctcctgcctggccgtctggcaacgccgcggcaccagggacctcttcccttttcttaggctcaataagacatggatgttgtcctttcctccacgtggtgtctctgcaacctggcatcaggcttttttatgtgcagaaccgtggcggtgagtttgccatacccggaggagagcagcagtttggggccgggggatgtaagaagcgactcccagctggaaatgaggcccggggcacggctgccgtttctgaggtccaactccaggaaactacagtatgaaccatgggagtggagcatctttctgactctcactctactatgtttcggtcgtactgctctctccttaagagagaaagatgaccgggttctgtgggtagctgaggaccagaaataggggtgatcatctttgggggcgtgaccaatgttagggcgaagcattgtggcctaaagaagtggggatgaggtggttggacagagaaatatggttaccttggagaacattgttaagccagcatccctagagctgttttcatatagaactgctttcaaaaaaatcctggaacttagtaagcatagctctgactcccttg

SEQ ID NO: 27253 - DNA, 2042 bp, Mus musculus
tgcttaccacttccatcagtgcccttggtgagctcaccccacaggcagtttccatgcctgcacaccttccctccttgaccaatatggagtgagaacttgaagttgtgtgccaagcagtctgtgtaattgctgtattccaggtgatgccaggggctgaggaaaagttgtctgtgcaaaaatgtaggcaagactggccttgcaggtttcttcagacttccatgaccttgcacgtctctttcacacttgaacattctgttaacattctgatctgcatgatctcagctacatttcatcagcaaacacggcagttagcatagctcatttaaccctggtgtagccgtacatgtcaatcacactaatgcttgattctcttgacgtctaaaccactgcttgtcttaatcatagagtacacagcattgacccagcttgggaaagtgctgttcgtggtctcctggtctcgccctgccttatgcttccatgtgtgtttacttcactctggtccctttagggcgtttttctacagggttaaagtagaactggggccacttatttttagctgattcttcctgagataaaagcaaataagatttattctgggaaccctagaatggggttgaagaagtagatgattccgttcgtttctctccaacccccttttgtaggcacgaaaagatgaatggcgggtggaacatgttcagggtagtaccttagcatgtgtacaggtaaggagtctgtcataacatccaatttgggatgagctgttgaattttgttccctaaatcagattaagtcaaagctgtcctaccaaagaatccagcagacagttgtctctctacagaagtgtgagaaataaagcctaggtgtcagagcatttagctaggtacattttcacaaacagcatgatgagtgagcctggcaaatcttgactattttgccaggcttttttataatgtccagagctccccaaacccccattttcacaggggaagatgacacaaactagtaactgctacaaattcacctctagaagaatgcaagactctagagcagtggctctcaatgaccctttcagaggttgccctaagctatcagacaatccaggatatttaattatgattcttaacagtagcaaaattagttatgaagtagcaatggaaataactgtatggctgggagtcaccacaacatgaggaactgtataaaagggtcccagcattaggaaggctgagaacccttgaactagaggggaccagaagccttggtatgctcaacttctatgccttaacaagcggatcataaggaaccagggatgttgtttcaaatgttcctttggctttctcatgctgaatttagtaattgttcaacaaatttcctatgaaaaatgcattttatggtacttgctatccctgatacatggttgcagggccatggatgggtatgtggaccctgtgccacctgtgacccttaagcattaattttaagagggccttaaagggggaattcttatgctttctggttgcctttcctctctgcttttactaaacttgctgtgaaaacactctggtttctaagggaatgactcctaatgttcagggtgaagatagatcacacaatgatagaaactgagagttctcactcagtgatcactttgtggtactaccctcaggagctggcgaggccaccaaaaggggttccaggtgctggtaatgtttcccacttgctcttgaaagttcagggctgaattatttcacattcggttatgacctggcaatctagttgtgtttacagacaaaaacagacaaaaagactagtgattggcatatgaccattttatctggtaagagaaaacctgcccagctgatgtactgtgttatggaataaagtcatcttgatgagaaggaatttaaacaatagattattttgttacctattggaagaactgtcttgaatttgtttctttagaagttctaaataaaattgtttaatgtgctaataatgtctgctttgtaaaagtccttctaaatttatttacattataactt

SEQ ID NO: 27254 - DNA, 1197 bp, Mus musculus
gaaggccacgccccttccccctcctccagggagtccgggagaacgcccggccctgcccagcagcctgctgggaactgtagttgtggtctctgacaaactggcattaaggtggaatgtaggactacagatcccgaaaggccacgcgtgccgcgcctgcgtgtccgcacctgctggagggagggctaagtcgtcccgggagcctagctagtcagcagaggaggctttggctgcagcgggtgacatggacaacgcagggaaggagcgagaagcggtccagcttatggcggaggccgagaagcgagtgaaggcttcccactctttcctccgagggttgttcgggtgagcgccagaggtcttgcccttaggggtcttggtgcccgatcccctgcccagccggctgccaccgcagagtaccccgcgcaactgcttagggttacgggattcccagtggcccacgctctgttttgggtcccgtagcatccagggcctcatcgcatcccttgggccgtgtctggggtgtctctccagtcagcacacactgcaagccccagaaccttttggggatcctcaggccttggacacccctcacccacacccggagaacctctagctcacaatccccaggcacccttaaacaacccagaacacctacgcgtcctcggagatctctgtggtcccccaagtcccatgcgtcgccaacggtccggtgctagctccagggtccgcgccaagctgcctcttcaaggatgccacccctcctggtggaccagatttattcatttcccctggttgggcccgtaaatcccccgggggagccaggactgtgaggttctggaattcaacctggagtttggcagcagctggtggctcgtggggagcgcgaagtctgcgcccctgtatcccgggcacttgcccgctggccttggctcaagggccttgaaatcatatcctccttggtgtgtttttcatttgccagagtgacttgtatccgtagttcaggcttcccgtttgatgaactgtatgtaacattgctcctttttaaagtcagagtatcctttgggaatcccgtgattttgttaattcttacatatcttggtagggaagggtttggtttacattctgagctttcaaaaagcaaaacctgccctgagagcttgtggaagaattctgggctgttgattatgcgaatgattcagc

SEQ ID NO: 27255 - DNA, 1281 bp, Mus musculus
ggagtcttctgtgcctcttctaccatgtctgcagggatgtgacaccatggttgtggtgatagctacattttccttatcatccttccctatacctttgccacttttagagatgtgtcctatgcctgggcttctttcctggtggccctcttagtacttaggtggagggctcatgggccctgagccttttccactgccttgacctctagggctcccacaccttaaaaggctactccttaacaagctgtgctggggctgaagaatatggtcttgtggaaccaggaaaggggacacataccatccaataatagggatgaacagaccctgctaagtgtcctgggactcagaagggagaagggtttagcttccatcattgcatacacttgttccatcatcccggagtgggtatttgtctttgctgtagcttcacactgattgtttctctttgttcccttttgcagaaggcactctgctccttccagatctacagcgtgccctggaaaggcacacactccctgacaaaattcagctgcaaaaatgcctaagggctgagtctagaaggatcatgcagactgttccttacttgtgctccttccctatagtgtttcatctcgcagaagggtgctccggctctggagggcaccgccagtgtgtttgcaccaggagacagtaaaggagctgctgcaggcaggttctgcacatctgaacagctgtcccctggctccactcttcttgcagtacctgccatgccttgctcaattaaaaaaaaaaaactcctttggctctgtttgagttgtttctgtctcaggataatgcagcaaggaaacccagaaaacaagtgtgtgtgtgtgtgtgtgtgtgtgtgtgtgtgtgtgtgtgtgagagagagagagagagagagagagagagagagagagagggagagagagagagagagggagagggagagagagagagagagagagagagagagagagagacccagaacccacacagcaccaattcctatactattgggcctgggtcactggtgtctatggggtgacagggatactcccagcccttctatgccctgatataacacaagtcttttcatgcagcttcaggggagatttaacccaaatgaaacagacataaagtcaattccaacttacaagtagggagttttagttaatatcaccttagtgccatgattgcatagatctggggaggctacaaggttgtataaaatacaagtcctcatatcctattgctcaatgtccatccccatgtcctccaatgtaa

SEQ ID NO: 27256 - DNA, 1099 bp, Mus musculus
atggtaacctcttgaaagctacatcttcgagtgcttttacattagcattctactttttatatagtgtatcatctccctagatcactctcagctatgtgagggggtattatgtagaatcccaagtgaaaagctattaaccttccatagggaatatcaatagttcactgcaactgacctagctactactgttttgttctgctctagttgtcatggtcacgagggcaaagtctaggatggcttctgtttttcctggaagaaaaagcatggcattagcctgtttggggaatcttaagtatttctgtgatggctaatcttggttttcaacttcagtacctctcaaattgactaaaaacccaagtcattggggaattcttagtttatttgattgcttgaggttagaagaccctccctaagtttaagccgaattttcttgtgacagcctagataaagaacatggaagaaagaagtttttgctctttgttggcttgcccccactctcacttcatgggtattagagcctatctcttcaggattcagatgtacgctgaaatgtggacttgtggaccaaacacctactgaactcttagactttttcttcagagagagccattattagactagcttgaccacagactgtaagccgattggctaatctccctttatttgtattccctaggtttcataagtaataagctgttgtgtttatagagaggagcctagcataactgtcttctaagaggctacacccagcagccaatggaaaaatatgcagagacccacaggcaaacattagatggagcttggggagtcttattgaagagctgggggaaggactgaaggaccagaagggaacagggattccacaagaagaccaagagagacaagatacctggacccacgggggtttccagagactacatcaccaaacagtgatcacctgctggatttaggcccctgcacacatgtagcagatgtgcaacttggtctttatataggtacccaaacaactggagttgaagctgaccctgaatctgcttcctgccagcctatagatccagttcccctacctagaccatatcatctggcctcagtgggattg

SEQ ID NO: 27257 - DNA, 1141 bp, Mus musculus
aagccttttcgtctccaagtggattcctgtatcataaacgaacacatactggagagagaccatatgaatgcaatgaatgtggtaaatccttcatacatcgcagtaattttcaaatgcataaaagaacacatactggagagaaaccctttgaatgtgaccaatgtggtaaaagctttgcacaaaacacttatcttttacaacataaaagagtacacactggagaaaaaccctatgaatgtaagcattgtggcaaagcctttgcatattctaataaactccgagtgcatgttagaacacatactaagtagtatggtaaagccttttcaaatgtcacaagtctttataatcatgaaagagaaaccctatgagggtattcagtatgtttaaacctttgcacatttctataatcttcatcatgaacatattcatactgtagagaaagtctgtgagtgtaagcaatgtggtcaagcctttgtgtaatagggtcctctgagatccaacacaactcaaactcatgtaatgcaagtgactagaatttattgtaacgaagctgctactgatggaacagggctagagaacacacttgaaagctgaactgtgacagtccccacactcaccttgatactgaaccagagtgttatatagagagtttttatgtttgagaaccagaaacatttgtgccaaattacagctacattttcccaccactcagaattaatgataggggctttcctcatgtagtcttctatgtcagctgatacagaatgagggtgctacaatctaatcaatcatatcaatttgttgttttgtgattaggaatagacattgttttgatgaataaaagatgcatagaaaaagaaatggttaggaacagtcatggtttttatgaaccaaagatgcataattgaagctggtccactatttgtaagtctccagctcctctagggcctataaatttgaccttaggttcatcttatgattaaattgatgccgataacaaaaaggcaattcttaggacaagattcatttgcttatttccaagatttgcatactacagtcatttttgaatacataagaaaaaaatccacattggagagaaacccagcaaaactaatcaatgtgataacgatttttcacaaca

SEQ ID NO: 27258 - DNA, 1092 bp, Mus musculus
atgaaaggaagtgtgctgctatggggtgtggggtaaactccaggatgtcctagagtcctgtgatgtgagaggctttcaggactcaatggtgataaccttagctgaaatgcacaagatgggggagctggaacctgaagagacaatctgcagtaaatagacagggcccccagtggagagatggagtcacccacccatcttcaaaatgtttaactcagaattgttcctgtgtaaaggaatcagacagaaatggagcagagaatgactgaaaggccatccagttacctgcccaccttggcatccatcctatgggcttgtaccaaaccctgacactattactgatcccatgttgtgcttgcagacagaagtctagcatggttgtcatctgagagcctctaccagcaactgacaaatgcatatacttagagccaacgattgtactgaggttgggtccaatatggaagagttaggggaaggatataagctgaaggagatgccaaccacataggaagaacaacagtatccactaccctggacctctcagagctcccaaagactaagacaccaaccaaagagcatacatggtctggtctgtggccctagacacatttaccagaggactgcctggtctagcctctgggagtagatgcacctgaccttgtagtgacttgataccccatggataggggttccgtgggatggggtggggtgcaggggattcttgtgggtaggggaacattcttttaagaggaaaagggtaggggggatggggtgaggaactcttacagggaagaacaaaggcgatgatgcccccctttattttgtttgtacttgtaaatgcaatactcttcaattacatgaaattacttatccaggtgtaaaactatgggtatgtattcatgtcttttctctcactgtgataaaacacaatgtctaagacattataaaatattttaatttggcttgtcttttaacaggaggattggaccaccttgaaattgacaatgctaatgtcacaatttccctttaaattctgggctatgttatccagcctgcattggatgtcagtcattagtcaaggctacattttatctc

SEQ ID NO: 27259 - DNA, 1200 bp, Mus musculus
actctttgggaggttctcaggacccaaaggaaggtacctttgatgaaatctcctacagtggggagaaggaacttgaagagcccacctctagcagaaagacagggcatcaagtgaggggtggggttgccatcttatagccaaaatctttgacccatcattatttctgtctgacagaactgcagggacaaaaatggagaaaagcctgaggaaaaagaggtccagcgacaggcccaaattgggatccagctcaaggggaggccccaaggcctaatactattactgaggccaagatgtgctcacaaaaagaggcctatcctgactgctctccgaaagacccaacaagcagctgaaagagtcagatgcagatatttacacccaaccaatgaacagaagctgctgacccctgtggttgaattagggaaaagctagaagaagctgaggaggagggccactctgtacgaggcccagcagtcttttaaatgacctggatctcagacattgggccaccaacctggcagtatacaccagctaatatgaggcccccaacacatatatagcagaggactgctgggtttggactcagagaagatacctctaaccctcaagagactggaggccccaaggagtgtgtatgtggggggagttctggtggggtagggggttgaagaggtaaggaagtcctcctggagatgggggatatgagacgtgcagtagtcagaaggtggaccgggagagggataaaatctggactgtaaaaaaagattaaataaaataaaaagaaacaaaaagcagcacattttggggagcatcatccacaggcaggcaacagagtcagggactctccctggtccagttgttggggaacctgtctgaataccaaactgcacatgtagtacacgtttatggggtatgtgtgtgcagtatcagcctatgaatgccctttggttggtagtttagtctctccgaacccccagaggtccagatcagttgattcttggtctgcttgtgaacttcttttttttttattgggtatttattttatttatatttccagtgctatcccaaaagccccccacacgctcccctacccacccactcccacttcttggccctgtcgttcccctgtactgaggcatataaagtttgcacgactaatgggcctctctttccactgatggccgactaggccattttctgatt

SEQ ID NO: 27260 - DNA, 1191 bp, Mus musculus
ttcttggttgtctgttgccaggtgtactgcctggttttgtgtgtcaactggacacaagctggagttatcacaaagaaaggagcctcagatgaggaaatgcctccatgagatccagctgtaaggcatttcatcaattagtgatcaagtggggagggcccattgtgggtggtgctatccctggttctagtagtcttgggttctataagagcaagccatgcaaaccaggtgaagcaagccaataaagaacatccctccacagcctctgcatcagctcctgctttctgacctgcttagttctagtcctgacttcctttggtgatgaacagcatcatggaagtgtaagctgaataaaccctttcctccccaacttgcttctcagtcacgatgttttgtgcaggaatagaaatcctgaccaagacattgttggtaccagcatagtggggcattcctgtgacaacctgaccatgtttggggaaggagtgtagaaggactttggaactttgcactagaagagctattgggatgctaagaactctgtggaatgttctgtaggagcttggaagataaccttgagaacagtgcagaagatggagacctggcttgtgaaattactgagggaagattaaagtctcttatggattgttgctattttgattgtgaagattctgtggttctggttatctggggctgaagaatcagctgtgataaacaagataccagaactactaaattgaaaactttgcattactgggactattgatgctggttagcttcagctaagaaattagtgatgattaggaagagaccagcatcattgaggtaaaaacttctggaaagtgttttcgcagagcacaaagaggctgtgttccagatagagccaaggttgttctacctactgctgcagctggacatggtaatgtgtaagaatcactcaggtggtaataggttttgaaggggtcatgaagagcagctgagactcagcactgtgaggccatggaaggccattggtgaaggtgcagcctcagttgcaattgatggcccagaactgaaggggtcttgcaaaggagttgaatcttggaaccgtgaagagctcctataataggcttttggcaaagcctagttgcagctgaagacaacagtgttttggagatgccaataccatgagatgaccaccaagaacagcagcagcat

SEQ ID NO: 27261 - DNA, 1145 bp, Mus musculus
gcctggcctcatggccgggacccagctctttcggttccgggaggagccaggtcccggaggcgatcgggcggtgctggaggtccgcgtcccgcaggtcctgcatgtccagtatggaatgtatgtttggccctgtgctgtagtcctggcccactacctgtggtttcacagaagatctctaccaggcaaagctgtcttagaggttggagctggagtgagccttcctgggattttggctgccaaatgtggtgctaaagtaatactatctgacagctcagagtttcctcactgtctggatatctgcatgcaaagttgccagatgaataacctgccacaggtctaagttgtaggactaacatggggccacatatcaaaggacattctgtctttgccaccacaagacatcattcttggatctgatgtgttctttgaaccagaaggtaagtataatttatagcaaacttggctggatgtatcttagaaaactcacttaaaaaaccaccccacccctccccagattttgaaagcaatttagccacagtatacttcctgatgcagaagaatccaaaagttcaattttggtctacataccaggtccgaagtgctgactggtcacttgaaggcttgctctacaagtgggatatgaaatgtgtccatattcctctggagtcttttgatgccgacaaggaaggcatagcagagtctacccttccaggaagacatactgttgaaatgctgatcatctcctttgcaaagcacagtttctgaatgaattgtacctcaatatgttctgggacagtgtcaaaatggaataacctggcataaagctgaattatctgaggaaactcaatgggtatgaagatgatcaattctgtaagccttgtggctgtgatgtcatgcctaggatagcattcaacataactttaacaaaattaaacattcaaaaaggcttaaaaaaatggaggcagaactaaacaagattcttgacagagagatcatgaataggtgagaagcccttaaaaaatcgttcaaaatccttagtcatcagggaattgcaaatcaaaatgaccttgagatttaccttacaccaatcagaatggtgaagatgataaactcaagtgacagcacatgctggtgaggatgtagag

SEQ ID NO: 27262 - DNA, 1216 bp, Mus musculus
caggtggtcacctatgtgagtgaggcgcatgaacatgatggatacctgtacctgggctccttcagatctcccttcatctgcagactcagtctccagtctatttagccagcccagcagctgcccccactgtgcatgccagaaatcatcacactcagtcacataggtctggaaggagccatggacatatagctctgtccctgtgttcctgctagtccttggaagtgtgggagtagctgctgtaacctggagaaggtatgaaccttacccatactttctcccaagacgtgcctctcacctggacttgatgtcatttttagagggaaatagtgtatctgctatggggaagacaaatcatggaaagccatttctctttaaaaaaacatgctaagtacaagaattctctagtacctggaaaatttaatacacctgtgacagggctcagggtttgatgattagagcaggggattagctgtgcagggacctttgtattgccattggctctatctgacacttgtatcttcattctaaagggggtcatgcttttgggggtggtattgcggtatgccatggaagtggtaatgcatgtgttgaggcagggattattcaagctgaaacttgttctcaggggccgtgtgagatgtgtgagaatacctggacttctggtatttctccacagaaaaggtgtgctctcccaccctctacaagcctctttccatgccagagggttttcaagactcctgttttagtggccaggaggatttcattgggtttctttctgactgccttctccactggaattgggtgacccagtgagtttgtacctgcacaggggtgttttagaaatgcccttttatggcttgattccttttagacctacagatgtgattagtgaactgttgatgtaatgtttgtgctaatgtaataagctcaaagttgcttatttcttggcaagtatgtttatacactggtcttaattttgataataataaatcatattaaacccacttttctgctgattattactccttttgataaaatggtccagaggtttcttctctactttaattattgtatttttctacttaaatgccttaacagtgtcagtatgaagactcattctgtaaggatattattttagggcaagacagccatttaatttgcttagaagtaaagttaggggacctgtcaggataccaaaggtcccaagtggcatttc

SEQ ID NO: 27263 - DNA, 1661 bp, Mus musculus
gtataatgtgaacatttagttacacacacacacacacacacacacacacacacacacaccgtgggaagaatctcccttcttacctccccagggatgaagataacagaatgcgcttttttttaaaaattttattaccattcaatgtgcttaaagtccaaaccagacatgtttgtgcctctggcacataactctcctgctaatccaagtcaccatgtccaactcctgcgtctatttcatatttggttcatttggtttattttatgatcgaacaaactggacaattcttacattttgtatggtaggaattgcactcagggcctcctgcacactaggcaagcaagcgctctacctctgagctgcacaccacacctctaactcccaagaagacggagtgaatgtcctctcctttacttgtgaaatcatttgggttcgtttctctaagctgtgatctggaaggagtttctttccccaaggtgcctcatagtaggagatcatattgcttcaaacgtgtgaggttgttcatggtagccagtgaaaactcgggtgtctttactaagcctctggtcccatctgaactgagatcctgaagactctgcctgtcctttcttttgtggttggggcagcaagaactcactgtggtccaatgacgatgacacttggtgctcctgagcaaggtctcttttgatgtgccttaagttctctggacattggtgagtgatgcaaatagtgaagtcatgaaaagcttattttgcagctagattgtggctaagcatgggagggctgaaggggaggcagctctgtgagcagggcccctgggggcaaaggaagcctgttctgtctggtccacagaacttagctatatgggtgtttcagggtatcttagctactgcacacttactgtctgtcctgacgtcttgggtaatggggtaaacatgctgacgctcccaggaggcggagcggttgtagtatgaacaaatcttaatagtcctttgttacaatcagcagtgaagagccatgtgatggacgtggctgagtatagttactgtgccctttgaaatggcctaggtttctaggttactgatagaagctctcggaatgatttatagaaatatccaaataaagctttattttgttcactgtcttcttatggggatgtttttggttgacgttattctattttgtttcttcctggttggggattgaatctagggcctcctgaatgctaggttagcactcaatcagacctttacccccaccccactcccaccctagccaacataatcctaagggaaaacgaaaaggggtccatccaactcaaaagatagtccacacacaagaaatgttggtgccgtgtattcgtgtgtgtgtgtgtgtgtgtgtgtgtgtgtgtgtgtggtgtgctttgaggccagaagataacctcatagcaccatctaccttttcttttttaagacaaggtctctcactaggcctgggactcaccaagtagctagtctggctggccagtgagccccgtagattctatctccatctccctagtgctggggttacaagtgaacacctgcctattctattcactcctgcctatttcccctcggttctgaggctagaactcaggtctcatgcttgcaaggcaagcaccttagtgattcaagctatca

SEQ ID NO: 27264 - DNA, 1767 bp, Mus musculus
taaccaagcctttcactctttatgtaaaagagagagcaggggtcaccagaggagtccttactcagactttgtgactttgaaaaaggccagtgacttacctatccaagaagttacaccctgttgccagcgggtggttttcttgcctgaaagctattgctgccataatctgtttgtcaaggatgctgatgagctcactctgggacagcaaataactgtagtggcatcccacactcttgaaagcattaccaacgctcctgtgacacatcagagctttttgttgtctaaatgagtgatcttcgcttcattccacctgctgtcccactgcgtgagactgcacctactcatcactgcgctgacattctggcagaagaaatgatctgaaggatcagatcagccttggcctgaggacagtagcctcgaggttaaaggtaagcagaaggcggggacagcagtatggtggtgaacagaaagcaagtgatctaggccagcagccttcctgagggacgtcggcccagaaagctgaacttatgactttaagacaagctctatgaatggcaaagaaaagtctacactgacaacaggtatgcttttgccactgtacggggcaatatacaaagagggctgttgacatctgcagaaaaagacctaagatgctgtggctaaaaaaaatcaggtggcagatctaaccgccaatcaggtggcccaaggagcaatgatcctggcagtcaaggagcctaaagattattatgacatcagagagaccagctttagatacaccgctgagcactatcaagttatggacagtatttgacttggcctgggggccaagaaattcaaaggtgtggttaggtcctttgactactatgttacaggactctctgacttggcagaagaaatagtcaaaagctgcaaggcctgtgctatgacgaggtagaatttctaaaagaaaccttcccaaggtaattggatccaataaaggacctgtctttgttgcccaggtaaatcagggactggccaagatattagagatcggttagaagttacattgtgcacgcaggccccaaagctcaggacaggtagagagaacgaataaaaccattaagagacccttaccaaattgacagcggagactggcactaatgattagatagctctcctaccctttgtgctcttcagggatagaaacacccctggacagtttagactgactccccccctataaattactctacagggggcccccctccactggtaaaaatagcctttgtacatggtgctgacatgctgctttcccagcctttgttctctaggctcaaggtgctccagtgagtgagacagcgagcgaaaagcagctccagaaggtctactcaagaaaagaagacctgctacattagacatctccacgcaaaaaaccttgagactctggtggaaaggcccttgtactcttaaccaccctactttctacctttatgggaccccttttgattttgcttctgcttttaattataggtccatgtgtgttaaataggcaagtcacccttattagaacaaaaattagtgcagtgcggcttttagttttgagacaacagtaccatgccataaaggatcaagtatgtcaggaaaaagatagtatctagttctaagattagaactactaacaagaagaaggggggaatgaaagagtagtaaactcagtgctccaaggtatgctaatcataaaacagatagtgacattcctccacccacccacttcctgagttcaaggag

SEQ ID NO: 27265 - DNA, 1105 bp, Mus musculus
gcaaagtctgagtttggatccatctgagtttattgaatttgtgtcttggtttcagggttgcgagatcgtgggttccagtcccacctcgtgctttggtttcagggttacgaaatcgtgggttcgagtcccaccttgtgccttggttttacacctggcagagtgaggaacaagtgtgcttctctggttttggtcgtctaagtagaagtggacgacggtgtttgtagacgatggggtgatggggttttctgaaatgcgcgcgtctgtatttgcagctgtccttttgggccgtaaggaccggaggactgtggtcggcagacgtgctaggaggaccacaggctgtggccctgggggacgccctgggaggtaaggagagccagggatgcctggccgtctccggatcggtcagagggaccgagttctgttgaagcggaagcttccccctccaacatcgtctaattcttttgcctgcttgtggaggacaagaaagggtcgagtgtgtctggatctgttggtttctgttttatgtgtttttgtgtacgtgtttagagctatgtgaaaatctagagaaacaaaggtaattctcataggtgctttataccctgactagagatagtttacacctgagatgtgtgaaaatgggttttgagaaaagcagtactctccgactatctggagataatttggtaataaaaaaataaaataaaataaacagtattaattggtctttggaaccctgcacctgtagttaggaatctagtgtggctagagaagccctgctaggcactgattataaatgctgttcttatagggaccagcagcttctcaaagttctatggtaagggaacagatggctgtttttcctacaaaaattggattcatcaggtgacaaggtgctcctctcttgaaattacagctagaaaaaaattaagaattttgtttggtttaaatgggcaaatgtatatggccatttcatttttgtttctaaatagtttcaaaagtataaatatgttttatatgtcttggttatagattagtggctcataagttattggttatgattaaaaatttgtaacattggtaacaaaaagttgacttaaaactggta

SEQ ID NO: 27266 - DNA, 1301 bp, Mus musculus
tcctgctcctatccctgctttaaagaaacagcccagcactgtgtctatcctcctcagccactgccttcttccacagataccacccggtctctgcagctcagccctgtgacctcatcttctcctttcctttgtcttttcaagctggctcggaaaattgacaatgttgaaaccagctgggctctgggagctatttttcattacatcgactccctgaagagacagaaggttcctgccttgtagcagctgagccctagtccctgcctcaaccagaattccaaggctcccaactccatggacccctctgtcttggaagtgacaccatccttgaggagcctgcatctggctgagaccctctgtgcctgcagtgtcatctgcagatttgcctgggacatggcccatgtactagccctgctacaccacactagctggggcagggccagggtaggaatgctgcttggcctgaggccatctccctgccttacttacctccaagtgggcagggagccaggtggggcccagggcacatgcagccctgttcttattccatccctgtgcaggattgtggctgcttttatgtgtttctgtgacgtgagtcttgttttgtctcccagcccctgttccctcatgagccaggcctctctgccttcccagagttgtgggagttgaagtaacctgaccttgccacagtgcaacctcgaggggagcacatcttgaatgtggccatctcttcctcgggacagacatgtgaaatcacctggagatttgctgtcccacctttgaatggtatagcattaactgatgtggggacactgagtaggaagaagatggcccagtgcctctttacagacccagcgtgccgcctttgcagagaatgtgggtgtgagcagagctgtgagaatgttcagggccgttgctcaagtactaccttgtgagctgtgagtgctttatgttaaaactgagcccctcttctggacacaactatgtcccagtgaatgtattcctgctatgagccacttgcagaccagtggggcggatgagaaagctcagccctgaaccatactaccccttaccccaccctcctcactcggctgcagctggcttccccatggtcccctcagtgaatgtacagttcataaaataagctgagccaccactgttcaactcaaaataaaggtttacaagggtttctctcttttgcctcattagtgagcgcccagcattaaaaaacctgcccaagtgggacaacgggtggtagcagaaacccagcagcagtgacagcagcagcagcagcagcaggccac

SEQ ID NO: 27267 - DNA, 1248 bp, Mus musculus
gatcccaccccccaacctccccaaggactaattaattatcccacacagtgagagcagtggcttgcttagctgactgtgcccacgccagtcttcaggcactgcaagcagccgctggtccctgctatccgaagtgccatgcttccaggaaggaccatgggaatggttttgaggacctggatgaggaagaaggcgtggcatcctcctggcttcttacagaagaactgttgcagagttcacagcacagatgggcagagatggtccccacagcttcagcccatcatcatccccagaggccgagcagggagggagtggagctgagcccctgaaatcctgcacgtagctgagtgagcttaagcctttagtttggggtgtgaatagggatctgtggtagccagtgttcctatgttctgctagtacctgggtcaccagccatagggtacagccagccccagtgtgtggtcttgttggcctgctgggtagaacctttgcttcaggcttcatgctcacagcttcctgtcctttgcccttgactgtactgagtatgtgggtggttgacccatataggccatgcctctagccatctgtggaaccctgtgggtgtcaagtagaacccagaacccctggagaggagcactgaagagagagagacctttatcccgtaactgagaccttggttgaggactggcaattttatagagggttggtttagttctttgctttttcaacaggaaataacacttcaggaggaactgaaactagctaagccttcctttttagcaagtaaaccttgaacttggtcagtgtggatatttctgctaggctgacgactaagctgctggccctgcagagggtccagtgtacactccactctgctacagcagcatggtgaggacccaccacaggagctgtgctcctcagagggcagaatctacattaagtgccgcccaaaggagagtgcgttgtcatagaaaccacataaaactatccttccagaggcttcaccaccttgcactgctctatctggttgggggtgggcaggagaacccctcgctttccccaccatgggagcatttgctgggaagtgtcttttcaggacttaaatcaccggagccactgtggtagcttgtgggggtgggtgggcaggttctagggctggtcatctgctgccctgtgcatgaggtcccctgaagccgcaatacatgaccacccttctactacttgctattacctccttgtatgagaaatgga

SEQ ID NO: 27268 - DNA, 1147 bp, Mus musculus
ccgctgtgttgtgaagtgggctcccatcacaatagtctgcatcttttccaggtgcttgacgacctatgaggtctactgtcagggtcaagagcagactgctgttctatccaccagaaactatgacaaacaagcattagaacccaggctgacatgggaggattgaggggaccacttgtggctcagttggcagaactcatgtaaagacatctaggctatattcttgccttcgtggataaactgcagggagggacctagcacttgctgctactaaatctgcattgactttgctgctggaaagctggcttagatggggggtgagggggcgtggcgtgtaaagaataccatactgggcacaggagtgcctagagaagtgcttggcatgcctcatcaacagacttggcacacgactcgctttgggcaggctttatacgttacacaaagatgaagccatccaagagagtgtgaactgcccagcagcgcacccctggtgcatggaactgagctaccccttagctgttttcagaggaagggcactgtggaagtagaagagcagaaaaggggtcataaatggtggactttatggacgtggcaatgcctagcattcccagactctggcttcttggacctggctgtgtaggctgtaatgacagaagcagtgtctatgggcacttgggctgttctctggaggaagcaccagtctttattgaaggggagaggtcataggcggttctccgttgggctctaggctgattcctctctccctctcaccagctatacaacattgctgcaccatctcggagtttccgagacttcaaagtccagtttatcccctttcactcagaccttggctacagacataaatacatctacaagagcccagagcttccaaggatactgaggtgagacattctcttctaacccttgagcctctctggacagctagcctcacacctagctgtgcagcaagtgacagtcactgaagccatttgagccgctcagaagtgtgctgcagggtcagtgattcaagggccttccaccaacaccatgtagacgttacaacgtttgttctcctttcttctggataatatgatcagatggggcatatggtcttccggtacacatcgcacaaacgcacatgagcacacga

SEQ ID NO: 27269 - DNA, 1212 bp, Mus musculus
cagcctcacaattgctgggattgtgagtgtgggtcaacatgctccacttaactggactttaaacataagaatgcttgcgcctgccatgcatggagtcacacagaatgaatcgctacaaggagctaactgctctaataaagagcttccaagaactgggatggatggtttggcagttgtgagcagttccaggggagctgacccccacctctggcctacaagggcatgaagcgtgcatatgatacatgctgccaaagctctctaaagtaaagtaaatacatctcttaatgtttttaaagcttctactaactgagaagaacgaaaatcaaattgcaatggatactgtattgtacaaaggacctaattaaaaaccaaaatcacctcagtatctgaaaggacactcaagtacatttagtttcttctccctgctaaacccccccacccccatactggggatacaacccagggtctcaaaagtagataggcatttgctctaccagtgaactacacccctagctttacttttgatccttaattatagaacgcccaaagtacaccaagatggccatttctacccatcagactgacaacatttcatctgtggcaactgctttgcttttgaaggaagaaggatttgggggggtaatcactttgtaattacagatgaagattttgatctaagagtttgcatttaggaccgtcctagacctgaaataccttcgtgcacaaaactgtatatgcatagagtgattcattgtggcagagtttgcttgaaacaacctgattgctcagagtgggagaatgctttctcaatgtttgtcttgttggtctattgaggtaggagaagcaagaaagccatatgaattgatatagaaaaattcctggataatgttgtagaattgaaaacaaaaaacaaagacgaaagcatctagtgtggcatgcaccctttatgtttaagagggaggatttatttagagtgtgtgcttatgtagggaaactctggaatcagtccttaataaaaccagttatttctgggcccaggggtgacagtatagtataattagcagtcagatctgttatttgttcattttctctgttatttgggactgtggatcgttgagacacaaggcagggtgtgtctaggccttgctggcagcagggggatcagcctctggaggttgaatgctggcaacttctaactagaactgctttctt

SEQ ID NO: 27270 - DNA, 1153 bp, Mus musculus
aaataaatctttttcttaaaaaattatgcagtgacttttttaaaaataaaaactttactagtgtctgattagtggtatcagttttacttggctgtaacagcccattatttaaggttagcttttgactacaccgctgtacaagctgatgaggtatttaattagctgttgcttcttactgatgcaaactataattgagcttttctcctctttcttttctccttccttttacttgcagcactttttgcctcggtggaagtgtgagcagttaatcagacaaggagttctagagcacgtgctgtcctgactgtgtcctgtggtgacagcagctggatgtgaagctaagccaactcacagaaggaaacgtcctcactggacctccccctccttggttttaaattgacagacatgcattaacataaccaagatgggctggggtccagctcattggtagagcacctgcttaggatttgagaaacccagagtttcatccctagtacctcaagaaacaagacaacaaaaatcaaagacaaaaccaagaactcttggctaggagcataagctgccagctcttaagcctttgttacaggttatatctctagttattccattcccacagtaatattgtactcttataattgaaaataaacagtctttggtttgaatctgttttcacaatgggaatctcctggtagcttatctttggttgtttttggtagtgaatgcttctggaatacgtttctagaccactctgtcaagtaaagataataatttatcaccaggctgtgggaagggaaaggaagaccttggaattcggagtactgcagtggtagctcaacactacttgcaggctagtgggcaccagtgtcatgactttgttcttaaaatggatggaaactatacatttttttaaaaagtagcaaatatttatccaataggatataaacatcaaggggtaggggaataaatctatacttcccttagcagtgggataagcccccaggaaagttgttttggctaagtgagtttcagtaagccaaagatgatgctgagccttcaggagctgtgggaggatggacagtgctgagcaggtaagctatactgtgtagatgagcgggtccttgcacttctgacgagtacggcccagaggacaccg

SEQ ID NO: 27271 - DNA, 1076 bp, Mus musculus
ttaaccatcctaatgctgcggtttctcatgttgtggtgattccaacataaaattattatagccatgtctaattgtaatcttactactgttaagaatcataatgcggcggaaggggcgggccgggtacgagaagggctgggccgaggtgccttggggttgctggagggtcgtgggcggcgtgcaggagacatgtcggcgggcagcagctgcagccagactcctagccgggccatcttcactcgccgcttagccctcagcgatggcgtacagctcccgccccggggactacagcaccaccccaggctgcacgctcttcagcaccaccccagcaggaaccaggatcatctatgaccggaaattcctgatgggagtgtcggaactcacctgtggccaaaacacctcccaaaggacctgccagccattcctggggtcactagccctaccagcgatgagcctcccaagcaagccagtcagagctacctgcccagcagcccagaagataagccggcaggcggtgaagagtcacagtttgagatgggcatttaagggaccagccataggacgcaatgatgcttctggggcccccagggccctgggaggagagccgccacagcagtcaggctttgtaccaggcagacactgggtgtgggtcggccacccagtcctgctcctcactcagggcaccagctctgccttccattttgtgaacaccagcgcatacctccttgtgcctctgtctacagagctgctactgcaggggaatgactctcagtcacagcctccctgcatggagctccagcgagtggacacagaggagtctgtcagaatgatctagcaatcctagccccagcctccggagcacacccacctttctttagggtgggttacctgggaaagccacacttttacttctttccctgacaggaaataaaagccacatttacccttaaaaaaatcataatgcaatatctgatatgcaggatatctgatgtgcaaccctaaaggggttgcaacccacaggttgagaaccactggtttaaatgcatgtaccactacacctgtcaaggggatccaaa

SEQ ID NO: 27272 - DNA, 1108 bp, Mus musculus
tctctaatgaaaggagacaagaggatcttttttctgtaagatccggttgcagccaaccgcagctctcctcatcagggccctggtgaggaactgtaggctcctcccttccaaaactgtcatttcagagtataatgtaagtagaactataaagatggagcctttgggcttggcttttgtcacacatcaccattccctgaggagtttgggggagtctctgtgtagcaacagtttctcattattgttgaatgtcctgtgtgcttttctatgtcgtactatgacactctgctcttaaatatgtcagcagatctctccccaacactcgcagcgtccactgtaatgctaaagagacttaactgtgctagttcatgtccatcgtaccatagtcacattgcttccgtgatccaaaactttcacagtaagcagctgatagatttcatgtaactgtcagggtctttgtttgtttggtttgttttggcataagctagccactttgccttgtttgtagagtgaaggggttagagaatgagcctagcacatctctggtgacatcccttgatcagcaccatcagagatgtagctgagaagactggatagctggggtgatcagtgctattcctaatgtgtctgtgggcatggtgcttccctgtgggtcccattgtggggctcatggtgcttctctgtggagccaggttcttggaaatgtcctaggcagcaccctactgaaagtcagcacccaagaggctcaggtgtacagtgctccctgtggatcccattgagactcatgaaagcacaggtggccctctcacgaggcacatgtccagtcacgtggcagacaagaactcagggacactgctggggatagatatggaagtgtggtcttctgcagtcattcattagctctgttgaccccatgacactggcttttggaagaaactgtctcacaggtcgtccctgttctacatctaatgcctgcttcctcagggagccgtgctgtttggtcttatgttactttggtctgtgtgacttgaagatcagaagaaatttgaacaaaagggttggttagacccagtagaatcatctttgacatgaatatccctttatttttata

SEQ ID NO: 27273 - DNA, 1145 bp, Mus musculus
gcccctctcatatatccaatgatgtaagcatgagtgtcaagaaatggtttccctagttctgccaggacctttaggtagttagaagcttaggttcaggtttaaggttacatgctgaaagtccaggatccacacctgcctataagtctagcctgtagtgggcgcttactacagatggggctgatcttgggtttggccccccaaggctgagtggctgcaagtgctggaggaggtatttggctctgcctacacaggacctacaggaccgcaatgatgagttgcaagcagagctggaaggcctgcggctgcggctgcccaggagtcgacaaagccccgctgggaccccaggtacccatagaaggaggatccctggacgcggcccagcaggtaggagcctcgtctggagggtaagttgagagtggggctccaggacatgaccacaaagctggacatgtgacaccccagaggaaaagatgaggagaagagggtggggaaatttatctttgtagaaatcacaaaggttataattacctgaccccagaggagacaaatttgcccggggggcatgtttccaggttggatcctgtgaggttacaggcaactttgtgacagggctggacatggaaggtcactggcatggaaggtcatagcaagataggcatgggatattctcaactgagggaatcctgtctgctgggttcagtggaagtcacactgcagacgctcctgatcttggacaatgaggtccagacaaaggcccatgtttaagtgttcttggtcttttttagagaccgaggttgggggaggatgttgtggaggcgccatagttcttgcggaggacagtgggtacttagctagtctctgccttcccactggttgtatgaggcagtcaccaatgcagtcactccagctctgctgtcttcagcagtatcatatgacactcaatggccccatctctctgttgcccatggaatccagcagccctgactacccctccctagttaaactgtggcaacctaagcccctcagcgttgttctccagcctctgagagctcttgagtctctataccctacagctgtttatgttgggaagaggaaagaaatagcccaaagagatgctcttgggctctccaagaggaacttagtag

SEQ ID NO: 27274 - DNA, 1115 bp, Mus musculus
ttaagtagatatttttatgtataagggagagaccttgtatttataaggtttcagggttttttgtttgtttgtttgttttttgcttttcccgagacatggtttctctgtgtatccctggctgtccaggaactcactttgtagaccaggctggcctcaaacttagaaatccgcctgcctctgcctcccaagtgctgggattaaaggcatgcgccactacgcccagcaacagttttgtttgtttgtttgtttgtttgttttgtttttttaaagataggaattgtgcatagttcgtgctttttctgtttatctgttttctgctccactcctctcctcctcccctccctccttttttcctctctctttcactcctttctccctttcttatttctagttttgaaggtagaacactgttgtgttgctcagactgacttcagactctggggcccaagaagtcctctgccttagcctcatatggagctggcatggaggcacatgctgggtttcatctgttttctggttactctgtagctttaaaacacacacacacacacacacacacacacacacacacacacacacacacactgctgactgacggatgccttgggtccctgcaaagagaagctgattcctgtagctgccttcgaccccacaggggctcctagtacgtctttccagtgctagctctgtgatctgctgttgttcagtgtgtaggcctgagggaaatggggctaagaaacctagctaacctgctacttcgcttttctccttcgtgaccagcctgctatgggatggacaacgaagaagagaaccactatgtgtcacggctcagggatgtctacagcagctgtgacaccacagggaccgggttcctggatcaggaagagctgacccagctatgtactaagcttggcctggaggagcagctgccggcactccttcacattcttctcggagatgaccgcttggccagggtgagtggtggactcctgccgagggacactgcagagctgtgccacccaccggtgtgggcatttggtccacagcacccaaagaaaggcacttggggaggagaagtctccagcaataaaccgtgttattctagagattgaaag

SEQ ID NO: 27275 - DNA, 1141 bp, Mus musculus
ctaagcatgctggggttaagaaattttcaacttcctgtccagcaccgtctcccaggagtgctgcacaaggacatcatagcccttggaaaggctactgctccttagtgtgtagcccagtcaagactgggattctgttgcctacagctggcctctacctcagcatcctcctgccacaaagtgctagggttagacgaatgtacacccatcacacctaggctcattatcactttgtcatccaaaataattcaaagctaaaatctgaattttatttttcaggtttatcttaaatataaaacaaacctcagatttggggggtttgcttttcaagttatatataaaaaaaacctttttatattaaatagtgaatgggtcatttactttaaaggcactgagaaaattcttgagttgtgttgaatatctgtagtaggtttaggcttcacatccattcatttgagccacttacctgacagtttgataaagactgcacatatttcagtttgaagtgtaaacagtagaaatgtgctctcagaaaacacttcccagaagatgtcacctcaacgatgctggtctcttcttaatcaccgctaatttcttagctccaactaaccagcatcaatagtcccaataatgcaaaggttttgctttagtagttctggtatcttgttaatcgcagctgatttcagccccagctaaccagaaccacagaataatcaaactccaaaatagcaatggacctgaaaagagtctctaattttcctcctgaaatttcacaagccaggcctccattttctgcactgttctcaacattatcttcaaagctcctacacaacatctgacagagctcttaacaacgaatgaatcttctagcccaaagttccaaagtccttccacagtcctccccaaaacatggtcaggttgtcaagggattccccactatgctggtaccaatttgtcttagtcagggtttctattcctgcacaaacatcatgaccaagaagcagttgggaaggaaagggtttattcagctttacacttccatactgctgttcatcaccaaggaagtcaggactggaactcaagcaggtcaggaagcaggagctgatgcagaggccatagaaggatgttctttactggcttgctt

SEQ ID NO: 27276 - DNA, 1093 bp, Mus musculus
ggtcattataaacagaacaaggacaacagagtttgtcctgcatattgagttgcttggaaggaagttggcagcacctctatttctgcacttcacagggcccaggtcacacttggcaaatggtagggtgcatgggcaaggttcctgggaccatgctctaatgcccaggctttcctacataattcaggccccttccactacctggttttgcctacatcctcaatgatttgcaaagggtcctgggttttccccctgcctgtgaagtaaatatggatggcagctgcttgaacttgccccagttctgtgcctggcccacagccaaaggaactgcatagaatgggctccatgcccaggaaggctgtttccagcttcaggcttctgttctggaggctcaggtggaaacatctgtccacccagatgggctttcatcagatactctagggctgttgaactgagggcagttctccactgcatcattgtggatcatcctagcattgcatgacaagtaggggaatcacttgaaactaagtaggctgtgcttagcatgcattacaatgcctggacatgtcttgatctgtcggaagagtacttcttattcaccagagtaaaggtaagttaattatgatgcctgttgtgggggataggatcccactgtttgctctggctggtctggaagttactatacctccatgtcaggtttcatgatgccttttctaacaagtgcagttcaagcttgttcaaagaaacatgtttgatcttactacaccaaccaactcacaagtagagttatatacatctcttcctccttagaagatgattatggaaggaaggaaggaagcatgcaggcagggactgagcacattcttggctttagatgatactgccgcagttccttccagagtaccactagctgtttcctgccatcaatacaatagagcatgcccctctccgccagactcttcagggtgacttggaatttactaagagcaactggtacaaacataggccccctgctgctccctctttctaacctgctctgttctaaccactagattcaagacagctactatctgagaccctttctcaggcccaaata

SEQ ID NO: 27277 - DNA, 1706 bp, Mus musculus
cggaaacccagacaatccatctgctttttccagctatcagaattggcctggtcccaaaagacctctctcagctgctcaggacagggcttggcatgacagatgatattgtgactgtccacacagagagaacagagttgctggaacttacatattttctgttcccaacagatctgccatggaggaatctggtacctccagatgggtgcacatgaatccatggggagctcttcctgacgtcccaccaccctttgtatagacacctacccgactgaatgtgttccgtcactcagctttgcttcggacacctccatgtcctcttcccccctctgtatgtgtgttgacctaaactatatgccataaacctcaagttactttattttggggtgaagactcagtttctgtttcagatctaagtttccaatgaagtatattgtcaagtgttaacagcacaagcgatgggttaacttagaatagaaattggtgttggggggggatttgcaagaatttttattttattttattttaattttttggatgaaaattttatctattatatattaagacattctgctgctgtgctgcaaagccatagcagattcgagatgctgttgagggctggatttttctctagtgagggaggtcctgttaaactgaaagccctacccaaactgaggtgggaaggaagcgggggagagagccttggcttctgacagtccttccaccttctgaaactagctgccttttaaagcagatcccttcactgctatgttggacactacagtatctgtccctgggttggcagagacttgaaagcctttgtgacctggcttaatttgtttttcatcctatggtttttctaatggattttctggacttttgtaatcttgtaactattcaagctccactttctaaattttaagaacttcagtggaaagtttaaattgaaggtgctgtttgtagactcaccacccaacggacgcccagccaccacggcaaatccttgagtgttctctaagaatacgatgctggtcatcacagcttcagcatctcctgggttttgatgcttggctctttgctgatcttggcttcctggcttttcctccttcagttccttctcaccctctgctgtccttgtgtagtgatttggtgagagaaagcttttgtcccctgccctctgcactacatatgcggttcaagttttattattgcaataaaagtgctttatgctggcttttctcagctctgtgtcatggaggttgcttacacatgccttatgtcccttttagcacagagattggtaggtattagtgtctgttcttgacaatgcagcagtgaacagcctttcccccttggccgtgatgtgcatgggggcattaggcgtaactcaggcacagcctggggccaagctgaagcagtcatggtccttctcacatcccttaatgtagagaagacttaacctgcctttaacagggagtcagctgcagacgcgttgcaagcagatgtttgaaggattacgaagggaggatgcagggatttaaatctttgtcctttattgaatagatatgcaaagactgccttggtattttcttatcccccagcctcattctgtaggtgccagtaatgtttcttttactgagagttaatgctgatcatgaggatgccccaaaataccttgacaaacaccttgtaaaattgctctggagctg

SEQ ID NO: 27278 - DNA, 1094 bp, Mus musculus
tcactcagtgtgtggtctgtgtgtccagcatttcccactctctgtcctcactgttcatgtgattgtagcatcgacattccccatggctgtacaatcatagcatggctatgtcatatttgttaatttataagttcatggatgcttggattgtttctccttgcttgttatattgaatgctgttaacattcatgtacaaagtgggttttgttattttgcgtgggcagtttttaagtcattgaatgtatctggaatggattttcagggtcccataataacacgttaaattttttgaggaactgccagtgtttcccaaaacagccacgctattttcataccagaggtagtgctccagtttctctgtatcctcaccaatccttgcttgtacccaaactagtgatgtcaagtcatatcttgtttgtattgtcccatttgcttttgttttttaatggaaaaatttgaccaagaccatgcagagcagagtccacagtagcttgccctgttggctttgataacagccacggggcagtggctatgaccccatggagttggggttgacttctgggctggctgtgatataagaaggtcttttctctgggggaaattcctgagaccttcggacatctaataagattcacagtatcattttcacttggtttgaaatctcatagctcatctagtggcttacaaatagaatcaaggtctacttctaaatcattgtcttttggtgctaaataagaccactcatactatttctaggctacaccggcccacatcccaccttctcttcttggcttgctgtcttttctattcttagagctggctgagttttgcattgcgtttctctcctcagtcatgagcttcaagccaacctccaatctaaaccacgagtctcctaagacctcaactccaggaatgtaccaagtattaaatggagctacattcctgttagagttcttacctgttgacacacagctggaaaacaggtaacacatctgtccaacctccctccagaacccagcttcctcatgactttcgtcttgtcattggtgacattttatcattgatccatagctgtcttctttgcaggaggaaaa

SEQ ID NO: 27279 - DNA, 1798 bp, Mus musculus
gttcttttatagatgagaagggcaaggccaggagactgggtgtttaagccatggtaaaatttagttccaggccatctggccctagagttcatgatcttaaactccatgtcactctgtgggcctcctccatacggggcatgtttcttgcgtactcagcctcattctccaattcattagaccctctttacattgcagacctaaccctgaccatcttcccccaccgggctacgatgacatgtacctgtgaaggcctcaagaatgtaacagctcagcctcccttttactctccaggagctgccaccactggccccatcagcgtcagtattcttgtgggcttggggcagaggattctgcccatgtgtttgcaggcctgctggggttgcatccccagcccttgtcagagccgaggtgcctgctgcagcaccccaccaagctgcatataggtcccacggagaaattagtgtgtctcaatcaccagctcctccccacttgcaaggaagactccggcaacatcagccctccacccgatgcagtcgcggtcacagcgctataagaacagaacgcattttggatgttattattaagaaccaaatgtcaatacagaatacatgttgccagtcttccacgctcctttttgttaatgcacaaactcttaagagtgtgatactgcataggactacgggattcctacagggcattcttctcaagcaccctcgagtcacaagttactcttgctcctgacatcactaagatgagccccacccaggctttctgggtggaagtgtgattggaatccatgagccacaaggatgatttcaccaaagcaggcacactagaaaaactgccatctcctcccaagggcatgctcaaccagttgctctgagcagcctgttgactctccctgggctgcagtggcctgtaagtagaggaataaacagaacagacctgtaggctagtttcatagtgaccctaaagaagtcctttctcttaggagcctagtaacgacctgtgaaatcagaggtgccttcactggagctctgtagtgagctgtgtggatgggaatagccctaggtactagagaagagaaaacgaaggtacgctgtgtctattacctgctcttcatgtcctcctgggactgacaagagcataggaacatgggtccagccaggaggaaggggagcctttgtctttggaagcctgtgtccaagctctcccaatctgtagaattatctagatatttgaagccccagctgacaggcactggcagtgctctacccctgtgccataaagctggaagagcacaatggcgtactgttccaggagacaccaaatcaagtaccaagcgcttcgttccatggccggcagcccaaccatgtgtggctccaggatagatggggagatagactggactgacaggaccagggccagtctcagggaggctgggcttggggctcaatccagcatgagcaggctccctagctgttgaaggatcccatgggtcaggcactgaccaccttgaaggtgtaggccattctgtgctctgaggccacagaccatgcagagacaaggacaagacgtccattgtgcatcaacttcatccttgagggctggcaggtggatgtttgggttctgttggtaactgggtacctgcaaaagagcttaggacactttgctcattaaagcatcccttttttatgcaaggaagcattaaaggaacagtggctagaattctccagataggtttgggaatgtagataacttggaccctgatttaaaggaaaaggtaaaagttgaaaca

SEQ ID NO: 27280 - DNA, 1132 bp, Mus musculus
ctgtttaaggcaaagtcccatgaccaaaaatcaaactacttaaacggtgcttatccaggtactcttgacttgtgtgctcacgcgcggcgggcgggagtgggggtggcactggtgggtggtacaggcctggcctggaatacccagcactctggagaccgaagcaagagaatgaaaagttcaagaaatccagccaggaatagtgacacacacctttaatcccagccttaaggagacagaggcaggcggatctctatgacttcaagtctgcacagtaagtgagtttcaggcaagccaggaaggggcaaacagtgagagttgtcttaacaaaccagaacggcgtgtacacacacatacacgaacacgttcattgcttcctgttcacccttccaaagtaacaggaaatacagagacttccttcttggacctcaagataccgagagtcacaaaccacggtgcatctcatgccttttggttcaatggaaacagaacctgctcattttttttttaacttaggttcattagtactctactgggggtgcccaattatttgtccacatttgaagatactaggagcaaaatgaaaactaaaatctggtgatcctctgcacaggcagaggggaaagaaagcagtgttgttatctaaggaataagttgcaaatctggcagccatgggtatcacaatctactacagagatatgaacacaaaggctgggcatggatcgcaatggcagtgtgatcgcgtgatgcatgccaaagttccgtcccaataccgttaaaaagaaaaaacagtttctggacattgtaaacagaaaagtcctccctttacatagccaggtgggcatgacccatcacacagatactctcaaatatctaatgaggaatgctcaaaaaagatgactggacaaggccattggtcacacaggacattctgaactcccctggcaattgagtgtccatcattgtcagctgactgtctttatccaggctcatatctttatgacaggtattcttgccctgaagtaggcatctgccctcctcaggaggctaagtgaccaggtgcagatttccttgatattcttggtaaaagccgccaggtcagcagatgttgtgataaacaccgcgaccaacctgg

SEQ ID NO: 27281 - DNA, 1601 bp, Mus musculus
gctcctgccagcacgagccctctggcattttgccagttctcaagcatagtgccatgttctcactctgtgacccttctctctaggcggaccctgacagtgtgccccccatcgacgtcctctggatcaaaggggcccagggtggcgactactactattcctttgggggctgccaccgctatgcagcctaccagcagctgcagagagagaccattcctgccaagctcgtgaggtccaccctttcagacctgaggatgtacctgggagcatccacaccagacttgcaatagcaacctcctgatagccccctgcccctctccacatcagcaccactacccggcgctcagaagacacatgcagcccccagtgggcagaagctgtagatgggatatgttctctttattcttaagggaggtctgcctcttggtgcctctgcactagctcccaggggctagctcccaggaatgagggggttcagttcttctgtctatggaaagatatcatggccttgaccctgaaggagtaccaggaaggaagaaaggagatggacttggagacaaggactctcattttaatctttatgatagcactatatgaactatgtactaggaagtaaaggaaaacccaggtcaccatggcttcagtgagagaagctggttatccatccccatagcctgaactctggaaccggcagctaacacagcactgactaacacagtattgtgtcaacagctcagtgaaggcagggcttcctctcgggagtcctttggccttgtcctccttgctccttacttcgtagtcgctgttgctgtgtttctaggaaccgtgtctgtgctcaaggaagaaacccactggaccaacttctgtcagaaaggaaaaccttgttcaaagtttcaggaccctgttctttgcttatttgcacatggtcaccttggtctgagctagccaccattgtcacccacagctgcaaagaaagcagaccttaggaaacactgtcacggctgagtgtgactgccttgttcatcccctggactggtactgtgttgcctgcagtaccattgggatcccatagcaagagagggagagggagatgttagttagcctttgctacgaaccaagctgtccccaagctcaacagctaaacaggtattcatttacccatgattctatgggttagctaagctcctttgagcagctcctctgatgtggcctggtcctgctcatgagcccatagtcaattgtcacctcagctggggctggttgggctggggtcaccttcaccattgtggcaagtgttggctgcattggcttggttactcttgttgcctctctcaaaggtcagttcaggagaattctcaagatggcctcagggttccaagagagagtagtagtgagagggcctggagcggagactcagctgttaagagcacctacatggtgattcacaacactgtcatccctgttccagatgacctgatgccctcttctaggctctgtgggcacagacaaacacattcgagcaaagcacccaattgcttttcttttgctttttgagacacggggtttttctgtgtaaccctggctgtcctggaactcactgtgca

SEQ ID NO: 27282 - DNA, 1162 bp, Mus musculus
actatcacccaggtacatttttttaaggtgacaaggtttcttcagcccctgtgccaagaatgtgtttctgttggtcagttcgttccttagattcaagggttgcaaatggaccgagctctcagcgggaggaaccacaaagaacattgggctatcgttcatcacagatgaatcttggtgggcaagagacagaattcctcactcccacacataagtactcccttttcataagtttgtcacagaagcacacaaggggccttggcatgtcagcctttaagtaacggttctcaaaacctagaagtcatggcatggtgtcttcgagagctgggtaccccagccctaaggatgtctcagaggcacaatgaggtggataatgaggtgggcattcagaggggcttctgcaaacctagagtccaggaggcaatgggtgcagcagtgaggtagctatgccacacagagaccatagtcacttgtcattttcaagcctctgttttcccagctccatggtgaggacaccagctttcccacccaccgagtgtcccagaaaatgaaattggaaggaataagatgcatcgtggtgctggattgattcttgggaccaaaaagagactagggagagaaagcacattagcaggtcaaccaggactcataccttccagtttgggtaatcttatctctggggtgggctggatgaagaatgtatgggaactctagtctctgcaacttttctgtaaatccaaagtcattctaaaataaaagtgtatttaattaacacacacaccatgcaatagccttagcccaacagttttggttgtgtttgatgggacttgcccttggagctccaggaacatgcatttctagaaagttctcagaaacagctgggggcccagaaacatatatttttagaccaagcagctgctgctcagggaaaagagccaggactctagtcagataacacagcttgctttttgtgctgggcccttggatttgtccaggggacttgagctctggaccacgacggcaggagagtggaggggggcatggctctccaagcagacaggtggcctctacaagccctaactttgtgaccagggtcaggagagcagaggatgttcttgcaaagtgcttttaggtgggataactgcaggacatgtatcccacctaa

SEQ ID NO: 27283 - DNA, 1212 bp, Mus musculus
ggtgctggaaattgtattataaatgtttattgaccattgactatgttcttaagctcttcttggagagagtgatggctcaggcctgtaaccccccccactccccagaaggccgaggcagaaggatcccaagtgtaaggcctgcagagcagcttagtgagaccctgtcttgaaaagtaaaaccagggcaggacttacagctcatcagtaggacgcttgcctgccacaaatgaggctgtgggttctgttcccagtaccacacacaaagagcttcactgtttaaatgtgccacctatgttagcttgtttgtcctgtaaagtaatatatgttacaggtggggaaactgaggctctgtccagcagggagtccccgatagagcaggagtgtctcgctctggacctggtcagaacctcttctcagggttcttggcagctgtattcaagttccactacatctgatctgagaccattccacagatgaagaaactgaggctcatggagataaactgtcccagcattcccagagaacccagttctctgaaagacctccagaattagggtaggaggtggtattccttgtctctgaggacctaagagtgaagcgggggagtattctgtcccctagctcccctctcccctagctctggctattcctgccagagtctgagaagcccaagccccaggctctgctgggaccatggcctcggccctcaaaatagccctgtctgtgaatgaacatactgtccctgggcccagagagcctccagggaggctgggatcacatctggatggatctgccccaacctgggctggggctggggcaggggcagaggcagagctcccagatggtcccctgaggtcaccaccagatcagccactcccagccaactgtgacctgaaaatggggaggcttgacaggtcatggggttctccccagctcttactaagcaacgggtgtatctgagccagttactcaacactggagtcctcaaaagagggagtgctaagctgggcataggctcaggcttgtaacccagcactcagatgaaggaaggcagaagccagaggatatggagttcaaagtcaacctaggctacatagctacataatgtcagaagtaaaggaagaagacagtgccagggctgtgagctctcagtgagggtctaacctatgtacaatctaagcatattggtgaaaagggcaaggctgaaggact

SEQ ID NO: 27284 - DNA, 1175 bp, Mus musculus
tctagttactacaaatcagacttgcttagtagacctgaggctaaaagtacaggacacatagccctcccctatgtcttcatctccagtcctaccctggcaagtttgtccttccctgactttgaaatatttggccttagtttgttactggaggaggatgtgtaacttgcagaaagaaggaaagggttggatatttacttagattggtttttattcatagttgcaaagttaggttactctatgggaactttcttcgcaacaaactaacctaccatacctactttattttggcttttatgggaaacatcagagaagcagatccttaaaggggatggaggactagcttctgggttgcatggaagttgggtaactaagtggcaatatttccacagtgtgctttttttggttcttttgctctttgttgctgtatgcttgcttttgtgttttgagactaggactcctgtagtccaggatggtcttgagtccaagtgcctcagccttcagaggtattggacatacaggtgtgatcctccgtactcagcttcttggtactggctttatccctgaaaataacattccgtgtgtgtgtgtgtgtgtgtgtgtgtgtgtctgcattcatgtgtgcctgcatttttgtctgtgggtgaacatgaaagccagaggtggctgtcaggtgtcttcagttgctctcctcctttttaaaagtatgtatctgtgtgggggtatgtgcacataagtgctggtgccccaggaagccagaagagggttggacacgttggagctggaattacaggcatttgtgacctgcccaacgtgggtggtgtgaactgaacttttatcctctacaagagcagtacctactcttagctaccaggctatctcttgagccccactaccttattttatcttactgacagtatctcactaattctggaactctatgaacagcctgtccctgggatcttcttgtttctgcttcccgaaacctatgctgggatttttgtacctgactttttatgtggacgctgaagattgaatttaggtctttatgcttgcatagcaagtactttaccagccctgatcataacatttttatatcatagagtcaacttacactaaagaaagagaaggctttcttagaaatttgatttaaagactcaacataaggtttaggttta

SEQ ID NO: 27285 - DNA, 1155 bp, Mus musculus
agaaatcggtggatctcttgagatttcaaggtcagcttggtctacatagtaagttccaggacagctagagctatgtagagagaccctgtctccaagggaaaaaaaaaagttgccagttggatttattccttccttggtctgtcagaattcactgagtgaccagggccatgtatcttgaacaagaatagtgttgactgcttaagcctaaaagttttttgtttcctaagatggaagatttcaaagtggcatgccttttagttgttacctaatggggacagacacccacacccacacaccacgggtaagcaggactaaaagagaagtgtaggccaaccaactttacttgaatctttttgttttgttttctttaggtgggtttgtttgtttgtttgttatatggtttcactacgtagaccaagctgaactcctggcagtcctgctgccgcctcttgagtactggaattcaggtataaaccatcaaacctggcccagtttcttccttttttcttatcatttactaacttcattcattcattcattcattcctttgtttacttatttgttttttgtttgtgatagtgtctcctgtagcacaagctggccttgaatttgctggtatgaagttcgttatgcctagcttatgccactggggatcaaacccatgcaaaacttcatgcaaacagtctaacagctgagcccgttccctgcttcctagctagctatttgaacaaggagattcatttaggattattaacaaaaagtggaagctgcttggattatagatagaatgttgtgtttttgagacaaaaatctcactgtaactgacttgcctagtcttgaattgagagagatctgcctcctgagttctgggattaaacgtttgtgggtagcaccatgctcaccattctttccacttgtttttttgtttgtattacatatctcttgtagcccaggctagtctcagattcactgtgtagctaagggtgataggcctgaatcttatgcttcattcttgggtttctttctgttctttgttcctcaacctcccaagtgctgggatggtaggcctgaatcttatgtctagtctcaaatgcccctattttatctgctcttttaacacggtggtcttaggagcttttctgagttgtttttatt

SEQ ID NO: 27286 - DNA, 1082 bp, Mus musculus
tgcctgagcagaggtggggaagtccaccctctcctcgatgcagcttgcgcctgtttgggaggggtgagaacacttcagaagcaccgtgtctgaaccgttgcttgtggatttagtagttgagtcataaaaaaaaattataggctgattttctttctttctttctttctttttttttttttttttttttttttttaaaacgtggacttttcataactcaggggattccctgaaaaaattacctgcaggtggaatatttcatggacaaaattttttctccccttccaaattcagtttatcaccactaaagaacaaagataaactggcctcagtcccagctgctgcgtttgggtggaaatttcatccccttcccacgttgctctttccacattgtacactcttgtggcttatatctcatgttcttctccagagattgtaaactgtagctcatcaggggagggggggggaggggggaggacccagtccatcctacaacactgttctgctggctggccacttcatctcttctctccaggactgcagccctggcttactccggctctggtggaggtgggtctgtcttatttacatcaagatgttaaaagtctacccaatgtgcagacagatccaaagcttttttttctgaacgaatcatgtcttactaacctaaccctaaatgattttaattttagttgagtttctatttgtgatactttccctttctgggctcctactttggtctttcccttttcgtctccagacatgctatgcttcatagctgctaggagagggaaggcaaaatctttttcagttttctttgacttggccattttgaagacagttagttagtgggcataatttattgctttttaaaaaagaaatattgtccatataagtttcatgctagcactcttatgagctaatgggtgatgtggccgcactgggttcattttaagctttgtcctttctcccccctgccttgccctttcttcacatgccatccagtgaggagccctgctctcagaattggaagtgtgttttttgagaggcaggagcagagccactatctccagtgaaccagagat

SEQ ID NO: 27287 - DNA, 1869 bp, Mus musculus
tttatacaaccctcatttgacccatggtactgggcagggcagagaggccttaaaaaaagcaccacaagccaaagcgtctctggggattaaggatcctttgccataaaactcattctgtgtctcagcattgcagggattggggataggaaaggcgccagtttttgtgtgtttgtgtgtgtataaagtggactttccactgtaatccagccacctaagtttatcaggtgcttcactgaggaagcctagttttttaagcacaatagcaaaacatcagctctgtattttctcctgttatttcattacagtagctgcctgtggggactaggaaaacaaatcttccaacatattttaaggcctaaaatcttagttccccattctcctacctttttagattcataagcatttctcacctggcatcatagataaaacataattgtttggggagttgaatttaattaacttacctaactttgtaacccatcttggctttagtaactttatcaaggtggtggctttagcgaatgtaatgataaaagtagaggatgctaatgcttttcttaacatttctcaaccatagagagagctaaaaggactgcagagtgagtttcttctttttggccacttgcagtgactatttattgtactcgattcttgtgtgccctagcgtgctatgagggtcaccatgttggatttgtgcagagctgaaagcaccaggtgtgccagagatgcagtttgtgattatgtttgcactggatcgtgatttgaacaagacacttagactgatgaattctttcttttgaggtggaaaggaaagttgtagatcaggactctacaccctgctcacagctcagaagtgtaggtgtgtctgaggctggtgtggaccgctgtggataactgggcctcctcacacatcaaacctgtgcaagagctgagggtaatgcagaggactctggtgtgccaccgaagagccctttaaataaatcgaagcttaaaagaaaaaaaggagtcattgcagaaatgtggagagttttaaaagatctgagtgggtggggggtagggagggtcagggtttacagagtaacaacttctgtgttgtaaattacctcatctgtacaccttgtattgggacactatttctcagcacttcctgtgtctgtattgcttagacggcgggatggatgccaatatgaaacagctgtgttggcagttactctgaaagtattttttaactttgttttgaagtgtgcccttcccccctttaagtttaaagtcagaattcccctccttgatttattggctgtaattgtattgtatttggtatgactaagacataactgtgctgggaagaagttgtgccatgaaggtctttaatttttttttttaaataaaaacatttaaatcaatgaaatgtccatgcagcctgagcaatatgcttctccaaccgacaccgtgtgtaataaaggatggtttagttttcataggatttgaacttaatacggggttggtggaaatgttaagtgggagaaatttaatattggtggaggaactctgaagttttggcactgaagtatagtggaagggatcgtcgtggtcctattcattcatacccctgtcacacacataccaggtacatcacatgttttctgacttagtcacatctgttagaattagggccactctgcttgggagagaagggagaatgtatgtcaagtggctgacatttgtctaattcctctggtcctctgatatggaaggttcgtctctggtcttcagtttatcgacaattcacagtgctttgtggcagaggcccttctctcctcaggacctctgtgtgttttaaggaaggaggaactaaatattgtctgaggc

SEQ ID NO: 27288 - DNA, 1986 bp, Mus musculus
gcaggaagtcctggactgtgactgtgacatggcctctgtccaccacctgttgtcccagatccctcaggacctgccctatgagacgctcatcagcagagcaggagacctctttgttcagtttcccccttctgaacttgcaagggaggcagctgctcagcaggaggctgagaggtgaggtgggcgagctgtggctgctgcagtggggcagttggaaatcagaccatccctggagtctacttgtctagagggtacggggttccacactgcagcgggttcttctctgcaggccatatagatctttaccagagagcatgctgagcaatggcctgctcagtgtcttctgcccctctgtgctaccttctgcttctttccacagaacggcagcctctactttcaaagactttgagctggcatcaactcagcagaggccagacatggtgctgcggcagcggtttcggggacttctgaggcctgaggctcgaacaaaagatgtcctgaccaaaccaaggaccaaccgctttgtgaaactggcagtgatggggctgacggtggccctcggagcagcagcactagcagtggtgaagagcgccctggagtgggcccctaagttccagctgcagctgttcccctaaactcagctcaagcagctactccctcacccagggcaccaagctctccccatttccagaaggagggtaaagttgctgtgattaaagggtttctgtcaggggtgttctgtctgccacccttggcagcttgttttttggctttgatggctggtggcagagctgcctgacactggcttgccggacccgagtgctctctgcacctctcctgttgaaaagtggctctggagcacctggttacccaagtcactgcctaaaaagttgggcccagagatgccctccttatagcaccatgtgtcttgagtatctttagacaaagcaggcaggatggtccagccttgggatgaaagtgaggggagaaaacattagcctgggagccagctggaccctcttaaaagcggccatattagctggtcagaatcagagatagactcaagctgggttctaattaaatttttatgatcccagcctagagctcatgtgcagaggaatgttaatcaccaggatgatgttgcccgtgtctccctgttctttctcctctacaagccacatgacaaaacctacaaagacatttttaatactgtttttatgattgtatactacacctaacatagcaagtagtcttcactttaaaaaaaaaaattacttatgtgtgtgtacaggtgcccacagaggccataggtgggcttcaggtttcctggagcctgtgtgggtgctgggatctgaatgccaggcctctggtgaagcagcagtaagtgctcttaactgctgagccatttctccagcctctttcatagttccttcatgagagaagctgtcagagcattgagtttctactgggctaagttatcccttttttggaggggaatagaacccagggccttgcacatggaagcaaaagtgttctaccactgcgctgccccagctttggtttttttcgtttttgtctttttccatttttagttttgagatagggtctacctaaattatccaggctggccttgaacttttgatcctcctgccatggctcccaattatcctggatgacaggattgcacctgagatactctccctgctcagtttagccaaagttgtttgtgaacactcccagaccccacggtgccacttcctgactcgctttccttattttcctcttcttacccaccttggcctgtctttgtgtcgatctcttccgctgctggtctcaggctgggaatgtccttggaaacttgccagcacgtagacagggtttggcaggaaccgcacaccaccagcctcactgtacctgggctcctccaggagaggtgtacaggatccatgggatcacttggtcttcctaggatggctttgttaaaagtga

SEQ ID NO: 27289 - DNA, 1429 bp, Mus musculus
gtagacaagtgctctgtggatgcgagtcaccggctgtgagtgcctgggtggtggcagtcagtactggtggatgcagaggcactgtacattttccttctgcctgggtgctggtcctcctacagctgaatccctttctctttctggcctggggaagaccatggagtttaagggtgctggagaggttgggatgggggttaaaggccttcatggctacctcactgcacctttagatgggccctgccttgggctgatagagtgactttggggcatagcctgttttcaccaacctgatatcctcttttctctatcctttagggcccaggggacaccagtggtggctgccgctgccgggtcaatgggattccatgccacccaagctgtcaaaactgccactaagtcgacgatggtggctctcatactgacccagccccacatgtatagcagtgaacagcagggctaggcaagggactggcctggtttggccccatacctttaggcttggtaagggagaaagcccgagctgtactgcagtctgattgctgtgttacaaggacccagctgagctgatgtcattcgcactgcctctgttgcttctggctgaccagacctcatggccctgcactagacacccgacccttactagccaccagccttaattaaacacggccttggcctaaggcctggctggctagtgctctgagtgactctattttccctgagcttgctccctgaggacccaccacagcctcatcctttgccttgctggctttctgggcacgtcttaaagctgatgtgaatccatccagggcctaggtagattggtaagtcaggaaacagcccatggggttcagctctgcatcctcctctttaagtgaattaaagtggttttcccagaagggaaaggtgtcatgcttgagggaacaatgtcctaggctgggtaccacacaggcaggatggtgagctctggagagcttggaacagaacctgaaggtgatctgttggttctggtggttgggggaataaggatggctcagctctgggacccctgtagcagacctggcaccaccatgcccaactcttgggacaaggttgcttgggcattattagcccagactggggaaatgtatcgagaagggcttgaagcttagagggatgctagggagggagggaggtcaaggcagcagctggaggctgggaaggaaggcttggctgctccctctgggtgtctaaggagaagagcagaggcgtttctgaaagtgctgaagccaagcagggaggaggtcctttctgcttgaagagcagggccatgctgtgatgtctggcctggtgctttctctccactccggcccattcagctcctctgagattattaccgtcttcccacaatgtgagccttaacagtaagcccagcacggggtcaaaactcact

SEQ ID NO: 27290 - DNA, 1185 bp, Mus musculus
tgcatccctggttgagagaggatcacggccgagtctctcctccacagtctgaccgaagggagatggaccaggtggtcccagatgggccacagctggaggaggctgaggaaggggaggtggggctgtacggctagggccaccttactggcccctcagctccaaggtgtgagttgagtacctgagtctcagctttctcctgactttttgggccaagctaaaccttaagtgcctttctggaggaagaaacagccggcgtgccttattcgttcctgtgcctagtggggtgatgctccctgagtgccacgccctgctctaggtgctgtgaacagcaaaggaaaaagagggagaaatataccttgctggccaagttgccacagtgccgcatgctctccggccagcccctgccttgggcacgtttcctaccggggctgtcttctctggtgctggttcatgggacagtcccttttatcagtgccccagctgccttctgtcttgtgcctttaaacaaaggaaacatctctgtgccaaagaccaaagtcctcactcaccatgtgcctcaggaccacaaatcaggccgggctgggattgtggcctccaggcaggagaacctgtttgaagaagacttggctgtgggattcaagccaaaaggatgagactccaataaagaggcatctgactcaaggaatagtctggaataaggatccgggtctgtttaccctggtagcctccggctgaagcaccaaagttggagggggaggaccaggcagggtctgtcctactgcctacagacaatctcaggccctgttctggggacttttagtacccaggcccacagtcagtttgatgactttggtctggttaagtgtgtattttcatcatgtgcccaataaaagagagctgtgtggtttgatatgtgaaacatccttggtgactttctcttcttcaacgctggccccaccatgaaagccaggtacagctcagcccctaccaagtggcttgtgaagaaattcctctactgatcttcctgtacatgccttttcttctagagaccttgggtctcaagtggggagctttctaagctgagcactggggtatggctcacgtgtaagcacacacctaacatattcagggttatgggttctgtccttggcccaaaagggcatcagtttaaactggaagaaacat

SEQ ID NO: 27291 - DNA, 1352 bp, Mus musculus
tggttggatcaatggcctggagttcaggatgtctttggtgaaggtccagagatgaaagtcacagctgtgagacctggtgagacttgggctatgggaccagttgctgtgactggaaggagctgggaaggagaagaccaggagagtgggcagcgtggccaccaaaggagagaaagaaaagcgggttgggctctcgccaggcatcctcgttggagtgacatcgtctttaaaccccgcgtggcaatccctgacgcaccgccgtgatgcccagggaagacagggtgacctggaagtccaactacttcctcaagatcatccaacttttggatgattacccaaaatgcttcattgtgggagcagacaacgtgggctccaagcagatgcagcagatccgcatgtccctccgagggaaggccgtggtgctgatgggcaagaacaccatgatgcacaaggccatcaggggccacctggagaacaacccagctctggagaaactgctgcctcacatccgggaacgtgggcttcgtgttcaccaaggaggacctcactgagattcgggacatgctgttggccaataaggtgccagctgctgctcgggccggtgccatcgccccgtgtgaggtcactgtgccagctcagaacactggtctggggcccgagaagacctccttcttccaggctttgggcatcaccatgaaaatctccagaggcaccattgaaattctgagtgatgtgcagctgataatgactggagacaaggtgggagccagcgaggccacactgcagaacatgcgaaacatctccccctcctcctttgggctgatcatccagcaggtgtttgacaacggcagcatttataaccctgaagtgctcgacatcacagagcagtccctgcactctcgcttcctggagggtgtccgaaacgtggccagtgtgtgtctgcagatcgggtacccgactgttgcctcggtgccacactccatcatcaatgggtacaagcgtgtcctggcattgtctatggagactgagtacaccttcccacttgctgaaaaggtcaaggccttcctggctgatccatctgcatttgcggctgctgcccctgcagctgctgccaccactgctgcccctgtggctgctgcagcccctgccaaagctgaagcaaaggaagagtcggaggaatcagatgaggatatgggattgggtctcttcgactaatcccgccaaagcaaccaagtcagcctgcttaatttgagaaagatggaaataaaggcttacttctcttaaaaaaaaaaaaagaaagaaaagcgggttggaattaacagtgccaaaaggaacggtgttagtctctttggtga

SEQ ID NO: 27292 - DNA, 2946 bp, Mus musculus
ccccccggaggcggcggtggtggcagtcggctgaaacccgggccacagctgccgggccgcgggggccgccgagcgtcgggaggacctctggggggcggcgcggcggcgccggaggacgacgacgaagacgaagaggaggagctgctggaagtacgcctgctggagacccccgggcgcgagctgtggaggatggtcccggcggggcgcgccgcccgcggacccgcggagcgcgcgcaggggccatccggcgagggggcggccgccagcgccgcctctccgaccctgtccgaggacgaggagccggaggaagaggaggaggaggcggctacagcagaggagggcgaagaggagacggtggtatctggggaggagccactgggctttctgtccaggatgcccccgggccccgccggcctggactgcagtgccctggaccgtgacccggacctgctgcccccttcgggcacgtcacatttcgaattcccggactattgcacccccgaggttaccgagatgatcgcaggggactggcgctcgtctagtatcgccgacctggttttcacctactgagcccaccgtcagcggggcgcgcacgcccccaaaccagctgtttacatacaggaatcaggtattggggcccctcggaggccgaggctggcaccccatctcccgcgcagcctcccccctcctagttgtgcccatccccccacaaatccagacatacccctcccccgcagacacaccccaaggcagcccaacccccactttctccctgacatctaagcccctccccattcagtcctgtcccgcgtagccaccagcagccagcccccctcggatacacctcgttcctcctacataccttaacccctccccctcactttgcacacgcccctcctcgtgtccggacggcacgccccttcgctccagaatccctccgccctctcctgggcctgccttggtagttaagggggcgctgcagtctagcggttcagcgctcctcccagtcccctcctcttctgggggggaagggagccatccctccccccctggatctcaaggccccacccctcagcttgaaccatccctccccccccttcttgcgcatgcttgatgcttcttggagggggcaggtcccagttaagctgcaggcctctgttgccaactccgaaagggagggggcgattatagagtgatctaagaaatcctttgatcccgaagcctgtagcttactctcaacccaaaggggcgtcactgccttaatgggaggcgcactcaaagggagagatagaaactagctagccctaaactctgcaagtgtcaaccccttttctatgaaggggtcacccacgcccaccaccaccctccaccgcgtgactgcctttacagcccatcttggtcgccggaaacttgatttccccaagtgggaatttagaattcggtctttggaaatccaccaagatgggattgtccaagagaactcagaaccaagacacctaccagtctggggacagagttcctgctgccccctcaatccccctcctcgggaagcgccctatcagctcagggcatcctctctgcctgggctcctccctaagtccatcaccccttcctatcactcaaatccagtctcagcaaccacaactgcagtattcagtgggagaaactgaagcacgttgttgctagggtttaggacaggcataccagcagccgggtggcaagaatgaggaccatgtctaaacaaacttggcttgaggagagaccaggccaggggacggtggcagagctagtagtggacttgggtgctttgcacctcggtctgcccttgtgagaaatggggtggcactgctgtagttaggaagctgtgttgagattaggttgccaagtctgctccactggtctcccgctccagccccgcccctccagcctccccatcctccctctgccctcactacctgtatctcaccggcgtgtgtccaccctctgggtggttcacacacactcattcacacacacacaaatctcaggaacaaacggtcccagagtcctcctcgacccctgccctgggtctctgcaggtctctgccccacgcgttcccttcgctgacaacgccaccagctgcctcctttaaagcttggtgctccggctctgggcctttcttgcgctctttctctatttctctttctgttttcttcctttttttttttctttttttcttttttaagaaaacaaaacaaaaaaaaagacaatgaaaaaaaaaaaaacggaaaacgtcatgtgagtgaagagatgtcactgtctgtggtctttggagaactagtctcgtagctgaggggaggggattccctcctctggggcgctggcacccacagcaggactcgccagtctgatgccaggactgaataaagtgtatttgccccgaccttgccctgtggttctgcatgtgtacttctcaccctggccagcttcaaagtgcctagagtatgggctggtgcagggagaacgggttctctttacccctggccagcttcaaagtgcctagagtatgggctggtgcagggagagcgggttctctttaggcctctgttatcctctatctcaggaatccctgccttcattaagaatggcaaactcatcttcacagtggctaagcatcgtaactgggaggactggggtgggtgctgatgtcacagtgcaagggtgcaagcctctgtagacagccatatattccaagagatgcaggaaaccagtcattgtgcttgttaagtctcattaggtcagacgagacaagcatgcatgcaggcaggactgatcatccggggtcaattccactgtttaataaaggattgggaagcaaaattggtagctttgctcagagcctatgttctgagcagctctacagtgtgtgtcttctaaggatcaacatggtattttcagtgggaaacc

SEQ ID NO: 27293 - DNA, 1543 bp, Mus musculus
cccagtgtcccaaagcagttcacaattccgtgacagctcagctcaccagcgtggcggggcactgaaggcgcgactgcctgccagggtgaatacactgccagcttacccctcccttaagtgccaaaactttttttttaacctttttttttttaatcgttttgaatggagatatttctaaaacctaccagagacgttctctctatgccttttttaaaccgcgtgtgctcctttttggcatgtttgaaatggtgaatttttgcccgtaagaactattcagaaccattgcatacagatatattttttttctcccggtttgtatttgtttttggtactttcgtctactcccctccccactctactttttattttactacctccctcctcatacatttaatccttaaaaggttttagccctttgggccgccttggtcattatgcctccagcccagggtactgggcccaacgcgggatagacactcttatcaagtctttcattgaatcaaaacggtatcgactggcttctgtcaaaagtgtctaccttttgcaactctctgctgggccctttttatttgctgcttctctgtggtatcagactttgtgaaaacagtgttgctagaagtgtgtattctgaataagctctgaatggtggccaagggcctctcgtggcaaaaaaaaaaaaaaaaaaaaatgtccctccattgtgacagctccatgtggtggctaagaagccgagtttctacaagatcacagagcctaggcttccctgctggaaaagacccaagaggtggtttttgttgagtttgggaggcgggttgcttttggttttgtgttttgagacagggtctcagtgtgtctcccgtaggccggcttggaccggctgcattcagagaacaggctagctgcaaacgtgcagtaactctccctcccgactcttgcctttgcctccccggacggtgttttaaactaaccttttggttttccagcagataaagtgaacccagagaagttaaattacagggacaaagtacacagcgcggtgcctcagatagcccacagtagagtcccctgaccccaagcccggtgctcatcccactacctctcacacttcacaacaatctcctcgacactgctgggcccaaagtccgctctccaccgtgcggaccccagcagtgtggagaaatcatcccgaaagagcccagaaagctcgccctgctgcttgggagctagggaaggaaggggccaggagcactccaggctgcttgcatcagccctcggagtaccacatcttgaatgttccagggccatccctttccactatcactgtcaccagtgagaaacggttcccctcagtaaagaaacttagcagacgtttacatttgcacctctgcctcagccactaggaaccctagagaagctcacccacaacgtttaacctctgaccctcaggagaaaggtggttctaacccagaatcacgagtgagtggtaaaccagaaagcgttcttggggaaacaggccaggccaggccagggcctgggtcaatga

SEQ ID NO: 27294 - DNA, 1199 bp, Mus musculus
atttatttatgtattttatgtatatgagtacacattgctctcttcagacacaccagatggatcccattacagatcgttgtgagtcaccatgtggttcctgggaattgaactcaggacctcaggaagagcaatcagtgctctgagtagtcagtgcactgagccatctctccaaccccatttagaatttctttctttcttttcttatttctttttggtttttcaagacagggtttctctgtatagccctggctgtcctggaactcactctgtagaccaggctggcctcgaactcagaaatcctcctgcctctgcctcccaagtgctgggattaaaggcatgtgccaccaccgccaggcccatttagaatttctacctcattactcccacctgtgggtcctacttgataagctggcagttctggagggtgggaccagtttacccatcctctctcctcccacactgagggcccaaaggcagcgagtgataaaggggactgtgggaccagagagccgctgtgctctagtcctgacacctcctcggatcgctcctcgaatgctttcctacaaacacgcctcctcagtaaaagcagcagcacctgtaggtctcagaggactgtctgctcccgcctttcttgttctgtctcttctgttcctactggctgcctctatgtcccaaacatataatagacctcaccaccagggggcctttaccctgcctctctctacctagcctctttgactgagcttacatctggtcatccgtcataatggacaacacttcctcagggaagccctctggactaagcccctgattggccatccaaataccacttggcttctttattggtacccctctgtacgctggtttactagactggccatctggttaacgttccttttcctaggccagactttcagattcacaataccagagttaactatcctagtcggctatctcattggctgtgccccagagcctgggacatggttggtatgcagatttattggttgaatgaatatcgttgctgttactgtttccctaaatccttcctctgacatttcagggtgtgagtggaggtacacccctcagatctgtcttcagaaggcttgttcaagtgccaggagtggcggagcacgtttgtgatcccagcctttgggaggtggaaacagaaggatcggaagttcaaggccctcctcagc

SEQ ID NO: 27295 - DNA, 1623 bp, Mus musculus
caaccgctggttcctgacgggcatgactgtggctggtgtggttctgctgggctcactcttcagtcggaagtgaccagacactgaccgtccactcacctctcacctcccaccctgcccccaccacaactctctcttcagccaccattgctaccaggagaaccactacatgcaactcacgccccttgccctatcacagggttgggcctagacggagtcccctgcaattagctttctaggatctaccacacttctgtgaaagccaccttccccccacatctcagttctcttggcctcaaaactcacaaggttttcccctaaaccagctccttggaggctggcaggagcagagaggggtgtgtgagggaggagagcctgtcttgttggtgggaccctaattacccctgagcctctcgggaatgcttttccagcagggagctcttcccctgaaggagactagcttgccttggttttgatgtgtgtggcctcagacgtgatcatttcccatcccgctgtgtctctgggtctccctcctccccatctccaccccccaagagccattgagtgaggtgcttttagcccttttgactaattagaaattcaggctgcttgggataatgagacaaggaccagaacctcctccccacctgtggcctggccaaaacccccacttgtggtctgaatgttctcctgaggcctctggctagagtctagccccacccagggggaggggcttagctgctgaaagtccaccttgctagagctagggtggctcttgcagcttagcaccccccaagatccttgtccacccctcccctggctcccatgaccatgactgagggaccaatgggcccaagataggtgccccagagctgttaatgacttcagctgcctcacttcctgcaagattggcctgtggcatctttgccttgggtgttggccacagggtcaagggactctggcctcagcccagaagtgaggggaagctatacagagcagctgtgggaaccccaggggcttccctacctcaggcaggaagggcaggaagaagagcctggagcccaggcgagggggacggcaagggcctgtctttgtgctctgccccacctagcctgggcagcagggctgccaaggtcagaatggcctggctaggagcccttcaggcctctctctcctctgtccacccttggcctgtctcatccctgtgggtcccagctcagctctggccaccccgggctctctgctgtacatattcgagactagtttttattccttgtgaagatgatatactatttttgttaagcgtgtctgtatttatgtgtgaggagctgctggcttgctgtgcgcgtgcccgtggagagctggtgcccagagactgacagcctgatgctccctccctgcccttgcctggggaagcccaccaggggttctggcttctgaggggcacctgtccctcctctcccctcaccctacacttgttccagctctttgaaatagtttgtgtgaaggtgaaagtgcagttcagtaataaatggtgtctgtgactctgtgaaccacagccttggctctgcgccgcatgagtaagggggaaactgctgggctctggctctgctgcctgggatgggg

SEQ ID NO: 27296 - DNA, 1197 bp, Mus musculus
gatgtgatgttcttctgagagcatttccacagtatgcattaagatcccccaactcagcatttttacctcattagaattattttagagaaaaataaccaatatgtacagaatattagctacaagaatttcttctcaaaagttttttggttttttgtttttgttttttgttttcatttgagacagggttcttctatgtagctcaggctgtcctggaactcactctgtatgtagttcaggctgactttgaattcacagagcctcccaagtgctgagattaaaggcatgtaccaccactgcccagttagaagtatttttaaagtggaaatattgagaaaaattccaaaaaaagggggtataaataatttctacatatcattaggtaatggtatatgctcaaatttattgccatggagtatttgtagaatatatgaaacagattcaagatgtgctgggactgtagctatatctgactttaatgtgcgtttactcactatgtagctctgtctgccttagaacttgttgtatatatagatcaggctgactttgaacttgtataaagtcatccttcctttgcttcctgggtggtgggattctaggcataagctaccagaccttgttttgtgtgtgtgtgtgtgtgtgtgtgtgtgtgtgtgtgtgtgtgtgtgtgttttgagggtcttaatgtaactcagactagtcttaaactcccatccctttgactctacctcctgagtggtgctggtctatgctattacacctggctctggtttagtttttatataagggtttttggtttaaatgaacatagattttataaaatgaatttttacaggcatttagagaaagttttttttttgtgtgtgtgtgtttcatttttgaggcatgtttcgctatatagctctggcttggtctggaactcagtacgtagactatgctggattcaaactccaaacctgcttttgtcttctattgtgtgattaaagacatgtttcaccacacccagcttaaagaaagtttaaaaaatattcttagctgggtagtggtggtgcatgtctttagtcccagcagttggaaggcagaggcagttggagctctataaatttgaggccaactgggtctacagagtgagttccaggacagacctacacagagaaaccctgtcttgaaaaaaccaaaaccaaaaccaaaaaacaaacc

SEQ ID NO: 27297 - DNA, 2446 bp, Mus musculus
tgtgtgtgtgtttacgtgtttacacattcatgcactgaacaacagtagccacctgcttgggcttcatacttctccttcccctgaatttgtagttgggatctataaatcctgtccccacccttctcccctaacagacagaacaactgtgcacatagatgtgtgcagtccacctcaggaaccctgtttcttattctacaggtgcacaaggcaaatccaatacggaagtacgcagcagtggaggtgaaatctagcgagctgcctctgactgtgccggtgtctcctaagttctccactcggttccagtagaagctgcatctatatcacaagcatggagcacgcgtcttcagactcacccgccatgtgtggaaacacacctgataactaatggatgccgggtgttttgaagatgactctacacagcaactttgaagctaatgagcctccactcatttagactttaaccagacttcttgtagttatttccttcagacattagccggccctttcctgttggtcttaacgctggctaggatttcaagaattcgttttggcatagtctacttttcacctaatccccccttattaccccttatatatgtattttaagcataaaataaaggcagtcaattcctgggttgtggtttcagtcacagtgtaagtgagaagcagccagtctattggattccttctctgttcaaaatgcgtttataaaggaaccctgtgctgcgaggtaggaagggaacctctgtaatggctccaaggaagactgcgcagactccggaagaccttacagagctgctgttgtagcatgttctttattgttggtgctgacaatgggatgccacagcctatagtttccaacctcacttggataactttttttttaaggtcacaagaatttatttaagctcactgttttctggaatccagtccatcctggagggggtggtgagatgatactgttcagactgtgtgacagattggcaccttcaaagacctctctccctgttggcttacatactccagttgagccttgcaggcaaaagtcctacaacttcccaaggcagtgccaggctatggaccaagaaacactagcctatggtgggcattttatacctacgtgatagcattccacctgtgggtgctataggctcacggttattgcccagtgcaaaggcatgtatttcaacttaagaagaatctgtaatgtaattttctttctgagatttcttgattttatatatttggtttttagaggcgaggtttctatgtagctcttgttgtcctagaacgtgatttgtagaccagagttgaccttgaatgaattttttttttttacctgcatgtatgcatgtggaattcttacctaccctgtgccagtggatgtctgtggagtgtgtcagatgccctgggattggagttacagatggttgtattgggaaaccctgctcataatgtcagcttttgacattaccagaaagcctagactgaggtcggtgcaaaatggtggattcctttcgtcagcaaggtttccttttctctacctgagggatcccggaccacacacctgtggaatatcacatagccttggttagatttcaggtccgacttcttttctacttacacgaacccgttggagtagcaccggagactgctggatgtcggagtgcctctgtgtgtgtgatggtttgtatattcttggaccagggagaggcaccatttggaggtgtggccttgtttgaataggtgtggcctggttggagtaggtgtgtcactgtaggttgacttcctagttgcctggaagtcagtcttccactagtagcctttggatgaagatgtagaactctcagctctgcctggatactgccctgttcccaccttgataatggactgaacctctgagcctgtaagccagccccaattaaatgttgtttataagacttgccttggtcatggtgtctgttcacagcagtaaaaccctaactaagacagtgtgctaacaaggcatctcagtaccctagccttcagccagtgacctttgcccaccctgggtattcctacccacttcccccaaacagtataacacttgattcaccccaaagaaaattgatctgtcttcccgatactgatcccagaatgtccctttcgggccaacgactccagggaggaccaaagctgtgagaccccgtgtgggttctcagaactaatcctgggtcctctgcaagagacattcattttgtgactaggaagtcctcagcattgtatgtgacattaagcctatttttatattcgttttttgttcttgttcatgcagtgaccacttttaaaatttattttatataagcctttgtaaattcagctggaagtaacaaagccagatattgtttcttacaggatgtgtgtatgatcttggtcctggagacccacaaagcagtacaaagagcac

SEQ ID NO: 27298 - DNA, 1164 bp, Mus musculus
ttttgttcttaaaactgggtctcaccgtgcagcgcaaactggccttgagtgcatgggtcctcttgtttctgccttttcatatgctaggagtcaattctcagcctgacttactaggcaagtgctctaccctgagctctgtcaccagccggcctttgggatcagagacagatcacccaccactccacactggtgattttttggcttactgaaaaagtcatggcccgtgacttggcacatgtagcaatgctaaagtatgaacactgaatgtaggcaccatcctgccttcctgtgtgtgtcacaagcacagctcagctctccatggctcttcaggatcacactctgttcctctcgccagcatggtgcctggcccatggctggtgttcactatgtgctggtttctctagcgtgtttatcatgtgcttgatgaagtgatgggtgagtggaaggggaaggcattggaatgcttgggtttctaaagtaatagatgcctgaatgatgagcaggtggaaggagccactgttggccatgctgcctgattgagtggagaggggtccatggatgtgtggggtgaatgtagagagccagctgctgtttggatggagggaattagactcagatccttctctctctccctcccccatgtacataactttttattcctgaaggcccttgggaaagccagggccctgggtgagtcttgagatagctataagccacagtcaccttctgtgctcccagcttccactcaaccctgatagcaggtggactttgagacccttgcagagtagccctgcctgggggaattgtactggtcactgtgcgagcagactgggtctctgtctctcacagacctcaaaacaggcgagaagagttcatgtaccctacccgagggtgccaactccttaccccaagaaattgaccccactaaggagaatcagctgtacttcacctactctgtgcactgggaggtgagacagaacacctgctctggcctggggaggagggcttgctctgggctgggctcctctgtccaataggagacctgacgctgcttcctcatgcctgccaggaaagtgacatcaaatgggcctctcgatgggacacttacctaaccatgagtgatgtgcagatccactggttttccatcattaactctgtcgtggt

SEQ ID NO: 27299 - DNA, 1223 bp, Mus musculus
ggttataaacaccatgaccaaaagcagtgtggggagaaaagggttttttggcttacacttccacatcatagtgccatcattgaaggaagtcagaagagaaactctaacagagcaggaaccaggaagtaggagttgatcaagaggccatggaagaatgctgtgcagctgggtctcatggaggcattttctcaattgaagatccctcctctcagatgactctaacttgtgtcaagttgatgtaaaactaggtagcacgcacggggtctgcagtttgccacagccaccgctgcctggcattgaccatccatctccctttctctgccttcgccccagctggacatcgtggagttcatcccttccctcctctactttggctacaccaccctcatggtcctgtccttctggctgctcacagggaccatcggcttctacgcagcctacatgtttgtccgcaagatatatgctgctgtgaagatagactgagtgggtggaccaacgctgggcccactggatcctcgacaggaagccaccctgcgtggggactgcaggcacacaaaataaaataactcgtgctcatttggaatgtaactcctggcacagtgttcctagacccccaggctgcatgggggacaggagggcctgtagataacccttccatttccttcatctcatccagtctgtagggatacatttttctgtggttggttttcttcagctaagagtcgctgtcagcaggagctttctgacctgttaattcaggttctttttggtttaggttgggttttttgttgttgtttttcggttttggggttttctttcttcttcttcttctttttttttttttttcaaaaaaaaaaaaatgcaaatccgggatggataaatgtagggttttggtcactgtccccatcggctcctcagagttgttggccaccctaccactaactggaagaggaaacgctggggctgcagtgagggctccaagcttctcagtgccaaccacgccctgccagcccctcctcccattctcttccccagcctgccctctgccgccccgaacagtcaggtctttggtcatcgttttaactgggaacacttggtcactacaaggacatgtcctggttccctgggacagcaggatcccctcctcaaagcagccagagtttactgaacaccaaggaagaagtgagacctcagtgactgttctcgtgccaagaagccctggg

SEQ ID NO: 27300 - DNA, 1106 bp, Mus musculus
gctctctctcctcacagcccttggccccagcatttattcttgggtcctttagccaaacccattccctcttcctcccatgcaagttcttttgggaacacccagaaaacttctctgagaagaaaaatggaaggtaagttgagttgctcctttcccagttcctaggaataggcaagaagccagtctccccaggttggaagaggatcatgggcctggcctagctcctccgccctggcctagcccagcaaaccctgggcgagtcacagagtttgctcttaagtagcaagagaccaaactcaccttgggtgtaggggtcagtagcagccactcgcccttgctccagtcctttgggagcctgtcaggagacaaagctcaggatgctgcttgtgctaggaacacaccctgccctcactgccccacctcctggggccccaccgccatcgtcagtcaaatcagtgcacctctcaatctgcctcgcagtgacttcgcagcactgagtggcatccaccaggaatcaggctggagaaatgggagcccagagagtggagagtgattgggagttacttgttcattcaaatcttgcacccccccccccaaggttctcattgttggagagggtgggggaaaggttcaaacattgtcaatttttctgactttttaaatcatcatcattatttttaattaaaaaaaaatgcctgtatgcctttttctggtccaattgtaaataaaatgccattgtcctgttgtctcaactcgaatgcaagggtgcggattgaagtgtgatggtttcaccaggtgggttgagtggctgcttttgcagctcagtgtcccacctgggctctctaggtctcaggcctctgctattctgtgcctactgcaagctcctgctcagccctccgtgtgggtcacaggcattgccctctgaagagcaggaagtagcaaacaagtaggacacacatgaaaatgaagcctggcctggggttctgaatttgcttcacgctgtatcaagtagcattctttcaaagcaatagaaatttaggctcaagcatcctagaaagtgggaggcagtgtgggttggatctctgttgagtttatggccacttagagct

SEQ ID NO: 27301 - DNA, 1974 bp, Mus musculus
tgtctaccacaacactcacttgatctctgtagttttgatgcaaagccatgcatgactacctgaaaactcccctttgtttttaaaaatcagtggagtccattagcacaaaagcctaaagtgaccttataaatgaaatgcagacaaagccaagaagcaagtgggcctattggctgctcttctgggggtcccctaaagggccctcagactttccactgccaggcccagccactgccatccctgggctcctctgttgtgaacacagcaggcaggagttagcagtgctctgaggacaggtatgtgctcccaccatgggtggcagtgtccgggcctcagcagtatcactgcacaagtgaggctggcagggtgcactgaaagctgctgtctctaagaccctcccagcctctgctctgtggtctcagccctcactgcagctgtcccctaaggactactcaccaagcctctgacatgtccgtgcacagaggccatgtgaagccccaggttgggagcagtctttgtccctccagccagtgtggtgaggtcctcctgatgctgctgctctcattcataagaagtgaactctaggtgacgggccaagtggtcctagattctgccttgcacagggacatttagaggctggagccccagtgggtgaccatgcagaccaccctgacgggcacagcatttctgaagagcaggtgctgggctctcgtctgtggcaagcactgtactctttgaccccgtttctcccctgtaagtgctgagtctggtgggttctaagcttcacgtcagctcatgagtgttgtaaacctgggctagaacaagactcccatgtggccattgccgagtgtaactgttgcttactgccaggcgctgtgctggggcctgaagggcatcctcttacttagtttgcccctggttttatccttttctttctgaccaaaaaaaaaagtgactgtttagagacattttctcccaggcagggctgcatagctgtgggtggtaagccagacccactggactctgtgtgttgcttcccaggacacattgtgcactaaaggacactaggaaaatgatgagccacccgactgcctctgcatactgctgttggcttctgctgccagccctattaggaagcgacataaaaaacaggaagctctgggtagttacagtacctgttttccttcaggaagtgttcactgatggcctactgtgtgctaggaaggagggtggcagcagagaaagcttaagacccaggattgctgtggaagggaagagctgtgaagaatgccaaggggaggggctcagggaaactgttttaaaggaatcaccttagggagtggaggaggacttgctcagctgaggaggctgcacactccctgcagcaagcatggcacgtgccaaggcactaaggcaggaagggacagcaagggaacatctggagatgaggtgccaagatgacgtcccagaggggagctggtgctgcctgtgggtgagaggctaggccattgtgctggaggtgggagaagaaatcacattctgagtatatcaagttatttttgtatttcagtctctttttttaaaggcaccagcctacatggttgtgcagtatattccatttaatgtcttgggttttgtttttgttttttttttactacataaccacacatcctatttttcctgtgtgaacatagctgaatagatgcttttaattatgtaagcttccactgaggagtgtttcatagtttgtgactcaccttctatgagatcaatccccagctgttactattggattttatccccaaggtttctttgtgtaccccttgctgtcttagaactactcactctttagaccaggctggcctctagttctcagagatcaccaacctctataagaaaattcaactgtgctcaaaaattgtgactttaaaaaactgagctcacggtattaacaatttacttcagcagctagttcat

SEQ ID NO: 27302 - DNA, 1808 bp, Mus musculus
tgggtggagaggagccgtaggtgctggcaagaagaggctctgagtaggctcagaggggagtccacacctcctgtttacatagactagtttggtttataagttttagttcttcatgttacggcacctcaagctttgctttatgttggtcattaggtgacagttactcattttccccaagagaaataaatgcatgagtgtgtggggctgcctgtgcacagtagtgcctgtgctctgggtgtgtctctaagagagactgaaaacttgcccggttttagaaatactccagcgtccagtgtttgcctttgtctgtgtgaaaggcccacagaatgactaatccaggctagaagcacgcaccccccatgaagtgtcttgagtccatgatccaaacctgaggggacagtctgagtcctcaagtctgccacactggtgtaccttgctggcatggtgcctcaggaagatggcaactcaggtggctttgagatacgttttaactcagctacttggtctccaggtacatttctggacagagcccatggaaggaggagtaacgtgcaatgtcttgacattctttatcacatcacggagatccatggatcttcttggtagcttcctttctgagcccagagccctattcagttcctaggatggaatggaacctgtctcatcttttcttggtctcaaaccctgcttcttccttgtgtcctaagagtttgcttgtttgactaggaaccaaatgaggagacatgtgctctaaggtggctgtttgctggtgacacttgtctcttacatttcctcacagctagtctaaattctggaggctgaaaacatttgtgtaccaaaacaggggattgcaaacttcaggtacgatcataccttaatgctggtgtcgtgaagtggttaatgttcgagtggcgggggttaagtgacgcatagaacttttccaagaagacaaaaggaaaaaaaaatctggaagacatgattattaaagcaagcctgccctgtcctctgctgggttcctacagtggtctgtggacaccaagtggaaggccacccatgtggtgatgaagctgtcccttcccgggcagcgtctggtgcttctcttttctcaatacggatccgatactgaagagagcagatggtaaaaatgtcttgctgtccccagaatgctgctgctctgagttctgaattgagccaagagtctagaggatatgacaagctcactgagggaccaaagctttatgctgttagttatctagctgagattctggaaggcctccatgcctgcagtagctactgtagtctagaagcaaatctttaaaaggatctaagaagaccatctgggaggagtttgaggctgcgcatacaatcctcttgggactctcttcctctgttcagtagaatgtatctgaaattgtaacagctgacacaatttccagatccttacactcagaatcagagtccccaaaccataggcatgaagcactttgtaagactgacctacattgacttgctccctgtctgatgcctgcatgctgcctgaattgttccacctacatctccatgaccatggtgccagagtgcagtacagctcaggcacaggccacttgtctgctcttccctgaagtcctccttcactgaatgtagactctgccaagtttctgagaagcgtcgaacccctgctaacgtaggctatcagttctgcctcactttggcctctcgaatttgaggggtactgcgagcatcttggaccatccagacaccatctgtgaatgaaatgggctactgatgtactccaaaagccataatga

SEQ ID NO: 27303 - DNA, 1176 bp, Mus musculus
tgttttaattttcagtttgtgtgtatggcatatatacttggttacactcggaggccaaaagagggcataagtatcccccgtagctaacagtgttaataggttgtgagccacccacactgggagtcaaaatctggtcctctgtgaaagcagtcagtcgactcttgtttttgtttcttcaaggtaggagacaagtttcttcactctgtaggtcaggctggcctcaaattcagagatctctgcctcctgggtgctagaattagaggtatgtgccaccacacctggtctctacattttttagagcttggttcgtattgtcaggaaacactaaagatgtgcttggtgtgtattgtgaattgttatgctccacaacctagactctgagtgggacttctatgaattgcagttgtttatcttcactgctttcacaataggtttgtgaaaacattgcttctgtttttgctttacttcctggtttggaaatgaattagaggagctggatatttggtaagtagacgccaacttttgtgatctatttctgttttttcactctttgcagtgggacatcccctcttgcgtgcctcaatgccatgctacattccaactcaagaggaggagaagggctgttttataaattacctggccgcattagtcttttcacactcaaggtaaaatgatttctcagtgcagtggtcctcaagactttgtgcataagagaaacctggtgggtttggaatggtgctaatggattgattgtctttcctaataccagtcaggtatcactaatgtcttggtcctcaatggtactctgagatgctgtagtctttttttttggggggggtggtggtggtttggagacagggtttctctgtgtagccctgggtgtcttggaactcactctgtagaccaggctggccttgaactcagaaatccacctgcctctgcctcccgagtgctgggattagagatgctgtctcttaacagactattaggagttactaagttctatcaactgttgtttctgttcagctttgcttgtctgtaccttagtagatacatgcaattgaaagataagcatgtgtagtgatgattacagatttgccttagtaaggattttgtttgtaataatattgtcagggataattactgtgcaactctaatgaacctactctatgggaa

SEQ ID NO: 27304 - DNA, 1195 bp, Mus musculus
gtacatgcttccacactttactctgtgttagctgtgcaacaagccatcccacaacttaatgtgtagaacaacctgttattttacttacagttctttggttgcttggtctggtcacctatcagcacagatgatctggaagctagatgagttagaaagatctctcaaatgatctctgataacctttgtccttgagtatcctctttcctatggaggagggtggttgtaatttgtgttcagcaataggataagcaaaggtttagagtctttgcacatatggttgactgtaacccaaagatgtttgtctgggtaggcctgaatcagttatatgtgggtctgatgttcagagatggaagatttgaacaagtctgctggctttgaagatgtgtgttggcatgcgagaagcctagtggcaaggactgaaacactgagagcagaaagtcaagtctgcaccgacagtcctgggagtgactttagtcctataatacaaaattctctacagtaaccatgtacatacatttcgagagttcctgagctccagggaggaggtaacccctactgacgcctgacttgaactctgtgcacccctcagcaggagctccagccatgcttgagtccataattctcgtcccctagaaaactgagataataaaaatgtgtgtttaggtctgtggtaatatgtcatgtgaggtagcatgtaatagccctcttcccttgtatgcttgctggctggagctactgggaaactgccacatgaatcactaaaaggttcctactatccgcaagagagcaagcccccatatgtacatcttaagcctctgtgtcaaacagcatagtttacagccaaggatggttttgattccccatatctgacagttctcactatggaggtggggagtggagagatctttgccgtggaatagggataggccagctatactagagcgtccttagtgtgttgtgcttctgcaacaaggaattagttatctggtccaaaaccaaaaattgtcaagggtgagcagcctacctacatcaatctgttggtcatatcagctccatagagcaggaagacatttctctttctgagaggaattgcagtcatattatggaagagaacattgtcagaaccgttcttataacttaccatgtgacttttgccattcactgtgctgaatgtgagatttatctattgctgttg

SEQ ID NO: 27305 - DNA, 1131 bp, Mus musculus
agtgagttccagggcagccagggctacacagagaaaccctgtctcgaaaaaacaaaaataaataaataaataaataaatattaaaagtgtacatatctcaggatagctattaatggtgcctaagacatttatagaccacagtcttctcacagtgtcataggttgggcacataattgcagtacatttaaactaagaagttcacactggtacagcactgctacttccagaagagccttatcgagtcagtccatctgtgtgttcttgttaagagcacagcattggatgcagtgctgtgttcaattgttttgtctccttatctaagagctcttgcctatgagtcatattcatatccataatctactagttatatatccttttatttgaagccttgtaacaatcaaaacttttaggttatcattttattatggggcacttcagagtgtcctggtgtgtttgtgggaggcagaagacaacttgaaggagttgagtctatattgtatggaacctgggaattaaactcaggttgccatgtttggttggaaagtgcctctacttactgagttatctctctctctctctcaaaactattctctaaatttactaatgttaggctttgtgtctggtttcttacttaaaataatacttttatgattcacttgtaggctgagagtgaaggtggactcctgtaatcccaattcttcaagggctgaagctaacctggtatacatagagagatctaccctgacttaacatggaaacaaatgtaattatgttgttgtaggaatgatttttgttccttaaaataaatagatcaggtaggtgataggtagataggaaggtaagtagaggctgggactagagaaaagtttaagaatgcattctattattgcagagggcctgagttaggtccccagttcttactgactctaagtacaggtcaagggatctgacaccttcctcttgcctctcgtcgtgggcactgtactcacataaacaaacacacatgtaattgaaaataaaaataacctttttgttgtagtggtggtggtgttttgtgggtttttttgaaacaggatttctctgtctagacctgactgtcctggaattcactctgtagaccaggacagcttc

SEQ ID NO: 27306 - DNA, 1203 bp, Mus musculus
tttgtagggacaaaggcagttggcatccagatatctgccattcatatctttggttctgtaggcatagattgaacaaactaactgaggattgtttaaggaggaaaccatggctcagtgtgcatagactaacaactgctggatgtcacacttagtgagactaggtctgagagacataagggactcagctacccaacgctgggatagattagaccattataaagtatccaggagcatatagacaggttatgttacaaacaggctgttttgtctaagggatttaggcatctacaggatgtccggtataccaagggacagatgtagtatgcacataaaagcatggaactgactgccgcttgacagtgaagctattgtggttttctgtgcttagtgctatgcactatgcagatttgtttcatctggctaagttatctgggtgtatattgttcatagaaatgagtcatatgttctctggcctgtagttgatgtgagtttgatttgcagattgggtttgaccaaagaagaatcactgcagcagaaagaggtccaggaggaggccaaagtcaagagtggtttatgtgtctctggagagtctgtgcggccgcagcgtgggcccaacacccgtcaacgggacggacattttaagaaacgttctcggccagatctccgaaccagatccagaaggaatatatacaaaaaacaggagccagaacaagcaggggttgctaaagatgcaagtgctgcaccagacgtctcactctctaaagatactaaaaccgacttagcaggggtgaacagtacccctgggccagatgtgtcctcagcaacatctggacaggagggtcccaagtgtcccagtgaacctgtggcttcccagatccaagcagaaagggacaacttggcatgtgcctctgcatctccagacagaatccctaccttacctcaggacactgtggatcaagagacaaaggatcagaagagaaaatcctttgagcaggaagcctctgcatcctttcccgaaaagaaaccccggcttgaagatcgtcagtcctttcgtaacacaattgaaagtgttcacaccgaaaagccacagcccactaaagaggagcccaaagtcccgcccatccgggtaagagacttggtacttactgtcttgggtgtcagatttctttctgaggagcttttgggtaggagcatgcatgaggc

SEQ ID NO: 27307 - DNA, 3650 bp, Mus musculus
cccacttgtgatgcacctgctgcatggtaatttgcccttggagaaggttcttcctccaggtcacagaagcagccgactagagtcatcacagctgccacttagagaacagagccaggatagaggcactctacaaggtacaggggaaaacaatcgcctagctgccagaatcaaccctggttctgcacaaacattgaaagagtctattctggcccagagctatggagcaagtgctggtcttgtcagggcaatggcctccaaggctcctgcaatgtcccagaagattgcgaagatggttacaagtttagactcacagcatccagagacagaactgacaccttcctctggcaatctggaagaaatagattccaaagagcatctctcttccttcctttgtgaagagcagaaagaaggccattccctgtctcaaggcagtgatccaggtgcggccccaggccaatgtctaggagatcacactacctccaaagtgccatgtttctcctccacaaatgtgagcctctcctttggatctgagcagacagatgggaccctgagtgatcagaacaatgctggtggtcatgaaaagaaactatttggtcccgggaatacagttaccacccttcagtgccccaggtctgaagagcagacaccactacctgctgaggtccctccagtgtttcccagtaggaagatagaaccaagcaaaaactctgtgtctggtggtgtgcaaactacaagggaaaacaggatgcccaaaccacctcctgtctctgctgacagcatcaagacagagcagacatttttgagggatcctattaaggcagatgcagagaacagaaaagctgcagggtacagttctctggaactagtgggtcacttgcaagggatgccttttgttgtggatctgcctttctggaagttacccagagagccagggaaagggttcagtcaacccctggagccttcttccatcccttcccaactcaacatcaagcaggccttgtatgggaagttgtctaaacttcagctcagtcccaccagctttaattactcctctagctctgctacctttcccaaaggccttgctggtggtgtggtgcagctgagccacaaagccagctttggtacaggccacactgcatcactgtccttacaaatgttcgctgacagcagtgcagtagaaagcatctctctccaatgtgcatgcagcctgaaagccatgatcatgtgccaaggctgcggagcattctgccatgatgactgcattggaccttcaaagctctgtgtattgtgccttgtggtgagataataaattatggccattggaaacattgtacatttagtgtgtgtattttaataatggttgatcttaaatctgtatacaaaatatcactgatataatgaactctctctctctagacaagataaattttgcctccccatgagatttatagtgctgaagccctctgtcacttgacacccttctagccttgttggaagggttttcagggagatgggggcactatggttgcccaagaccataaaccctcttgtagtcaggcagtatagtgtagcagggcaatctgtctgacacctaaatggacttgaaattgaagcaggaaggttgggttctccatggatggaactcacctgcctgaactgagcaggaatgtcagtcttccactgcccctccctgccatcttctgctacttagcttgggagttgatggttgcagaagccacacagggttaaagtaaattctgtctttgcccaccaggggatcaaacccctgctgatcttgatatcatatttctgtcatttgccagttgatggagccaagttgacctttggttctggtgcttcacccagtttggaactttaatctgtaacccatggatccacagattttcttgggagcttgaatagcccttcttggacaatggggtctggaaatagggctgtctgcttatggaaatgccatctgtagaccttgagagtcaactgtacagatgtttgcaggtgactcctgcttgccacccacccatcatatttgattctgtgggagtgggcacccatacacctgtgtatgtgaaagtcattttacatttccaagcagtctgtttcttatttttatattttaactctattcttggatgtataaagtgaactttttcgcttctgtaagtatgctctatgcacctctaacgttttatcctgtatttatatgttgtacacagtactggccaattctgtaaatggatgtattgtacagagaacacgaacgtctcttccttattttacgtcttcagcacccttgattaaaatggtgtcgtttacttatgtgcaccaattgtcaaaaccactgagtgctgtgctgcctatgtgagaagaaagttactgacttgtgacctatgcttggccctgtgcctagtcacctgtcaccagggattctactacagtctgcgcgccacagatagttgctcacacaccattgagcaaacgtgtcttgttccttgtatctcttttcttccagccctgagtggctgcgctgctgccatatgtgacaagtggtcctcaccagtgttaagtgcttctggattcatgggtgagttccttggacgaccccagacaggcttctggatctggctccagggtcatcacatgtcaaagcaatattggggattgctaggcttctttcaacttacttttcacagtaggtttcaggggaacaaagccatgcctgctgcctgcctctctcctaacatggttccatcaagtagacaccctttgtatttgacctcttcccagttcctgccctgtttctgtatctttacttgaaagttgggagtccttgtttaatttaggtctgtcttcttgtgtgactgtttctgtatgaagtataaaaatttgtgtgccttgagcaagtctcattttctttgtaagctgcctcttccgccatttcatctgaggttgctgtctttttggtggggaggggtttggggaacccatcaggtatgagtgaggagccggtagtgaattcagtattggccaagtccatgttgtgtgctcagaagtctctttaccaaagaccaggagcaggagccaagcatgtccagtcctcttctgagacctctgaggtctcagaagagaaacttgacagtgtctggtccatggggctgctcagaaaagcgctgctcttgtatgtctcattggtattggaaaaataaacctgtacaacctgcacttgtctccttgtcatctgtggctgcctgtgggtgtggggaggtggggttaagtgcagagctagatggttgcatcaagtagacaccctttgtatttgacctcttcccagttcctgtgtgcagtgaattggcagctccactggtctttggactcttgattttggtggatattaccaatgggtgtagtagagccagaaagctaatgggagtgatgggagctataatggtcaaggtccctccttccaggaactcatctacaccactcgtgacctcctggcagtgactagttctggccttgttcatggtgtgaggcagatacagggtcactactgtttgaacaagcctaaatggatgcctagtgcttcagggacaaccacttcaggagtgcttaagtgcagggttttacaattg

SEQ ID NO: 27308 - DNA, 2530 bp, Mus musculus
gggggccagctcactgtcccgagtgcccagcatacccttgggaaggccaccacactccaccactaggctgtcttgttgcagatcccagtgctgccacagggacactgccaaacagagggacctcaccaacactcactacaaacaaaagcagccacccatcccatccgacagagtcccagtcacacggtcacctgtactctacctcacactccagcgtgggcttttccaggacgtgctccaagtgtgttctgaacggctgtctcccccaactcccacacaatgtagctatcttctgggaggtaaatgagacccagtgtccaggagccagagcccagaggggcttggcccttaaaaccagcagcttgccatagcctgggctcttggagatgcttgacaggatagtgtgtctggagctggtccaggtcccacacagcccccaggtaacctgctgaggggccacttctcttggccaggcatctgtgtgcccaagggtgaattatggtttccactcctcacctcacgatgggagtagagggatcagatcgttggtggaagtgcagaactacttgcattctcctaagatcaaactttcttctggaaaggcctgtcctgtaagaaacctagtccctggagtgtgacaagggacaagaaaaagctgacctggtttccttcctccctgacaggcacttcctcttgctctgtgcaatacctaccagtgctgctaaaaccagggattcacccagacctcagcaggccagggggcctctccctcaacactccgtagccatgacagcagcactctgctgcctgcccctgcccagagatggcagaagccctgttgcctttcttccctcagagctaggaggcctcaagggagccagggctgagtggacactaagctaaccacaaagagccactcttggtcccagagcgagtgccccttcccaaactggtctatggcagggactgcttgtggcagcctgacagactacccttcaaacaggtaggcaagcagtgccagtgcagataccctacctgttcagattcagggctgtaaggcagggttccccaccctgcacacttccacactggggttaaatgtggtctttcacatggcctacaatgcctacccagccacaccacctctgccttcatgtgcccgctcaccaggcctctggactgggccaggacacctgagccccttcatacagcacaaactccagtgcccaggcctccccacagctggccaaacatgtgcccagttccccacctgctcagtaggactcctggatgtttgaatttgtgtaaatatttatttttgtgtgtgaatactacaaagtaatcagtagatctttttgcaaaatgttactccaggcaatttgtgaaaatgttgaaaattggcagagacaatcgccaccctagaatttctgttatcaattgcttaccgcattctgtctgctcccagaggcagtacccaagctagacacaaatggcttgcatttttggaagaagatagaagagactaggcaggggctcctccctctatccccacaggacacatctgtaaggacgagcataatctatatctaagtggtattttctaactgcaagcagtcttgaccagccactagcagcctgctcctagagtacggtgtgagcataggttccatgtgttttgctttcaagagaaataaaaccaatgccagtgctgatggtttccagaggggctgcaggacagtagtagatgctggcatgctgacctgggcttcttcccagagaagtggtctccaaagcctcagagcagccataccaggagcaagtcagtgtggacacaggattccattacctagttaagtcagggaacttgttctgttttccttttgttttaaaagatgcagcgtcaagcctcccttcctgactgtggcccgccttttcccaggaggagcttcccaaagccttgtcctgcagccactgcagtgtgatggaagcctcaggcacacagtagtcattggtgatctcaagtcatagtgaacatgccagtgcaggatgcaccccccctcacccccgagtccttacaggcagatccctgcaggctatcaagagaagtggtggatgatcatctgttagaccagggatagtatacaggacccatctgaaagcatttttttttcctctcaccactcaacaaatggacagtttattcccaaggacggtgttggggagaggcaggcagggccaggagggtcttggaggactttgaacaggtggaacccatctgtccctccctatttctcaagggccacaaatgactccacaggtggttataggattaactaccagttcattctcaaaatgctgctttgaactcagagggttgatacttttaatttgtaattttttgtaaaactttttacaagatagtaaagtatttcaccagaataccagtttcaatccgtccgtggtctgattttatataatttagtggtgctttagagactttgttttgttgtttctgagcgcaacagctcaa

SEQ ID NO: 27309 - DNA, 1175 bp, Mus musculus
tggatgggagaagtcaaacctggagcttctctgaaaccctgggttgaggggctgcgggagtggggggggggcgtttatgggtggttttgttttggtgatgttgttagaacccaagacccgtgcctgctgcactcgcaagccttcaggttgacgctgatgctttcttcgtggaggtagagcagtgcggagctggaggcaggggctgatctgaggtagggggctctggcatttgctacccggcagtcttgagggcatcctctcatttatcgcatggaatgatgggattggctagtgtagcacagtggtcttgctcttacttagcatgaacaaggtcctaagttccattcccagcaccacaacatattgatctgtgtgtttgtgtgcctgtgtgagtttatatgcatcatacgtgtgcaggtgcccagggagattagagtgctgaatttgctcaagttggagttgcaagtgtttgtgggctgtgtcatgtgggtgctgagaaccgaacccaggccctttgtaagttctaggttagggtatagagcatctaccccagggtgatggccatgtaacaggaagctgctgtcagggctctggtggactgaccagtgagcagctgagccgcagccctgcccacagacctctgggcctctgggctcagtggccagcctctggctgagttcttaactagcactcattcagtgaccttgagaaagtccctgcctcccttcaagctgattttctgttctgtgagtccagtggtcttgcctgtgttgaagctctgggaagtaggggagactccaagcaaagttctcagccctggaattaagagctgttctctgctgtgcctgtcctgtggtaagcagcagctgcaagggactctgggattgagggtcaaagacaaagcagcgggccaaggtgggagagagtgaggggtggagggggtgcagggacttgggcatggcagggaggggctactaggaagaggacatcagcctccagggttgattgggacctggttcctaggtacggagttgtaggaggtgagctggttggaaggtgtctctcaggaggtaggaggaagaaccagacatcatcctggaatccaggctgcccattaagacctgtgtgtatccctgacctgggggcacacacattgaatcctagcacttggggga

SEQ ID NO: 27310 - DNA, 1835 bp, Mus musculus
cggccactggcctgggcgggaaagggcctctaatgctgtagtgtaacactgtaacaggcttccactgagtaacaacaggctttgaccttcagtgggatacctacctccctcagtgttctttccttttcatcctagcccccctctctcccccttccccgtccccctttccctctctccctctctcctacctccttcttccttctcctcctcctcctttttttttttcctcttttagacatggtctcactgtgtagcccctggctagactggaactctgtatagactaggttggtttcaaacttgcagagatctgtctgattatgtctgtctagtgctggggttaaaggccagagcccgtgtggcacctgtttctcagtaggcctactgtgtgcttgtcactgtgttgagtgagatgctgcctcagcttgtggaaatctcacagcagcttagaggccaacactgctattatcatcacctgacagagacgtaaactgaagcttagggaacttaggaaatttccctaggccatactagtgagtgggtgggccttgggactgggtactaacacatatacatttctgttctgactctgaggaatactgctacctaacttaatttaaatgtctaagcctttcatgataggcccttacattttagtctgaatttgtttagaagaatacctctggtcaagatgtctggtactgtagattggtgccatgtaagatgtctggggctttcctggacacaatgggaaaagcttgggggagaaaggtctctgttaccctgggtctccggggactttggggacagagttgacagtggtgtctggtacaggccccatttagatttctcaggagtggcagaaggaagcctttttattaattaagcatccataatttgggtaacagggtcctagaacctaggggaggcatttttgagctaagtgccatttggatgctgagtgccaggccatgactttctgaggtttcttctctggctctgggttgctcctctgtggtggggacaatgtgtactcttcttcctccactaagtagtctgccctctcctttgtgacctgaggcactaccttcctgtccagaaagccagaccttgaaactgctcctgggagccactggtgggtgggttggaagcagttggagtgtggagacctgtggctagggcttttcgggcacaaaaggtgccggcttcagacaagccttggcttcaatgaggcagctcttatcttagagattataccactgatgacactgtacatgagtgtgggaccatgggctagaacatatgtgcgcagtgtacatacacacgtcagctccgtgggtatgcctatcagcgtgttggctgaggatgctggcgggagtgtgtgtgtgtatgccggggtacgggtgcatgcaggtggagggaggcagtatgcttatgatgtcttcggctgtgatcgtctgtgttggcagatgtgggagcacctggggtgctgcgctggcagaccatggtgtgactgtgtgtgaggttctgatggaaagccctggctggctggtggtatgctgctcgtggtgtgtgtgtgtgtgtgtgattatagccaggctagcccaagtggccatcctgactctggtgtgtccctgttggccagttgactcgaagtaaaagagagtgactggaggataaggccttaacagccccctcccacccccaggttcaaagtccaattcctagggcagaatggaggcttctgggacagggtgtgaataggaactagacgtgagtagattagatcccatggacaggatctcggtggtacctacaggttcccaggtgccctg

SEQ ID NO: 27311 - DNA, 1755 bp, Mus musculus
agacacctgtttgcccccttgaaggactactttgcctgtgaatagttctacccaggactggggagctctcggtcagagccagtgcccagagtcacccctccctgaaggcacctcacctgtcccctttttagctcacctgtgtggggcctcacatcactgtacctcagctttctcctgctcagtgggagcagagcctcctggcccttgcaggggagccccggtgctccctccgtgtgcacagctcagacctggctgcttagagtagcccggcatggtgctcatgttctcttaccctgaaactttaaaacttgaagtaggtagtaagatggctttcttttaccctcctgagtttatcactcagaagtgatggctaagataccaaaaaaacaaacaaaaacagaaacaaaaaacaaaaaaaaaacctcaacagctctcttagtactcaggttcatgctgcaaaatcacttgagattttgtttttaagtaacccgtgctccacatttgctggaggatgctattgtgaatgtgggctcagatgagcaaggtcaaggggccaaaaaaaattccccctctccccccaggagtatttgaagatgatgtttatggtttaagtcttcctggcaccttccccttgctttggtacaagggctgaagtcctgttggtcttgtagcatttcccaggatgatgatgtcagcagggatgacatcatcacctttagggcttttccctggcaggggcccatgtggctagtcctcacgaagactggagtagaatgtttggagctcaggaagggtgggtggagtggccctcttccaggtgtgagggatacgaaggaggaagcttagggaaatccattccccactccctcttgccaaatgaggggcccagtccccaacagctcaggtccccagaaccccctagttcctcatgagaagctaggaccagaagcacatcgttccccttatctgagcagtgtttggggaactacagtgaaaaccttctggagatgttaaaagctttttaccccacgatagattgtgtttttaaggggtgctttttttaggggcatcactggagataagaaagctgcatttcagaaatgccatcgtaatggtttttaaacaccttttacctaattacaggtgctattttatagaagcagacaacacttctttttatgactctcagacttctattttcatgttaccattttttttgtaactcgcaaggtgtgggcttttgtaacttcacaggtgtggggagagactgccttgtttcaacagtttgtctccactggtttctaatttttaggtgcaaagatgacagatgcccagagtttacctttctggttgattaaagttgtatttctctataacgtgctgtgtgttttttatctgctgatgtgtactggcttgaggcctgctgccatgtttgtgagccactgtctttactcccatagttctctaatacagaaccaggtgagttccaggccagcctggacaacatcgtgagtaaaacagtgacctgctggatcccatggccttaacagaaggacagtcataacaaataaacatgctgacctgtgtcgttcttggttagttaccaagaatcatgagacttagtgagtaatttaagtttaattgtaaaaactgtgacctgtagtcattggttggtaaacgtggtcaattataacaatgccacggttaggtgtgtgaggtgtaagtgaaatggttcgcatctttggcttagttctg

SEQ ID NO: 27312 - DNA, 3349 bp, Mus musculus
gaaggctttgtgatacctgatgaagggggcccacaggaggaacaagaagagtattaagcagcctggaccagcagagcaacatccgaagtcttcactccaaatcatgtgcttaactgttaatactcccttttattaatcttagaggattcactggtttcttttcataagcaaaaagtacctcttcttcaaagtgcactttgcagaagtctcaccttttccgatgagtttgagttaggagcttttgccttgtagcagagcagtattaacatctagttggtttaccaggggaacaagaggccaaccatggggctcttcatgtggatgctggtcacactgactgatggagaagggggtttataatacgagaggtgacaacctcagaaatgcaaagactgaattgaattctaagctaatgtgaaattctggcagagaacgttttaataaataaatgccttaagagtatttaaaatatgcttccatatttcaaaacatacagtgtaacatgacaggagattttatgtgtctgacattgtgtctgggaaggaagggcagactttaggccctttggaacctgctgtgtaggcctttcaaggctgcttgaatcttatagatgtcgactttggcccagaagtaaagtttgaaaagttctgtaaaaccattttgtgtcaatgaccagttgcacccctgctctaaaagcaagcagcatagttgcttgtgtgactagagggcgtctgggccctgcagtgcctgaggcgaagagctcagcttcccatcgagcagtcctctggatcttttcaaactctccctccagttcctctgtattgtgtttctgggacctgcccacgtctctgggatttgaatgggggtggagtcccagcacactgtcttttaagtttacagttacacttctctctctgctccctgtgacctctggaaactcctctggctccttaagtttgctgctgagcattgtaattacagcaggcaggtgatcgtgctgcaagttcttgctggacctctggcaaaggagtgatcagtgaaggccagtgtcacctgtgctctgtgaggctagggtgctcgctgtctgctggtcactgctccccattgtcacctgagtactttgccagtgcactaatctcttggagataaaattctctagtgtgttactaaatgttaaaatgtttttttttaaagaatatacagtaccgtgactgaaatattaatatttaaaatacttcattccttaattctccctcaattgctttacccatagcctattcaattcctttgtttggcgaactctgcaaaatgtgttacccactactgagattgttcagcccctgatgtgtttgtactgatttgtttctggtggtagcttgtcttatgctgtgtgtaggaaacaggtattttatgacagaatgttatgtagtgcatgctctgtggaattcagaggaaaatccaggctcagtgattaacaatgccaaaaaaagaaaaaaaaaaaacaaacaaaaagcaagtaacgagccattgttcaaacgacagcggtgctgtttctcctctgtggcctttcagacttctgttgcccccaaattccattttattgggaacccattttccacctggtctttcttgacagggtttttttctactttaaacagtttttaaataaaattctgtatttcaagagtgtcctgtcttctgaaatgtgtcttgccttgggtataagcttttaattctagaggtaagatagctatgcatccatctttggctgagcttagacagaggctgagaaatgattcccaccgtcttaaataggactaatcttttaaaatccctcacttttctcaagctaactaatctggctctccccttcctctatcctcctttctccttctcccttccttcctccctctttttcctcttcctccctccttttggtttttaagacagagcttttagtattgttgtcctgattggcctcatatttgtcacagtccttcttcctcattctcttgaaagattatgtgtgtgtgccatcgtgcctggcttaaaattgcttattttgaattctttttaaaaaaaaaaatcacattacatttttcagtcttctactgctttaaattcctgttaccctgagaaggttttcctcacagaaacagaaagcctgacctagttgcttaaggctcttaggaatgtagttggccggtgtttggcagatgatttaattggaggtaattgtttcattgtcctgaaaatgcatttacaaagtcagttagtacactcttaaactggagagtaaagttgttgcttcttaaaactgttctataaagtcctacacctttgagaatgagttgaaaatatgatcctctcctgttgttgtcttgaaatgttaaataggcagaaaggtaattcatctgctcttgagagtaccatgtacagtaccctggctgctgtggaagtgatcttgagagtaccacgtacagtactctggctgctgtggaagtgggacttagtgatttttgtgacgtttatattcactgctgcccctggaggttgataatgattcaatccagaatcattaccagtttggggaataatttggcaccatctgcattcatcatctttaagaagaaaccctgaagggatgtatgttgtgtgctgttagctgagaagttattaggtaagaggtgaagtggagactgtatccattgacctggcttagctgtataaagccttaatgtgactaattcaggttaggaggatggtgcagcctgaacgtgctgttggcaaggtctgtggtatgtagaggaacaggctactgcagataggtttggattcaggataggttcttcaggccgaattgatgtgattgcttcccaatttcttgggagattggtgtagaatgtttagaagttcatccccagaagttctttttttttgtttttgtttctgttttttgagacagggtttctctgtatagccctggctgtcctggaactcactctgtagaccaggctggcctcgaacttagaaatccacctgcctctgcctcccaagggctgggattaaaggcgtgcgccaccactgcccggccctggaagttcttgagctgggagattatgaatctgcattttaaggcccctcaggtggcctagacctgggccctgcttagatgaagctttaagtcttatcgtgtcagtgagacatcagatgtgagggttctaatccacctcttactttgctttattttgtttttttcttgtttgcaaatcaagggctctgatgttggctgaagggcctcacactctgcatgttttttagaatccgaggaaactaacaggccaagtgc

SEQ ID NO: 27313 - DNA, 1102 bp, Mus musculus
catttctaacctcctgaatccagagccttaaatcttcttgttgttttgaggcagagtctcatctattccagactggccttgaacccactatgtatattctagggtgattttgaatgaatgctgggattataggcatgttataccatgcccaacatcaaacccaggccttcatatctgctgagcaaatatcagccaagccacatatttagttagccccatgagtgttgttttattttgaaaaattgtaactgcttttgaggatggtaagctatgtggtttatttattttatttttatacagacaggtatagatgccaagtatgtgtcacctcacacctcagtaatttatttcatttttgagagggtttcactatgtggctctggctgacctggaacttgtcatgcagattaggctggcctggagctcacaagtgctgggatcacaggtgtgcaccatcattcctggcttgcatgttaaaacagcattggtgttgctgaatgtgaatgaagaagtatctgtgaggatctgggtctgctgtggctcctgccggcctgagggcccttttggtgatcagcatgcccttggatgagatcatattttcaaaggtattctctaggttgtaatgtctgaatccttttcaagttggctttgaacttttcctgaatcactatgctgagacttatctagatttttccttctatatgctttcccacataaaaaaaaaaaacttgttattgattatattttgactcttttgaactttttcctaaaatgaatagaatacactgtaactaagtccatttctcctcccaccccatttttcttccagataaggaggaaattatatcctagcatattttagttatgttaaatactgatagtttagtcagtgaaaataggatataatttttaaaaaccctaccattaagttagtgtgtgtcatgggaaaattagaaacagtcataaaaatcaactttctgtaggaataaaaccaaaaaaaaaaagaaacattaattttgtgggttttttttttactgtaaaaaaatctctagtttcaggctgatgagatgtctcagcaggtaaaggtgtgtgttgtataact

SEQ ID NO: 27314 - DNA, 1099 bp, Mus musculus
tgtgattgaaattgagagacttttatgagctattatgtaggtgcatcaaacctgggtcctctggaataacaatcagtgctcttaacctctgattcagttctccactttctgccccaccccctgcaagttaaataaaaataaaaataaaaatttctagcttcatacctaaggaaaaaaatctatctgaaaggatttttgtgccccacccccttgtttcaatggctttcttcccttgacctttcctatccagcggtgtgttgggtgcgttgatttagatacgtttatgttctctgtttaggcccaagaaggaagctttggtggtggtgtcttgacacttgggtcatgttcagttccttacagtctggtgcaaagatctagaatccatggccctagcagaagtctccctcaaaagacctgttagcagctgactggccctggtgaagggtgatgcgactaccacgtccaggtcatccctcatctcggatgctcttactgactttctctgctcaaataatgggctggtgcagaacttggggtgtgtttgtgtcaaagagctcttgtgatatttgctctctgaactgggagaaccagttggcctctttggtttggtgaagctgcattcccatagggctccctggttcccttgagagggaggctcagtcagtgcttgtccggtgggttactttgtattcacatttgtcctgactctctgctgttactgccctctgtgagctcaatttctttaataaaaggtctcaaactgggtgaaagaaaaatggctgtgtttggtttatgggttagattctgacattacctttgtggttattttgtgtggaatttcctcagttcccaaatttgactggttgactctgcggtcagaaaccctctgcctctgactcagggatctcagccaagagttacaaatgtagtgagttgttaaaaactggtagcagttgggtcgagcttagctgtggagatcaaattgggtcagggtgaatgccctctggaaagtggacaccttggccttcagtcagtggcctgactctgggactgagtgggaaccagaagtatctcttcatttctgggacatattccttag

SEQ ID NO: 27315 - DNA, 1806 bp, Mus musculus
tataaaatctctgctccctgtgatatggctgaggttgtagatatgagagaaagaacaactaagggagagttcagaacagactggacgtggccagggctagggaagcaagaggctaggagagagtagtggagagagcgacatagcaagagatagagaatagaacatgccacagagaataagagaataagagagtaggtaggagttatagatatagatatagatatagatgatatagatataggacagacagataggtagagaggatagtgtcttaaggttttattgctgtaaagaaactccatgaccgcttttccgtctggactggaggcaggcggctgcgagcggccggcgtgctccgatcggtcggagctaaccgctgccaggccggctgccgcggcccggcgtacgccccagtcgagcgaagatggtgggccggaacagcgccatcgccgcgggcgtgtgcggtgccctcttcatcgggtactgtatctacttcgaccgcaaaaggcggagtgaccccaacttcaagaacaggcttcgagaacgaagaaagaaacagaagcttgctaaggagagagctgggctttccaagttacctgatttaaaagatgctgaagcagttcagaaattcttccttgaagagatacagcttggtgaagagttactagcacaaggtgactacgagaagggtgtggaccacctgacaaatgccattgctgtgtgtggacagcctcagcagctgctgcaagtgttacagcagactcttccaccaccagtgttccagatgcttctgaccaagcttccgaccattagtcagagaattgtaagtgctcagagcttggctgaagatgatgtggaatgagccagataccaacaagataaaatctcagtaaaataatttaacagttagcttggaagctggtcagctctgggggattaagggcaaattatgctgtcatgaactgtcccacactgacgtctgccaaagcgaatatgaactttggtagatccattgtctgttctatttatttttccagtgaaaagtattttgatagagcttttcattttataaatacactgagttaaccaaatatcatggatttccgtttgttcttaagacatgcaattcaaatgtaaatacagtagagtattacttaggtagaaactcgtggtgattttaagattggaaaagaatctgaggaagagttgaataacacacattctaaagactagaacattttattgtatgttgtaaaattgggtagaaatttgtgtttgtgaaaactgagcattaaaaccttacagagaccgtttctcgtttacttaaaaaaaaaaaaaaaaaaagaaactccatgaccaagataactattataaagaaaacatttaattagggctggcttacagtttgcagatgttcagtacattatcatcatggcaggaagcatggcagcatccaggcagatgtggtgctggaaggagctgagagttctacatcttgatccaaaagcagcaacaagagactgtcttttgcaggcagccaggaggaaggtctcttcagcatctggccaagcctgagcagaggacctcaaagcctacaatgacacacttcctccaacaaggccacaaacccctccgataaggccacacctcctaatagtgccactccctgtggccaagcactcagacctccacagagtgagaacagcctgtgtaagaaggatgagcggctgtgggagggacccctgtgtgctgcgggggttatagggtagaggaggatgtgaggagagctgggatgctgtgtgtact

SEQ ID NO: 27316 - DNA, 1186 bp, Mus musculus
acaaagtttaagcaagccagtctttagtagcaagtttcctatgcttagctgatggcaatttgtatttaccaagaaatagattatcatacatctttttttttttggattatcatatatcttatgtcttacttttgaagtcttgttctcctgaactattctctacctttttttaaaagatttatttatttattatatgtaagtacactatagctgtcttcagacacaccagaggagtgcatcaaatcccattacagatggtttgtgagccaccttgtggttgctgggatttgaactcaggaccttcggaagagcagtcagtgctcgtaacctctgagctattattcagcccctattctctactcttataatagattattcatctttatttataaccctctcttttcatggtacgcaccaaaacctgtggccacatctctagatcacaaggtccaggagctcagagcctacctagaaagaatgttctctggtcattttttgtcccaagcctattttcctcttctgtgtacagttccgtgcttgtaacccaggaaagctcacttggctccttttctaccctgcgcagccctctctattctacagtgacgggcgggcacgttctgttcgtgactctaacttggttgtatctttctggcaaaacaacttaaaccatctctttaaaccttctatcaactacccaaactttctaaaactatttaagtcaaatcaggaattccataaaatcattaattcatctaaacagcattatctcatgaaagttcgtcttcatgttgatctgcaggaaaattgcccaacagagtgggctgtcatccaggaagtaatcacatcaggctatagtgagggtcaccccatgcccagtcacaccatgccagatatctgaggaatatagcaatgatagacaggagaaggcacagcagtagcaggaagcagtcctgggacaaagcctctagggctgtgcctcttcaaggtacagccatcacagctgtgcaaaacagtggcctgtctccaggaagctcacctgcccactactctttttcctgtgtggtgtccgccagcaactctaggttgggtcaatttaacagcttcaacaatggggctagagtggggagatggctcagtggctaagtacatatattgctcttccacaggacctgagttggtttcaact

SEQ ID NO: 27317 - DNA, 1129 bp, Mus musculus
atttattgttgtgtatattatgatgtaaaggctcctgagacacagtgtgcttatggaggacagagaatgatggggaaagctgtttctgtcctatgattcgagtccaggggatccactcagggcctcaggtttggcagtaagaaagtgcctttacaggtgaactgtcttgttgggctactcttctgcttttttggggggtgggggtgggggtttgagacagggtttctctgtgtagccctggatgtcctggaactcagaaatccgcctgcctctgcctcccaagtgctgggattaaaggcgtacgccaccaccaccctgctcttctgctcttttaattttaaataatggaggtgtcaactatgttgaaagcttatttttcttacatttaaaaagcttacttttcttacatttaaaaattggacttttttgttatatgcattttgcctgggatttaaggtgtgagccattatttaaagataggttcttctagcccaggctggctttgaactccctattatctgaagatggtcttgaactcctcaaccttctgctttagtgcaagctttataagagtgtgccagatgctgccacacccagcttaaagttgccaatatttgattgtgaactgggacagggacacaggggaagtcaaggcaatgttaggattattgattaaggttactatttaattcttacggaatacttgagtaggcgtgggtaggattacatttcactactgatttccttaaagtgaagatagcgttcgtttcagagaaagctgcaaatgctctataataaactaagatagttatgtggttgactgcttcatgaatttaccaaacaacatttccatagttcattttggagttacttgcatcttgttgaattacctgttacctgtggttttcattagcagtagaaaaagtaaacaatgaacccatgaagttctgtaagtagccacaactcttctggaagtgtaagtcagtccctttctgccatttgacacaggaagaaaagtgtcaggaagggaagtcttcccaggggctggaaagatggctcaacagttaagtgcttgctgctcttccagaggatggaagtttggttcttagtacctatctttgaggttgac

SEQ ID NO: 27318 - DNA, 1189 bp, Mus musculus
ctttcagttgtttgtattctaacagtaacctagcaaatatctcataggagattaaactagtcttggttgtgtcagtaacttggtctcagtgtagaaatatgtaaagtaacagctcagtaaaattttgggatatttctttttttcagttctggggatcaaatctagggctttgtctgtcattattctcccttggtttgttgggattggatctggtctcactgtgtagctctagccagcctgctattagccatgccgcttaggctgccttttttttttttttttttaatttatataatttatgtgcatggatgttttggttgtatgtcatcatgtgcctgcctggtgtccttagagttcagaagagatcccttgaattggggttacaggtagttgtgagccaatatgtgggtgctattaagggaacctgggtcctctactatgctttaactgctgagactagatacgtagtgtttcattatgtggtgactggaggcccagagctgctgggaccaagtagtctttgtttgtttgtttgttttttgagacagggtttctctgtgtagccctggctggcctggaactcagaaatctgcctgcctctgccttccaagtggctgggattagaggtgtgttccaccactgcctggcccgagtagtcttttctgtttcatgctcttagatctgagccaccatgccttttgtctttttttggggggggggtaaagatttatttatttattttatgtatatgagtacactgtagctgtacaaatggttgtgagccttcatgtggttgtcaggaattgaactttaggacctctgctcgctgctgtctgtccagctcactccggtcaactcaaactcactcagtccctgctcgctccaacccaaaggttggtttatttctttctttttttctttctttcttttttttttttttaagatttatttattatatgtaagtacactgtagctgtctttcagacactccagatgagttacggatggttgcgagccaccatgtggttgctgggatttgaactccggacctgctcttacctgctgagccatctcaccagcccatttattggtttttcgagacagggtttctctgtttagccctggctgtcctggaactcactctgtagaccaggctggcctcgaactcagaaatccgcctgcctctgcc

SEQ ID NO: 27319 - DNA, 1198 bp, Mus musculus
tagtcctagaattcagacctgcctgcctctcctaagtactaaaagcacgaggcaccatgcctgggtgaaagttgttgttgttatgtggttggtttggcttggtttggtttttcacatttaataagaacaaaaggtttggggtatagctcagtcattgagcacttgattatcttgggtgctgacaccttggttcagtccttagaactgcttcaaaaaagataaatcaagaacagaggtttaaggactgatagggtgcaatgttctatgaacacttgtttggaaggaaagtatgatttagcagtcaaagataagggatgatgggaaatgtgtgcaggctgattggggccacagttgcaggttataggtaagcgttttttaaacaatggcaagtgttgtcattcaaaccagaaaacatctgagactattaacagtagatctttttcactttgtatttgaggattttgaaaagatttttatttatttatttttggactattgccccattatataaataacatcttgcagatctacatttgaaactgcttcaatattccttctgggccttcctaaataatgtctggagttacattggacttggtgtgttcctgtggggaacaaaagcacatgatcactgaagcctgtagcataaatgagaggcttgtgcgggtggtgtgaaaggcgctctcccagcctcacatgcctgggtgggcaagctaaactaatagttcccagcagttctgaatcagacactgtggagccaagagtctagcatttggaattccactgcctgtgctaagggcctgtcttttatcctccaaaccaccatttgttaaatggcactggacctgttgacaagaggggggagactggcaaagatcaagttaaaaggcaaaaaaaagttcaaaggtaggaaaataagaagggttagttatgtcttcacctccccttcccccaccccgtctctgtctctgtctgtctctctatctctctctgtagctgtagccctggctggctattatagacccaggctggcctggaactcagtgatgtccagcttgcctcccggggttcaatggtgtgagttactacaccatgtttttcctcctcttcacttatttacttatttgtttaattttagtaatttgttacaaagaaacttcatatctgaaagctgggtttgattgtgcactctttaatc

SEQ ID NO: 27320 - DNA, 2275 bp, Mus musculus
ttagcatattgtcaatagtgtcccacactgtccacagtagaggcctgaagactggtagcaggcttaggaggaggcccttccttcccctgtcttcaaacagttccttgagccccatatccaccctcgagtgacactgattggcctaaaagagacttggatagcacaaaagcagtactcaggactctctcctgagctgctcagagctgttaagatgctcagaaatgcaagaaagaagtcactgtttcagtaaaatctctagtaatgataaaaaattaaattagtcttcccaagcatcatggatcattttggacaagattttctaacttggctgtcttcgttagtttggaacccacctcttaactccagtgtttttcttgattttgcttgtgtaaaaaataatctccatcgcatggatcggtctgagagaggatggagccattgtgctagtcttttctctaagcatgttggccaaactaaaatattccgtggatcaccttggaaatgcagagcctctgccactgcttgactgtttaaaacagtcgccttgttgtatgtgtccttctctctgggactgcatgtctggatccttggggatgtcttgtgagtaggttctgtttggcacctaagcagtgctcctaaccctgatgggattattcgcacctggttttgacaccacctcataggtttattatcaggtggacatttgaggcatcctttttctgtgctccgtgtttatagtctccctcacagctcagagtttgtgaagaatgggaaccgtttttgaagagcctgacctgttttttttttttttttttttttttcccatcttcaggaacttttccaattatctgattctccaaatagaatttggagacatcgatctggtcattattggacctattgatcaggccaagtactgctcacatcttttccttgccatctaaagtttattagttgtcagcaccttgcatcggccactcagtatactccagaatcgttttgccctgtgcagtcaattgggataagtcattgcctttgatcctgttggcttttggaagctgtggtcactttttgtacaatgaacaagtctgaagaacaagtctgaatactaacacttgccccataaaagtatggatttagtgtctttgcacacagttaaggctgatttaaaaatactgagttcctatctcattggaacaagggttctcagacttagaaagtagacctttaaaatcatgttattttagcatagaatacccaagacccactgtttgccagacagcttagtacagcctggcctccctggtcccatcccatcagtctagtggggacaactttgacttactagatagagttagtaccagacagcacttgtccatactcagacacaaaacttcgggcagatcaggagcttctgtgaacatgagaatgtctcctggtgtgccctggtcagttactcagtagtaaaatggatgaacaccctttaagtgttaaatttttttgccacagaactactccagatagttggaataaagagctagaaccaatacattactacttacctggttggagatcagtttgtacagcaaactgggttacaaaatctagcctacctttgtgggctgtgtgattggcctgtccgattctgagtttctatagtgctgttggggactgctttgcttctgtgtcctacccaggtttgtctacacactcggacagtactttacactatatagttcagttctcagacttgtctctatcttgcctctggtcagcatcactctcggggttttgtttttggtttggtttggtttggtttggtttggtttggtttggtttttcgagacagggtttctccgtgtagccctggctgtcctggaactcactctgtagaccggactggccttgaactcagaaatccgcctgcctctgcctcccaagtgctgagattaaaggcatgcactaccatggcccggcttcagcatcactcttacgtgacatctgtttaggacttttcagatttaaggagttcctttctgcagttctccaactcctccctaggcaggagcagcagcagtaggagctggagctacaagtgattcctggctcaccgctttgtttctaagtctgcttatatgagccaccaggctgggagtgaacatagagcttcaggctgctcacaagtctggcctctgcagtaactatttgaggaagaaaagtagtcagggcttggtcattctgtaccaagtgagggataaaatttcaggaagtaaat

SEQ ID NO: 27321 - DNA, 1105 bp, Mus musculus
ggtgctaagttatgtgcagccatgggtctccatggaataacctgtctggccccccgaggtctatccaggcattggctgtcagtcttctgtaatgtagactcctttacccatttgatccccagggagtgcttcaaatcttgatgtcagctttaccgtcatttcttgtcaccttctcagagagagtgaagacatttttttctgagtggttctggaaactatctcagcaggtgtgtgaggcctcaacacaactgcaagtgtgtgttagtggttctccctagagcataaggagtgagcagatggccttcgttctgaaaactgcagacaggattgtgggttgaataaacctttacaaataggacacgtcttggaggcttacttcagaactggactggaaccaaggtttccaggctcctggctcaggagactaagccagtgtactttgatgaatgttagctatttgcagagaactgggtggtggcatgtttgaaccaaatgtgagaaaagccagaaggaactgaactggccattgtggaccagatggccagctgtggaagatccttgatccagcagctgcttagcagaccctggccactcaagtatattcctttaaagccaaaatgctgactacctgcttctgcctcatgttgacacccatttccaaagatgatggagccagtgtgagccaggaggaagctgagatggtggctgataatttactctaccatctccttccacagcccaagaggtggcacttcccgctcagacaccgtcttatcaggcctccagctgcccagtgtaaactgtcaatgcttataccaaaaagggcatgtgcagctggtgtctgccagggacagcccagtccctgccttgtggttcccaggaagaagctgcaacaattcagtgaatgattaaagggctgtttgataataaggccttcgttccactcctgtggctttccaagttcctaatgaggctacaaaggctccatccatacagaaaaccaataatgtaaataaaagccaatcctgcaagcatggtttgcagaggcgggtgatgaatgtgaagccacccgcaggatgcatttgagtctggtttttctgtgctt

SEQ ID NO: 27322 - DNA, 5610 bp, Mus musculus
gtgtgtttaaaaaacaccgtcagtcctagggaggtaatgttggacataaattttgaaccagggtcttcagtcttgagcttgactgattggagtggtaggatgctagcctcatgctgtgtccttcagaatctgtctctgctcgcacaccttagcatcctaacagacatcagactggggttgggataccaagtccttagctaagtcttctatggtctcagtcctggttattgggcaactttctgtgtttctgctacaggtgaaacggaggctggatctggagactgaccatcagtacctcgctggtagcagtgggccattccggggcagaggccgccacccagggaaaggtgccattgactccagcttctcaggcccagactgggggaggggtgtggacatggttgtacactctggggccccagtaggctgcccaacaggacttcctcaggccttggaggtggggagttgcccagctacaagaggaatgctttggttggcagacaacagccacagagcctttctgcttagcctgaggggagggagacatttgcctcatcttgccactcactctacattgctagggagacaggcctgttgggggcaggctgagtgtttgaggacccccgcctagcctaacccctgccccccaggtgtgaaatctccgggggagaagtcacgctatgaaacctcactaaatctgaccaccaaacgcttcttggagctgctgagccgctcagctgacggtgtcgttgacctgaactgggcagctgaggtgctgaaggtgcagaaacggcgcatctatgacatcaccaatgtcctggagggcatccagctcattgccaagaagtccaagaatcatatccagtggctgtaagtacttaccaggcaggtgggcaggtaacagccagaccaagccaaattgcttgcagtggcttcctgcattccccacagctgggaaaccaaggtcttaagagagttaccttccccggggtgatagaaggggaggaacgagcaagtcttgcagatccagttccctatagctgtacaaggtttcccgtgtgaatgcttgtgagcgcgcgcgcgcgcgcgcgctcacgcacacacacacacacacacacacacacacacacacacacacacacacatgcatgcctttctgagggtctcctgttccctctcccatggttgcccattcttagaccgctgtgctgacaccattccagcttttgctgtcatcattgagatcggccttatacatttgtggttttgtttctacttctctgctgtaccttctgcctccccaggcatcccgctgccttctctggcatatctgctttggtttttgatagatgattcttcattctgtattgttttctttttacttgatagtgtgtctccaaatcgtttgtatctaattcagctgtgtcattccatggcatgtttgtgctattgttttcttacctggctccttggtgggtgtttgttgactgatcaagcattttactgagcccgtgccagtcttactctaagcctacctggggagcagagccacagaggaaaaggagcttgccagcttctcacagaatagtggtggcaacagattgtcttgagggttagggctgatggatgggttgggggcgcaaggactgctaattcttcactggcttcccacagaggcagccacaccatggtggggattggtaagcggcttgaaggcctgacccaggacctgcagcaactgcaggagagtgagcagcagctggatcacctgatgcacatctgtaccacacagctgcaactgctttcggaggactccgacacccagcgatatccttggattggtcagggtgcattgaaggccgacttggccagtggtggcgccgcactactgagactatagaggttacctagggctctgatgataaaaaattctggctttggaaacaagacctggctctacattgacttaccatgtgacaccgaacaagttacttggattttatgggcctcagtttcacctataaaagagaggacagtaatatctatttccaaaattgtacatattaatagaaaaatagccagggctgtggtggcgtgcacctttaatcccagcacttgggagatagaggcaggcggatctctgagtttgagggcaggctgctctacagagccagtttgctgtctcaaaaaaaaaaaaaaaaaaaaaaaaagagaaagaaaaacgctgggcatggtggcgcacgcctttaatcccagcactcgggaggcagaggcaggcagatttctgagtgtgaggccagcctggtctacagagtgagttccaggacagtcagggctatacagagaaaccctgtctcaaaaaacaaaaataaaataaaatctgacattctcttctgctgtctgaagacagctatagtatacttatatataacaaataaatctttttttaaaatcaagtaatacattttaaaagaagccaaggactggagagatggctcagcagttaaaagcatttgttactcttacagaggacccaagttcaattccttgcatgtacatggtggctcacagctatctgtagttctagttatagtgcatttatgccctcttctgacctccaaaagcactaagtgcttgtgtggtgcacatacaggtatggaaaccactcatatacagaaaagaccaggctgagaacagggatacagactctgggggagcagagccatggggatatctgaactcaggctgctctggtccacatgctaggctagccagggctacccagtgagaccctgtctcaaccaaagaaggaaagcccagtgtggtggtatatacttgtaatcccagggccagggatgaggcagaaactaacactgaaggccaattgaggttatagagtaagacatgcaacataagcataggtcactggattacacagaccctgtcaccaaagagtgacaaacctttccttggtcattaatttagttcccgattgtagcttcaaagttaagactttaattcacaaaaagaaactattagaaagtgtgccttttagtgaatatcattatcagtaagattgtcaaaatccatttcccagtccagacctgttgagcatttgatatgaaattattacaggcagccatgagtttggaattggatgggtagatagtctcactgttgagaaagttgaagtttagtaatgagattctgggcagctactatgggccaggtggtgggatgagggtgtcaaaaaggagtgactggggaggcgtatgtgagtcagtggtccttgactcccccaaccctggcctatgtgacctgccaggaccttcgcagcattgcagaccctgcagaacagatggtcatagtgatcaaggcccctcctgagacccaactacaagctgtggattcttcagaggtgagactaaggaccctaagcctttccaagacagggaggctgggctggtgctcacctaggccttacctatctatcctgcctgctgcctccacccagacatttcagatctcccttaagagcaaacaaggccccattgatgttttcctgtgcccggaggagagtgcagacgggattagccctgggaagacctcatgccaggagacatcctctggggaggaccggactgcagactctggcccagcagggcctccaccatcacctccctccacatccccagccttggatcccagtcaatccctgttgggcctggagcaaggtaggtagggccagggtttgtagtatttggcaggcactcatggcagcccctctcctgctgggcctctcctaacttgtaatgcctcctttctccagaagcagtattgccacggatgggccacctgagggtccctatggaagaggaccaactgtcaccactggtggctgctgactcactcctggagcatgttaaagaagacttctctgggctcctccctggggagttcatcagcctctccccaccccacgaggcccttgactatcactttggtctcgaggagggtgagggcattagagatctctttgactgtgactttggggacctgacccctctggatttctgacagaagcctagggattcagggtgtctggagatgcccacctgtctgcagctttggagcctcctgccctgggccatccttcctgcctcattggaatagcacgatccataccctctgtcccaatagcttctagctctggggtttggttgctgccacattgagcagaccaaaatgggaaggatgttgtacagtgtgtgtgcatgcaccccacactgcgcactgtgtgcctggggtgtgtgtctgagtgtgtgtgtgtgtgtgtgtgtgtgagtgtgtgtgtgtgtgtgtgtgagtgtgtgtgtgtgtgtgtgtgtgtgtgtgtgtgtgtgtgtgtgtgtatgtatgtgtatgtgcacgtgtgcccgggaatgaaggtgaacacatctgtatgtgtgctgcagacacatcctggtgtgtccacatgtgtgcatggatccatgtgtgcgcattggggtgggggtgggctctaactgcacttttggtgtccttgctgcaggggccctgtgaggcccagggtggctgcctgctttcagaatcctgtgtgtcagccaggccgggtggtacagcttgcctggctgggtttgcagggcagcaagagcactgcttaaaagttttccgatcgaagctttaatggagcgtttatttatttatcgaggcctctggcaagcctggggggataagcaaagggtggggggcatgggtgataccttaagtccctgttctctgaagcaagggcaggatccctacccaagagttgctgaggcccaagcagtttatttattgggaaagggagagggagacagactgacagccatggatgggctggagaaacagtccctttgtaccagtactccagccgcatgtatccaggggatctgagatggggagggtacgtgagggccttggctgactgcggccaggaggggtgggtatgcgtccttcctatggctggagtgctcctctgctgtcctccccaccctccagtctgcactttgatttgtttcctaacagttctgttccctcctgctttgattttaataaatgttttgatggtgttagggctgggtttgaaactctccgccagccagagtgaggctagtgttggagggaatgttcactccctcttcctatctgacttaatttcctttcagtttgtaaccccttgagaagaaaactgacccaatggtgggtagggagttatgcttgggacctaagtacagaagagggagcgtcagagtcagcttgctgtgcaccttctgaacattagtaaagatgcaacacagtgaactgtgtttgtgtcgaatgctttcctgtgtgtatgtgcgtgggcctacgcttgcagctgctgttccctccctataggccttgtaagtagaagaccagggagagtttcctgaaaggtgctggggcagagatctgggagaaggaaggggtgattggcaatccatgacttgtgttaaagcatagatggaagtcctctgagctgagcatctacaaagcttacttctttacaacctgggggctaagggggaaggc

SEQ ID NO: 27323 - DNA, 1182 bp, Mus musculus
gcaggaccctcgcctgaggctgcccctggcaagccaccctttgagcaggacgctgtgttgtccattgtggtgggcggggacccggagctggtggtgcctgggcacacagagggtctgggctccaacctggcacttgccgagctgcaggctggaaccgagggagggtgtgccatgctcgccgtcccagtctatatccaagcctcagagtaaccaggctagacttcccggaggtgtgtgtgttgggggcggggagggtgcactagcacaatcccttttggaagttactgtatcagccttgccccaccgctgttcttccatgccccgagattatctggggaaacctgtagcactcacagggtctgaggcaggcaccatagctccagggcatagcagcggtaagagagatggccagagcatgaagtgctcagggcctagctgatggaggctggtacttgggcatcctttaagacacggtagggtggccccacccacctatccaggttacctggggtggcctcaggttgtgctgctcttcaggatgctagctggatgtggctggagtccttgtgtgttaaacacttcttgatgagggattcctcagacgactgtatgaggtgagcatgtaagaggcacttatcctggggcgtagactatagctgccagccagcccttgcttcagattcaccactgtgacctgagcaagcacatcacctctctctgttccacgttcctcacctgtgcaacaggacttcgtatagcactacctcctagagtgttccgaggacatagtatacgaaaatgtgcaaaggactgggcacagtacccatggcctggcaagtgctcaataaatctcaataaatgtttttaccaacctcatgggtccaaaccacccaggcctgagtctcagagattcctttcttgtcccccaggtggcaccactccctctaaagcacaggaggatactatgtagccctcctattgaccagaggagaatcagcaggctcacacggattacagtcataactccagcagcccacagcactcaggaagctgaggcaggaggattttgagtttcaggtcagcctgggttataggctgttgaccctctcttcctcatgggtgcaggactgaagcttgtctggtggttatcacagagcacagtctgtgcaaatggcccgtgga

SEQ ID NO: 27324 - DNA, 1433 bp, Mus musculus
caggacagggctgtgtgtgtgtgtgtgtgtgtgtgtgtgtgtatgtgtgtacacgtacacgtacacgtacacatacacatagagaagcatggctccagctcccagccaggcttcaaagagcatttttttctgtatccacagccaagaagaaggaagaggaagatgacgacatgaaggaattggagaactgggccggatccatgtaactgttccagcagaggctgggcccagacggactctggtggcctgtgcatcgggcaggcatgtgcgtgcgcagggcaggcaggacgcggtgcaggcagcctccatcgctcagctctcacccaaagcagtagccgcaccactgctcactctcgcatagcatggtctgtgcccaggggtgggtggggggaggggggcgggggggaggtgcctgctgtttataatgttgaatttctgtaaaataaactgtatttgcaaatccaacactgagttgctgggctgcgctaagcccactgctgcgtcctctgtggagggtcggccgtttgcagttgaagcgaactggaaatgtagccctgcagctgacgtgtctcactctgtaagatgtgtacggtactggcagaaaagtcgttttttaaaagccatagataggcttttccttgttcttagctgtaataacacatctagttttggttccctcaagagctgtgtttctgtctgtcacctgtgtactggccccatgtctaccatcctggcccttgtcactcctgtcccccctggtcttttggagtttgtgacacggatctgaaatggatgtgttctcttgcaagcgaataagattgttagagttaattccagctatccagttttctaacgtagctctaaggtcctcattgctgttgtgataattgatacatagctcattggaaacgtgtgcatacatttatattcagatgaaattatggtttgcaccgtctattaaatatctcgatttaattttcatatcgctgtgtgttcagtcaatctctcaccttccctgggagctgaccctttccaggccaacacttgtccagggtcctctggggaaacctgaaggacttgcgaagacggatcttctagaaaccgagagatcctggaggccacagagctgtggtcccacttagcctgggactgcctgggtccactgtcagagagatggtgcttatgcagcccagactcttccctccggtctgccgacagcacctagggcggtgcctgtgggagcctctgtctagtggaaactggtgccctcgtgagacacggcccagtcaggtggtgtgtgttcctacagcaaggacgtgtggtgggcagaggaccaatgtacagatgctcacacactccatttgcgtctgcagaatcactgcatctttggcccagcacttccaccctgcacttttctttatccttctaccctc

SEQ ID NO: 27325 - DNA, 1102 bp, Mus musculus
tacatttagcattgtgagtttaaagctttcagtccagggaaggttttccctggcccattttgcaggggaagaaaagcccctacccaggaggggctgctgggactacttagaaagttttgacagcttgggctccatacagtgtaagaccctgcctcaagaaaacaaagcaagctgggtggtggccaggaaagtgactatgtagcgagcttgtggccagcctgagctacatgagaccctgtctcaaaaaacaaagcaaatcaaacaaaggataaccaaacatacacacagatgaaagggctggcacggagctcagtggggaaagtgctagtctagcctgcattaagccatggattccgtctggtagtgtgtgaagctgggcatggtggctcacgtttataaacccagcacttagaaggtggaggcaaggtctgcgtggagccccggttgcgggtctctattccgcaggatgggtttgtgaaagttgtcaagaataaggcctactttaaaagataccaagtgagatttcgaaggcggcgagagggtaaaactgactactatgctcgaaaacgattggtgatccaggacaagaataagtacaacacacccaaatataggatgatagttcgtgtaactaacagagatatcatctgccagattgcatatgcccgtatagaaggggatatgatcgtctgtgcagcatatgcatatgaacttccaaaatatggtgtgaaagttggcctgaaacattatactgcagcctattgcactggcctgctgctggcccccaggcttctgaataggtttggcatggacaagatctatgaaggccaagtggaggtgaatggaggggaatacaatgtggaaagcattgacggtcagcctggtgcctttacttgctatctggatgcaggtcttgcccgaactacaactggcaataaagtttttggggccctgaagggagctgtggatggaggcttgtctatccctcatagtaccaaacgattccctggttatgactctgaaagcaaggagttcaatgcagaggtacatcggaagcacatcatgggtcaggatgtggcagactacatgcgctacctaatgg

SEQ ID NO: 27326 - DNA, 1120 bp, Mus musculus
gaaaggggttttacttaaaaatattacagatatttcagggttaaattcggggatcatcaaatgtatcttttactatataaacacatggatattgtttttatagagtggagagagatagctgaaaaatttaagactaatttaccaaattgtctgctgagttccattattatcttagagctgaagtcctttggggcagacttgggagcctaagactgtatagaacattacatttaaatgtaaatgaaaaactgactgtgaattccataataaaagaaaaatttaaacacttaaatatagcacaacaataggtgtgaaaaataaccccaaaacatgtttgttgttttgtgtgtttttttgagtcagggtccctgtagctctgattgtcctagagctcgctaggcagagcaaactggccttgagatcaacctgcctctctgcctctccatgataggattagcgtgtgtgcctggctcccaaggaggcatttttgcagttttagccttatgagataggtacccctactgtggacacccggcccttgaaatgacatctaaatgaatagttcagtttgtcaagccaaaatgattgctctactccaaataaatattctcttttaaaaagccaagtttagcagcttaatgtttttggccagtttttcttcattctggaggcatttatctggtatttagctatctcctgtttattaaagatttcagtaagcctagttaaaggcaatgtttgcatggtttctcttgatctgtttgtctagtttgatttgaaattctttgtgccagtgaaagcaatcctagcagtagaatttctgtaactcatttttgtaagtctagattttctttgtgttagatttgatcatgctatactgagaagtcatatgttgctgttcccacagaccattttcaggcttttggactttgttcttctaaatagcagtaagctacccctaagaaatggtgctgccaatataataatgagggctgtgcatgaatcagtggaacataagattaatttttcttaaaaccctaacgtctcaccttaaattggctcttcacaccaattgaaatagccctttctatagttagggtcatgaataggggtactgtgc

SEQ ID NO: 27327 - DNA, 1099 bp, Mus musculus
gtatgacttaattttgaatgttggcagctaacctgggattttgttagccagatttgtgtggattgatacatgtgagtgacctatgaagtacactattgtctggaaatgacatggctaaataggtaatggggtcagaaatggtaggctgttattggagcccttagccagaggcctggctctgggtttggcacttgtttccataaagagaaaaatgatataaaatatatacaagaaaaacttacttatggttttggcccaaaaccagagacaaagccatactcaatatgtctctgttttctccattgaagtgttaaaatttatagaaaaggtaaaaaaaagccatgaaataggcttatgtagattcatgtggttctcattgggttgaactgggacaggtgtcagtctgagttttaattctatttagtttttgtttaacctagtcagggcttctgagcagagtgtctatactgtcagcatgctgtttcttatagggagctgaggctgaaaaatccagttaagatttttaaaattttgagtgagttctattacagaaagaatgaagctaagagacttgatagtgtaggacagatcattctctttttgaaggctatactcccctctgcacagtcactgacatgtctgccccaaaatcccacacttaatgcagtagcatctaccatatgctccttagccaaggtgttctcttccttgagcttgtctgtcttccaagcaaactttttaacatttaaaaaaatttccccctgagacagtgtcttatttgcagtcatggctggcctggatctagtagacattttaattttaaaaactatttttgaaaagaaatgcctgctgacagattagtaagtggattgttggttgtttgacccatttatggcagatcttttggagatagaggagaaggttaggttagaccagtggttcaggggccaccgatcagagattctgcatttcagttatttacatcacagttcataacagcaggaaaattacagttatgaagcaataaaagttttatggctggagatcactacaaccataggaactatattaggtcacagtattaggaatgttgagaact

SEQ ID NO: 27328 - DNA, 1196 bp, Mus musculus
tgtttgcctggatttatttaaaggatttattcacttcttctttaagaacccctatcagctggtgagatggctcagtcggtaagagcacccgactgctcttccgaagatcccgagttcaaatcccagcaaccacatggtggctcacaaccatctgtaacaagatctgacgccctcttctggagtgtctgaagacagctgcagtgtacttacatatagtaaataaataaatctttttttaaaaaaagcaaaaaaaaaaaaaaagaacccctatcatattcaaaaaggctatttttaggaccttttcttgtgcttcaactatgttggaatattcagggcctgctgttgtaggatagctgggctctagaggagacatactgcctgtctgccttcagcctacttacttgctgccctgggaggagtggtgtttgggttagcaggggttgcctgctggagttggggtctgggaggaagcaacagattgggggagggaagttaggggaaggtctgtggaagatccatatgtgggcaggctggaagaaaggctgcagctggtgttgtattgcagtgctaggggtgagactaggggttcagtgttgggcaacagagagagagaggaggaggtcttagggcagcctatctggttttttggcaggtacggcctatagtatagcatgaagtgcctcctggagttgttagctgggatataatgattagtggtgggagggaagttaaagaggggaatggttgaagaaactgacaggaagtggatgaggaaaagtattaatgttttttgatatttagtcctttttgctagtatgttaaggggcactattctccattgaagaattactgcaacaatgatgttgtcttgttcctttttagtcttatgatcaggtgagaaagatttataacagagccatcagaaccactatttatataaagctcagggtcagaggcaactcccttgtggacaacagcattattcgtgctgcatcattcttccttttctaaccagcagatcttgaaattagagacatttctgcaaacactaaccagagagcatcaagctttttgttttgctgtgtttgttccagtgagcaggaaaatgagtaaacaacagatttaatggccacccaatgtttccaaacagttgaaggaccagagtcctggtcaggtaaattagcttagtgcagcta

SEQ ID NO: 27329 - DNA, 1118 bp, Mus musculus
attttcatgtatcctctttgctatggttctacattgatggaacaaaacaaaaagctgtagaaagttattaaaattaattttacagtggggtattaagtggactggtgagtctcagccttataatcttccaatgttggtttttcccacgtggtattatgagagtaccaaatgaaggaatgttataaagcacctagtataagattagcagccattgtcaactcctggtaaagtagcaagaaaacaagatgtatgaacagagagggatgggtgccatagggatgagagtgtgtagcaaggcaaggagcagtccaggtcattaaggatgtgggccatgaacggaactgagcctagcctgggaacccagtttcacattggcattcattctcttttcaggtgaacaccatgtccttgaagattcagaccagcaatgtaaccaacaagaatgaccctaagtccatcaactctcgggtcttcatcggaaatctaaacacagctgtggtgaagaagtcagatgtggagaccatcttttccaagtacggccgagtggctggttgctctgtgcacaaaggctatgcttttgtccagtatgccaatgagcgccatgcccgggcagctgtgctgggagagaatgggcgggtgctggctggacagaccctgggtaagctcaacatctttcctctgagtagctactaccgagattttaaatttccaacagatagaaattatatttaaaatataaattgagtaattcttaaatgagcgttaaataggggattgttataggagctccttttctgctaccttgctttctcagtgcctccagccccctttttagttgtgtttctgggcatgatagcacacgcctttaatcccagcacttgggagggcaagtggatatctctctgagttcggggtgagccaaggctacacaaggaaccctgtctcaaacaacaagtgagtgtgcatacacatatgtgtatgtgtgtgtgaactgtgatcctgtatggaggtcagaggacaactttatggagttggttctctccacttttatgtggattcaaggatcaggctgactagacagataacgtttcccactggcctccatagcctccctcccc

SEQ ID NO: 27330 - DNA, 1940 bp, Mus musculus
gaggaatatgtcacttgtcacacatgccggtcaccggacacaatcctacagaaggacacccgactctatttcttacaatgtgaaacttgtcattctcgatgctctgttgccagtatcaaaactggcttccaggctgtcacaggcaagcgagcacagctccgtgccaaagctaactaatttgctaatcaccattgatttttccaaaatgtgttggagatttggctggacaggttaccatcagagtggatgtaccattgagttaaaaacaagatagaaaaactgccaagttgtttggcaagtgattgttctgaaataccttgcaagataccgatattcaagctgttgacatactcgttgcctactttaacaactgtcagagaaacgtgatgggggtaaggaggtactttttaaaatcgttcatagacttctgtaaaatgcaagataaattaaagttattataacagtaattctttgaagtcgatctgtccttcagttttcttttctacaataaagtgttcgttaaatttggttaaaaacaaaacaacaaacttgattcctgggctgtggcaagttttctttgtcctcaaaactggcagatactggagctgggcagccatttttccttttagtgtctcttgaagctacatggctagaatagataggtcttcccttgaaagagtggttggaacataaggaatggggcagcgacctgtttttaatgtctagaaaatgatttggagggtttaatttccttttgtgaggattactgctacttcttcctagccaattcctcattctctcacgtgacaacagctgaaagtgccaggtgctagattcctcctccttggaattgtgttaggctagttggtcctctttgaggaagcatatagtacagacttcttagcacttaggaagcttctccaacctgtgctctaggtcagtaaaacttcgtcctctgaaatgcttttctgtactaaactaacttgaacgtgacctagaaaccaagagatactgcttcatgtgtggtctttattgggccacaggagggtcaatcttgtgggtctgtgctgtaatctgccttacttgcacccaccaggataaggacataaacggtgctcaacttttctgccaccagactgttaactttgctaaatggctcaagaacagtcagttagccctgctgtcttgactatgttgtttttaatcactgtgacctctgaattttcaagtataggccaaatgagccaagtaacttggctgtgaaatggcagaaggaaccttctctcaagcaggtaggtcaagagatgggccatatatatactgatatactggttgacctgccatcaccgctcactgccatgtgaatagaactgtttatgactgcaatttcttttttctttttcttttttttttgtacctctgcccatgatccccaatgttggctataactgcgtgaataaagcaaggatcagtgcctcctgtgtaactagtgctccattgcttttgtgtgttgtgttctgtacaattattttcttggtgggaccactcgggatgccatggtactttcactcttcagtatgtgctgcttgctgacttcaatcacaattttcaacttcataatggtgaccatttaggtgatttctaaagagcaaagctgggtgtagtagggcacagttgtaaacccccagcatttgggaggcagagtcagtagcattaagactttgtagccaacctggatcaacaaagtgggggacagggaaacaaagtatgaaagagactgatctgtttgcaacattccattcccatgctctcttttgtctttaaggattgcatgtatatggtatacatacataaagacagacaggtaaaacaaaacactcatacacataaaaacatgaaaacctttttaatctaatgtgaaagagtgcctaggcataccc

SEQ ID NO: 27331 - DNA, 1189 bp, Mus musculus
caattcgtgatactctctcttggtgcagtctactcaaagtgtagctgtcatgatagtattcagcagaaggaggtatggagccctctgaattagtggggctttggtgacagtggcaaatttgtggtcagggtcacatgtagtactttcccataaaaatcagtagaatgagctggggctggggcttactgagcatctgtaaagacccagattttggttaatagtttctgtcttcaagaagttcctagaagccgggcctggtggcacacgcctttaatcccagcacttgggaggcagaggcaggcagatttctgagttcgaggacagccagggctacacagagaaaccctgtcttgaaaaaaaataaataaataaagaagttcctagaacataacagaaattcatgtgtacatttaataaaagtaaatctgcttcattaaagcagagtatctcaaatagaaactttatattcttgttattactaagaatgtgcttaaatgccaccctttccttaaagttgctgaaccgagtgttcaacatcatgagagaaaagaatccagatatggttgctggagagaagaggaaatttgttatgaaacctccacaggtcgtccgagtaggaaccaagaaaacttcttttgtcaattttacagatatctgtaaactgtaagttcgctagtgggaacccttcattccaataaataccagatagacttgtggggtattaggaatgttaaatgtctttactgtagtatttctgtgcaaatgtaggtcatagattgagggaagtcagtttatgtttgtctgttctcagagctcattttatccaaagatgagaaaagtgagttagtgctgcctgatgagtagatcctgggggctggagagacgactccgcggcaggatgatgcacaggcaggcaaggtgcccacacacattatgggctgaggatgggatagatcctaaccacagagtcaagagtgaaaaggctacttttcattacgttcagcattattcaaaatattttactttcatgctgatgacagcaatagtgtatgtttactacaaattagaaaagtaagacacagtagagaaaattaaaagttatatgtaaatctaagtaggtagagataatcaaaacctagttttgcttttagtgttttgttctgctttcatgcttttaggcatgatacac

SEQ ID NO: 27332 - DNA, 1227 bp, Mus musculus
atggcctgtcagcagctctcccaccttggctaggcttggcagccctcggtcagaacaggcttcactttctacagcattatcttcttcagtgtggggagggaggcagctggctgatgggctggtgtcctgtgcaaacaggtgatgcctgggatccgcacagctgtgtagtggcactcgctgtgaggcgcacccacctgccagtaccctgtttcaggtgctgctttagagtgctgggcagagtcatgcacatcctagaccctctgggaggtttctgtgagtggtgatggcagcgcctccttggggtttgcacaagggaacatggggatgggttacagaacctggcacagcagatgcttcacctatagtcgcttctgctggggcactgtggctagccatcacctgaaactacccatcacagagactgccaggcccttcagacctttcagtgaggagcaagtccagggtcctgcctgatggaacccagtgattacaatgtcccttttggtgaagtcctgttctgtgtgagccagtatcttactccattgaacccaggcaggaggagatacaaaaggaaataattatttctagacacctacatctagcgttgtatgagacctctgtctcacttgacttatgctattgcaagccccatttatagaagaggaaactggtaaagtgaatttttcaaggtctagccggaaagttcagagccagccagggtttgagcttagatctctctagcttcaagctgcgcagttcccaccattgtgtgggtacaggggctggacatacctagggatgggagctaggaaggagatggtattggctttgttggtagagttctctagcgcctccctgcctgcttctcatgtgccgcttcccctgcagtgtttgcctggaagggcgagacagatgaggagtacctgtggtgcattgagcagacgctgcacttcaaggacggacccctcaacatgattctggatgatggtggtgaccttactaacctcatccacaccaaatacccacagcttctgtcaggtgcgcaggtggggtgggcactggtagcctgaaggtatcttgctccttcatagacatgaggcagtgggcctggctgaactcccagatccataggactggcagacaggaggttcctgcaggcaatggccttctaacttgtgatgtgaagccaggctaactgagggtgggggcagggctggctgagttcat

SEQ ID NO: 27333 - DNA, 1176 bp, Mus musculus
gggagatcctgtctcaaaaagcaagacaagagaagctgagaaaggcacttcacagtgacctttagcctctatatacatgctcatacgtaaagagaggctgttgtccttttataaaataatacacctgctggatttgacttttctgggaatgtgacctagaggtttgttgctggaacttccagccctaataagcccctataacagatacatagtttaaatatattaattacaaaccatatgcccagactggtcagatctggtactgttcttactccccagctataggacccctataaacttacttgcagtttctcccagacatttggttctggtccattgcagcttcctccatcctctctccttcttctcctccctaccaccccctctcaagcgagcatccagtcccacattgacaggtgacattgtgagatccatagttctagagctgattttccaaggagcacttctctttgttgtgagtgacagttcgcccagcctgaaggctgtagggttacacttgtattggtccttataaggtgaaggcacttcatggttaatgggaacaggttgctcatgtaacttacccattctgttcccgcagcggacatcggactggccgcctggggacggaaggctctggatatagctgagaatgagatgccaggattgatgcgcatgcgggagatgtactcagcctccaagccactgaagggtgctcgcattgctggctgcctgcacatgaccgtggagactgctgttctcattgagactctcgtggccctgggtgctgaggtgaggcccacgctctctgactccttcaagttgcttcccctctctgacctcagccatgagtgaagactgtactggtaggagacctagcttgcagagccttttctggtcaccttggttttctctccattccctattgctgctgctcttgggggcaaatagtctttcgtctcctgcctgagagtgctggtagaagacccccaccccaatactccgtttagtcatcccaaaacactcccattggccttccttgggccaagtgctttctggacagtcgtgctgctagaaaggtagagtgctttgattggttgagcctgtattatgtatataagatcttaaggagaaggggccctgctagagtaggacagccaaaataagagttcttga

SEQ ID NO: 27334 - DNA, 1195 bp, Mus musculus
ttatgggtatttttagtttctgtatttggtaaaaagcaagtcttttttttttttttttttgaaagaaaggcgattttattaaaaagaaaaacaacaaaagggagatgggaccagagcacaggttagtccatccacagagcacaggttagtccatctgggccttcagcgtcctggtgctgatcttgtctttctcaatgacgtggacgatgacgtccatgcccgacatggcatcccagtccaccgcgttcagcatggcctgagaaatagtttcaaacaggtgttctggatccatgttgggctcccagagagactcacacatcccatacatttgttcagagcaggtaccactgactacaaagtcatcagtcaccatgggacagccagtgaggtccagagagcaaatgaagagcttgaaggtcttcgggtccaggccagcaatgaagcaatgacaggctctgtgtagtagggaccgaaccgcttctcatacaggaggttggccaccatgctcatgaggagggtgtaaggcttgatctgccgacattctttcacctcatacaggttcagtcggaacttgagacgttgggcaactgtctggatgtcagtggcccggccggacaggcctatgtagagcctgtcacccatgggaaagatcttctggaagtccatggtcaccatctgggtctggatcccgaaatgcctgtctgcagccatggccacacagttctttcccttcatggccatgacggccccttcattataggacataatagtcatgattgcgctggagtggaagcccgatccccccgaagcaagtcttaatatcttttgttttcctctgtattttgtagtcagttaaatgaaaagcccttaccagaaggctgggaaatgagattcacagtggatggaattccatattttgtggaccacaatagaagagcaactacttatatagatccacgaacgggaaaatcagccttgtaagttttctaaacattataaatcaaaagcacagctaatttcttggatttccacagaagatttcagttaataaagacaaagttgtacttgaggtgggcccataggcactgtacactgaatcttggtggtttttttttttttttttttttttgcttggggatagggaagagattctcaccttgtaaccctgattgacctagaactcactctgtaaact

SEQ ID NO: 27335 - DNA, 2651 bp, Mus musculus
gattgctgaccactggtctacagtgggtagttgggacatcatgagaagactggcatttcctgagggtctgctaagcacctgcatggtgctgtgtgcttgtttctaagtctactacaggggtgggtattgctctcccagttgaccagagaagacactggcatgaatcttggaaaggtaaaaggcagttgcttgaaggctgcgtgattcaagggcacatcatcagacctctgaggtgcagctgtggggcactgcctgtgtgcatctttgtatctttccttttctcaagccaacaattctttctttcagttttaaccgcctggacctcccaccttacaagagctatgagcaactgaaggaaaagctgttatttgccattgaagaaactgaaggatttggacaagagtaattgtttagaccttaagccaccagaggccagggacttgtctgcagtgtctgtccccttccttctctgcctgttgcacatcttattgtaaacttggactgtgactagagagttacctgagagtaagtaaattaatgttatcgttgagatcttccagtcattctggatttctactcaacgtttccagaaagcagatctacaaactgtagtcagaaacttaacatgagatttaacacagcgaggaaatttccctcgtcttattccactagattgttcccttaacaacagtttgctgtatgtccgaagtctcacttgggcataggtctcttagtgggtattgtaaaggattctgcagggacatctcggaaacgcaatacacaaggtcttcctgtaaagcctcgctcagaggtgcaagcttaactcagtgtctgggcacatgagcagctgctgcttgtgctctccgctcgtcccagcctggcctgactgttgtttttcattcctggagcatgaatcagtgcaccattctgatgctattcctggaagtgatgcaggacttgcatttttctacaaagtagttttgtctatttgaattcagggaaaacttggtccccgccaacatatgaccatacctctcttcattcagtttgtaattgttctattgccttgcaaatactaaactttacaaacagtatcagcactgtggttccttcacgtttttagaaattaacctagaattaaaataagttcagatgaattcatctaagatcattcttgatttttttaaatcctacacataaattgaagctttatggtgttgaagtaatccaacaccttagttacatttcatttttgctaaactattcaagttgcaaccatttcctaacacaaatggaggtcagtggtgcagactctgcagtcacaacagcgtccagcagccacacagctgcgctgtcttcacactccactcctgacacaggagcagccgtgtctaccctcttacatggtcctgatctacaatatttttctctcccctaaaaattgtagatttcccttttctttccatgactcctttatcttaggctgctcctttagtaactgatgaatgcactttgaccttctctgtaggtcatttaccttggcttagcattagactgtgaggatggttgctgcccagactttatgggcagcaagatgaaacctcagccaggtgagtccctattgtagccaaatcccaaaattagccttatttctctaatggggaccttgaaatgtgttggtggcatagcataaagccaagaacaccaagtgtgacaaacccctgtcccataggaaagaaagtgtttctgtgtccctagctgctcatcctgttctcatcctgggacagtttgaactcgtgcagctgtgctccttaacactgccatcctcagcagagacgtgacagacgggttgcctcatgaagaagtgatcagtgaagggagagctcggctcctccccagccctctttttacccttataccacaagaaatacatgtcatctctagaagccctagttctttccaaagtaggaaatctctgcctttttgttggtagggttaaaaaaaaatgtatatgctaattgctttgtcttacagagcgaatgtctgccaactatccattcactacataggcctgaactttggtaataaatggctataaatattaagccttctacaaagacttcctattgaatccaattcttgtactaaaacatagttatctaccatattcactagagatttatgagattaaattaagagataatgtaagaaaatagactttgttgattctgcataatgcttcatgattcatttagggacctagaaatattatgtgaaaatgtataaatatcatccaaaaggctttctgccctatatttttaaaatacagaagttatatttgaagtagtcctggccctagttctatagggcttggctatttaatatttttatggaagaaacgtttagttctggaaaaggtaaatgcttgtatatatttttgcagccctggagtctcccaactccatttcttcctttaatttaattgatcacatgtatatgtcttccctgctgtgttagaaaaacgggggctggatatcccaggagtcagagcgtatataagacaatgcacctaaacagcaggcacattgaccagatgctctcaaattttggtccaaaatgagtatttgggaatagatttattgtgaatgttt

SEQ ID NO: 27336 - DNA, 4024 bp, Mus musculus
accagcctgatctgccagacagaatcagagtaggacttgtattggggggtcagggttttttccctgttctgcctagttacctgtgccaggtgcttaatcacaactctaattgtgattaaaggaagaatttgtacccctcagtggtctgccccgcagaaatagggtgtgggatgccaaccctgatctcttccctctctgacagagttgtactctgtttctgcagagagctggcgcctgccctccgggaacccagggccttgcaccacgcagctgctcctatgcccgctcgagctgtgctgctggagaaggctggccaggtgcggaggctgcagagagcccgacagcgggctgagcgccacacattgagtgctaaagtgttgcaacggcagaatcgcgcccgggagagccgttcgcgccggcccaagcaccagggcagctttatttaccagccgtgccagcgccagttcaactactgagcgcccctgctgcaccgcgaatccctcgccgactcctggtcccatccgcctcctctgcagcagccagtgtgctgctcgagggtgttggggggtccacccgcctccatctggatactacaacctccctccttcctaagttttgaggtggggtgatggccctctacttccctgtttatagtctaactcacctattaacctctctcatcctgggtcatcctccctcctttctcagtgtctgattctccaccctcacactccccacacccactctcccatgcttctttttaggacctctattcttgtctctcgccccttcaccttttccctcttagcccacccgattcctaagaccctgacttggcaccttctccgcttcagctcctactttccaagacttactcttctgtttgggatcgctcccactcttgttccctttttttcattcctggcaattccctcccaatcctgcaggtgcaacctgccaggcctgggccattgtcctcatcctgtagtcagggatcaggcatgggttttgatttcagttttccccctttctctgccctgggggctgggctccttattgctgcttaggcctagaaagtttaagtatgtggaagaggagagtgagttgtaagttagataaggtgaagggaatggagggaaacaggcagcctagtgggggccgcagatggggacaggtgggttgagaagtagcagggagcagggcatcttgggagctggtattgtgcttggtcagagtagctaagccctggtcttaggcctgagcctggagtctgcccccatttccttttcctataatcctgccttccagggttcccccctccctgaaatttgtccttcaggagtaacccctacccacccctgtccctgtgagtctggagtccgaagggcttgtaccttgtcaccttaccttgtcatgccaccccaggagtagaagctgggtaaggccccatcatcctgaccatctctgttcatatgcccaaggtgctagaattagcttaggagagatgcaggccagaggatttccaggcagggaaaaggaaacacaccccaaggcaagaatgaggaggcatgatgctaaggaggacaactatgaggtaaagccatccccagactgacagctctgcctttatcttgcctctggccttatatttcatactttgttcaatatggctggataataaacactcctgggtagaggaggccaggagcctcactgtcccaattcccaaatttttcttacagagattcagggccttcaagagtcttcttaatgttctcccacagggctctttctgagtgccctataatccctcccccctttctaattcaatatctggagtaaggaattcttgggtagggcacagggatggggttgccagcttcttctttcttgtggtggggctcagacaccagcaacagcctcttgggatgccccaagttgtttccggttctttctagctgtcctttttaaagtgtgtgctcttccttccttaaaacctttagatgtcctgttacactaacacaggtcttcccttccctccaaccccaggtttcaggtctcagagccaagccagggttggagaaaactgcattcctacgagggtaaaagtagctgccctctttgatcctttcttactaggcttcatgtgggatgggagaggatgtccccaggatggggacagaggaagccctgctagggtctcctagcccagtaagccaaatgggaactataagcagatcaaaattttacactagcttattagagccctattagttcctgtcccaagttcttcagttacaacctagtagtatacttactcttccaactgtcctaaggtcacttcccagccagcttaggatcttcagcatttttaagagctgaagctccctcttgcccttcttgtctactcctcactgccagttggggcctaggcttagtcctgggcaaatgtccatgatcttgctgctgtaggaagcttgatagggcatttggctcaaatttcagaaggcctcgctcctgacctaatttctcaaagctccggtagttctagacccctccaatttctcatctggttgcaaggcttatttttcttttgtactttcctatagatgctatagcatttgagtgtggcaatatttttgttgtgtatagatgtctaagaaccaacactactcagtctcctgctagtctgactcctgaagcatcagaccctgtcatactgtattgactgtgtatgtgcctttcaccttgagcatgcttcaggaatttttttttttcttaaaccacagaacttgaatacacaagggaaccagaattcacaaagtcctatgcaaccctagacaggaggaggttagagagtctgtcttgatttgtggtttcagagaccctagagaaatttgtaccagtttgtattaaagtcagtactaccagcactttgccaaaactacggatgtcagagggacctgtttctagagtgagtcccaattacatcaaagggcaacctgcgctttctccaataagtctgagtggttctcttgagctggtgtcactttctaacctttgccagtctagccccagcagggcaccgtgtgtgtgagtgtggtttggtgctgttttggagtgtgcctgccccccagcctggaaccctctgatcaacttgctgggacctataacgtcttaggtgcaacaaggaccctaccagagctcctgggtggctttgtgtgaggggactgaacgcagacaaaccacagcctgcttctaataccttctttccctaccacctagttccaaatggaaccaacaagttgagtgcatctctgttgggtgttttgtgttgagactggctgaagtgaagaatctttgactgaccatgttgtgatgtgtcgacagactcaaggacacaaccacctcgacctggtcatgtggcatgcctgtgtatgtgtgtaacaggattctgaatgttaggttgtaatgctattcctgtatgggagaaaaaataatataaacaaataaaaatctatttaaagcacattatgctttctgcctcagctgagctaaagtatgagaaacactataatttcaagtatcatcaaggcagaggatactattattaggctaatcttcgttctcctttgtcatataagaaagcaagaggacaaatagttcactagaaaaggacaatatagggtctgactcataaatatttttagaagatccttataaggcacatatatgaagatacctggatacagaaatgagaaagcacagcaaacactggtccactctttagtcccaagcactgggctatgacaaggtccaagagctacctagttaactgtagaactgtgttaagtgcatctcctgatggagcagcacaagcattgcgtgggaggaagcaccatctgtgttgctgacagcctctcacctctaaaacctttgatggaaggctggttctactttctgagacaaagtccaacctggcctcgaactctttctgtagccgagggtgaccttgaacttgtga

SEQ ID NO: 27337 - DNA, 1176 bp, Mus musculus
actcatcttcaataattcaggttatgaaaggatcacagccaagcacaattcctgcaaccccattgacaaccaacagtggcctgatgcctccctctgtcgcagttgttggacctttacacatacctcagaacataaaattttcttcagctcctgtaacacctaatgtcccctccagtagtcctgctccaaatatacagacaggtcggccattggtccttagctcacgagccactcctgttcagctgccttcccctccttgtacatcctctccagttgtcgctcctaatccttctgtccagcaagtaaaagaattaaatccagatgaggctagtcctcagacgaacacctcagcagaccagagcactctgcctccttcacagccaaccacagtagtttctccccttttgaccaatagtccaggctcctctgccaatcgtcgaagcccagtctcatccagtaagggcaaaggaaaagtggacaaaattggccagattttgctgaccaaggcttgtaagaaagttacaggctctctggagaaaggggaagaacaatatggtgcagatggagagactgaaggcccagggctagagatcacaactcctgggctaatgggaacagagcagtgctccacagagctggacagtaaaaccccaacaccctcagcacccactctactaaaaatgacctctagccccatgggcccaagctccacctcaacaggacccatcttacctggcggtgctcttcccaccagtgtacgctcaatagtaaccacattggtaccctctgagctcatctccacagcgccaaccacaaaaggcaatcatggtggcgtaacatctgagccacttgcaggtggcctagtggaggagaaggtgggatcccatccagagcttctacccagcataggtatgtacttgagcttggcatcagctcctcatgtcaggtttttgctggcctgtcccacaagagagaaagcacagcccttttctacttaaaagaagaaaaatggcagttgtagatttacttactgaaagtacattgaaaaatatgcttttaaatgccatgttcagtttatattcattaacatggttctttcctggcttctgaactgattcatgtttcattttcatgtgtatatatgttcctcagttttaaaaagcattttcatacata

SEQ ID NO: 27338 - DNA, 1189 bp, Mus musculus
ccttaggacctcacaggggcagacaggtggatagcaggtagggccagggctggctcaccccgccatgcactcccaggaaggattcggagctgagtcagctgaacctgcgggtggaggatgagcagctcgtgggggtgcagctgcagaagaagatcaaggagctgcaggtgggcattgtggccgtgggggatgccctgggtggaccaggcctggttcaggggctcatggagtcggtaccatctccttaggctagggccgaggagctggaggaggagctggaggcggagcgagcagcccgcgcccgcgtggaaaagcagcgagccgaggcagcgcgggagctggaggagctgagcgagaggctggaggaggctggcggagcttccgcggggcagcgtgagggttgccgcaagcgtgaggctgagttgggccggctgcggcgggagctggaggaggcagttctgaggcacgaggccactgtggctgccctgcgccgcaagcaggccgatagcgctgcagagctgagcgagcaggtggacagcctgcagcgcatccggcagaaactggaaaaggagaagagcgagctgcgcatggaggtggacgatctgggcgccagcgtggaaactctggcccgtggcaaggtctgcctccttcccgcctcgaaatcagttttgactctacactgaccctatccccccccgaccccccttccccaatgctctggtcacttcatgacaatactccgccgcaatgacctcctgacccctggatgtttaacctgatgtctaacccccagctccgcagcagtcctgacctctaaccccgagtgctcactttcattccttggcttgggttgctctggttcccacccaaacctcagcccttccaacaggagtgtgaccccagctcttgactcctgaattcagacttagcacctgccctaacactcttcttgtcccaattttggacgcccccacccccaccccaaaatcctgacacctgttcccagatctagttcctaatactgactcactgaccctgggatgggtcccgagactcccaatttgtgcccacagtaggaacccagaccctgaacctggaactcgagtctggtctcatacctagtgttctaggtcccagtcccagtctcttgcctggcagcccctggatcccccttggatgcacaaacttg

SEQ ID NO: 27339 - DNA, 1196 bp, Mus musculus
ggaaagagaataccacctacccaccctgttccccctgctgaggtcagccacctggttctgtccttggagccaccagtatcctcagaaaagagcctagacaaagttgcaggtttcatccacctgtatgcttgcttgaaccaagtgggtagtctgagctccaggccaggcctgagtggcaaacagatgagggtggggggcagacccatccactcactcaccctgtcccctgtttgacccagcacatcttatactgcattgtggacagtgagtgcaagtctagggatgtactccagagctactttgatctcctgggagagctgatgaagttcaacgtcgatgcattcaagagattcaataaatatatcaacactgatgcaaaggtagggcttgtccagggctccgtgctgttggctgaagtaccagctgtccgtaagctttggcctgcccatcttcaggggtggtcacacagttggaagagtctgggatctggtgggacagtcaggcttcaagccagaccctaagactattgggctgagaactttggctgttagagcatcttagcaggccactcggtgtcccatctgcggagtagtggagctggggtagaaggttggtggtgccctggccagcagcctgccagtaagcaccatctctgctccagttccaggtgttcctgaaacagatcaacagctcgctagtggactccaacatgctggtgcgctgtgtcactctgtcactggaccgatttgaaaaccaggtggacatgaaaggtgaggaggccaaggtgccagtgcacatggctgcagtctaactgccaggcacctggcctccagccaggaattgtgtgcctgggtcaggaggacagtcttgaccaaactcgatgtgttagtcaacttctccattgtgtcaacttctccactggtttgcttcctctaatgagcaagtatatcatcttagtaaagaaaaagctgccttctagactgactgcttggattgaacagggtcccttcattctgtttttctgcacaggactatagtatgcagctgtggtgggtgtgtcagacctcacctagaatcgtgtgtaataacgcatgtgcacatctgtgcctttttccctaggtctgtggcatcaaacagattgtcacaagtttatgaacacttccaaaagaggacagtgttcctcatggttgtcattg

SEQ ID NO: 27340 - DNA, 1178 bp, Mus musculus
ctgtgaggctgtgctcctcagccctgtaggttgacaacccttccttctatctgagcaccgaatctttcctctgccctcacagccaccatcagaggatgaaagtgctgtccctctgtgccctgggagcaacacccttgtgcaatgactagcctcttagctgcagagtccctgactggaaacatggaggctcccacctctacagtgaagtgtgttggctcccccttcccacttttttgcgatagtctctgatttttaatgattaagcttttagtggagaatgtataagaaaatgattgtccactataagggaaacagtgcaagggagggggaaacacgggattcttggccgtggcattagggtaaggacctgacgactgtgtgtgcacagaaaggtggatgcactggattggaggcctccatgaagggcccagaggaggggttctcaaggcagtgctggggcagcctgagttttcaatgttgtacaagttaatagaacatgcctgaggacagtgctgcctaggggcctctgtctcttatgattctgttttgtgagaacgtctgtggctgaaggcatctgtagttgacagaattataccgagtgtgtgtgtgtgtgtgtgtgtgtgtccgtccctgtcctagctttcatcagactctaaatcagtacttctttgtacctggcctagtggaaatactatgatccctgctgtcatgtagagtacatttgggagaggaagtttaccattagagaaggtcaccagttacagaatgcctgatgtcaaataggcatggtgtgtgggaacaaaagagcacactccgtgaaaggacagttgtcaagtgtcctgaccggctggcggtgctcagtgactattgcagaagcaatctgtgagcagaggcctgaccgggatgaagaggcagcgtgagagagttgagccagaaggctcccacatagagaagccctgtaggaggatatggcgtggtcatgaaaaccagagtggccagatggtgtggcaggtgtgagctgctcagtttgttgtagccacagaggtggcctggctgcacagggcctcaaagacatgatcactccctaggggttcacacaacagggtgtgagaattgggtaagcattttcaataatgacatggtcccagtcctgttttagaaatcactcaaggagctga

SEQ ID NO: 27341 - DNA, 1099 bp, Mus musculus
tgggaattgaacactggtcctctctggaaagcaccagtgctcttaactgctgagccatctctccagccccagtagctgagattttcggcctgtgctgctgtgcctcatcaactgttaagttgatgaagtgttctgcttcgagctgggtgggaggggatagatcattcagttaaatgtctttaaaactgggggctgaggattgacagctacgcactagaaacaagctgtaggccctattacacccagctgcagggagtcccagctgatggcctgtgccatttgtctctgctccactgactccattcttcacctcacagctttgtttctggatggagaagttggctttagtgatggcattgaatccagagcctcgtgtgtacttaatgccactctcaatgcgttacaccactaagtgacagttgcctatagataatcaggtaggggtgagaggggttgagcccctcctgctttgctgttgctatctgcctattggtcctgagggagaatgggcctctgggctctctctacccatagcacaccattggcagtcatgtgcagggctctctctagaaaacagaacacagcagcagtgttgtgcatcaaagatactccactcttcccttctttctacccctcttctgtgttcctgagccttgaagggtgtgacacggatgccacttgatggcattacactcaggcatcgtttgctctcagcatttgcacttagactccctggaaatggagttataggcaagcgttctttttttttttttttcaaaatatttatttatttattatatgtaggtacactgcagctgtcttcagacagacacaccagtcagatctccttaagcatggttgtgagccacaatgtggttgctgggacttgaactcaggaccttcagaagagcagtcgggtacccgctgagccatctcaccagcccctttttttttttttttttaaaaaaacaagcgttcttaatcactaagctctctctttccaccacacccagtgtttgaagaagtatttatattctgtcttgttcataagtaaaagagtagccactgtaagtactcagggatatgtttccttcttttt

SEQ ID NO: 27342 - DNA, 1186 bp, Mus musculus
ttggagccagtcattgctccttcccagctctgccaacctgctccctcaagccttcttattcctgtctgtgctacccaagtaggtgataggttccaccacgctctgtaggtgccttgatgttacatgtgtaactaaagtggaaatggtgcctacaattcgtgcagcaaacagaggattcatattcagaattgataaaaaattcctacaaatcaacctgaaaaagacgtagcctagttaacaaaaggggaaataggtgagccataaataaatgtttggcttcattgaaagtcagaaaatgcagatctttttttgttgcttttgttttttgtttttcaagacagggtttctctgtgtagtcccggctgtcctggaactcattctgtagaccaggctggcctcgaactccagagatccacctgcctctgcctcccaagtgctgggattaaaggcgtgggacaccactgcccagccaggaaatgcagatcttatcctgtgtgtggtgagagcagatcttaatgaatgtggagtgtaaatacttgaatgtgtacatgctgtgtgccagcacctagaggagcactgccccaagggctgaggtcttggtgggctctgtgtgacctgtgcctcagcatacctgtaggtaagtgatctcagaaatgaaaacatgcagccagagagagcctagcagatataatcacctgccatcaggcctgagaaactgcgttcaatctctgggaaacatagtagaggaagagaaccaacaaccgtgagttgccctctgacctccttttgtgctatggcacacacacaccaatatatatacaaacatgatatatacacatgctcaacacacacacacgtacgcacacatgtacacaagccacatacatatacacatacacaaacatatgcacacattcatatacacacaagtatacccaactctctctctctctctctctctctctctctctctctctctctatatatatatatatatatatatatacacacacacacacacacacataattatataaaatgtaattagaaaaaaggttttttggctttttatgtttttgttatgtttgtttgcttgttcttagagactaggtttctccatttggccctggcttatcatggaactcactgtagaccaggctggcctcaaattcagagatctgcctac

SEQ ID NO: 27343 - DNA, 1159 bp, Mus musculus
gcacacagtgagcacctcggtttcagtatcatgaatgattacttcctccaataccagtgatccacttaatccttagagagagcacgtctgtttttcagtctagtatttgtgactttttgtatcagcagtaatgaagagttctggaaaaggaaggcagttttggccttggcctggtctctgagaggcttggtctgggcacatcctgctctcactgacttttccttgctcctgtctcaaacgtggggagttttaggcttgatcttacacaggatatagtcagtctggaaccctggaacaggtggggttccaagtgtggcttttcaaggactgaactagaacaggtctagggtggggccacgtgtaccttgtaaaacagctcctgatatgtaatccattcctctctctgcagcctcacatgagtcaccgtccatgctgccgtgtgggctcctgcctctggactttggctcattttccatgcctgagctagtctgtaccagatgctggcagtggggcatggcagagctcggtagagctgaattgattgcccaacccttcacctgtgccatctcttgacaattgttactggaaagcctgccctgtcatgctggctttcagttcttgtggctcttggatgaaagttctgctatcttgtgccccaccccattaaaggactgcctcccaccatcctcagtgtgctgtgtgtgtgtgtgtgtggcctcagtttgcaacacctccttctacagcagttcctgggttgtggggaagttgggtgggatgacatgcagtgttttccctcaacaggatgggagacctgcagggggtggtggaacacaccagtaatcccggaggcagaggggatctccagttcatagtcagcctggctacacactgagttctagcacagctagggatacataatgagatccctcccacccctcaaagaagagatgaacaagaggaagtagtgctggcttctgggttccatttcaagccagctccagcctctcggccctccctggcctcagaatgagacacccagctcttctccctgccagggcctttgtgaggccataggcactcagctgcagtgcattctggtcctgcctgaatttgaagatggggtagcctccttgggaagccaggccgcctcctgtggctc

SEQ ID NO: 27344 - DNA, 1213 bp, Mus musculus
tagagtgaccagcagctccgcccggctcctgcgcgctcccggaagcgggcctgggaggaggcggaaacggaaagctagttacgggagaagttgttgcagcgtgtagacattggagtcgcttggtgagctgttgggactctgggcggcaaaagtcagttccgggtcgcagggcgagaggacttggggcaggagagccaggagggatccgtccgcacgcccgggcatctgaggggcccgagagggcggggtttgaggaggcgaggctggttgacccggctccggagtggatctgtcggcccagaacccgcagtcgtgctgccccccagcctctctcatggcggtcagagcgtcgttcgagaacaactgtgaggtcggttgttttgccaaactcacaaacgcctactgcctggtggccatcggaggctcagagaacttctataggtgaggcgagagcttctggtcccgagccgccggggcgggaagggaagggaggcggagagcgagaggtctgaaaagagcgacccaccccagtaagcagcgaatccgtgtttctacagtgtgttcgagggtgagctctccgatgccattcccgtggtgcacgcatccatcgccggctgccgaatcatcgggcgcatgtgtgtgggtaaggcgggtggaagacgccgagggacacagcgaagcactctgagtcattagtttcctggagcttacccccagtgatcgggggattcccaggctttcgggcccagtggactttggaatctgacgggtgtgtgggactcgaactgcagatcaagaacactgtctctcagacttgagagtagccggagcgaaataccattaagtgctggctatcattcttggtctcgtttttccttcacagggatactggaaagcatgggttgtcgctcggaactatgtgacttacagagtcccacacctaagggcggaggagaggatttgcatctctctcctgcctctgaatatgaacaagttgcttcttgtttttgagcatcagtttctccctcaggaaataactaaggtcccaggtcaccctgttcagctgcatttaattcttacaatttctttttttgtttgttttttttttgtttttttcgagacagggtttctctgtatggccctggctgtcctggaactcactttgtagaccaggctggccttgaactcagaaatccgcctgcgtctgcctcct

SEQ ID NO: 27345 - DNA, 1167 bp, Mus musculus
cttcatgtttatagagcaaatgctcttacctactgagccatgtccttgcccctgaaactgattcaatgctagactttatttaaacttatattttaatgtgacagcaatatcaaacatgtaatttttttcttactctgtctttgaaatccttggactagccatatttcaagtgctcagtagccataagtagctggtgactactgcactgagcagaaaaattctttgcccacattttaaaattctatagtagtgaacaaatatcttccctggctgaatggagaattcagatttgaccgtcctctaacagccacgtgggaggccttccacgtctgagggaagcatctgaggtagcctcatctgtgcagtgcttacactatcatatgcactgtgcaagccttttccaaactgcacacttgagatggacttttttttacagtgcctgtgtcataggtgtcttaaagctgtagctttaatatagtgtggatattaacgacaataaggtcactcctgcatttctgattcgttgtgctgtgctaaaatccctcctgtgtgaactgtgtgaattcatggaacatgtggttacccagcgactgttttgcttccactcaggatgtgtctagtccgaatgaagcaggaaggccggactgggaagtacatgtgccggatcatagttcatttcatgtgggaagatgtggagcagcgcggccgcgtcatgggggtgagtgcttccccaggtgctgccacggcagaatggctgagccaagcctggggttctttcagctttaggatagatttgcctttggaattctgtgaaatgttgcctaacgccagagaggcggctcagctatagtcacctttttttgcctcttggaagcttgacataccacggatactttatgggtttgtgcacattattgtggtttgtcggtatgaggacatcttgtatacagaagtggatagaattctggtgatgcggaggacggagtggggagccagatagtaatctagctgaaggacactgcctttgacattgcttcaatatttgaattagttccccttttacattagttctttgattggtcggttggttggttttgattttctttagacatggattcatgtaccttatgaattcctgattctcctgcctccatctaagtgctaggg

SEQ ID NO: 27346 - DNA, 1206 bp, Mus musculus
ggggacctaagggctgagtctcgggagcacgagaaggctgtgctggcccttcaacaacggtgtgctgagcaggcccaggaacatgaggcagaagccaggaccctgcaggacagctggctgcaggcccaggccactctcacagaacaagaacaagagctagcggcactgcgagcggaaaaccagtattcccgccgacaggaagaggctgcagttagccaggcagaggcgctgcaggaggccctcagcaaagcccaggctgccctgcaggagaaagagcagagtctgcttgaacaggctgagttgagccacaccctggaggccagcactgccgccttgcaagctaccctggacacctgccaggcaagtgcccggcagctggaggaggccctgaggattcgggaaggtgagatccaggcccaggctctccaacaccacgaggtcacgcagcacctccagcaggaactttgccagaagaaagaagagctgaggcagctactagagaaggctggggcccggaggagtcaagaaaatggaatccaagagaagcaaagtctggagcaagagagacaagaggaaacaaggaggctccttgagagcctaaaggagctacagctgactgtagcccaaagggaagaagagattctgatgctgagggaggcctcgtccccacgccacagagccctcccagccgagaagccagctctgcaaccgctcccagcacaacaggagttagagcggctgcagactgccctaaggcaaacagaggccagggagattgaatggagggagaaggctcaggacctggctctgtccctggcccaaagcaaggccagcatcagcagtctgcaggagataaccatgttcctacaagcctctgttctagagcgggaatcagaacaacaaagactacaggtgagtcgccatgtcggggagggaggacagggaacagagccattggctgagctcaagggctgcctgcctgtggtacctcagagagtgagaaaacagagaccgtgagtaccatacctcagagctagcagaggagaagagcaactatagtcagcttcgtccacgcctgatagaggaactccagtgtgctgtgagcattcccaggcctccaagagtgggcacaaaactgtttcctggtaaaagtgctgtttaagttaggtggaagggatgggtagaaaatcggccaggtaaagtggg

SEQ ID NO: 27347 - DNA, 1184 bp, Mus musculus
agctgaagagggattccgtgcgtgcatcccgggcaggatcactggaggccagagaaactatgacttcatcccccacacagcaggtttccctgactttctttttgcccttacttcgccttatccccaccctctgtctcgtatataacagcactcttctatatagacacgcccctcctggcttgattctgctctagtctgcccttacttcagaagggggtcctacttacctatgtaagtgtgttctcagggctagtgggcctgcattcttagttcagatccactcgctcccagacaagtgcctcaggttcaccttgtgtcagccagaatccctggtacccatgggttgtgtcgcttaccagctcttggcacacccaggagtgggtcacagctttgcagctctcagagcccttagttctgagtttacagttagggttcttgatatctcctggtatggaggcctgttctaagggaaggtgtttggagaggtgtttactcctcttagctgtcactgccttaggtcagcatgggagggagggactgctcctggccctgaacatctccagcttcaccccattccccaagggcagacactgtcttcccctttagatctctggctcatagcccaaggctgtcacaaaacagatccattgtgaacccttatgttaaatataaaaattcctcatagaggatattgcccatgtgctgctgtgggtcctcctcagcctcccctagccctggagccatgccccattgagcgtcagtctgagctcaggtacttctggccctcagatgttgcctagagcccaggagtgggatgacaagttcacgttgcctgcctggtggatagaccctggaagcctcgctggccttggagtgctgtggctactccagaccaggatagcccagttaacagggaccatatttgttttcctaggatgggagaggcagtcagaggggttcctcggacagcgtgcttgtggttgagcttcagagagaggtaggttctggaaggatccacttcctattctcctttccccgctcactattcaggcaacaaggtttagggtctgctacatgcttggccctgtgcatttccagcgggagaagggaagtagctttggcatccagagaacgtccatctttctgggaggcaaaaagtgctacagatccaactccacctgaag

SEQ ID NO: 27348 - DNA, 1120 bp, Mus musculus
acattgcacggtccgtgcagaccagccgtgagctagcaggcctgcatcacagcctgtctcactccctcctcaccgtggcccaggcccctgaggccactgttctggaggctgagacccgaaagctggatgagtctctgaatcagagtctgacatccccagggccatgtttgctacatcccagtctggacactactcaaaatacccacaggtagtagccataggcagggcaggacacaggcgagtcaggtgggacacacattggatgactgcagagaggccaaacccccccccccccccacgacccagctacaagtttgccaaaggcgagatttacctgttactcaacctgggagaccctagccagctgacagcccctggaagaaaacgagaaccctccaggctggggaaggtcccaggacacatgggaatgaggcaaaatcacatttgcttgctaacctgctacccaagaagtgccttgccctgaccgtggggcatctgttgtcttcccgccggatgaagcaaccacagtctacactaagcctgaagacctgacagcatatgagtattctgtcctgggcaggagcatcctgaatgtatcaggtacaggagtgtccatggcctgtttgtcttcagtgtctccctcatcttcccttcgacaataaatcctaggcctttgcgttagtccttggctgctgtctctgcttatgtagatgcttatgaggaagcagggcttcaagggcagtaaggaggattcactgattcttacatggtggcatgaacataccacacggtatggtgtctaactgggaaggttaattagaaaatcccctctgggtgatgatggtgcacacctttagtcccagcactcggagtggcagaagcaggatctccgagtttgaggccagcctggtctacagagtgagttccaggacacaaagaaaccctgtcttggaaaaccaaggaagaaaaacaaaaagcaaagaaaagcccgggccaccccaaagtgtgactgacaagacccacataacaagttttgtgagatggttcagcaagtgaaggcacttcctgccaagcctgatgatctgagttctgtccctagtcccacaagataggtgagtaa

SEQ ID NO: 27349 - DNA, 1167 bp, Mus musculus
aggggctgaggggtgggatataggccgttccaaatctcgctctcgccctgcagtgaccatcgtcagtggccttctcatgctcctgcttttcctatcggagttgcagtattatctcactacggaggtgaggggcgtggcctagagcgtgggcggggcctggcattctaagggcaggacccttaaaggtgggagaggggaggagaggcgaggagaggcataggggcgaatctgactgaggtagacatgctctaggtgcatcctgagctctacgtggacaagtctcggggggataaactgaagatcaacatcgatgttcttttcccgcacatgccttgtgcctgtgagtacccgattgtgagtggggagttggactcctggacgtagggtgggcttccagatttacacctctggccttagatcccagagtgaatgccaggccatcctcattccccgagtccatttcttcctcaagatacatctttcccatcaaagctcagctctccgggtccctggtgtcgtagcgccttagcttgcctctctgtttccagacttgagcatcgatgccatggacgtggccggggagcagcagctggatgtggaacacaacctgttcaagaaacgactagacaaggatggcgtccccgtgagctcagaggctgaacggcacggtaaccaggggagggggacaggtctccgatcctacagctggacatgcctgccttccacacatgggccgttgcaggctcagtgacaccgtagacagaagtcagctggcttgcttagggttctacaactattaaaaatcaagagtcagttgaatccatgcttctggtattggaacattgagtagaataccttaggggctggagagagggcccagtggttaagagcaagacactttgctcggttatcgtttctcaagcttgaacatgggtcttccttaggtaaaggaagtttgcttgtccacctcattggctagagtactgtcccccgttgcagtgcgagtatcctaagattaagagcttaaattctcgagtagagttgcctgggttcggatctagcattgtcttgcagtttgtgagcatgatgcagggctggatgcaatacagatgggtctcagcttacaacactctgacttggagatggtttgaaagcacgcctgtacaa

SEQ ID NO: 27350 - DNA, 2145 bp, Mus musculus
gcctcaaagctgcccatgtccgtgatcatcgtgggtgtgggcggtgcggattttgaggtcatggaacagctggatgcagatggtggccctctccgcacgcgctctggagaagcagcggcccgagacatagtgcagttcgtgccttatcgacgatttcagaatgtgagtggacaggaggtggcagggtagtatgggtttgagggccaggagataaagccttttcaatcagtgtctgggaaaggagtaaaccagggaaacttacaggccccccctccctgatctcgcctctcttctggcaggctccccgggagacactcgcacagaccgtactcgccgaagtgcccactcagatggtttcctacttcagagcccaaggctgggccccgttaaaggcacctccaaccccaggcaagggccccgcacaggccccacaggcataggcacccgtggaggagtaggctccaatcagtcctcagcctgcagcctgctccatcctcagggcagggaccaagcgtgcacattctttccatttcatagttgatacttttatatgtactgctgctgctgctctttgacattgcctgcctgcctggcaccttttcattcaggaaagaaagactagtaaagatatcactcctttcaaaattatagactgctagagagagccacacttgctttgaccttgggcttgttgagtagatccctttggtctaataaccccattcaaggattatgtttatgtctattcgcttcagtcacatactttgaaaagacaaagtttgaataattaagtaaacttgtggttgtcctttcctccggggcgagctgaactggggctgactatgaacacgatggaaggtgctacagtgtaagaggtagcaaatgagagaagacaatgttttagagtaagggctgttagacttcctgtgctagctctgtccctctgtttcttggggacatttgtgtagcccaggctggcctgcagtttaccatcctgcggcaaccttagagatgctagaattacaggtgtatgctaccgtgcctggagtatagtcttgatttttttacttttttaatatatgctctcatatagcccaggctggccctacattttgttgccaaggataacttgaattcctgctccttcctatttgagcttcccaaatgctaggattataagcatgcctcaacagttgccctttaccagctcaacagtttgatagcttttttttaatataatgaatgatttaatgcatgttcatttggggaaaactttataggacacatcctaaccactttgcccagactgccttttacattttacaactcaaggtcctggagtagctggaactacagttcagtgtctggtttagcaaaactggttttgtttgcagactggggggaggggagctcctaaatgcaggtatcagtattatataaaaatagaaaatgggaacaaagattggtggctcatggttataatcccaacactcagaagtctgaggcaggagggttgctctgagtttgatgtgaatttgaggtacacgaggagtttcaggtcagacagaacaactttaaaagcaaacatgtgtgctgtttgtatctggtttgcatttatattgggtgccttatccaccagaacttactgcctcctctttttcattatctgtccttttgtaagaatataccagagtttagcagttcccttcccaacagagattcgatttactgtgattacacacatttttgaagagttggtttttcagtatggaaatgagagattgcaggtgatatttgcagtgttagcagttattacaggctgccttctgtagaggggtgatctgacctctgataacctgtgggtcaccttccttccccagatctcatttctagtttccatttatttctctatattatttcatacacatttccttctcagtaacctgttcacaaactgtatgttagagcttttattttgttcttgacatgttgaaagtatttttccctcatctgttactgtttcatgtttttatattccatatgtaaaattatttttatatatgttacccttttaaaaaatatatctatgtatcaataaaattaatatatccacctcctcagtggccgctcttgttgtgtttggtg

SEQ ID NO: 27351 - DNA, 1127 bp, Mus musculus
tgttaatttggaggctttttggtgcagttgtttgatcatgagcctgttcacaaaaattctttatgcagagtcttaagtatcaatgtcagaagagagaattgaggtcactccgtgcattttatattcttttccttttggcaatcaggatactaagatagaatcttcggttggctaaatgtcctttcccttaaaagcatttggtttttcacatcttgttcactgacaccttacggctctttttctaaatttaagatgcttgaaagctgtttcacatttcacatgacatacagaattggagattgatgaataataacgggaaataaatagtatctttcacataatgtagctctggtttcaaacaccaatatcgagaagtctgcatttatttttaaaagaagcatttctcacatacattatatatattatatatatatacatgtatgtatgcgtgtatacacatgcacacacaactgtatgtatgtatgtctatgtagtgccttttttgtgttctgagggagtggtaccctgaggtctcgtcgtgtagttttagagttaagagtggcaacagtctcgtgtgtggaaagtgtggaaagcctctccaatactgcgatggtcttggaggagagacagtatggtggtctgttcagggaaagggttgtgcaggctttgaaaagtggctgcattgtgaatcacttgataactcacaaacacaatttgcttgaaagatagctactgcctcaaaaagcaatatgtttatatgtgatgttctttgttaaggaatcatttctcgtttgaagacatagtgtgaacgcttcagaactgttttgggcttcttattccaactgcaggtttattttccccattggaaactgactatattttagaaaaaatgattgttggaaggtgaaaattttttatcctttctcacaatttattttggttgtatcttcgtacatgcttattaaatatttcatacactcaattgcaactattttgttatttctacatcttagataaatgctaaaaagaaaaacttggttctcactgttcattaaataaattaagaaaatagtgttggtatagaaatcagagagaattgtgttccgcatcccttgaatcacaacaga

SEQ ID NO: 27352 - DNA, 1423 bp, Mus musculus
ccaaataatataagtgggccatcaggatttggggggatccctcagaactttggaaatggcccaggtagtttaaatgctcctcctggttttggaagtggaccccctggtcttggaagtgttcctgggcatttgagtgggcctccagcctttgggcctgggcctgggcctggcccaatccatattgggggtccccctggctttggagctagctctggaaaaccaggacctacaataattaaggtgcagaacatgccttttactgtatctattgatgaaattttagatttcttttatggttatcaagtaattccaggttcagtatgtttaaaatacaatgaaaaaggtatgcctacaggtgaagccatggtggcctttgaatctcgggatgaagccacagctgctgtcattgacttaaatgataggcctataggttcaagaaaggtaaaacttgttttagggtagccgttcacatcagttccttatggggtatatctttattttgctgtgattaatgcatccagattgttttcctagtagttccaggttagaacctgtggattgtttcaattgcagatagattggtttctataacacagagcattggttggctgttttacaactcacagaataaacattgcaatttgttacagtaaagctatctggagagaacacaaaaataattttggcatacagtagagaccatttgtaattctcgatgatcaaggaatctagattggttttcttttataccacatgggatgaagaaaattgaaacgtataaatagaaacgtgagtagagctcgtggagggggctcatgccagtgatggcattggaagttggctacttttgccatttgttttaaagctggacatacttgctttgttatagggtcaaagctttgtctgaaaccttcattttcttttaaaattgaataaagtctctgtatccagattcattgtatgtacctttattgcttctggagggttcttgctgtatagacggccctgcttcagtgttgctgcttcatcttcctaattgaccacttgtaatcagtacaccattttgttagtttttcattaatttctaatataaaaactccacacttgtggtttgtgctaaataaccctgaactttgtgattaatgtcacacttatgattgtgtgaaatgactttgaccataaaaataaactatggagtcctctactgacattatttggtttgaccgccaagttttatttagtttagggagtttaaaatttgttcatattgtttggatgacaatgaaaatcagaaaccacttagtaatcagtgtttaggtatttgatttgaaatcctttactgtgatggactaatttagcaaattgtttttgtcccaatttatgtgaattttggaacaaagagattcataggaaagagcattgt

SEQ ID NO: 27353 - DNA, 1485 bp, Mus musculus
accgctcctccaagcatggggacttcttttgggagcccaacgttcagttcaaccattccaagtacagcttctccaatgaacacggtcccaccgccaccgattcctccaatcccagcgatgccatctttgccaccgctgccatccattcccccaataccagttcctcctccggtaccaacattgcctcctgtgccacctgttcctcccattcccccagtcccttcggtgccacctatgaccacactgcctcctatgtcaggcatgccacccttgaatccaccacctgtggcacctttacctgctggaatgaatggctctggagcacctatcggtctgaacaataatatgaatcctgtgtttctgggtccattaaatcctgttaactctatacagatgaattctcaaagcagcgtgaagtctcttcccatcaaccctgatgatctgtatgtgagtgtgcatggaatgcccttttctgcaatggaaaatgatgtcagagagtttttccatgggctccgagtcgatgcagtgcatttgttaaaagatcatgtaggtcgaaataatgggaatggattggttaagtttctctcccctcaagatacatttgaagctttgaaacggaacagaatgctgatgattcaacgctatgtggaagtcagtcctgccacagagagacagtgggtagctgctggaggtcatatcacttttaagcaaagtatggggccttctggacaagcccaccctcctccacagacacttccaaggtcaaaatcgcccagtgggcagaaaaggtcaagatcaagatcaccacatgaggctggcttttgtgtttacttaaaagggctaccatttgaagcagaaaacaaacatgtcattgatttttttaagaagttggatattgtggaagatagtatttatatagcttatggacccaatgggaaagcaactggtgaaggctttgtagaatttaggaatgatgctgactataaggctgctctctgtcgtcataaacaatacatgggcaatcgctttattcaagttcatccaataactaagaaaggtatgcttgaaaagatagatatgattcgaaaacgacttcagaacttcagctatgaccagagggaactggtgttaaatccagagggggaagtcagttctgccaaagtctgtgcccatataacaaacattccattcagcatcaccaagatggatgttcttcagttcctagaaggaatcccagtggatgagagtgctgtgcatgttcttgttgataacaatgggcaaggtctagggcaagcattggttcagtttaaaactgaagatgacgcacataaatctgaacacttacaccgtaaaaagctgaatgggagagaagcttttgttcatatagttaccctagaagatatgagagagattgagaaaaatcccccagcccaaggaaaaaagggtctaaagatatctgttccaggtaatcctgcagtaccagtg

SEQ ID NO: 27354 - DNA, 1228 bp, Mus musculus
ggcatcctttcaggctaaagcaataaatagtcttcctgatgctagaaattaggaaaggcctgggactgagcaggacttacagaagctagaagaggcttgtttgtctcttgtattggggttcaccagggcaaaaggcagagaagcatcaaggacagaagggaaatgattgatcagggcctgagaggcagtgttacctgctgcttcctgtctaaccctcactcactcagtgcctcttctctttggcagtcctctctgggagatggtccaggatggcattgacctcaagagcatcaagtggacccagcattagaggagtgggctgtgactttgtgctggcctggctgttctggcctcactgatctgtgcacagccaggaacctcactgcctgacgtggtccatgctcaaagcagatgggaagctctgcagtgacttcaccacagaatgttctctagtgaaagctgaggctagctttcttagcctcggctcctgtgtaggcatgtattccgtaatcttcctcaggagttcttctcttgcctggcgtggccattcttatctgagggcctggaggcactgccttgttactgccacagggaggacctacctgtgcagagatggaagaactggaagaaggctctaggttcaaagactgcttctctgtgaatcattactctagctgctcagctgaactggcgccattagggactggcataaacaaactttattttaaccttttttgtggctttgaaagacatctctttgtatcgacttcagctgaagaacaccaagttgtattaaagtcttgtttcctttggggtctcatcttctttcctctcttttgacttaatgtaagtagaaatatccatgaccccaatcattattctaataatttacttaattcattaaacttaattcaataaattcccatttcctgtcctgatccttgaatttttgagcatctggagagaactctgctggagaactgtagaccttccttccacctgcctttctcagacaactcagtccacttgcttttcatccaacagtttaaaggatttccaggacacacatttcattctgggtattgggatgcactggctcataggaccaggaaaggcacactgtcctcagtgagcttttatattagcggagagatagaaactcagaaatagagactgtcatatgtgggacagtgctacgtgagaaaggagagtgtttcaaggcaatagt

SEQ ID NO: 27355 - DNA, 1563 bp, Mus musculus
tttaattaatttttcttttgataattttagggcaatgtgtatgtgaagtgcccatctattgctgcggctattgctgctgtcaatgcattgcatggcagatggtttgctggtgagtaactgctacgaagactttatgttgaaacaccaagtgattaacattgagtaaaaactgcttacccaacttttttctttttgtcaacaggtaaaatgataacagcagcgtatgtacctcttccaacttaccacaacctctttcctgattctatgacagcaacacaactactggttccaagtagacgatgaaggaagatacagtcccttatgtatatagcttttttttctcttgagaattcatcttgagttatcttttatttagataaaataaagaggcaagggtctactgtcatttgtatacaactcctgttaccttgaaaaataaaaatgttaacaggaatgcagtgtgctcattatccctaactagcaaatcctactttatgcaaagctgttctcttgttctgctgttttaaatgtccatgtagaaaatgacattaaggatctatagaatagctctaggggaacaaatgtgctttctgtataaaggcagacaggtcacgttttaatgtttcagaaacctaactttttacacagcagttacaattcacattcatgtatttggctcatggttcagcaaaggtttccagaatccacatttagtgtgtgaaaagtctaagtggctgtatggctgcttggcatttgatcttgattatttggcaagaatgggatttcaaaataatatttctcgatggtaattttttcaattaatgtctctgtaaaagtttctttgtaaatactgtatgttttagtgtgtcttgagattccaaacaaaatgatccctgcatttcctcaaggtggctgacgtaacagattgagtaagcagtcttgggcaagagatgggaaatgcagaaaaaggttttgtctggttgcatataatctttgctctttttaagctctgtgagctctgaaatatatttttgggttacttcagtgtgtttgacaagacagcttgatatttctatcaaacaaatgactttcatattgcaacaatctttgtaagaaccactcaaataaaattctctgaaaaaggccacaagaaaattttcgtttttcaaatgttttcatgttacaaacttaagcaaaggctatcacaatatcctttgggtttctttccttctttttttcaagttagtgtttcagcattacatgcctcagatctaccaaagactgaatatgttactctcctaacctctgggctgctcggaaaggggagctgtgtgtgtcagcatacatgcctagactaagcttatttcattcttagtgatagacatcactgttggttgtctaataccactactaccaagtatgtcctctccactgaagaaaacaagttgccccttgaaaatgctctcatccttctctacgtgtttatcattgtctttagctctatagtttacaaagtcacaaaaaaatacataagcactaccattcctaactcgacaaaaatag

SEQ ID NO: 27356 - DNA, 1191 bp, Mus musculus
gtccttttccaatctggacactaaaatttttttataaattcaggcttctagacatattgttacactttaaatcccagaaattgggtagttggaactcaaggccagctgcttcttcacagtgagttccatgcaaaaagttacaaaatgacacttggcctaaaaattaaaaaaagcttcaaagttcccatgttcattaagatgtccttcataaaaatatggtttaagccaggtgtggtgatgcacacctttaatcccagcacttgggaggcagaggcaggtagatttctgagttcgaggtcagcctggtctacaaagtgagttccaggacagccagagctacacagagaaaccctgtctcaaaaaaacaaatcaaaaaagtaataatgatctaattttatacatatattgtaattttttcaggtattttttgcactttccacatattaataagttaaaaattctgttgtctattctagttttctgactcagaatgtgccaaaaaggctttggaacaactgaatggatttgagttagctgggagaccaatgaaagttggtcacgttactgaacgaactgatgcttcgagtgctagttcatttttggacagtgacgaactagaaaggactggaattgacttgggaacaactggacgtcttcagttaatggcaagacttgcggagggtgagtcttcaatagagctattgatttatcatagtggtagaaaggaaatttagctatgcaaactacaaaatggaaaaaaaatactgttatatttttggtattactgtttatgtatacatagttatctttaccattgtcttattgaaacaaatgtcctcattttggtatatggaaacactatagattttttttttgctttatatatcaccagactccttaagaagtgagttgtgattattttccttggcttttacaatttttttagagaaagttactattatttcctttattttgtgtgtatttatatttattttgatggtatatgaatggcacaacatggattggggaggtcagagcactacttgaggggaaaatgttttatccttataccatacatgggtactaaagagtactacaggttatcatctttggtagtaggaaggtaggtctgttagtgcagagacatatcgcagacatcccttgagtttaccacatgaattcccagtattt

SEQ ID NO: 27357 - DNA, 1163 bp, Mus musculus
gctacaggtctgggataagtcatgatttttctaagttctgttctttcctctttatagttgaggtagaaaagaagcagcataaacagtgttagaattgttggggagtccatgaacttgatcttagcaacacacccaaaacctgtaactagtataatttgtgtttttggttttttttttatttttagctccggaccaaaatttaacagtgccatccgaggaaagattggattgcctcatagcatcaaattaaggtttttaaacatacttctgaattggttaaattatatttcaaggaactaatgtgatttttttggggtaacttgtgaaactttttatccttgcagcagaagacgttcccgaagcaaaagtccatttaggaaagacaagagccctgtgaggtaactgttagctttttttcttttgcttttttaaaatttttttctagtaaagttctacaaaccttattttcttgttttttgtttttgtttgtttggtttttgttaaatttttttgtttgtttatttttgagacagggtttctctgtgtgtagctctgactgtcctggaactcactctgtagaccatctggcctccatgtcagaaatctgcctgcctctgttccccaagtgctgggattaaaggtgttcaaaaacattgaccagctaaatcctgataattttaaatagacttcatttcatatagaatcaataacatgaaatattctcattgtaaaataacaatcacaagttttactgcttgaaactgtttcatgaaaagtacatttcatcttatgtatcttaccaaattgaatggttatatctgtttatgcctcagtaagcttccaactgtataatgaataattttgcttcagagcacaattttgtcttctggtttacttcactaaccaggttgaccttaactagaatatgttaaatttattttcattaatctatgtatatgaggacactgaagctatcttcatgcacacctgaagaaagcatcagatccaattacagatggttgtgagccaccttgttgttgctgggaattgagctcaagatccctggaagagcagtcagcgctcttaacctaataagccatctctccagcccaatgaatttatttttttaggcagggtataccttcatagtcataggagacttg

SEQ ID NO: 27358 - DNA, 1150 bp, Mus musculus
aactccagaaggcctcatacagatttatttgtaatcatccaggagagatttgttttcaaaatttaaggtcccaaagaagtaatacaatttggatttttatttcttggggtgaggatggtggtggtggtgtggtggtgctggcattaaattccctgagattcttctgtctctgcctcccaagtgctggattaaaggaatacatttgacttggagtttatacaaatacacttgcaatcccaatacccaagacacaatcctggcctacgtatgagacctggtctccaacaaaatgaagcatgaccaaatagctagtggatagggtgtagcttagtgatagagcccttggctggcatgcaagaaactgagattcagtggcctgcagtggaaataaaacagcaacaaataataagctggatgtggtgagtcactcctgaaaccccagtgctaggactttgggcaggaggattgacaaaagttcagtactagcttgggtaacatagtaatatctaggccggctaacaagaccctgtttcaaaaaaacaaaactcaaaccaaaggtgattctaattttggagctattgcttctgggcacatgtctctctagagagtaactgcctaccccactcacttgcagacttgtacagacatgctggctaagatgacaggctttcctagtcaagatgctgggtggatggaatagaaagtgcctgctatgcttgatgctcctgccttcttcctgttgtctgtcagcagtgtaccatctgtcccaagcagcaggcgggccttccctgttcttgcagcaagcacagtgaaatagcttctgtctgctgccttccagatccttctgccacattctccctactttatttctagttaagtgctcatagtttctgttccacgtagaaagaatttaaaaatctgatttgtaatgtcctttatttttggtttcttttttattatttgtgtgtgtactagctggttttgtgtcagcgtgacacagctggagttatcacagagaaaggagcttcagttgacgaaatgcctccatgagatccagctgtaaggcattttctcaattagtgatcaagggtgggagggccctgtccattgtgggtggtgccattcctgggctggtagtcttgggttctat

SEQ ID NO: 27359 - DNA, 2144 bp, Mus musculus
cttgatgtaatgagaatctacaaggaattccaggaggaagcagtcaggggctggaacccaaaggacagcattttctacccacttactaatttcaactgcttcccagttctatttaaagttatgaaaaaaagtttcccaaaattttcgaactcttttactgtaaagatttgttacaaagaaggtgggaattaccttactttatgtctcatccgcaaacttgcaactctgttgcttgtttccctcctccctggaggctggggtagcagtcgccactccagccactccactctttcaattccccgtctgtgttactttatgagatgaaggtaattatgctgcttatggtccaggtacaacctctttgtaccttcacagagatgtttgtgttgtttcttgtttcgcaggttctggttccatgtgtcattgctatgttgtttgcttggttttatcttattaggtgaaatgtaaaaggttccgtgctgtgaggacttcattttcaccagtttttgtatcactaacggtaaactttgtttgatttattcatcaacatccacagattcattatcagttttgtaatctgtaatgttctaggctgcaaatatttactatgtaaacattaaggagccaatgtcggtagctaccaacagcagcacctctcgctgccttaggaatggttaagtttcaggcctaacaggccatcatggccataaattcaggcttgtgtacagagaagcttcagggaatgaatgcccttatctaaagatctgttcaccatctgatacaaaatgtgctgtggagcaagcatgaggtgacctggcatagcttagggaatgtgtgatgtgtaattaagccaacacagtcccttacaagaggctgcttcccactgctcacattgatgtcttcttgtgggaagaagtgctccaagagtacacatgccatcacggttctggataatttatcatagagctacattttgagacttgtatgatgattgtctgaaagggaaagaaacaagatacttaaagctacaactgtgtgaggtatgatgattgttagatactaatttggggccatcaaagtggcttagttgggagaggtgcttgccaccaagcctgctgacctgagttcaagacccaggaccgaatagagagaattgacaccttcaagttgttctgtgacacacatacacacaaatgtaataaaggattttaaattgaggtttttctttttatgtaactactcttaagtatcacatctggggaagctgtaaccttgaaggcagtcagttttgtgtggttcaaagaaggaagcagaaactgaatgatgctaatcttgccgtgtggtccttactgggtttatcatttaggttttgtaaaggacataatctggtttcattattacttgtttttagggaaacaaagcagaaaccccatattctgataacctcagttcttccctaacttaaagccatgttgaggggctccactcccagttcctgggtcaaagtgaattcacccctaagttggagcactggaatctgttgcaaacaatgttatcatttagaaagatgtgcactacctatgttctgtctgttaaaaaaacctatccacctatagaaagtcaccttgacaaaacagttctggtttgatcagtcattctttagtatgtatgcaaggtggatcctggctgagccaacattgcactgtggatacgtatctgtgtttacacgctattagacagaaggcactgtacatatgagtgttgctttcaagcaatatttgcaaaacatgcaaacttctgtatctggaaaaataaaaacaggttcttgttgctatgtgtcagtcacattactgaagtataaaaggttgtgggctttgttggtttagtttagtctcactatatagccctgactggcctagaactcccagaaatcccgtctctgttccaagtgctggttttaaagtcctgtaccaccacacctggttgttctttaaacaaagtcttgcaatgtagtccaggctggccttgagcttatgcaacccaaagttgggcttcaaacttaaaatgatcctgtcttggtctccgagtataccaccataacccagcaaggattaaatgttttatgcattatggtgagcttgagg

SEQ ID NO: 27360 - DNA, 1197 bp, Mus musculus
cccgctgtcccacccagggcatccgcccaagctccgacaatcccctagccaaccatcaccctcctttacccaggactgtcagcgctacccccagatcctgcctggtcaagtagggaccagcatctaccctaggaggcgcaggtcacctgcacgccagggcggtccttcggttggggtgtctccgcctttatctccttaatcgaggccggactctccttgtcttcctctgatctggaatccgatcccgactcagatttcgactctgtcgtgtccgacttgtccgccggctccaatggggaccttgcagtgccgccatccttagtgtcagtagagctgatgtctacggacttccccagatcaaacttcacgtgactggtagaggaggcggcttccggattcgcggatcggttcatttccggccaccgaggagcttcgcgggtcgaggtaagctgggcttgcccgcagcctgtcctgagtccgcgtcccgctggggtgcccgggccctgcccttcagcggccctctgttacctccttccggtgcagacgcaggcgaggcgccggactgcgaaacaaagggggacgccaacagccgtagtcatggcggcgccgcagcccagccaggacccccaaagccccgcggcgcctcccgagcagcaggaaggagccggcgactgtgcggccccgtcgcccgattccgggagctccccggccccggagctccccggcgcgcccgcagctttgaacacggcgccctacgctgacgccgccctgcggcccggagcctctcggcccggccccgagacctttcgccagcgcttccggcagtttcgctaccaggacgcggccgggccccgggaagccttccggcagctgcgggagctgtcccgccagtggctgcggccggacatccgcaccaaggagcagatcgtggagatgctggtgcaggagcagctgcaggccattctaccggaggcggcccgggctcggcggctgcggcgccgcgcggacgtgcgcatcaccggctgagcggcggagcctggggctccctggactgacaccctacccctgagttaataaaagttgaattttgacagctcccatgtctgctgtgtcttgcgttcgttctttatttattgggtttattttacgaacttgttgcccacctttccagctgatagctagaggattctgggaacc

SEQ ID NO: 27361 - DNA, 2927 bp, Mus musculus
tttgtctattggtttgaagggagaagaaagtgggtcgaagcccaaatggttatgtttagaagatacctcagataataaccattgctttgcatacagttttatttaccagtgccatgtcaatagcagataagttcttacatgaaacatctagtcttttagatatctgaaagtgcttgatacatttaaaggtacaggtaatagaataatattttgtgtatatagtttttttaaactggagaaatgctgtgtgtagaagtagaattgttagcccgcctctgagaacagtgtaccggctgtgcttgttcagtggatcaaggaggtgggagggaaggaactgcaaaaagattccatttgtgtgctagacatttctagcttacccatccccctgtgtgttgtgtgcatctcatgtaactttgctatgctgtatatattgtacatactggacaaacgagtcctatgatatctagtctctaggtattaaagaggttgccaatgtatgacaaaagtagttagtaaactcacacattctgtatactctgttagttcatagcaaggttgtcttctgaagagttgtgaaagtgtatcatccaagtgacgagtgacataggcacccgtgcctatgtcacgggacacaagatgggctgaaggggaagaaaggtcggagaccagaatgtcctcaccagaagacacttggagatctaactagttacatgtgtgtggtttcagtactactatgtatataggggacaaattcatgtcctcatctgaaacatctagtccttctaggtgtttagaagtgcacaaagtatgttaaaagtagacatagtaaataatacgtgttgtagattctgtttaaactcatggtgaagtgttgtcttttggaactagaaagagaaactgcttctgagcaatgcagccttgcttgtgcaggtctaggagggaggaagaaaatgaatgaagagcctaatgctgatgcaagtttggtaatacaaggttatccattgttgcttatatctgtgcatcttactttgcaatgtatagaaaacataggtccaaatttgcagcacccagtcttcctagactgtaaaggtgccagtgtgtgacaaagtagagttagtgaaaagacatatttatagattatgttaaaatttgtaggaaaaaaaccttaaaaccacttaggaagtgaaattgttaatattccacaaaaacatgacagatgcatacacatggcccctggggggagagaactggaagaggggctggaccagaaccttgctgtttagaaggcagtctgaccacagcctttgttaggtgtgcagtgtattcactgtggtgtacacatgctggggaaaccaaagtgcttactgggaacatctggtctccagccttttaggtgcatgatagacctgatgtggtaatgcatgcctttaattctaggctgaggcaggtggatctctgttctgggtcaaccagggctatagactttgtctcaaaacagtgagaaagtgtacataacggattggtagggtggctcagcatgtaaaggtgcttgctactaagctggtgacctgagtttgatttccgggatccacttgataaaagcgattcacagcttgtcttttagcctccacacaagtgcagtggcacatgtgcacacatgcatacagtattgcatacatgtaaaaatagagggctgacaccactttgttaacgatgattttgttacaggaatggtcacactgggggaatggaggttaagcttggcctttgagcagatgctgttaccaggtgatggaggtgggctagggcaaagcttagtgctcagaaagaggcactgtagctgttggttggttcgagttgtctagccattggttgggtgtgcatttcacttaatgttgccaggtagtagaggtaagtcccagtgcctaaaggatgttagaagtagcaagagtcactaaaggccaggctcatctttggggagggctgttttcttggtgtggcctttgttaatcctctcactagcatcatctgcacttaggagttgtgcagtgaagaggatggctgagggaaaggctgctagtgcctctgtccaggggacagctctacccaggggtcctatgtgcatcgtggtaaaatcttgtgttcattatgcacagttgtcatctgaatgttacatcctaaaggaaagcacatggttaagagtagagctaatggctatggtggaattgacaaaagggttcctcttgaacatggaactgctaagccatgtctggccagtgtggggaaattcatgttgctaggctgactggagggacacaggttcacaggatgaggtctgcaggtgtgttgagactgacatcctgagagcccctaccgtaggtgtgtctcccagctgctccgtgtggaatacatttgttgagtgggaagatcccttctacatatgctagtatatagatctggtgataagcttaggaatgctatacttagtgtggtctgttgctttgtgtttccttgtaagctgagactgagcgaatgcagaatttaattgtaactttgccagtacatctatctagaggcctgctgccatttttgtcttctatgaaatttctgttgccaaggaagacaggattacaattttgtctgacagattgagatggcatggtgtattcttggttatcaaaatccctgtgtagtgtggggtttttaattggtgaatattcacaatgtggggaaagcatggtacatactgtataatctcaattacccaagtgtgtgtacgcttgcaggatctagaacaatacatcgagctgagctgcttgtgactgggtgactttgttcttgctttcttgtttcctgtaatgcatatactaaaaaaataaacaaaagcttctttaaagacttgggcgtctctactgcttgtgtaataa

SEQ ID NO: 27362 - DNA, 1377 bp, Mus musculus
cctttcctaccatttgcacagccactggggatgtgccatttaacacgaacaaccgtctctttcttccagtagtccagagactctgacagacaactgagataatgtgcttggtgctgggaggtgcacccgagagctgtgggtgcccgtgtgggagcccagacctggggaaagcaaggcagctacttcccaggaggaagacagctaactgggcctggcggacagaaagcacagccccgtggccggcctggtggacagtggactggccccatccacccagttgcgtcctcttcagcgttcactattgcaagagtcagtgaggtgacctcattaatgagggagttactttaatgcaatggtgggcgtcttcccgagcagtggagtatggagcctgtgccccgtccagactcaggcctgcgtggagacctcattctgctactgcgagtttctgtctggtgcttcttccctcaaggccttgattggtccatctgtgaagtggaatcagggatggtccttacttgagtgagagcaaaggcaactgtaaaagtgacttctatttgtctgatgtaactgtcgtctctgaggcttttggcctcagtctgtcagcctaggcctagtcctggaagcttccagcctcttaaacactcttacctaggcctagtaagcctctgagactgactgctgagtaagctcgccctttctagctctttctggactctggctggctggttcaactcaactgttctggctcaaacccttctccaagctgactgattcaacccagcttctcttggcttgtgactgaattgctctgcttggcctcatgctaactctagcaatctgttctaatcttctggctccttctcattttctggcttgtcctgtcttcatctgtgtctagcttgttctctctctgtaacctgtctctgtacaactgtcccagtaaagctgctctctctctgtctctctgtctctcaaccgctccttcttatgttggctctctttgctcaatactatgcctggcacatagtaggtgatttatactactgagtagttagaaccatgatggtgattgatatttagatattgagatctggtggggccatcgaggccagtgatggtcgtgttagtgttggtagtttcatatgtgtttggcacttggcagttcacagatcatgtgtctctccatcacagtacatgcgcttctgaagagtcgttaagggaaacaggaggcggcagcagctcccttgtgcagagggttaggccaatagctcctcatgctttcagctcgggtctccctgccttgaaagcttgatactcacataccagaagtgcacactggcctgaagtccgtgtgttcagagtggttgcagcaaccag

SEQ ID NO: 27363 - DNA, 1147 bp, Mus musculus
cgccttctgcagcactccctgcttggtctccagaacactgcacccatctttctggccccctctggctcttcctgaacccctctggccttctctttcctttccactcctcctctttccagtgttggggctccttggcgccctgctacagttattgatgtttctctaatacctaatgaaagtaacacaatattcagagttctgagaccagggggaggggggagtcatgcctgggggtcatagggagcttggtgtatttcctcccaactctttcttttctggttccttacggagctgtaatcccacctgtgccatcccatggttggcactccaggactctgagatagtctgtgtcattactgagtgtgccattggcacacagtggacatatccctttcctgttgacggccttgcaggttgtctgtagttgtgtggataaaagagacccacccggaatatgctgcagacatctctctttctgtatccatgggaggtctcttggggtaggcctctaggaggcagaggctgaagtcgccatacatagtgacttgccatcctgtgcagcattcagttctctgttcctagggtcagggggataaacagaacctgccttggacttccctcagcctgtagaacctatttcctgggatgaggatccccctaccatacccctcctagccccccaccacaacccagggctgactgggcatgaggatatggtgttaccctaccgctgctgccgctgccgccgctgccgaggttcaaaccaggtccccttgcctcactgccttgagtctgttttctcagctcaccctgatcatcacgacggtgagtcatttcacatgacacaaacctcacaggggtttactgcccacagctgacttggcttggcgctgcagacaccctgagccatggtgacaagtgggagaccctaagagaagaccctaagaagacttctggccctttgtccctggtgcagtctcagccacaccccatttggtttatggggaaagtgactcaattgcagattagctgggggcgggtcacaaccaagtgatgaggcaagtcacctgtcttccactgtcaccttctcttggcctctgtgtctccagtggtagctctttggatctggagctttgatcccagccca

SEQ ID NO: 27364 - DNA, 1163 bp, Mus musculus
attgaagacagtagtccagtatatcccactgtagtatttaagacagtagtctagtatatcccaccacagaatttaagacaatagtccagtatatcccaccatagtatataagacaggagtccagtatatcccaccatagtatataagacaggagtccagtatatcccaccatagtatttaaggcagtagtactgtgtagcaggcaccttcatttttctcatcagtaaatactctggaccataaatcctgtaaaccaagctcttagccctgcctccattgttttattctagtatagaaataattgaagagccattcagataggaatcagcagggctgagatttgaacccaggcctctgttcccaaagttccctctccctttctttctctgtctttctgtctgtctctgtctctctttgtctctatctccctctttgtctctgtgtctgtctgtgtctgtctgtctgtctctctctctttgagacagggtttctctgtgtagctccgactatcctggaattcactctgtcaaccaggctggccttgaacttggatatctggttgtctcttcctcctgaatgttgggattaaatacgtaaccactgtccggcatttacccattctttatagctactatacagaattattaggcttgctgggtaattaaactcttgaccatgtaaacttaaacttgatcccataagccatagggatgacatgataaactggaagcccctgtagctaaggaggtgaagtggcttaattttcagactatgtgatgtgtgtctctctttttgtcttttgatttttaagacagggtctcactgtgtagccctgtctggtcagaaacttgctgtatagacaaggataaccttgaactcacagagctccatctgcctgttggtatttaaggcatgtgccactatgcctggatgtatctcagcattactatggtgtcacactcattctatctttggtttttagtcttttcttcttgttcatatttctctatgtaacactacgttttttctttaaattgaggcaaaatacacatatcctaaaatttaccgtgtgtgtgtgtgtgtgtgtgtgtgtgtgtgtgtgtgtgtgtgtgtacatctgtgggctggttgtatgtttgtttgtttgttttgttttctcaaga

SEQ ID NO: 27365 - DNA, 1151 bp, Mus musculus
tttaaatgtcaggctgaggtattcgggctggacgtgagcctggagatgctggggacctttgaaaggatttggcctgcggaggagtgtggtgggctggtgtttgggaaaggtctctggcaggtgtgtggcccacagagaaggccgggactgtgaccttgcacagaggcctcctctcggagagttaagccggggagggaggaaggttgaagctccattaagatatccctctgtgggatgtggtgtggcttgccaggttgagggaggaacggtgtgggggtggggagagccatggggaattcagtttgaggcttggtgagatagagaagggctggtcccctgtcaatcattctgtgggttgggcagcatcttatttgagcatctggcttttttcttttgaatgaattcctttggataaatccccatctataatagcagcaaattggaactaaatgtccaacaataggaagatgattgggaacgttttggaacatacactggataaaataatttgcagtcgtgaacggccgctgctcttttcagagcatggatctgggtgctgcacagttctttgcccacttctgtgtgtcatgctcatgactgcccagtgccagtgatgccctggctcccttccttcctgtggatgagaaggtggaggcttgtccctgtcccgtctgagggcgggattcctgtcttatttcttgctttgtcattaccatgtgcttgctcctgatcagaaaaacgaaggggagggggagaaggggaggaagggcacttgttcaaggtcatgtactttttaaactttatctttaatttttttaaatacttacttttattttatgtgtctgggtgttttgcctgcatgtatgtctgtgtaccacgtgcatggctggtgcctgcagaagccagaagagggcatcaaacgctttgggactggaggtataggtggctgtgagccgccacatggggactgggaattaagctctggtcctctggaggagcagtcagtgctgttaaccactggggcagctttgaagttctcatttatttgtttgtttgaagtgtgtgtgtgtgtgtgtgtgatatttctgtgagagaagacacacagatgtcacaggacagcttacaggagatgattctcaactcccaccttg

SEQ ID NO: 27366 - DNA, 1149 bp, Mus musculus
acgtgctggtgcacaggcaaggagagttaagggagcccacaggcagtggttgaggcacccatgctgtcaaggacagaaacgggtttcagtccccagaccatgagccaaaggagggagcagggtcacctgagctccacagtagcttgagcagggcagagagctgaagagttattaccacttcccatagagaggaaactgggaaggcagctgaccacggtgtctctcctgccttccagccaaaccctccctccagaatttgcaggcgtgggagcttgaggggacagttcagagggctaacctcctgcttcatgcatacatactatggatctggaagtacagatgggcctaccaacccagtaggcattgttgccagggggtgggagagatatgtccccttgatctcccaaaaagaaagaagtctttcttctttgtttgtttgaaaacatctgcctggaatctcttggtacttaagttgtctccggcccctctgaccccctttcttaaacccttccctctctcccaattcccttcctgtctccttcacatccctcctctcccttcctccgccctccttcctactgctgctctactcctgaatctgagtcccctggaacacctgggcaaacatctttggtgtcatcaatgcctaggatttagaagagacaacctcaccatctagtgcgtgactgctcatgcgcatttctcctctaacggcagagtcctggcagtgtctgttattctcgtggtattactccagtgtgggaggcacatgaggaaacagagaagtgacctgcctggatgctcctcaggtaggaagtggtagcgttgagaggaaaaccagtggtccagattctaaatgcgtctcctcctagtggatttgtgtctcagtgttgagcggtccagcctttgccagcttcacccctgcacagtttagcctccattgcactcccccggcctgaggatgttgaaatgctgtatagtaggagcgcctttgagatcatagcaatctggcccagcgtcacgtccttgtgaaagtcagtttcttggcagctgtgggctctcatcgatttggtaaggaggatagtagcaggagattggtttaaaaatccagtgatttgggcctgataaatcagaagagaggctgcctgg

SEQ ID NO: 27367 - DNA, 1164 bp, Mus musculus
gctcatgtcttcaagtcccagggcaggttctagtcccatccctgtgcagtacctgccacccaatgtccctcgtcgcttggcctggtgatctatgcttgcctcccaccccacttgcatcctccaccagttctctgagtccatttagctcctccctctactcccacccttccttagcatcacctctgccccacacccccatcttctctgtgttctttgtatcccctgacaaccagatgtgagggtggggctcgggtgcggaaggaggagcacctgctcgctcagactccagccctaccgccctcctgagtgggctgctggtgcctccctggaaacctcctctccttctctcttctcaccttcctgttctctgcttctatcaacttcgccttccacccccacctcttgttcccttttgcagcacccagatctctctggacccttcagtacaagagagacaatttatcctagctgagagcaggccatagtcagagcctgtcatgataccctgccatccgggcttcagcccggctcaactaccaactttgggtcttagaaagacttggtgggccctgatcgtcagctacacaatagggcaggcatattacctgtgactccagcagtacctgccttattcttgtgccaggccttgactctcagcctttaagctctaggaatcccaggacccaacagttgtactattgggagcacaacccacccccaaggccagcaggcccattgggatcatctgctattcattgccactcaccattgaggcccgtactcaagccctgggcaaagtccactgagtttgacctctccgacggacactgtctgtggccagcttagcccgagagagagggagggagggagggtgggagggagggagggagggagggagggagggagagagggccgaggtccaagcaggtgcctggggggggggtggcagaagcctcggttggattggctttcttcctgagaaggtttgaaagcaactatagagattcttagatgccagagctgagtccaagggaagattccagccttacccaagagcaagattatctcccaggtggctcctctcaaatagccttacagatagcccctaggctccccgcccacttctctctgtcccagatgatgtcccaagcagatggccagcat

SEQ ID NO: 27368 - DNA, 1348 bp, Mus musculus
gtgcacacgacgctggagttaggtgcgtttgagtcattcccaagtaagttgtatagccttggatagatcactctctttctctctgagccacaatgcaggtaaaaggtagctaaaactgctgctgtgtgtttaaaggcgaatgggtaaagtaactaatttcccaccctctggcatccaggaatcctgacctctgtgaagagatgctggcgtgtctggtccaacccaagccagagagccattaagaaggggccttcactctggattctccgacaataccaacatcccagctgcgacgtactgtcactgaagagagactgggaagggaaagcatatatatatagatatatagagatatagatatatatacaggaaacaccgcgtccttgcaccgctgctggggctggcggagcagtcagctgatggccacgaccaacatctgcaacaaccttcatttcctttgcagacaaatcgaattggtgggaattttttttcaggaaaatgtataacaatcataatctctcactccccaaaccccttctcctgcaaactaaaaaagcagaccgccatgattgtagacattcccttgaaccccagctgcacagactccaggatggacgagcaccccgtttgttctccagcctctgttgctccctctaatgcaaaggaagaaagaaattagatcacggagccaaggaagagaagtcacagcagcaagacacgcacggttggctatttgccaagaaagaatggaagtctcccccatggagaggaggaggaggaggaggaggaggaggaggaggaggaggaggaggaggaggaggaggaacgctcagttgttcctttctgggtcttgacactgggctgcaaaatcccttctctgttcttctgcctccccgcttcacccttgacctctactcatcctgtcttcatattctgtctcagctcccctctgcctctctcccaaccctcctgttctgtgtcctggtcctgctgagggccactgcaggtaactctcattggaagaaaaagaaactacaagagcaaacagaagccatgggaagggaagtagacactgtgtgcttccggtttctcatgacggaggtgcagcttgtaggagattatatgactgtgattttaagttatgtatattacatgtaacaggaaacaaatattaaaataaactgtgctggtaagtatgcagctgacatttccaagttataattacctgactgtgattgatgtatcctaaggttcctagatcttgccaaactggcccagctgagaacactggactctgggtgtggccagctcccagtagggctgacagattcagtgtagtgaaactgtg

SEQ ID NO: 27369 - DNA, 1850 bp, Mus musculus
tgaaatgcccagccagcctttcccctctgcctctgtctgtcttgtgaatcatcctcttcttcctgagctaaagtagccacgataaagaggccatgagcacagggaaggccacaataggcccatgctgcatttccaaaagcctcagccatccctaaactagagcaggcttgaggaagtgttgccatccggctccatctgcatcagaccctggcttgcaggacctccatcagtcagtatctaagctcagaaatggccttgaggtgacaggagcccttggagaaaacgctgccacaggctgctatttcggcctggcacatacaggcttcctctggcttgctctcaatgtctctccctttctgagtgaaagtatcccacggcagtcccatctcacttcctgtcctgctaaggcacttcatacatttagtcaacagatgtttaccagtttcctgcttgtgtcaggctctgttttcaaggcagaaggagagggagggacctgggaagccactggacaagcctgtctgtccctatccatagctggctcttttcagtacccttcttcacgccctccacctgatgagacagtcccgtgaaatgtctccgggagagccccggctggatgtgttctcttggcttgcttcttggttactcttgtgatgtacaccttccctactcacaggtgctggcctgacacagggcaagaagctaggagagcttctgtctctgtggcagctgagacgagccaagctcttagataacagagccagccatatgcccccggtgcaggctggtaggcctgccctgctccagtggggcagcacattgtctctgctccaggatctttggccattcttgatggagaagccacagaacctccctcctgctcctcacggcatgcaagctcccactgcttctctgagcccggagcaggaacggctctatcaccttggaatcaggctcgggcctcacctacttttgcaggaactccccggcctgaacacacaagacatacatacctcagagggagcctcattgtacctgctctgaatgtgggctacagggcaaggacgaaatgacccagcttagctcgtgggacattagggtttggggagatacttactccatggatgttctgaccggttcttactatttttttttctcccagagaggcagtcagtaccccgcccagggaggaggagacctgcacagctaaaatctagggcaccgtctcctccccctcctccacttcatagagaataaggacgttgtgttgtctgacttcagcctactttttccttttgctttttttgtgtgtctgtctcatcatctctgtggcacctcgctctccagggggccaggtaacagtgagaaaagccacctagagcagtcagggttccaggtgagcatctcaatgcagctcctaactcaccgtgtgacactgggctgtcccatttcacataactcaaaggacagggcaagcattacaccctgagcctctttcccattctgtgtctcatgcgcctttgttttccccacgtttgctttctgtgaatcttttccacacgagggcagaggaagtgccaggagctgtttcagtttctgaatcctgcaagcacataccaagactggcctgaaattgcatgagcaacatcactctagatatctatttttttttcaaaagcaccttagcagccacctgcaatgctgtcctgttccttttctcccagtcccctctctcctctctcgtccccacgcttccccacctcagtgctccgtgctgtatgcgtgtgctctctgttcttgtataatcaataaaagtgaaataaatgtgtttgatgctgaaccatggactc

SEQ ID NO: 27370 - DNA, 1321 bp, Mus musculus
accctgaggaagaaagctgagaagttccaagcccacctgactaagaagttccgctgggacttcacttcagagccagaggactgtgccccagtggtggtggagctccccgagggcatcgagacggcctaactgcaaatcctcaagctgtgggagacctcttccctcatcactacaacccagcgtctcccccattcattgtcctggaaccctgcagcacagtgatccagtcaggtcccgcaaggatggagctggagcctgtgctcaccataatacgttcctttgctacaaacgtggccatttatgtatggcttcctatagactggcccagccgctgaatttcaggaaaaaaagaggtcgagatgaaacctgccccagcaacagtctaattccttctgacaatgagaaatgaacattagatccaaaagaactagctgcttattccattgctgcttaaaagaggaaagaaaccagatccatcctagggtctgtggcattaagtcagtgagtttttaagttaagtgtgggttggtagctgaatgtggtttgtatagagtttctgcctgctcctggttggatggaaggaaacctgctggaactcaggccactgacctctcaggagcctagctgggaacaggtgacaaggaagatgatgggttgagtctagcaggtggccagcttcatctgccacacctccttctgccaaaagccacagtggttaatacctgagtcggccgctgactgtggggtctcctgctactgtcaccgtcatcctgaggcctcactctgcagcaggatgtagaaacctcccacgggttcccatttctcacaaaggctcccatgatgcttctgatgacatggaaatcaacagcaaaaggaggggtcttgctctgagcctgcttcttaagccctggtaaagcctgggcctttcttcagaaccatagagatagctgggtagcttaactctccccagcactgctgtgggattctcatgagtgctgtcatgtttctggtgttagggagtcttgaaggcacacccattgtgcggtgtgggcagagttctgcctcaagaagggctcccaggccctccattctgacctcaggctctctgctgtactctggagtccttctgaggcttgagctcacagcaggccagtgagtgagagtcctgctgtttaagacttttggttcctcttgtttccttggagatgtttttccaagagcacaatgtacattaaagtctttgagttgggactaatccccctgtgtgagtctcttacagctaatctgcccagtttccaaagtagccaagctgtgtgcatag

SEQ ID NO: 27371 - DNA, 1145 bp, Mus musculus
agctcacttaatacggtgtgttcattctaaacctatgcccgcaccaatgctgaagggcaccgtggaggcagggttgttagctccgagtgtctgagatactaaaaaaaaaagggggggggggaggaggagagggctggggaagcccagttggtaaagcgcctgctgtctgagcatcaggacatcagctcgggtctccagaatccatgtaaaaagtgggagaggggagcaaggatgggggatcccagaagcttgttggctggccagcctagccaagttgatgagctttaggtccagggagagaccttgtctcaagaaaggaacatggagactgactaaggaaagacctctggccagacacacattcataggcatatgcactagcacccacatgtgcatgagcactccacacacaaaccacatatctcctgtctctctctttccctccctcctgccctcctcccccctcaatacaacatcaacaacaatgacaacaggaccccggggagaacgctcagatgaagagcttgccacatgaattgaggactggagttctgatgcccagaactcatgcaaaccaggtgaggtgctgtgagtctgtaatcctggcactccacagccagatgggaggtgaagacagggggcttaggcaccagctagtccttcgatcgcagacggtgacgagagagcctgtctcaagcaagcagacgctgagggcaaatacgtcgagtttataattaaaacacttaaaatggaaattcatttatataataaatgactaagtttaaatctgatatttatttgtgtatgtgtgcatgcgtgcgtgtgtatccaagaagctagaagaggatgttacgtgccctggagctaaagtcacaggttctaagtacccagcatggatgctaggaactgaactctagtcttctggaagagtcacaagcgcttgcaaccatcactctagactcagaatgtattatcaagagagacagagcgggagctggagagatggcttgggttcaagtctcagcctcaacatggcagctcacaaccatctctgtaaccccagttcctgaggatctgatgccctctcctgatgtccatgggcaccaggcactcacgtggtgcacagacacaaatgttaacaaaac

SEQ ID NO: 27372 - DNA, 1099 bp, Mus musculus
tcactatgggctcctgttccatcccctggagtgtcatgagaggagatggggcacaaggagtgccgggtaagtgtagctgcagagaaaccacagtgatcacaggagtggggagtttggctggaacgaacccagcttgaaaggaaatggacttgggtaaggccaggcactcaagctgtgacaaagaggcctctagaactcaggtaatcttcctggcccagggcttgctgatgctgggtgatcaaggacaaaaagccagcagagaaggctcaaagtgaaaatggaggggtctgcgagactctattctctgagtgactggctggaaacctggctggctgctaggtcccatctgaatccctgtcttcggatattccaggtgcccggcggagggggagagtggagcaccacgctgctatcccctcgagacatggatagcaccgctgaggggcccatcccgtgccggcgcatgcgcagtggcagctatatcaaggccatgggcgatgaagacagtgatgagtctgggggtggtagccccaaaccttcacccaagactgcagcgcggcgtcagagctacctgagggctacgcagcagtccctgggagagcagagcaaccctcgacggtgagttccagtctagaatgacagccccgctagagccccaccccttcgtgtacgtcacgccccttgagttgaaccctgtaaaagccaccactttaacttaatgggagcctgtcctgacagtatttccacccgaggaaggtctcagaacttgcagtcctaaccttagatcagctgtgtcccttaggtgagcctcacactgcatgccctgtgtctcgggagcctcgccttccttcactttggccaccctagcagaaccctggcctgctgatggaccctgtttctcggctctcatgcaagtcctagtgactatccccctataagagttttctcatgcttaggttagccctgcctgctaacaacttgtctcccaaacagcccacttacagttaagccctgctcatagtggtaatttggggaactggtttagctaaattctgccgcaggagccatgtgcataggtgagttgccccagggtccgtta

SEQ ID NO: 27373 - DNA, 1132 bp, Mus musculus
gacagaggtgggacaagcacttgagaacactccactatgggaacagcccttttgggcaccatgtgactgacgagcatctcatgtcatgccttggctcctccctaatctacagtgggtatcaccttgggagtgttggcatgaaaggtgttgccagtccagtgttgctggcttgagatactcaagggaggtggtgctgccacacagccactgtctcaggatagtggctctgagaggccactctgtcactgaacttagctttgctgcatacagttcttccctggcttccccactgctgaggtggagataggaagggaagagaaacccaggattgagtggtggcatcggtcatagtacagagaggagtgtccctgcctagcttgggtttggcagcttcttgttgagtggaagagggaatgagatcttcaggcctagcagcaccatgaagggggataagggaagtttgtctgaggccaggcctgtctattcaggtggaacctgaagctggacggtccctcctacatttctgtgaggtttccttcctgtctgtgactcttggcatccagtccttgatatgtctgggccctttcccctatccccaccaagccccaagagtcagcagccagaggacagcaatggccttgggatcacctagcccagcttccaagcaaaggcacttgtaggagctagcttctaggggccaccgtggcctccagagccttaggaggtagagtcccggccaccactgagtatctgattctctgtttagctaatgtggacgcttggatttttaaaaagaatagtgtagagacattcatctgatctgatagtagagaaaaatcttttaatgttgtggttttttgagagtctcattgtaaccccagctgattttgaacttcctatgtagttcctcttgcctctacttcccatatggtaagtcataggcaggcaccaccaagctgtacctacatcgatactgtgttgcgaataggcttttgccttggcatgaggggcctgcatggctaagtggtgggtgggtgggcaagcatgtgtttggtgtacggatgagtcattatgctgtggtttagcagactcttctctcaaggtctttggaattgtgtacaggcttagcggg

SEQ ID NO: 27374 - DNA, 1138 bp, Mus musculus
cgccctcacctctcctgctctccctaacccacttctccttgctggatttctaataaccaagccgggtgtgggtgtgggtggtggctcaggtgtgggggctgggcggggcaggtgggtggacacatgagcgcttgctctgagaccagtcaccccaaggggaacgaggctgggctgggctgggctgtggcccctgctccctgatactggtggtcttcctggccccactgcagtaaacagacaaccttatgaccttgtccttgtgtgtgtgtgtgtgtgcgcgcgtgtgggcatgggcagggtgggcaagggctgagcagagaatgagcgggggctgtgggacccgcttcaggcgcatggtgagcagatgatgcatccgtttctctgtctccccgtgtgtccgggtcaggtggctgctggtttctggccctcttagtgactcattccttcctgtccccatcctcccccaacagaagcagtgccccctctcacagcatgtcctcccgtcgggacactgactctgatacccaggatgccaacgactccagttgtaagtcatctgagaggagtctcccagactgtacctcacaccccaattccatcagcattgatgctggcccccgacaggcccccaagattgcccagatcaagcgcaacctctcctatggagacaacagcgaccctgccctggaggcgtcttcgctgcccccacccgacccttggctggagacttcctccagctccccagcagagcccgctcagccaggggcctgccgcagggatggctactggttcctgaagctccttcaggcagaaacggagagactggaaggctggtgctgccagatggacaaggagaccaaagagaacaacctctctgaagaaggtgggtgtcacaagggtgatcccctgggtgtgtctggagcctctcggggaggatcataggccctgttcttacactcactttgtgagcttgcctctcagtgttcattctttccgtctgcctagccagacctcttcccagatgagcattatgatagtagctccctgttgtcaggctgtgggcttgctcacacacgatcccagctcagtcacctgcttttgatcttcatctctgcccgcataagaaccttgtgaggac

SEQ ID NO: 27375 - DNA, 1762 bp, Mus musculus
gttattatctctagagaccctgagccaactttccaattgacacacacaagggctcacaatgtggcttttctgggtccctccgagctttaggttatgaagacttgactcaaaaaaaaaaaaattaaaaaaaattaaaaaccacactctagaaccttttccccttgggctgccatggcggaccagatgacgacttgggcagccgcggcccagcctccagattgcggtctttttacttgctctgtctgccgagaactagcttgtttacaagacgacgacaacagtccaaggcaaccttgggcccctgccatgtccctccctcccctacagcccacagcttttctgttttcctgcagaactcacaggggtcaccattgtggctttctggttcacaccctttggggctgaggacccagaggacagagagaagggcagcacccacccaccccaacctccccactaagtgctcacacacagctggtccgccctccctccgctgccacacgccagcctaggcagtgtcgggctggactggcctggcctctgagcagataggaaagtactggtccttggggcacgtggggaaaccacggctaccatgctccagcctcctcttcagcaaaagaaaatgtaggactcccaagtggcttccagggggttggctgtccttggccgcacctttatccagtcccccaggggcaggtggcggcttctgtacgtttgtgtacatatgcacatagaccttagagtgtatatttaattaacgcccatctgctcacccaaagcccaccagcgccgccggctctcggggtccctgcaggaggcgggtgtgtgaatagcatatatttttacatgtactatatctaggtgtgtgtacaagtgtgtgtaaaaatataccttgtgtgtaagcagtcccgtttttggttgtccccctagcccgtcagcccagcctcttgagtttttcattctgttgtgatttttcatcccaatcctctcctgtcccccactcccatccccaaggtgttctgagccctgagctgcaaaggcctgggcccgcagagcaggacgggagggcagggctgggtcaggccgcctggagggggccggacccagcagtttggcgtatcgggctgttctatactgtgcatatgatttgagggcattggggacattctcttgtctggcgcatgctgcagggttttcccccaggtgaagcaaaggcctgctctgggggcctgttccagcttggccgccccctctgtgaccttgggcaagtcacttgacctctgtgtgcctcaacttcctcctctgtaaaatggggacagtccctgcccctccctacctcacaggcatgttgtgagaataaatgaggtaacgtgtaacgaggcctcatggtgttattgcactgtggtgggctggactgggtaaggaggatggcagcagacgatcccaggaaacccagctagaccccacctcccggaaggctccctggtctgtgagcctgggcagtaaatcgaggaagcatctatgtggcattcagtccaccaggcatcagaacagcatacttcatagggaccatctcagaagaaagagagcagatcgttcattcaaaggcctggcctctgtacatggcaggcagggccccatgacccccagcaactgccccctcaccagcctagggatccagtgccttagggaatatgacctgctgtgagagagctgcatgggggaagccagtgtggtgtggattagtctcagtgacagg

SEQ ID NO: 27376 - DNA, 1166 bp, Mus musculus
catgccccaggccagggtgttgattggccagttaagttctgttaatggtggtgttcctctggcttcagggttccatgtgacatcaggaggcacctcgtgtgtttgtgtaagacggcgagggtggacctgagtgaaggaactgagctaggttccttttgtctttttcttgcttcttgtttcaggacaggggatcagagaggtgagtgctctctctggtgctgagttgtactctgtgctgggtgatgtcctctcagaactccctacgtgcctgtcctttcttgtgcacttactgtgtgcaaggctgtccctaggggatttagacaggaccaagttggttttagttctctctctttttcttcaaggtctgattatttatttgttcatttttgactggattcagacttagaagtagaaactctcagctcagacaacctatatctcttggtcacctgttcctggcacttttcttaaaaaattttcattaggtttattcactttcttttatgtaaatgttttggctgcgtgtaccaagtgtgtgtctgtctggtgcctatggaggtcagaagagggcactggatctctgaactggtattacagataaatggtcttgacccactatgtgggtgctgggtattaaacctgggtcctcggcaggagcagctgccgttcctcagtgttgggcatgtccccactgccctggcattcttctttgacatccttgattttcttggccaaatttagcatcctcaacagcttcctcatttttttagtgtggcgtttcttcagagcaatgcattcacatttgtgtcacaggatgcatggaataacaagacagtgaatcttgtgtgcttcagtcctgcttctgatcttccttaaaggctctatgacaacattggcagacattatctcttttagagagatagagacgtttgctgattcctttagctcttttactcgccagccacggaggacgggagcatgccagcccaggactgtcccactcccctttcttcacaataactaagttgagaatgctcagactggcacccacagtgcacctatgaataggcttgcacctcctctctccaatttctctggtccataacaagaatgcccctaacccaacagcaggcatcctgtaccgtgggtcaagatgccttgctcat

SEQ ID NO: 27377 - DNA, 1201 bp, Mus musculus
aagaagagagagcctatctccctcaccctcacaattgtcatgggtttgagactaacagctagaattggtaaggggaccgctaccttggtaactggagcccaacaactgaaacaaggtctagaaggactgcaggcagcaatgacagtagacattaaggctttagaaaagtcagttagtcagttagaagagtctttgacctcaactctctgaagtagtcttacagaagaggcttagatctattattcctcaaagaaggaggactatgtgcagccctaaaggaagaatgctgcttctatattaaccattcaggagcaattagagactctatggccaaactcaaagaaaggttagaaaaacgaaaacgagagtgagaagctaatgaagcatggtttgaaggttggttcacaaaatcccatggatgactactttactatctgtcctcatgggccccatattagttttgcttcttttatttactacaggcccctgcctaattaacaagataatggctttcgtcagacagtgggtcagtgctgtacaggttcttatgctgcgccaacaatatcaaaaagtagaacaggctgatacatgctgtactgagtcagaggttttatttttctagttctaggattagaactatttactagaaggagtggggaatgtaagaccccaactcaatgtgtttcttagatccctagaaacgaagcccagcatggaattctttgttctttcaccttcagcctgagagaaagatgaccactgggtgacccacccaggctcctgacccatagtgtaagggaccaagaatgtttgccgaagatagcctgtaacctttctgtgagagatgagctataattcaccatccccatttttacgatgtttactcagcttccccattttctgtgttcttatcctcccctcactttacggtttattctttaaaaaccctcaactgcaactgctgggggtcaatctcctctgcccctgtgcgggttacgagcttggcctcagcatgctgattcctgaataaacttcatgcgatattgcatcaagaatggtttctctcgagttattgaggcatcggctcatccagggacttgagtgagggtctccccaaaacggggggtctttcaattatcttggagtctcagctttgcctttggtgatgactatcattctgtaacctccaagttgtttgtta

SEQ ID NO: 27378 - DNA, 1900 bp, Mus musculus
aatgtttagatttttgctaaattgttttattttccttttgctgtggtttgtgttaatgcagtaggtagcccagaagcacaggtgtggggagagagcaccttacacggtgggtggagctcggtaagtgggtaatctacttcccacaggatggttgtatagggaccagcagattctctgcagtggtgctgagttcagactagagtggttgtttaattcttggtttggtcttccctattataaaagacagaaggaaaatatccacaggtggtgggttatttgcaccagacggtcatttagacacagcagagacagatgacaaaaccagaggcacacgtgtttctattgtcgtggttaagctagagtgaaacagctctgtttttctctctgttctgagtaactcccctcaccccaccccagcgacccccaccctgcaccacctttgtagcttgtttcggatttattctggagcttggcaagaatgtcgtgtgccagcatctacttgggaggagtgagccatctgctggtcattaggcccttcggaaagctgcttgttcacagaggcagctggaaccttcctggaggagaggctgctgaggctaccgactggcccacctcccttcagggtgggattgcaagggcctgcctaaatttcccggggaaacagaccacacttggtcttaatctctccccttttcccgtttactttgcttagttttcagcaacagtataccccatctttatatcctaagaaacactaatcctagatttgtattaaccaaaatacttgtgttctgaataaccagaagatgtgaggagccctgactgtggtctgaggttcacccgggtgtgagcacagacggggctcttggatgttgactggcttggagtgcctgttccgaggaaggcagagaccactctggcctttccagggagcccctgaggcttagcaggcttccatacctctcctgagtgacttcacccatcccttgctgtgcaagtgggcgcgagaatggctatttgtaaggggctgcttccctgggctctgcctcatgcctccctctggcttcctgtcctgtaggagacccagcaggctcaactctctgtcaccctgaggcactgctgggaagggaacatggcttcattgactttgtggtttgcccactgctaccccacctgtctgtgagaccccatgatggctgtaggatgctaaggcgggggtgatactaggatgagggatttcttttccccccacagtgcactgagcaagggaggagggagggagccatgctgctgacatattctggcattccccctcctgggataaaacagggcatcagaaaggtagagcggtctctgcttaggttgcctgtaagataaatgtggagaagcacggttgtcccattgaacaatatttgagcaaaaaactactgtaaataactggtttttgtcttttgtcaaataaaattgttttggttttgtttatgttttaaagtcaaactgaattttttgttgtttctttttcaagacagggtttctctgtgtagccctggctgtcctggaactcactttgtagaccaggctggcctcgaactcagaaatctgcctgtctctgcctcccaagtgctgggattaaaggcgtgtgccaccactgcccggccaaactgaattcttgattggacctaatgtgctttggaaataagtgttttggttttggtttggctctttttttttttttttttttttttttgagagacatggtttctttgtaggcctggctgtagaccagactggcctcaaattctgagatcctcctggctctgcccacaggtgctgggatcaaaggcgtgcacccgtcactgagttctaaccctaccttacctctgctgctctccctctagcc

SEQ ID NO: 27379 - DNA, 1397 bp, Mus musculus
taaagtgtctgctatgcatacagtgaaatgatgattgtctgctcctgagcataggtgagccttgaaaacattatgccaagtggaagactctacggctacatggtccccttagtaaaatacagaatacacagggccagagacagaaagtaggttagtggttgccagtacctgaagctccggagagaggtggcaagtgaccgtgggaacagactttttctttgatgttttgagattaatgataattatcctttatgaacatcctaaagacctcagatttatacattgctgccttcatgtgggggaggagcctgtgttgatccaggtgacgatatgaatattgcttgtgtctcccgtaggtcatttggatcatcttttacactgccatccactatgactgatggcatttgctcccgtgtcttctgtccagtccgaaggacccttttactacagcacaggtacatgccaattggggcactcctgccgcgtggaaccgggaagacccacgtctcctgaacttagaatcaacgtgttggacatcagtattttccgcaagggttgtgaaacttttcaaagaaccatccgcctttggggaagcatttctgaatttgtccattgtcaactgtttttccttggataccatcatgtaacagctgtttgccgagtggagctgctgttgaatttgatgcgcctctggatccggatgaaacattgtcttccttggttctccgtcaggtgtacagtttttaaaccatcactgcatctcaagtcttctgaaaacaccatgtgtgtggtccatggtacaatacaagcagccatctaataagtctccattgtaggatgttttcagaaacttgaataaacaaatctttaactgaaagtgtgttggcatgcctggtaaactaaagccttgcttacctactgaccttaccctctgaacctaggagtagggtttagcagagcccctgctctcttccctcctccctctcctcccacagcagcagtagcagccagactctttctcttttggctggagttggtattggcatttcagagagggtccaccacctgatgtcctgactcagtactgagataggtgactgggctagatgtgagatttaaacggtgtcattttgtgtttgaccaccaggtggcaaaacgggggtatggggaggacctggctgtttgaacactgaagttggctgaaaggacttgatgggagatcatgggaagatctggattgtcagtcttcctcgtgcgtgggagttaggtggggtctactgcggtaaagccatccagtgttcctcttgtcaatgctttctgagccatcctaccatctgagatgtgtttgcattctggaaaagacttgtgagcgttcccaatattttttctctccatgg

SEQ ID NO: 27380 - DNA, 1368 bp, Mus musculus
ccttgtagagtatctgagctccaccaggctcctcctcctgacctcttggttctttgttacagtaccatctgccagcatgacccggctcgcccgatcacgaacccactccacctcaagtagcattggctctggagaaagtccctttagcaggtctgtgaccagcaatcagtcagatggaactcaagaatcctgtgagtcccctgatgtcctggacagacaccagaccatggaagtgtcttgctaagcagatctcctcccctggaccatgcaagtccctctccttgaaatgaccactccgtaatagaacatttcattccgtcagctggcccccacttcctttcactcacgcatggccacagcatctctctctagtagccgagagtgtcattctctccaccctttctgtgtgtaccagagccacacccatgccattactgtaacattccaacatctccatctgacctgacctccatatcttctcttgccagcctttccctatgctccctcaaatatgtatctgatgagattctttaattcccaactccatgtgtgtgcgagcacgcgtgtctgtgtctgtgtgtgcatacttctgtgactttagacatgctttcttgtagtgcttctgcaaagggactttttttgaatcctcagtggcatttttttaagggaaatatgcagagtggatatctgggtgggttgggccacaagattggattttggttccacttggacaacaaacagtatttgcagagtgatttcaggagagagcaggtctgaggaatatgcaaaactgtagttactgtgtgggccattgactgccttgaccagtagaagggataactattacacagataggcaggcagggtggcagtcacctcccctgtccacgtggatccatccctgccattgtgtgagtcagagggatagatctgaagcctgtgaatgatgtctggtacaccacagtgttttctccagagaactggcctaagctctagattagccaagaaagctggaaaacagagcgccaggcttcactctgcagagagaaagtgctctgtccctgtagcgtctgattccacttaccagacacccacgcatctgcaggatgtctgatgcagagcggttctccatccctcagttccagaaaaaatggagtgatatttaaaaatgccatcgatggtggggatcttactggggaagaggaaggaccattagcacaccatcatgatgtcagatgacaaaatggaagccaagacaccttgaaggtgactttctaggaaggtcttaagcatgtaatgtccctttatcagagggaaggggacaaactcagggcagccctgtccaggtagaaatatttttgcccccctg

SEQ ID NO: 27381 - DNA, 1164 bp, Mus musculus
gcttcttggggaaaacccaggggctcaggattagaggctgcagtggcttctgtgagaccttgaggatcatggaggtaaagttgaagacaaggaacggatccccatcaccaagcagggccgcctggttaagaacttgaagatcaagtccttggagatctgcctgttctccctgcccattaaggaatccaagattattgactctttcctgggcgcatccctaaaggatgaagttctgaagatcctgccagtgcagacgcagactctgctggccaacggaccagactcaaggtttttgtcactattggagactacagtggtcacgtgacattggtgttggctttaggtgatccaaggaggtagccactgccatctgagggaccatcgttttggccaagctctccatcacccctgtgcagagaggctattggggcaacagtgtttgcaagctgtatactgttccatgctaggtgacaggctgctgtggctctgtgctggtgcgtctcatccctgccctcagaggcaatagcagtgtctctgcactgtgctgaagaagcccctgatggtggccaatatagatgactgctgcacttcagccaggggctgcgctgccagcttgggcaactctgtcaaggccatctttgatgccccctccatgacctacagctacttgacccctgacctctggaaagaaactgttcaacaagtctccttatcaggaattcactgatcaccttgtgaaaacccacaccagatctgttcagaggacccaggctccagctgtggctacacataagtctttctatacaaaaagataaagtggattaagttggttaaataaataattatgcctccatgtcattatttggaaattggggtggtcatagaaaagcccagacagttaacacctagttatcaaagatagaatgatactgtccagagtagaacgaagaaggaaaccagacagcttccaagaaagcctgtatttgagaatcaaagatgttattactgactgttgtttcaagagcagatagactttggaacatgtcttcatctcactttgctcagtcatcctcaaaggtgactgtgccttcctccattttcttacatccgatcacatttgtttataagtgttcaaacttgaagatggaaaatgtgtttgatgtc

SEQ ID NO: 27382 - DNA, 1182 bp, Mus musculus
atagctttcctggctatgggacagtggttcctccagccactgtcttatttgtcacaccgtgctagctttcctgctagactgccatctccttgaggacaaagacttcatgtgtcatttactacccttcactgtctggcacactgtccaatacattttgtatgaatttaatgaaatgtatcttttggcctcttgcctctgcagagaagagaagtatggaccaattagactcttcacctgctcggaaactgctcaagctccccctccagagctcaccttccacgcagtgatgaggatcctgtcagggaccctacctcacagcagtcagctggaatgtcccagctctacagcacttcactgttgccgagtgacagcatgtatgtatccagaagagtgtgttaaggacactttttgtcgggatgtgcacgatgctcaaaatggccttcagaaccagtcgtccgttgctcctaacatcctcatggtcagcgcttttcatcccataaaataatccagagacatctaaaaccaacctcaaggaaatgttttagaggccaaggtgggttgttgccataaaagactgacgctaaagtttgtgagtgtgggactgaaggtggattataggatgttgtcacataacgggtatgtgtggacactttacagcatgcccattttctgaagtgtcctaatctctgtagagtgctttagtttttaatattgaattgacttcctggaatctaaattcatgacaagaaaaggctgtgccaatttaattttttcctttgggaattacccctgcctccctaagaattgaccccagagctttgtgggtgctagggaagcaccctcaagaagctgcacctttagtccccatattttggggtttttaatattttttttaagttctgttagtgaatggcgtgttatttaaaaaccgtgtgttgtcatttcctggggctgagatagagttatttaacctcttatctcgaacattagatggatgttagaatctatgtcgtaaggacactgtgaggatttgtttaaagagtaaaagcctagaacaatgttatagtttgttgttgaagacttaataaaatgagtatactgtagttaatgaggtgggaaagctactatctcatatggaataccacatggagaactcaagcagatacataaagtctggattag

SEQ ID NO: 27383 - DNA, 1251 bp, Mus musculus
ttgaacacagaaatccgcctgcctctgcctctcaagtgctgggattaaaggtgtgtgccaccaccgcccggccagaagtgaaacacttttatcagcaaatcatgattactcctagagacaaactgatgtggaactggagatctctttacagaccctggatctgactggtgtaataccaggttagcctaagataagacatgttttccagaagactagttacaaaatattaaactgcccccactttgaatgaccttggcccaatcacgtggctagtctatgtctcagttcccccagctataaagtggtggctgtggagaagaccacatatatcatgcctgtttgtctgaaaaaaaagctggcattctatataaatccgaatgaatctgaccatgctctttatagcattgagcccctcagttgccctggctccaagcacctccttccctcattggcctttaatagaagggggccagaggagaatctcaccaacctgctcacgttttaaaatgctactgtagtccttctgtgtgtgtatgtgcatgcgtttgcacatgcgagggatgagactcagagcctagtccatgtgaggcaagcatcttaccactgagttacaccctcagcacctaagaggctttttaaaaactatttactttgagacagggtctcttgtatcatcaggtggcctccaactcactgtgtaaccgcggatggacttgaatctcctactacctttctgcctctatcgcctttggcatttgccatcgctgctggccttagatgtccttgaagtacattctcaatgctttgttaaccaccactgctgctatctccagaacttcttattggtcccaaactgaaataccacacccccataataattactaactaacccctacacagtaactcccatcctgccccaggccgatgacctctggtggtctgctttctcccttcttcactggcctgatttaggtactcatggagatagaacccggtatttatcattttgcctcacccctttatgatatacatgtggagaaggatgcggcttgcccgaggcctctgagcatgacaaaggcgtagctaccagcacaacccagagctcctaactcttcaaagattctatacagagtgaatgaagcatgctcaggggtgtggctgaatccccatctaggttggagttcatttcccacctcacacaccttccgtcctcctttatcattatctatagtttccttcctgtcattacac

SEQ ID NO: 27384 - DNA, 1176 bp, Mus musculus
taattagtcaatctgtcaagcctgtgaatgtgacatgagaaatggtttttatcaaccaggaacttgtcctagatcttgaaggggctcagatcattgagagaaggaacacggtaggtcgaaggaacaggacagagttgtgaggctgggctgcagagagcgtggagtggtgtggttttcatcctgagagaatggcgggagattgctgtgtgtggccctgcactgcatgggaccgggcgggtagtggcttcagctgtgctgctgtggcttcagatcgcttcttgaaaggggaggcccgtgttgagtctccctcttcctgaagtaagagtgagcagggaccacacgggtcaccgacagggtgatagaattgtttcagagggctttgcgtaagagccattcacaaaattaatgtttccacttgccccactgctcgttatgcaataagcaaatgagttgtggcctcgcaccctgggaaggccaattcacccaggctccctctcatgtggacaaagcccattatatggcagaggcctggtggggacctttgttgcactccttgggcctctccctatggatctcttctgcttttagccacctgacttcagagacctgcttgagtgggagcccaggatccgagaggccttccgtaccggggacttggagtccaagcctgaccctagtcggaacttcaggccctaccgagctgaagataacgattcttatgcctctgaggtgggtctaggcctaagcaggctgttgggtggaagccgattgcctcctgaaagcaggcagggtggcccttggaggaggatggtataggttttaagcatttaaacttctgacagccaaggcaaaaaaagaaagaaagaaagaaagagagagagagagagagagagagagagagagagagagagagagagagagaaagagaaaagggaatttgaatcaatcccgtggtttagttagaggaagcttagctggatatgggacatgatatcaaactgtaatcccagtgtcaggacgctgaggcagcctgaatgctgagctggaggccatcttgaaatgactaacttatgtagcagagaagcaatggcctctccatttaggctgtttgagttcatgctgtgactttctgggtgctggctgtgagatctcgggtacgtcatttcactctcgaaa

SEQ ID NO: 27385 - DNA, 1101 bp, Mus musculus
ggcggttaaataagaagaatgtacagtcccagtagttaggaaccaactgggctctgtgatgtgaggccagcctgggctacaacgtaagactttctcaaaacacaaagaataaaataaaaatggattggcactgtagctcagatggtagagcgcttgcctaggatgagtgagctcctggactcaatatgcagttcccaataaaatgggcgtggctccacacatctctaccccagcacccaggagatagagacatgacctacagtagaagcttggggtcatcctttgtgtggaaatcctgggctacatgaggcagtgccccaagagaaagtccttaaacaggacatgatgagaacgtctacagtcccgttacagggaagcctgagggagaagatggctgatgtctaggtatctaaaagctgctgggatagcatagcaagaccctgtcttacaacaaacaaacaaacaaccccatgatttacttaggaattacttgtgagattaaaattttacaacatttgaaaactttatttcatgtctgtgtgtgtgtgtgtgtgtgtgtctgttcgtctgtctgtctgtctctgtctgcatatgtgctccactgtaggcatgtggcaatcagaggacaacttgaagcacttggttctcttcttctacactctggatcctagggatccaactcaggtcatcagggttggtagcaggcgccttttgcccactgacttctcaccatgcctctttgtggacctttaaatgtagattttagggttttaatgtaaagatcccacaatggaccctgacaccgagtaggcgctgaagatattggttctcactcctgggaagcctgatggagcctcccagtgtttagtgctggctccagagcctgtttatttgctgtttgccctctcctcctccctctccttcctgacatggttgctatggagacaagggtccctcagcacttctgccagagctacagtcttatccttgggatctgccttttccatcctgacagatgatgaggtgatgctgtcacccgactgggaatgggagctgatgctgttgccgtggagacagctcctggcgagacagaagggaggt

SEQ ID NO: 27386 - DNA, 1147 bp, Mus musculus
ggggagcaggctggtgggcggggccagagcagctgggatgggggtggggctcagccctccaggaggaggggaagggccccttctgttaggatttgaacgagccaatctgcatgcccgcgctgctcctgcccacccccgcagctgcaacgctgagctcatgttctggctctgtcttagcgggccgcacagttttgccatcacccttcctcccagtgtgctggggatgttagaggcaattatggaggtcctcagaatgctgacttccctgtcttcccctaggcacctctcaaccaggtggagagggactgggggcggggacggaggtggggggtatgcctagggattcctctcctgctcagcaggctccttggccctgtgccctgcagggcttttgagctccggtggttttattgagctggtatgttattagtgagattccccagccgccaccccagaacaaccctcccaggctccttttgctggtccacacagttaacaagatctccgaccctcaacagggagacccgctagcatgaggatggtctggccactttatggccgtgtgggcttgggtaagctgcttcaatctctgatcctgtttccactgtggaacatggagataagtttagtatcctatagagactttaaaaaaaaaacacacaaacaaacctttatttactatgtctgtagctttctgcttacatatatgcctcaacaccagaagaggcaccagatttcagtacagatggttgtgagccaccatgtggttgctgggaattgaactcaggacctctggtagagcagccagtgctcttaaccgctgagccatctctccagccccctatagagactttcatgactataaaatgaaattacaaaatagagtcctgtgtggtaggcatggcaccaatcataggagcacgtgatgggaggagcctcggctgggggactctgggatccactgcttttcctgtagagagccccagaacatgtcagtaacatgtaccccatccttctataaggatgctctggccttggctctgtgtcctgggtgacctgcatcacttcctccttggagcctcagtttccctctgtcaaatggcgtgacaacacccatcatgtgatttttgagtttggtcacacatgc

SEQ ID NO: 27387 - DNA, 1203 bp, Mus musculus
gcagggtaagaatagagcttgccacaaagtatcaccaatgagaaagagagaatagcttctcacctctgctggtgtctggcacatgccatacccttggaagtgcccagctgttgttacttctgttgtcccatttatgagcctcaaaatgagcctaagtcctgactcctgacgcctctgctttcaggcttcttgcctactggggagggagggactaactgtgtgctgttggcatgagcctgccgtggtcagtctgtctgctctctctggtgttggagaggcagggcccagagaagtgggacctcatagatctctagggtcagatatccccagtgccaatggaacaggagcattgagatcctgtaactcggtgatgcatggctggatgtgacttcctctgtgacacttaaccctgattcccccaaacctctgcccacagaggctaagctgggttgagcttgaacaggaggcaggaacccagagtccttcttggcctcactgcgcgttctgtaaaggacaaggagtctttgagttccccttctcctggagtgtttgcattcaaactgggagggaagtgaagctctttgcagccttctcctggggtctgactgtgatgatctcatctggagccctgtcagagtcccggggaggaggagggacagcagatggcttttctggccttttgggtggggctggcctgctgtccctgtggccactgctggtcagctcttccatagctggggtaggttgccagggccagagtgggtgacaagtggtctggagccagggtggcagatgggtaggcagcctgggccttggcccaggggaggaccatggtagccaagtggtgtgggaggaggagggcaaagcggagcccctggtcctttgtagagtggttgattagagtgaagtccctggccccatatagagcatagcttttcctgtccatccctaagtctgcttttgagctgggcaggaaatgatccatttgggtaagatttggaatatgtcacggctgcggtcgggtgtcatggtgctgggagttgaagcctccgtggagattggcctcggagtctaaacagttgctgcagctgctcagtgggatggtggtcctcccttcagcctggctgttctgttccctcatggctatttcttgagcccctctatatgtgcccgttctctggtgactgaagtgggtcttccaca

SEQ ID NO: 27388 - DNA, 2096 bp, Mus musculus
aaaaatggtaacattaacaaatttttcctatctagcctgtggtggtttgactaagaatggtcccataaggtcatataattcaatgcctggtcaccagggagtggaactgtttgaaaggattacaaggatcgagacagtgtggccttgctataggaagtgtgtcacagaagatgtgcatgctcttgtactctctctctctctctctctctctctctctctctctccctccctccctccctccctccctccctccctccctcctgtccatcagctaccacacagcgcctgttcctcgccatgatggtggattaaccctctgaagctgtaagcacacccccagttaaccgctttcctttataagagttgccttggccgtggtgtctcttgactgagacagatgctgtaagaagcattatctggtgtatttttagcactgactgaaacctttctcctttagcaacctatttcccaggataactctcccatctatcctgaactcttgggacaaaggattgccttttgtttttaaatcaggaattgagacaagggtacaaactagaatggaaattgtgatgcgccgtgtagttaaaaaaaaaaccaaaatcccagcccactgaagaggtgcccggcaccctgctccccccacaacaccccaccacttccatccctgttaagtgccaggcatggggggcatcgggagcagttctttcctcagaggagctgaggtgtgtcaggcgggtactctaccgatgacctcagctccatctctgtcttcctggtacaactccccctgtcccctgctttaggagaggctaggttcagaggacacctcataccaggctactcctgagtctgtcgtgactccagacaaaatcagagttttaaagcacctgcaacccctccagccccaggggactcactgctgccagcctggggacaggtcttcgcccatctcttctgagctgaactggtcagctgaccaccgaccccaccctctggctgctctctccggcaccactgttgctgcagtgtgtttacgggttttagaacattctggactgcctttgtgagcttagcagactgcgcagtgagtctcaggttctctttgtagcttgctgttcctaccagtgccgagccgctgtggttctccctgctgcccccctcacccccactttgcacagctttaccaggaattgagtccaattggagccaacagtggtcaacagaaatgctagagatgcaggcagtggggacagaggcaggagctggaggcgacatcttagtgatgatgctctcccgggcgagcagccttgtgctgcctctctcctccgggtagccacgttctgtcttgtccactcatgggtgaagagtatttggtgtgtctgccactatggggtcataaatgcacacgggaggtgctagctcccccactagccacggtgcctctgtagatccacgagacagctaggggtccccctcccctttgtgtgcccagactcaaggttaagaagtggaaagttttctgcgaatatttttgtatttttgccagtctatattttttaaatcattatggtttattgtggagttttgtagtcctaattttgtaccatggtatgtgggaaacaaatctgacccattttctgcctttgatgctgttttccttgtgagtacctgtgtcgtttacgagactgcattaaaaatggagattttaacagcttagtctctcgagttactgaatactgtcagcttgctgtaaatagaaccacaggtttagtgacggtgacatcagttgggtaggggacagctgccataaagctttcatgagcgtttctatcctgaaactagaggcaagctccttaatcgcagactctcataccctgcatgcccggtttggattcctgtacgaaggaatatattctgtagggcccacatagatgcttcttggtgtcacagcattgtgtggggtctgcaggacagtagtacggacaaggtcccaggtacttggttttcctcaccaaaataaaagcaggctatagccggctcctttccagcagaaggcagaccatgcacgggaagggtatgggggcgtaagctca

SEQ ID NO: 27389 - DNA, 1181 bp, Mus musculus
tcacttagatttggagtcccaggtagttgtgagccaccatgtgggtgctgggaactgaactccagtcctctggaagagcagtaagtgttcttctcctctgagccattccttcagcgccccctggaaaagcttcctaaagccgcttaggctgaaacctgaaaggacaggtgatgcagagttggaatgggggaaagtgtcagtgtgggggtgggagaggacggcgtgaggctgaggagacaagatgaggattcagggttggttctgtcctggggagttttcaatgggaatggtgtagtcttgctcttcagattcctggggcttgcatgaaagactgtcctggtggttgaaggtgggggttatctctcccctctagaggctaagcctgtgttctccacccttccctacgtggttgggctccaaaccctgaggcgtcattgttgggatggtgactaggcgtggtgtggtgtgtacttaatacttgtttccctcaggttcaagcgctgtcttcctgttggccctgacaatcactgccagcgtccaggctctgacccccacccactacctcaccaagcaggatgtggaaaggctgaaggcctcactggaccgccccttcacagatttggagtctgccttctactccatcgtgggactcagcagccttggggtacaggtgccagatgtcaaggtgagagtaaagcgcctttcccctgttcagtgtttcaggagacccgcagtctccgggctgtgttaggcttggacactttaaagcaaactcttgctggtgtcaaggcagttgggttaatgtaacatatttctgtcagtttgatggatgattttatgtgtaagagtattttgcctgcatgtatgtgtaccacttgtgctttgtgcccaagagcccaggagagagcaacaggttccctgaaacgagttacagatgattgtgaggctgtttggggccttggaactgaaccctggctctctgcaagagcagccatcttaaccactgagccatctccccagctccacaacatgtgctcgaaaagtgcgaggttcgtggctaaccacctatagggagctcaaggtagagggctcacacgcattaatcagcaacagtaatggtgctaatgggcaatttggacatattttgcttttagtaagcataattcattgcagttgaaatg

SEQ ID NO: 27390 - DNA, 1219 bp, Mus musculus
tggcttacacttccacgtcacagttcatcatcgagagtagtcagtgcgggaactctaggccggaactggggaagaggcagtagaggatagctgttcacctgcttgttcctcgtggcctgctcagcctgctcactcatatgccccaggaccggctgcccagaggaggcaccacccacaagggctgggccctcccacatcaatttctaatcaagaaaatggtctatggacttgactatagatataggccagtcgtagtgaggcatttcctcagttggggttctgtcttctcaggtaactctatagcttgtgtcaagttgacaaaacccactcagagcagaggtggtgttgacattatgaacacttgactctgggtgctgcgtggacgtagccttggcagctgtgttcttaccacggtcggtatgcctttcacaaactgctggaacctcttctaactctgtgtccgccattcctttcctagatatctgtttcaaatgagaccaaagagctcctgctggcagcagtgagtgaagactcccccattgcccagatctaccatgcagttgcagcactcagcgggtttgggcttcccttggcatccaatgaagccctcggtgcccttaccgctcgcctcggcaaggaagagactgtgctagcgtaagttgtcgctttgaagactttttgaggtttgtttgtgttggttactgacctgagaatgctttttcatttctgcagtgcacatttctagacatctgctgtgagccaggtgctctgctagatgtgcagacactgttgtgattgtggggtagggggtcaaggggctggggctgtatttgcaagtggaggccagaggttaacagcaggtatcttcctcagtcactttccaccttgggttttgttttgtttttctaattttaggtagggtttcactatttatacctggctatcctagaactccctgtgcagtcccggctgaccttgaactcacagagatctacctgtctctgcctcccaagtgctggaattacaggcatgtgcattctaccttgttttttgagacaagctagctaatgagctccaggggtctttctgctagtgctggggttacagacacactgccttctccatcttttccatgggtgctaggagtctgaactcaccacgcctgcatggcagacacggaccaactgagtcgtctccccagtcccagggactggcactt

SEQ ID NO: 27391 - DNA, 1155 bp, Mus musculus
actattgctcagtcctgtacccaggatatggccaccctcaagagctggatagccagtggtggcaggcagttctaccagtgtcattgctgtgtgcttctcaggcacggtagctgcttcactctgttcctctgggagagccatggactggggagcagcactatgtaggtgcatggctatggctccgtgtgcatgccaggctttctggcaggtttgcagctgggatcactgttctgctcaaaccagtggctgcttcagtgccctggcccttagggtttgtcaggagtgccggggggctgggggaggcatgctgccaaaacggccagagactgccagtctgcccgaatgcttttcatttatttatggttgtagaaaatactaagtggccttggtggtctttaggctcattgagaccgttaagaaaggccagctgtctggggtcacggttctttttgtatctcatttctgtgacctctgtgtcccaacatgcctctggttttgtttttgtttttgtttttttgtgtgtgtgtgtgacaggaccttgttgctcggctggatgaactagggggtgtgtatctgcagtttgaggaaggactggagctcacggcgctgtttgttgctgccacctacaagctcatggaccacgtggggaccgaaccgtccatgaaggaggtgtgtgtctgaagatggtcgagcatggagctcataggcgctgctgagtttatttgccaggagcagctctttgcagagaggggttgcggtcacacctcagggtgtgggtatgcaggatttagttaggtttaaagactgagaagtggaaggggattgattgatgcctatcctaagaagctgctagtcagggtgacagcatgtaaataaactgtcacgcctgtgtatatgagccatttgcatatcattagtagggacagtcaagtgcatcacccaggtttgctctcctctctcctcctgacagcccagcccagcccttcctgctgtctcttgtatacttttccatttcctttcggcatgaagtgccctggactcagaattgcctcttcttcctttttcccttcatcctcattagcagctaattcagataatcttatctggtagatggagtttttcatgatatttccatgagaagcttgtgtgtcttcc

SEQ ID NO: 27392 - DNA, 1193 bp, Mus musculus
tatacattctcatagagcgcttccccagaccctgaggtatacattctcatagagcgtttccccacaccctgaggtatacgttctcatagagcgcttccccagaccctgaggtatacgttctcatagagcgtttccccagaccctgggtcaggttttctctgtgattttcctcagtcctggcctgcagctgagactgtaagcttagtggtccggtcaacctttctggtccaccttggctggcatgcatgagaccctgagttctagctccagcaccaaataaacaaaacaaaacaaagacagaaaagaaaatgcctcttcagtacagctgtattgatccgctcggcctctaggccacagatagttttgtatgttagttggtccaccttggaagtggtgaaatgggacagggctggtgggactgttattatctctgttttcagacagggagatgctgggagaagactatctgatatgtatataaaataatctctttcagggtgacctacccagccaaagccaagggtacattcatcgcagacagccatcagaactttgccctgtttttccagctggtagatgtgaacaccggtgcggagctcacccctcaccaggtcaggaagtggcccccgttgttctcctgtccagaaattgaatgtccaccagagcagtaatgctctgacacagatgcaaatatcacattcccgtttgtagagcctggctgcaccctgactgtctggtcagcttgtccatgtcccatgactccctcggtagtgatggggacccattaactgaatacacacatttttagaaaaaggaaaaagatgaactcagctcagcggctcagatgctagtcctagaagcttggggtagctgagacaggaagataagctcaggttttctctggagaaataacacttttctctcacattctgtgtagctctgctgtatccatcggcactgtggttctcctcctacactgttcactagcaccacccaaggctttgttaaaaaccacgtgcttttaatgtaagattttcatagtgcttagactgtatagaaggggtaaatgttcttgctatgcaagcctgacaatgtgagttccctcctggaacccatgtaaatccagaggataaacaactacacagacttggcctccagacacacgctactgtctatttctgtgcttaggtcat

SEQ ID NO: 27393 - DNA, 1197 bp, Mus musculus
cccaggctctgcgattcatgcttcacacacagacatctttaacatatttctgtgttaaagatggagaagtcaaggtacaggagattaagtgacttactcagctactaagtgatggggctggtcgctgtgttcagagccaggctctttgtgacaccaggctgctctgtccacttagaactctgcttgctatcagcagcagagcctccactgctacatcttgagctggaaacactaggaaattgaaatcgagcctcatgccgttccacctcgtttccctctcttggcgctctggtgaagaagttaattgggcagcagagtggccaaaagctggcaggagggcaattgctcacactgggttttcagcctccgagtcgctgagcattgctggacagctaagccaagattctctcctttgtcaagcagaaagttgtccctggggtaggaactagagtaagatggctactctctcccctctgaagagcctgagccagagctcttgctatgacagaagagtaggactctattcctggctgactccatgttgggccctctgatcagatggaattcttgttctctccagacgtttgttcgacttcataaccagaagactggccaggaagtggtgtttgttgctgagccagataacaagaatgtatataagtttgaactggacacctctgaaaggaagattgaatttgactctgcctctggcacctacacactctacttaatcatcggggatgccacattgaagaacccaatcctctggaacgtggtatgtgcctgttaggcgcctaggtgaggactgcagcgccacacctcacactgacagcctggctgtgagacatagggtcacacgcctcggccttagcacatagtagatacctaataagtattgatcagacaaatgaatgaaatacacacatgccatgaatttctataactattttactgggaaggttttctggttatgtaaggcattggggcatacatagatggacaaatagtctaggtcttgggacctgttagagcctggggaagaagagggcagggaatgacctgtaggtgtgcagaacgctagttaacagtgtccagcagttacgtgattatgctctaggtttcatggttcttcctgaccggccttacttttgatagttccgatgacagaaacatgaaatacagctttagagcaaggga

SEQ ID NO: 27394 - DNA, 1437 bp, Mus musculus
ggaagatcataagtttggggccagcctgagctacataacaaaaccctatctcaaaaaaaaaggactcaaacctaccaaccagtcagccaactagcctacaaaccaaaaaaggaaggaagagcaaacgaacaaaactgtggttttatgagctaagggcccttttccatacttgctctgtgttagattagttgctgagtctgtactggcaagaatgcaggcagccagcaggattaaactcttgattctttctgactgaagtcttccctgttggcctgtactgtgaggggtgtgcctggaattacctcatccctgtattttcacatgctccctcctcagtcctcagcttacttcatggttttcaggtcatcatgggcctcagctatttttttgaaatgagacggggcatttacaagtggaaccagtagatacaggctgtccccttgtcaatcacatcttctagtgggagaatgacttagtctccctgttgtcccacgtaagaactgtaactgtgctttaaaccatcagtgattgtatgtctgtctgcgtttccttccagaacagcacattagttccagaagaagtctgaagaccctgaaggctgaaatgaacatttaacaaggagtggggacagttcatggtgtgaaaggaagaactggggacacaacaggagggaggagatgcctgttcgttaaaaagagaaaagctgagctgtgcttacatgtttacttgtttctcactttttgcttcacagagcagacatgtttgggcccagattgtctgtccctttgtcttgatgcctggcaagatgctgtgaatatcccaggctacccagatgttgtatttgaaaagttgaaatctgtaattcatcatcagctttggaataaagagaatggtggactcccagtgttgatggagccttgcatgtgtgatatgaagactcagcagtcttcagttgggccatctcacccctttcttaaaagtactaaaagtggctagaaaaagcctgtgtcctttcggctccagtagcaaacactttgtaggagccctgcttgtctttgaagattcttctcttcaaaagacctgctctaggcttttgccttgaacatttgggcttggtgtgtagagaagggttaaaattttgtcaataaaaagctgactgcctcggtccatttcttctgtgataaaatgcaccaaagcagcaggtgacttagagacagtaaaatagagcacttacaggcagtaagatgatttataagcaataaaatagatggatggatggataatttataaataaaaaggtagattggtgtgtggatattgatagaaaggtagatagatagatagacagacagacagacagacagacagacagacagataggcaacccaatagtcctaagaactagaaggcgctggcagagctggtaagtagtaagag

SEQ ID NO: 27395 - DNA, 1483 bp, Mus musculus
acagcatcccgttggtcaagctggagtcctctaaacagtactctgtttttttaatcaccccacaggaggcagaacaggctgagcccagaagtgcagaggggccaaagaagcccaaggttgccatcgcttccaccaacaagaggccgaagaaggagacgaagaagaagcgatagaatcctagaatccgaggccgaggagcccaaggctgcagcctcggggacagccctcctgggaaccagcatcctgtttgctctcacagactgtctctgtcctcggctcagagtctgagaggattgaaactccctctgactacagagctctgaacagtccttaggctccagctgtgcagaccaccacttcctcttctttctctctgtggtgcacgggagattctcaagagcaaacactgccccgagggttccgagtcaggtcaggctcacagggcaacgtattcacattagtcctggagtccagtgggctcgagacctgagcctcactaacagcatggaattgttgcctaaggctgcaggcataccctctccctgtgcttgggccacatttgtcttttgtgagcacagaacttcacacgtgttcaggtcaggatgcatggccgtgcagtgtgagccagccaggtcctgaagatgttgggggttggggggtgaggggggcggacagtagaaggcctgggcccagtggtgcctgcaggggaaggtacagctgaatgaggccagatttcctgggcacagactttgtaagcctttgaagcaggcttgtccctttcacaccaacctccttttaacccagttaacattcaaagtgcctttgacttcaaccagtcctccccacatctcgtattccctgaccagtgaaggaaaatgatgtggagaagtcaaagtaaataaagtgtcctgcatgctgagcctgcctgtgttgctactgaggagggaaaggggcagcctgggtctctcctgagggtggggggaacactgtccccaagaagtgggacagtgtggagagaaagggcagctctgggtaaagcggccctccaggccaggccactctggaacaggttttcaaaaagggtccaatcagtgactccatgctgtccttagtcactggggacccttgcgagttagtttgcacaaggtccaaaccccctctccccataggtccctccagccagaggacaacactgctgtccatagagattcgagaaatacacaacagtacaatacaaagcttcaaggctccaggcagctctgattatagggactgaatcagctgcccaggacaggccctgaaccagctgcccctaacaccacaaagtcacagacaacaggctcccaaacctgccagacccaagtgtcatgaggcttgctgaggcgctcaggtatagacagctttcgtttcaggtgctagtcaggccactgaagcaccacagtggaagtgcaacccaagcccagtgaccaggctatttagtggt

SEQ ID NO: 27396 - DNA, 1148 bp, Mus musculus
tagcaccccaagctctcagagtgaaacaagccaagcaaaagatgactcactcacggcatcctttgccagttcccgggaaaacacagatcatgaaacccatctggggacttctaaggacagaaagggatttccaaacggcgcctctccttggtgggcagaagctgggggaactgaatgtgtgtgtatttccttccccagagacatctcggtcctctcaaagcgagggatagtgtcctccaagagcactaactgagcagcaacgctgctccatacacaggaagctaagcaggacctcagccactgtgacagcggacctactgtgtgcagttaaaaacagtttagaaagctggtgcacacctttaatgccagcactcaggaggcagaggcaggctgatctctgtgaattccaggctagcctggtctacagagtaagttccaggacagccaagactacacaaagaaactctgtctcaaaaacccaaaacaatcaaaacagtttagaaacccttccaggcggtgcatatctggaatcccagcatttgagtacttaggcaagaagaggaagatgtcaggataacctgggctacaaggtgaggttttgtctaaataaagaacaagcaaaatgaaacaaaacaaaacaagagtgactacttagctgttctgggtgttcattagttgattctggtgactccagtcaggactccctgatcactcgtgttgctctaacacggaaaagaaatgtttttcactgtggagtccaacataatttgttccacattgccatggagggaggtgatatgtgtgaagagggttctcaaaggtgaaacaggtaacttgggatagccaggagttagatgggccaactccaagattcacagacaaccagcctagcattacaaagacagataaagagtggtatggtggcacatactgttaatcccagaaggtagatccctgagttcaaggtcagtgtggtctacaaagtgagtcccaggctagccagggctaatatagtaagactatctcaaacaaaccaagacagacagaaagagtgctctcattttgaattacaggacaatggtgctctagtatatcagctgtgcatgcctaccgctttaaaagagagaggggataaaagagagcaggac

SEQ ID NO: 27397 - DNA, 1164 bp, Mus musculus
aagctgggctggggagtgtgcacaggagatggtctggctttctggatataaaccataagacctagagagagaaggttacttgcctagggtttcctaggtgacagccagggatgggctatagggctctgaattccacatttataatctggtgctcttggagtcttaaagccctgcagaggccccactgtgaactacagctgcagtttgaagtcctcctgcccctctgtggcccatcagacttcacagcatctcaggcctcctgtgcattttccatctctctaaggaaaacctttctggctctctggggaagggccccatcgcctttgaggggcctcagtttcttcatctataaaggacagcagtgactcatggctccctggatgtcccaagaggatggacacggggtacttcacacatcaggacttaataaatgtgggcagggcagagccagacctaggctgaggtctggcctcctctagcgcaggtggttcatgccctgtgacacacgggtgaaactgtaaaatggacttggagctaacagggccaaggagaagctggaatcccatccttttagggagacctgttgtccaaggcctcattccactgggaagcctagagtcaagtcacagcctctttcctatgctaatcctaatgcttactctattgacactcattgtacaattcatgtttcctcttctctggctcagacaagaagtcctgactccagtttcataggctgaagtgctgtgtcgagccgcgttctgaggtccagtgttgacttcatgggaaacagtgctgtgatagattcataatgtctgctccggacagaagcttagcaagcattatctgtgtgctatgagtttgtcattcctgatctgtccagactttctttcttccctgtgtgtgtatgtgggtgccatgggaggtgggaatgaaggagaaagacccagggcaagttggccaagctaggactgtccccaccagtcagcctgcctgtgagcatggcgcttgtggctagcctgactaagggactaggcagttagggagaatcccagagcaggaagccagaagccctgtgtttccattccttgctatgggactttgggccagtgacttccccctaggactactgagagttctagaaagaagaagctggaagcgaga

SEQ ID NO: 27398 - DNA, 1136 bp, Mus musculus
ctcagtgcgcccccttcaggatgcctgctttcattacaccagactctcacctggcaggcgcctggggtggtacgccacatctgggaatcagaggcacatacacataattaagaataaaaataaaatattaaaagtttaaaatttattacttccatttgctagatgaggaaaccgagggacagagaggggtcttgggacaacaggcaggacctggcacgcatctgtgtctatgggtcatctggggcctcttttgtatatactcgcctgcccgcctggctgtgtcttattgtgacctcccattgccctttgctgtcccctctccccctgagctttggtctaccttttcaagccagtgctgtttattataagctgaatgaagttccttgcttgaaaagacacgaggtgggcagggtgtttgggcatccttctatccttctatcaggaataaccagcccgagacaccggcttacagcactgggacgggtgtgggttagcccctgagccaggctctctgtctccacagatcgcttcaggcatggcctatgtggagcggatgaactatgtgcaccgggaccttcgagccgccaatatcctagtaggggagaacctggtgtgcaaagtggccgactttgggttggcccggctcatagaagacaacgaatacacagcccggcaaggtgggggtgcctgggggttatccgatggtatccgtctgtcaggtggaagtgagagtcatgctcctgcggcagactggtagtgagtgataccctgtgctttcttgcttgtaggtgccaaattccccatcaagtggaccgcccctgaagctgctctgtacggcaggttcaccatcaagtcggatgtgtggtcctttgggattctgctgaccgagctcaccactaagggaagagtgccctatcctggtgaggaggctatacctgtgtccctgaccttggccctgggggcaagtctcaccctcccccaaccaacacgccgcccctgggcttcctctttccaagctgatctctgatcacaggctgccttttgtcaggactcagcctcagaagcggggttctgtacaccatagggtcaaggctgtctaggctgtgtcagtctctctggagccatctcttcattgc

SEQ ID NO: 27399 - DNA, 2000 bp, Mus musculus
agagagcctttccaaagaggaatgaggcccaggccttggctatacgtacttcctgcccctggccatccttgttggaggcttctgggtggaacactgggtctagaaccttcttccgtggctctcaggcagcccaaggcccaacaccagttgggataagtgtcagagtgagcaccccctcagcccgtcctccacaagggacccttgagatcactgacacatcacccccatttctctgctggaaaaaaccagaatccaggaggggttgtgacctgcccaagaccaagggcagtttagggttgaggtgggcttggcacctggtgctccttctgttcctcaggaactaacgagaactgtcctccaaggcagggggcagggtggggcctgagagtggcttcaagtcggcagggttctgctgcccctgatgctcatgggtctgtcccggggaaagaggcaagcaggaggctgagccaggagcgaggggtagaaagtggtggtgtggaacaggcttctgtttgtcacagtgtgggtgggctggggtggagggagctctcaggctgcagagacagtcaagtagaagaggaagagctaaggggtgtggagtcctgctcctccatttgtcctgatcatttcaacacctggcccttgctctcctgcccgtgccaggactccctaactcagggagggaggggaggtccttagctgggggaaaggaggcgagggtccttactgctgtgtaccaacactgaccccgccctctctgagctgtactctctgcccgtgactatggcctctgtcattgctccgttccaaccaccccccccccccccccccgtattgatagatccacagctgggcgtccaagggggtcctggaacagcagacatctgactgtctggtccctggctcctctgaccagcccttaggctatgtggtggcttctctctgcctcagtgtccgggtctgtaaggtgggcagttgatgatttgtggcatctcaaccaagggcccctgtgtgtgtgtgtttgtgtgtgtgtacacatatctgtgcctgtgtgtcttcccttgtgtccatatttaatgtgtaagaacatccctactctatcccagacacgaccatttcacccattgccccatcacagcaataatgtccccgctactggggacccgagccagccaggccatgtttgcagggaaggatgccaagcagggcctgccctgacagttccactttactcccatattctccccgtgctcctggcgagcctgagcttgccacccggttctccctgcccgactccagctgcccaaggacctttgtgtaaggtggcctcaactgtctggttttctttttttctttctttttaacagtgttttgtagatttcagatgactatgcagaggccttggggacccctccccagctctgggcagggcctggggatcccacattccatgcccaggcttgggggagggggacccagacttgttgtacatattttgcatactgtctgattaaacacaaacagacctcagtttggtcagcagtttattggacatcgactgtgtgtgggaataagaagagtcgtggatgtgagggaagccggcagtcagggtccttgacccctgcagctagtggcttctgggcctggaactgatcagatggggcagatgcggcatgtccgcacttacttgaggatctggaggaggcaccgagtccagggcaaggatgtttgtgagattcaggaccctggcaggatggagcagaactgcctagcatgcatggaatgtgttcctgggtaatctccaaggctgtggtgtgtgtatgtgtgtgtgtgtgtgtgtgtgtgtgtgtgtgtgtgtgtgcgtgtgtaggcggggtggggtggtccaggtgagctgtgtgtgctttgtggagagttcctatctacccccatgcagtgttctctctaactttcccttcccactctcagtctctcctccagagttctcacacatctccagc

SEQ ID NO: 27400 - DNA, 1223 bp, Mus musculus
aaaaaaaaaaacaaacaacaacaaaaaagaaatgcaacatgcaaaaggtgggtggatccctgtgcattccagaggtacacggagataccctgtcaaaagaagaaaaaaaaaatgaaggaggggaggggagggaagaagggaagggaagggaagggaagggaagggaagggaagggaagggaagggaagggaagggaagggaagggaagggaagggaagggaagggaagggaagggaagggaagggaagaagggaagggaggacagagggagggagggaaaatacaaagacagcacgctaataatgcagttactgagagacaacttaacattgtggacatcggatacccaaggagatgaagcagaagcaggagaaggaggggaaaattaaccggccttccaacctttgtctgcctcattctaaaatttacacagtagaccatttgtcatccatgctgtcccacagatagtttttttgtttacgatttatgacaggtttatgttacttctatttgaatttctatatttcccatgtggtttttatgttttaatattaggggagtagagccagttaactttagggagttactcgttttcatcttgaggtggccaatatgggatgtggaatttttacatgagttacacatgtttggcatagtacttttttggtacattgtggcttcagaagggccagtgttaaaactgcttccatgtctaagcaaagaaaactgcctacatattggtgtgtgctggcggggaataatcaggataatgggttccagtcatgagtgtagtctttgtgggtactgtaaggcctggagcacttgtgaggctgtgacacaaacaccctgtggatgcacgctaggatcgtgtgtgtctgcgtgcacactcttgaccacagctccagaagttgtctctagacaaagtcgtgacccaatttactctgataatatgaatactttcatcccagatgaaaggcatagcccagattaaaggtgtgttccttaactcggagattcaatcttctggaatccatagccactatggctcaagatcttcaaaccaagatccagataaggatctccaagcctccagataagggtcactggtgagccttccaattccggattgtagttcattccaaatattgtcaagttgacaaccaggaatagccactacaatccaccccttgtcaacttgacacaaataatatctcatgttcaca

SEQ ID NO: 27401 - DNA, 1217 bp, Mus musculus
ggcgcaatgccgcagccccggtggccgtgccttaagtaccctcttgccacctaagtgcgcatgcgcgcttgggggatgttgagaaggaggggtgatggggggcgctcctcattcgccaagagagaaaaaaaaatcccgtctgttctttccacaccgacccccacctcctgagcccgctctaacaccgttccagaagattctgctctgcccgcttttgaaattcggtgtaaaatggagggaagtcgtggctctacagtgtagaatgagggtaggggtgcaagcctcttggttcgacacacccaagcctacaaattctacatgccgcgtaaccagtgccgcgccaaaatataccttccatacggatggaaagccgaagttacagaagtctctctgaaagcaaaatgtataccttttttctgcattcctactagtccgtgaattttaaacccatgccagctgttttgtgagaatctttgatcttttctgactgttggttcccgctctgtccggcaggcggtagtggctgcgatcccgagctggaccggcactcttgctcttcgtagctaaagcaattgtatctactctgggagggatgtaggaaggattggcgtgctttgtgtgtgccaaaggagcgagctttatggagaagtagaccaaattttctgcgggacagatacggacctctgttttttgtgctcccttctcttaatccttagtaggtctgcctgagccagggtggttctttgtatgagttcgctatgcagctggaacacaaaataggattttgctacatccacgtagggttgtggctactgtcttctagtttcaaagtaaagcttgtgtcctctgttagcgttgtcttatagatctttagtgaattgcgataatggtagcaagaccaaattgccatctgcaagtagaaggttcccacggtcccagtggctggagaaagtacctctccagcaagcctccttggcacagaggccaaatagtatttgcccctatttggataggacattaattttgattaaatactttcatagacccatttctgttcaatgtcagtaaaagatggaggtttaatggtccaactgagtttgggtattgtggttttggttttctttttttaaaaatttatttttcaaagaagttggctggtttggggtaaatgatgctgaactatttgcaaaaggcaaacaatggttcaggctgctttc

SEQ ID NO: 27402 - DNA, 1175 bp, Mus musculus
cctggtttggcttttgtgtactcagctggcatctaatttgggctgacgttagaacatggaacaatagagtgacatcaggccccccactccagatctccaaggggagagtcaaccttcctttggaacctgtgttgtatatgtactcaaggttcaatgagtttagtatggcaaaccacagaagtttctaaccataaaggaggtagccactgactgcagatgagtaactacggggcaggcacaggacctgacctgacttcaggccttagcagcagctgtatctaccctgctaaggaagaccgcgccttggaatgggtttcacatccaagtcctgtggaatcccgcctctctgatgtgtatggggctcatctggaccttagtagggaactaaaagcaacctggctgggtggaaaagccaaggccacaccaaaatctgtgctactttcccccgtaattccctagtgctgaatgagactataaagtccctgcagaagagggaggtgccagtgattgatttgaaaatcagggtttcttgggggatctgcaggtcagggttcaagaactttgaggtgctttgtgcacctgagtgtgtaatgtgatgaccaggactaggaagtttgaggaaatagcaagagagactggtgaccttctaactcattggcataggagcaggtgtgcagagacagggacgggtaaagccagaaatgaggcttaacaggtggcaggaccatttggtgaggcagtcagctgacacttgtgaacagctctggctaaccaagaaagggaactaaggggccagcccaccctccctgctgcaatgggaggggaaaaggcaagctatcgatctgataaggcccttagggatgaactgagaaaactaagagagggagtgtccagctggagggttggaaaatcaagacaggatggccagccttagggtgatcctggggtctggagcattaagcttggtggaggaggggccaagccacacctcatgctcattgtcccagccaccaccccctcttcttgcccagcattcatttcctggggctcctgggtagagagatctgtggtatagctttatattcttaaattaacccgtatgacccttagtattccatttagagggccagtcccagttattttctctccatctttcccagatagaaaacctgcca

SEQ ID NO: 27403 - DNA, 1145 bp, Mus musculus
caggcggtaggccgtagctctacgaagctacatgaggtgtgagaaaagaaagggtttattaaaaggaataggcggattgccccagttaataaaaaatgcatcataagggaggaaaatgtcccaaaaagcagagagaaatatctctctgggccttatagcaggagtactctgttcccttttgtgtcttgtctaatgtccggtgcaccaatctgttctcgtgttcaattcatgtatgttcgtgtccagtctgtatgaatgaatgttctatgttttgtgttggataataaagatggtataaaaaactttatctgcaaagccgagagctgccacgtgtttcagccaggaatcagacacgtggcgagagggcccctgctggaaaaactgttcgttttagaaaataagggcgagtgcacagcctctaagtttcagagtaaaaaagctaataaatggttcatgattaatgtgtttgacaatggtaaagtgttttttatttttatggttgtagctacaaaaattattattctctgattggtctaaatgtaactgtttcatttggttcttttttattggtaatgtgctctgagtgttttcacaatcagctcataagttgttggttaagattaataattgttacattgctacagatggttagtgttaaatttgataactcaagtttagagtccttccgacacatggcataaagcaggccaagaggctgggtctctaaagatatttctagtttaggtaataattaatgtggttcgtatcctaaatagtaaaatttaagataagatttaaagcaatgcctctttattaaagcattaaagctgctttaataggtattcataggtattaattgacatccaaacttcgtaatatgatagtaatgcttctaatattgattttaaagataataaattgttttaaacttgggttttgctttcccaaggttacaggtattatcctaaccttgcacaaaaaacttaaaaattatggttaaaactgctattgttccattgactgcagcttgcagtttgatttcaaatttaagatctttaattcacctgtatactgtaattaagataattacaagagtaatcatcttatgagagcgctcatacagctcacttcatacaaaactgtga

SEQ ID NO: 27404 - DNA, 1140 bp, Mus musculus
ccgagtttgggcgccatcaccctacgtatttcattccagggcagttgccagggaaagtcacaaggcaatttgagaagtgacagacatttcttatttatcgttcactcatgtcctgatggtatttgtattctgttcacgggtcattcctgtaaatgggggattagtttgaggttctgttgtggacaatacaagtcaattaattcccggcaagatagaaattctcacctccctttggtctccttgctctctctgtccttgaggatgtcatccttctgactgtatctgcggggctcgccaagatcagttcggttttctgatgacaccgttgatgctcttgtcttattaatcaatagtctcagtcagctatgcctcctttctcctcctctgatagagcagacgggcctgaagaggtagtaattactgctctgatctcagcgtgttctcttctctccttcccaccccagagcatgtctgttcgatcctggcttccctcctgcgcaacctgagagggcagcagcggacccggcttctgaataaatttacggagaacgacagtgagaaggtgggtgaccgtggccatgcagatggggccaggagcagagtggtgtggagacagccccttacctgagggtgctggggccaagtgcttctgctttaacgtaccttcaccagcatgtgggtctgttgcattgtctcttgaaggttcttacaagtctccatgcctgtgttcagtgtccttcccttggagtgcagtacctcctgagtggcagcaatgacactaggctaggggatagaggagactttcagagggttcaggtgagggtctggtgggtgtacagcacagcctggtgattgagaacactagctttggattcagaggtctgcagttgagctgattttgttactttcaagatacgtggcctgcagacatggctgagtgaatgaaagcacttgccatgcaagcagatagactagactttagatacccagaatccatgaaagagctgtagccactacctgtaatcccagaagccaaagatgagagatccctgggcgagcaggctgactgggaaccaggctagctggggtcagtgagctttggctcagtaagaggcttcacctcaataagcaaagaggaga

SEQ ID NO: 27405 - DNA, 1216 bp, Mus musculus
aaagggctgatgtacatgagagattatgcagtcgaacacacagaacacagtgatggctccagccacaaacaccagccttggcttgccagggagggactgtagtctggccaccatcctcctgatgccttcacatggcagctgctgagcctcgagtgtgtttgctcagccagcaagagttaaaagccccggtcttctcagggggtcttagggagattctagagatgatctcgatctacacgaacgaacggctttaggttctcggtcttcctccctgcccctccctccctccctccaaaaaggagaggaaatcaaggtattaatcatattattcatccaaccaaagctccctcagaattactctctatgtaatttgtatttatggatagaagcatctatgccttggaagcagagacctctgaattcataactgtcagaatcacaaaccatgggcaaggaattaatggcagtaattctttttttttttttttctaagtagagacctagatagaattgaattaccaagcatgttccagccctcttgctgctttagcagtgtgcagtcaccaggttgggaactgtttctgcaggttttacagacacttggaagcagatgtggcgattttctccggagtcggttctgtaaagatgtcctgccaaaactgaccagctccttaatcacccaggcccccatcagtgccagggctggaccagtttattctcatacactggccttcaagctacagctggctgtcttgcagggcctgggccccctctgtgaaaatctggacttgggtaggtaccacgtggtctcccagccccagaacttgcacgtgactcgatgccccttctttgcatcctctgactggagcttgtgtccctcacctcccttcttggacacctacctccctcattctgccctagccccctacctggccttttactttatagagtattcctggtttgctggaaagtataaagaattttaagggccttgcatggctaatcttaggtccctagacagtgattggttattgcttgtcccaaatgcagtctgagagcctgaggcttgttttgtttttctaccctgcaggtgagggtgacctgaataaagtggctgatgcctgcgtgatttacctcagtaccaaacagcccgtgaaattacaagaggctgccaggaggtaagtctgcttcatcacctgcatctctttacgtctgt

SEQ ID NO: 27406 - DNA, 1128 bp, Mus musculus
ttcttaggtgctagaaacattgtaggtccgcacatgcatgaaaacttacactgacttaccaagacagcgtgttttactctgtatatgccttttcagcagcacaggaattggaacctaaactcggcctggcccaggtcattgatcaggcatgctattgtgaaactcaattctggcttgccctgttcactaagaacctaaatttagatctatcctcatccctagagactttggcgtatgcttatatccctcactaacctggggatactccaagaataggagctcgttctttgcagtctcctgttcccctttgcacttggggccccgtgaatgtcggctggatggatgtcacttggctttgccttgagcttgaccctgtttactcagaagcttctctcctctagcctgcaggatgtttcctcggtgagaggaaggcggttgtacaatggcggtgtttgacactcctgaggaggcttttggcgtcttacgtccggtctgtgttcagctcacaaagacccagacagtggagaatgtggagcatctgcagacacagttacaagccataagtgacactgctcttcaggaactacagcagtacatcctcttccctttgcgatttgccctgaagaccccagggcccaaaagagagcgcctggtgcagagtgtggtggaatgtctcacctttgtcctctcttccacatgtgtgagagagcaggagcttctgcaggaactcttctcggagctttctgcctgtctgtactctcccagctcccagaaacccgcagctttgtcagaggagttgaaattggctgtcatccagggacttagcaccttaatgcactcagcttacagggacatcattctgactttttatgagccctccattctgcctcgtttaggatttgctgtgtctttactgttaggattggcagagcaggagaagtcaaaacagattaaaattgctgccttacagtgtctgcaggttctcctccttcagtgtgattgtcaggaccatccaaggcccttggatgaactggagcagcagcagctgggggatttgttggcatctttcttacctgggatctcaactgcgctgaccagaatcatcacaggagactttaaacaaggtca

SEQ ID NO: 27407 - DNA, 1196 bp, Mus musculus
tatgtataggattgtatttaaattgatgccccccccccacacacacacacacacacacagggtttctctgtgtagccctggctgtcccggaactcactttgtagaccaggctggcctcaaactcagaaatccgcctgcctctgcctcccaagtgctagtattaaaggcatgcgccatcaccaccacccagcaaattgatgtcttctaaaaagctaaattgtcaaaatcaatatggtcagttttgttttgttttctgtctgttaaaaccagtcatacaggctttccccctatttcttccaccttgcaaaggggaaaaagattccctgggtcgttggatgcctcttcctggttcaacatgggaggaatgtagtttctcaagactgagcatccaagtaatacagagtgtaccacagttttgttttaagtgtgtaaatcattttggcagttgttgttgttgttttaaagtaaatctgtcctaattaaaaacaaaaaatgtaagcttatatatatatcttttcatttttttctggacagagaggcagatgaaggctgtaaaaaacctttagaaagattgctgaacatctggcaagaacgaagtgtgtacggcggcgagttcatacagcagctgaagctgtctatggaggactccaagagccctccccccaaaggtagaacatcaccacatgtttacagctcttggtctttgctcctcccagccccacgtgaaaagctgcagtgggggctacagtggctgctgtgatccaccagccgctttatgactgcagagggatgctcctgagtgatggtgagaacttacacagtggtgcaagcggccaggcctggttctttgctcacgatgccatgctcgcacttcctcactttctgtgtgttcttcatggcccttgttgctctttcagggactgtccttgtgcagggaagggaacaaccaagttctttaggattgtggctgactaacgagtagctcatcctggccctgtcgtggacctcagcggggcctgggataggtctcttgccctttcagaactcagctttattagtaataagtctgggtttatatagtttaatgactatcagattactgtctatattaattattgattttcgtctttactgagcccagggtatctttgtgaagtatatatgtgaattctaaaattcttaagagtccgtgttat

SEQ ID NO: 27408 - DNA, 1661 bp, Mus musculus
tgactaggacaggtatcatgccccaggttcccatgtgtgccagagaaaagaagcaagtcactgctggagacagtcccctgccccagctccatctcttcagccagcatctgcctcagtaatgaagcggggaactctgacttcttactctcctccggctcccctctgagcatggttcagagccatgcagatggactcagttttgattcatatttgctaagaacacagactctccctcccactcatgtctcttgccactgctgcttttccatctttcgctctcttacacccataagccatgaaaatcatgtgtacttctggaagctttcaagagaagcttgcctcagtgacagcacatgccatggaagtctgagctggccttgaccaggttcagaacaggctcccaatgaggactcaggctgcagggattgggctttcctggccaccattgctcacaaggtcggcagcatagctttgccacaaagagtttgccaaattgccgacatttcctgatctaaacacttctgttagagaagtgttgtcatggttaggtgtgtttatttttcgagcattctagagaatccaacagtaagattcgaagctgatctgagacataaaagttatagcgcaggtacagagtggcagggctcacaagtcgtttgccaggcttctcaccacagccttccctgccacattgctccagggtccccagtttcagagcaccttcctaaagcaggaccctctgtcccctggggctgggaagggagctgttgggatagcatgcccaggctgataactgctccacagctggagtctgggctctcgtgcatgttgctctcaccctgaagcttacaataacgccaccatgtggacgcatccacagcatggtgactggacttgaacatctctacagataggacactgagcgtgccaggcagttcctgccactatatgcatccttgctcccatgcagagagaggagtactcaaacaactcacctccagcagaggaagggagtggagggagactaatttggggttgaattccattatcatgccagctgacattatgactgaatgatgtagttgcgatttttacgtctagtaaagagtgggcctggccctggaaatgactgtaatctggcaggcttatatttgacattggaaagggcagaaaccattttgtcctactagtgtgataggaattgtcgcccagagctgaagtccaaaagccataaaaaggaattcagtgaaggggcctgagaagcttcgttgctttaagttgctgttttcaggatcaccaaaaaaaaaaaagcacacatcgtttttacacgttaaagcaaatctgtgtgtcaccaaataggcaggctttggttgaagaagccgccccacctgctatgagatgggactcagttccactctgtccagcctggtcttcgtggaagctgttattcacagagtgcaggctgctgtttgcttgttcactctgccttttctgtcagcatccttttctccagaggttacaggacagcactgactcaggtgaaacccctgtctctgctgcggaacacctccctacacaccacgccactttactgtcacatgcacacaccactctgaacaccctccagacactgctttcccacaaaacagaccaaaagactg

SEQ ID NO: 27409 - DNA, 1173 bp, Mus musculus
cagtcagtgcgtaactcttacagcaggatcaagacgtgaccagtagcgattatgtaaatgaatgtgttggcctcattacaccacttccagcagatttcctgtgaggaagttagtttcgttttaatgaaatgcttcagtttttaatcttccttgttgtgtgcctccaccatgcccccagtctcccaactgtgtgcgaacttcccttgtttaacttaagtgaaacttttgtccctgagagttgatctggcgggtggggtgggtgacttctggttttgtgtttctttagggcatccgtaggcctcaaggatctttcctttagggtcatattcctcagaaagtcttcagtctttctttgtttttgttttgtttttcttaaaggatatttttaaagcttaaatttgtatattaatttaggactttatttagaagtataggctgtcattggtggcagcagtatattctgaaatgtctcatagatatatatttttgaataaagatggtgttgttgaacaacattctgtgatgtttcttctccctgcctcgtgcagtgattagtgatcatcaatggagggcgctctgtctgcacagaatcttcccctgggggctggtagtggtacatacgcaagacaactggttgaacttactctccaagtctctcttggagtttgattggccagttagcagtctatactgtagcagagagcgccaactgggtttcatccttgtataggctgaagactggttggggggtggggaggacttgtgatgtccccccacacacagaggatgtcttgagaggcctttggttgcagtcttttcagtcacaccagcaggccttgtgggaattgtttgatttgcagtatggtgaagctgctcttggaaaaacggaaaataaccaaacatcatcttttttaagtgttttcatggacttctcttctgctgaggttgacatccaatggaagaccctgatgactgagtactctggagacagggtgctctgaagcagctgctgtggtccggaatggttgagatctcccactaagttatggtggggttacctgtttctcatgatgcaaaggacttcctttttagtaatggtggtccatcaagaccacctgcagctgaagtccaagttcactatcaggaaagtgtgtgagttttgcctgcttgtat

SEQ ID NO: 27410 - DNA, 1160 bp, Mus musculus
gaaaaatggaagagcttaaataagttccaaaggtctaagaaagtgaggacgggaacgctggtgtcttaaggtatgaaaatgcaagttgtaaagattataagaaagtaatctaagatatgaaaaatgtttcagatttctctccctctctcttttgaaggtgcagagttttcagtggggtcctgataagctgatagagcactcactgctgttatctatcgaaagctctagattttaaatttcccgtggctgtcttctaagcatagacttaaaggcacttctcatggtactgaaaacacctctgccctgtctctatgcctctccctctagacagaagaaaaatgttcatgctttttatttatttatttatttatttatttatttatttatttttttggtttttggtttttggtttttcaagacagggtttctctgtgtagctgtggctgtcctggaactcactctgtagaccaaactggcctcgaactcagaaatccacctgcctctgcctcccaagtgatgggattaaaggcatgcaccaccatgcctggcatgttcatgctttttttttttttttaaagatttatttattgttatatgtaacacactgtagctgtcttcagacacaccagaagagggcatcagatctgattgccacatcagctggcccagtgaaccagatggatgccccattgcatgagtcctctcctgggctttgactagcattccagcctttctggaccctgacaaccagtttcaacaagaagtggttacagaagagagcatgttgccccttctaataggctggaaactccctggcataggggacaaaatggctactcaagtgcctgttggcataccaggaatggtaccagttaaaaccaaattgacccaaatctattaacagatagattctacagaaatagttctacaatatgatagggtgctctaccagctttattcaggacagggagagtattgtgtggccctaagggaaagaagttcttgttctacacaaaccacttgataaccattagagaaagccagctaggattagatccactgacagtgggggaagggtggcccctgcctcttccccaaggagaaatgctgcttccaggctaaccagtcaggtacagtgaaagacaagatctgacaactcc

SEQ ID NO: 27411 - DNA, 1198 bp, Mus musculus
attctttcttctgatgcaactcacaaccactgccctgccccatctctaccaccaccaagaggccggatagcattcctgatggcgaagcttgtgatggtttgtatacgcttggcccagggagaggcactatttggaggtgtggccttgttggaataggtgtgtcactgtgggtgtgggcttaagaccctcatcctagctgcctggaaatgagtcttccactagcagccttcagatgaagatgtagaactctcagctcctcctgcaccatgcctgcctggatgctgccatgctcccgctttgatgataatggactgaacctctgaacctgtaagccagcaccattaaatgttgtcttttataagacttgccttggtcatggtgtctgtacacagcagtaaaaccctaactaagacagcacttaagcaattttctggtaaactttaacaggattaggacctctctttagggaaatcaaccacccaagtacccaatagtgattatcagacaccttatgtcttatattcagtttaataatagttattcagccgttctcttttcccaagaaccttccttgggaagatgtggattgggttctggggcaagctagaaatgtaacttggacacatgttcgtaactaatttaactggaaaaaaaaaagtaaaactgacattttgagagggcacaagagtagtagctaagatttcagttactgttcgccagacaatgtattgactgctcgctagttctgtataacgaactgagttataatagtggttttgtttctgaggtgctcagagaggtggagtaattcacccaagatcacacagccagtagcagaaaacccaggtttggaatctaagcatctgggtccagagctggagcctaccgtggagtcacacttctgcctttgctaaaagaattgcagcaggagacagaaagtggggcagtccctggggggagtggggggagctggtgtagtggagagagagggtctcccctctgtggtgggcttggagaagacaggctgtcccagaagaggaggtgggggaaggccacatggggacagtgagcagagcatgtcacgtgagcttattgtgaggagactgcagatccagccgacagccatggccaaggtctgtctatggctctgtctatggttttattctctggatttgaagagccggttccaatcccatcc

SEQ ID NO: 27412 - DNA, 1197 bp, Mus musculus
gggagtggtgtgtggatcctcccacctaggtcgtgcatgggtaagtgtgaggcctttccagtgttagtgaattgtaagggcaagggagtggacgtaggcattgaagacacttgtatatgccacggtctccctctttttgtcattgtgttgggtagcagtgacttgttagcagtggagggaaaagtcatagttgaacgatggagagttagggtggtccggagcacctatctgctctggctctttgaggcccctcccttcccgttcattcttctgccagtggcagaagtgcacccacgtgtgtgccttgcttctgccctggaaagctgggcctcagcctagacatcaggtgactagctgttacctagctagtccccagattccaccttaattaagcagccttacctgttttgatcttccatttcctgacttggaaaactaaagctaagacaaaggtttttcaggactgactcccccttcttcttggcagattgtggggctctgtgcagttgatgttagttaaccactggatccacgtgttcaccgtggcttgcgcccctgcatccgaaagtgatcttggctgccgtgtcctggtcattggtagtgcagggaaaggatgcggaaagacgggctccgagctcggggcgtctggcctggagctttcctacacttgtgtcttgctctgcagccttacggaagtgtgggtggcgctttctggaagctgcacaagtcagtgctgggtcttcgcaacttggtgttctgtttccagaaacttggggtgtttgcatgtgctaggtcagcacagatttccaaaggatctctaggtgggttccctaacttttcacagaggagcagaaggtagatgacaggaggagaggtggggctggactgaggggagctgtgtgtgccagggtggggtggggcggggcgtgtaacagcccttaagcgtgtgttgagagaaggagctccctggtacagagtgtgcagctcccttcccagcctgtggtccccgtggcccaatgagtttttgtatcacttgtgagccactggtcttaaaatgcatggtttgcagaccaaaatgcagtccaacattatttgtttcatgtgtctatgtgaatgcacatatgtatgtatgtcatttgtgcctggtgcctgtgaagagtttattgggggctaggaatttcagagggtgactcttca

SEQ ID NO: 27413 - DNA, 1141 bp, Mus musculus
acgcaggttgtctcttcaaagggagagacatatatcctgttttcctcccagaaggctgggagcggaggtgtttaatatcctggcgaactttgtgctatctgtatgaccaagaccatgtcagagcctcccctagagccttaaggtatcatctataatgggtcagctaggtgggggggggggggcgcatgcctttacttccggtattcttctcctaaacccttaagatgtcatatgtaatcagtcacctgggtggtggtggtgcatgcctttatttccaggacttgggtggcaaaggtgggtggatctctgagttcgaggccagcctggtctacagagtgagtccaggtcagccaggactacacagagaaatcttctgtctcaaataaacaaaacaaaacaaaaaataaataatttaaaaaaaagatgtcacgtgtagtcaattatctttatggaaaatgtcatgacttaagctttattatgttaaactacctggtatcagactcttgaagtttgaaccaacacttagccgggcgatggtggcgcacgcctttaatcccagcacttgggaggcagagacaggtgaatctttgagttagaggctagcctggtctaccgagtgagtccgggacagccaggattacacagagaaaccctgtctcaaacatagaattaagtaaactaaagtaataaagacatttgaatcaacactggctactgagtcatgttgaaccagatggccttttttaccttacttgggttaccaccctggctgtttgagatacctgcaaggaccccccacaatggcgaccaacatgagagtctccagtcttggagtaggtaagagaatttttctctagtcacccaggagcagtgcgtgctctcacccaggaggtaacaggtaagtgggaagatagaatatgcctggattcttcccagtcctgaaacaaagcttttttttttttttttttttttttacaattactgagctgttggttaagatccagaggagggaaatagttagagcaacagagctgcagctctgcacaagtgtcagtcagattcagtcccttggcttcctgaacaagaaatgattgatgttgaaaattggaaatgcagccaggtggtggtgacggtctataga

SEQ ID NO: 27414 - DNA, 1100 bp, Mus musculus
ttgagggctttgctttattttagtagttttttttttaatgtagcaagataacataatatcaccattttagccatttacctaagcaagcctcaaacttgccatgctggtcttgaactcataatcttcctgcccccagcctaagcgctgggctatagggacatgccatcattggcgctgttttgtttgtacatttgctttttcttaaaaaagatttatttatttatttattatctgtaagtacactgtagctgtcttcagacaccccagaaatggacatcaggtcccattatagatggttgtgagccaccatgtggttgctgggatttgaactccggaccttcagaagagcagtcagtgctcttaatctctgagccatctctccagcccccaggagagtcttcttgaactcaaaattcaaattgccctaaaatgtaaagatcccaaatcttacataaatagccttaggtttaaatctttcaaagttaatgtgaattaagtaggatttgcttgtggtttagttttgtgcctgcccttggtctgacgtaaaggagcagacaagggaagaagttaggggaggctcaagagccctgccttctgttcaaggctcatgttacacagtattccaagtttctagtgcatattagtagtgagaggttctcgcatcagtgtgacatctacaactgtgtctggggccttgtcttctgtctgtagagacctgtgctcgtgtacactgcaggcatgtattatgcctctccctaattagacagcaggagaatacagccccaagcatggcatagggtcctgggggctccaggaaaacaccattctgtcatatcttcaacttgactttgtcagatagctctttacacatttctttctaggactcccattacgactaaaaactgataaatggacttgctgatactggcaaatgattaaaaaatttttgaagtttatggaatattaatcatgctactgaactcccttacagttgacagtatcaaactattgtaaaacagcacaattcaatactcaaattacaaatttgaattcccacatcttacttttagctaggctaactctaaattttttcactttag

SEQ ID NO: 27415 - DNA, 1177 bp, Mus musculus
ccgagcaatggtggcacacgcctttagtcccagcacttgggaggcagagacaggcagatttctgagttcgaggccagcctacaactgagtgagttccaggacagccagggctacactgagaaacctgtcttgaaaaaaattaattaattaattaattaaaattttttttcactttaaaagagagtgctttttctacttccaaaaaaattttgcccaagggagacactacctagagtatatatttaaaacaaaaacaaaaccaaaaacccacaaaaagcaaaaaacctaacaactaatcaatgggaaatgcccggtgtcctgccatcgaggcgaggttatgcttatgtcttccagaaaatgaagtcccagatggctcctgctgtgacatttcagacaaggactgcatcccagagaccaccagacaagcaaggggttgaagctagacgacaaacccatcaagaggagacgtcccaagaggacaaggaagccaataacgtggagagacttaactggtcaagccaagactttggggaagcaagaaggacctgatactgctgaccccaaaatgatgctgttatgtttactgactgtatttcatgttgattctcagcctgtcggtgcagaatccaaatgccttttgtcaaaaggagggataaagggtgcacctgtaataggacacagtataacattgtattgctgtgctaatcattgtttttattctttgggaccagctgtccaggcaaaaagaagagtatccaaacatttagacacatgaatgggtggcagcttggttagactaactgagtcgttcaaatgtaataatacagattttagcttaatgcagaactctttagaaagctcagatggaagaaattatagttgtatggaaatgagaaagggaataagtgatgtatggcttgctacgattcaaccaacaccagttactaagtagggttgagtggggctgccttcttgtctccaggcgaatcattacattagtctgctggccttggtggaggaagtatgccactgagggaggggagagccttgagagtttaaaagcctcgccttgcttccagtgtagtctctgctctaagcttgaccttcaaggtgtgattgctcagtttcatgcccctgccaccatgcctgctgtgtgctctcatgccttaccgctgta

SEQ ID NO: 27416 - DNA, 1111 bp, Mus musculus
tcttaattactttgtccatttgggttaattgtatagattttaattgctacttttcttcatggttaagcatcattctatagaaggaggaaaaaacagaaaataaataatagaaaaggcaaattctgtatatatctgtatgcagatgtatgcaattatagtcttctgaccagaaattcaatgaaaaaaaatcatttgtagaatctgttgatgatgttattgtaaattaactgctgtctatttcaaagaagatatcagagagccctttaaaaaaataaattatgacatagttgctaaccaaagcattattggattctattgaagtagttatgtaatgacaccaacatttgatctttgtgtccagggtcccatgagcctatttggcgttttgataaaattaatgaaatgctccttttttctccccagccattgcaacccaagctagcatggagtttcgacggaaagggtcccaaatgtcaacagacaccatggtttccaaccctgtgtttgatgccagtgaatttcctgataactatgaagcaggaagagctgaggcttgtgggacattatgtaggattttttgtagcaagaagactggagaagagattctgccagcttatttatccaggttttagaatttttttgtttatttttgcatttatattatttgatggtaaaatactattgtggcatggctaaatcaataagccactgttggtctgaaatgcttgccagtgtctttatgtaattgaaaactgcttgaattctattttacctgcctcatcagatctggtaaagactttaaggttttattctagagctattattatttatcctatcatttgtaaattctggagagatttggatgtaccacagtagtttgttaatagatttttttgggacaatgttaggttctgtgtacagtccagaaataactcagctgtgaatttttactccaaagcgtttaatgactgtggtgaatagattcaagcaaaattacagtgattcaataggaagcagaagttggcaggagagagacatcatggttttgaatgtttggaggaaacagcagctcatacttagcctagaagggtcaggagagagatctggcata

SEQ ID NO: 27417 - DNA, 3096 bp, Mus musculus
ggtaataaacatttgtagaagaaagagactggagagtgattcctacagtccaccacatgtccgtcggaaacagaaaatcactgacattgtcaacaaatatcggaataagcagttggagccagagttttatactgcccttttccaggaggttggactcaagaactgcagttcttagaatgcattttgtccaggtcagtgaactccagagtgggctctaacatcaaagcaagacagtcctgtaaaaatcaaagctaatcactcctaagagctcactgctgaatcagaagaagaaatacgatgtgaagccactggcttgaagacccagctttccagtgaagggaccctgcacagtcacactcctgctgaaaacaacaacaagcattttagccataaactttcttttaaaagtgacaattttagtaaaatatcagccttttgaggaaaaggctttatgcatcagttaaatacatgcattgatagtgtcaacaagtttgcaagttagaaactgaagatagttttatacctcgctttttaggagggtgtattcaaaattaaaatctgtctcagaatcttccagaactttttaggctcaagttgacactgtggagaaggaaaggctgcagcgttgtcctcgtgtggattcacttgtcaccccatcacactgacagagggtgaaacaaatgagttttgttcagataagaagtccaacattaaaatatttcctatttttctctccatatttaacaagttgtccctctgatcgctgtggagctctgtcaaatggctcagcttcttagcagacgtgggcagtggaggccctgctgtatctctgaatagtatactgccatgtttatggttaaaggctgtgagagaacgatggcacctcccttctccgttgctgttcagtttaatggaagggtgacaggttagacgtgactcctccattaaacaccaagaaatgtgagttcatagcaggggcttcatccatattgattgcaggaccaagttgcaagctgcagtagttgaggaaaggttctaatttgtggctcaggaagtagtgtcccactcacttagctccttagagggcacccagcccacaatccacagaactcagtgccacctccttaggtggctgctgctgtttggtttctagccttagccagctgaaggcagaagtctctgccatctcactgctgcttttctgccagggacaaagctttggaagtggccagaaccaaattgttttagaaggactcctgttacagcactcagtatatacctgtttttatgttctccttcaataagatctttttgtcttagaaaacaagtgacatttatagtccaaagagaaataatcacacttgaatggtggtgttcccactggccctctgttgtcattaaagtgtagaccaggactccagtgattggtttgaggtttcttttctttggatgtcaggggcaatgttgggccagctctcctgtgcagatgcctccattctagacatgtgctctgccatctggaagcacaaagcatggctgtagcagtctttggtctgaagtttgccaccaccccttttattttttttccctcagctcaggtacagacagccatccccactcccacccccatcttccttgtcctcttcttcccctatgagtttccattcgaggcaaagagctttctgtctttgattccctctgaagtcaggcaataatctaatgttcccaggtgattccctgagatggggaatggtgaaaattagtgaatttttccctaaaaatattcttgtaactcagcaagaataggtgaaattgaacaacagctaagatacttccagatttgacccttcatgggcaaagtgggttcttgttctatccaaggtgaacaaagaatttatacacatacatgcaacttctaacattccagagggtacaaatatctgataaaggtggactttctttgtgtgattcttctcaaaaccttgtttggatgttttttaaatgatactggaaaaataacgtatgggttatatgtgtaggagtgggcttactggccttcccccttcatttggctctaatttctggtaactctttataattctgattattttggtaagcgaaccaccatggcagatgcagtttgaaatctggggcatgcagtggttccccaagggaagagggctgccccctgccccctgaaggagagaagcatcggtgtgcacagccagcagagcttgggatgcaccgccactgcttgcttctgctccacacaccatctccccagcaaaaggctggcaagaagagcttgggccttcgcagaggcgtttggaatcctgctcactgagctcaccctcctgcctgcactgaggtcactttgaacagaatcatggcagaggaacatccttagagcctaacagtaatctcagtagttcacttgataaatttgccaccacaggttcagaaactttggggggaaactgggaccagtctggactgtggcttaagctattcagttgctgtagctgaatacccaggcaccttcaaacaggaaaacatttcccaagggtatttaggctggtggcccattctgttcacttttgaagctgggggtgagggtgggggtggggcttctactttggccggaacatggaaaacggggctcttaacaccaccttccccttttgtctagggtttcttccttaggccttcctggcctttggccccttgaaaagaataattacatggtagggcagccctctccagccatactgatgcatgtgccatgtgtacacaagcatctcccccttccagcacctcgattttagggtagctccatctctggactcacatacaaaaatacgcacagtttggcgggccctctcagtgtctaacccatgggtagtagggcaatctggaaggcccgcttccacatttatgagctagggaagaaccaggtttggctggctgccattacagacagtgatgaggtttccagggtgtttattcctattaaaaagtggaacttccctcacatactcagccttgggtacagctggataaagctggtagggactgccttggatattatgtggcact

SEQ ID NO: 27418 - DNA, 1368 bp, Mus musculus
ttgccaggaggtctcaaagctcccagcctgctgcttctggagtggtcatgcccaaagctgcaaactgaggtgcccgcggccaccatcctgtgctgcattcaggagagcatggcgtggctggagttggctatcatcccagctgtacagctttgctgcccctgtcttcttgatgctgggaaaggaagcccacaccacatcaccaccatgctatcccacaaaaccgttgaaattgtgccccgtaccttgagtgcgacacactggctctgccaaaaccttctggtgtaactggcaagctacgagttggttccttgctccgtgctctttttatttgtcctcaaactacctccttagagccccaagagggtccccacgtcattcggatgtatgggacagatacttctttacagccccctatgccatacccttagtaggtaggcttgccacttgttggtctctgtctccactgtggcctcagggcctcagtagactagagatgaatcaggacctgactagatctgcaagatgctttattagaaccaggagtgtgggccagagagcaccctgaaggctgctggatgcagaaggaggtgcacaacactaggtcatctccaccccaactccaggacagatggaatccggcatggtgcaataacataagagactaaagacagtttctgggatccctgggggctcagctaggctctgtagcccatagctgaaagaggagatggtcaaaacacacacctgtggctttaaacatttagctctgacagacactgaaatgcctctggagatgattttagccacaaggtgggcagttgcccaggcagccagctacatactcttaggagtcagctgcccagggtttctgagctctgtgctcaggggccagagaatgaaggcatttattgccatctctgagccattcaggccatctcttcacacccagcacttcttcctgcctcctggaccgttcttctctacctgaggggtgggaaactcggctgcctcctgcatgggagctagtcccagacggtgtggactcatgggcttttgttcatgttttccactagggataaacaaatgttccctgttcaggctccaagtccccagggcactttgtgactctttggaatattgagagtcacaatgaggaacagtctccagcgcatgagccagggccacccacccattcactcatgtgatcgatctattgaggtgctgagacacacccgatgcgctgttagtttcagcagataatggactaacctggcagtgaagactttgatctcttgaggaccgtgggcatccccggactcatctattattctaatcagagtgcctccatgccagaccagtgtcccccgt

SEQ ID NO: 27419 - DNA, 1210 bp, Mus musculus
ctccgccagtgttgagcatcctcgcacagctgctcctgagcatggcagacatctgtgccatgcccggggaccacatttctttgaataactgttagcacaccaattgctatcttggtgctactacttgttagttatggattttagtctaccttttcatatttctgaatgtgaatacatgtgagaaaaaaatgtttatttttaataatttcaaattcagcccttaaatttagggttagagttaggcagtgggttagggttacagttaaattttaaattccctttatattttgcacaacatttttactgggtcataatttagcaagctctgacatcttaaactcaggaagaattgtctacatcacattgactcttgacatcatcagttgtaccatccctgtctcatggatgagcctcctttttgccttgagacagggtttctgtctagccctgcctggtctcgaacttgtgaccctcccgccacctgcctgctggaatttacaggccttgtcaccatgcgtggctaggattgcaggattgaacatttttccactgtcaccattatttctcggtgccttctttttcagattcagaaaaagcgaggggatcttcgcttgattgtggcctcagccactctggacgcagaggtaagggcatctctctccttctgcttaaacactggagttgtcagatattcccttgggactgcacctctggccaaagcatgtcttcggcaggacgacctgcctctttgggggccatgtggtgctctagatgtcacctgatgctccttctccacggtgggtagacgttagcctgtgtaccccagggcgttgatgatcaccagcttgccctgtctctgtctctgctgtcctcctcctgacacaggcagcttctttttagttactggtcagtgtgaagctatattaattgaaattatttatgaaaattacatacttattttaattttttggtgtagtggaagtttctcttctaacatagtgatttccatgttaagtgtttttttttaattgtttttactttttgtatgtggggtagggtgtacacatgccatggctggaggtcagaggtcagcttggaggtcagttctatctttcctccatgtgggttcctctgataaaggtcttcaggcttagcagtagacatctttaccagctgagccatctctttcatcccaatgtttttatatggc

SEQ ID NO: 27420 - DNA, 1206 bp, Mus musculus
tattttcccagtgtgagcaattttcttgagttctctcaccttttgtcacatggtatctaatcccaactgtgacatcccattgtgccacctaatgcatccctttttccatccaagtagatggcactgttttcaagagggctccttggaccatcaaggccatccagtataatgggagtccccagggccatgacaccgccaggctccacagttgtgctccctaagtacacaaaggcatctttggtggtagcagagctcaagtgcagcagctgtacctgctgctttttattgtggtaaaaaatagttatactgaatattgtgtcatgtcggagcatgagagactggctgtaagaactccatctgtgtctgggcacctagctttcactggcatggaactgctcatagttcatgctcagaatttggctagtgtagcctaccaggctggctcatggcagctggtaactggtacagcagatgcccaggaacagctacaatgttgcaagacaccaacatgaaaggtagtgctgcctccctccccaaccctaccttctgtaaatggaattctgagggcttttctttgccctttttgctcccaattaacagcagggcatttgtatgcccaccattgtagtccgttttagcttctgagtataacacagagaactaataaagttattaaactgtaggcactatgctggccatatagtcatctattctaaccctcaatggctgcctacttcccagccacgtggttctttacctgcaatctgagtcttcttaccctggctcgtgcttttccatgtgtgtcctcttggcaactccctgctgatctgcttgccaccagccagtcgtcctgtccttctccaggtctctcttcttcctcttctctcatctctctccctctctttttgggaacccctgactctgatcagaagccccaccttattcacttctgctcagctataggctgaattagattttattaaccaatctgaggtgatagaaaagagtttttacacatctttgagacaggagatgctccaaataccatgacaatgccaacctccagactgctggcaggtccatcagcatctgaatacactgtacaaaactgtacaaaaccccctcccccaacaaccttcggttttgttgaatttaaaatactcacatgtgactgattgctttcttagacagtacaactttgaatgt

SEQ ID NO: 27421 - DNA, 1148 bp, Mus musculus
ggaagtcatttttctgctgtgtagattcctggggattgcacataattgtcatgtttggcatcagggacttttccagcctgagctggaaaagccatagagatttcaattaagaactttgtcttctttgttttctgctttgttttgtttttaatttaaaatctctcacagcatctgtagcacagtttgaggatatactagatatgtaatgactttgagttcatattattggcctagatgttttgtccatggaattatttaccagcaaccctaattttctctgagatagttaatttttacatttttagatagcatttgttttcaaaggcttgggacccggttttaaattccattttgaaaatttatgcatttcaggaagataataatgtgaaatctaataggaactactctgaatttgtattttaaagtttagtgctttttagtgacttttgcatgtttgtatttgacaaaaataaatttgtttgtttatttagacagggtctctctgtaaccctggttgtcctggaactctctgtgtagaccaggctggccttgaactcaatctgtctgcctttgtctcctgagtgctgggattaaaggcgtgtactaccaggtctggcttcaaattttaaagtttgctaatctctaactttattataaaagtcgttcattatggaaaataagatgaagcacacttaagaactcaagttcacaaatttctaaattttaaaattactacattctttttaaaatgtatgtcttccagtcttttttgtatgtggtcatggatttattgaattacatacagtggtgctcattttctctccttttcagataatttccttgtcatgcctttgaaccaaagcagtagatcttaacgttcaatattctgaagcccatttactgatttctaactataaacaaaacaacacatgctttatttcaggttgtagtcctggtgcatgcatgcattgtcatttttatgccatgaggtaaaagtcaccagttttatcctgattgactcagcatgttaagactttagactggagacttagaagtcagagggtcctgtacactgcatgggagatttgagttcagtcttctaacactatatgctttacttactattctcatctctgtgggatggaaag

SEQ ID NO: 27422 - DNA, 1149 bp, Mus musculus
aatattttacagatcagatatttaaaaatacactttgaaataaaaggactgtttttctaggtctcaaggcattactgggcttgtagtgtgaccaggtagctctcttaatcattcttaatcagattttctttaatttgtaatattgaaaagcactataaaacaaaaggtcaagttctgccactcacaaactgtatcctaatctaagcatcttaccttttttgcctccttttcatttttgattgatttcctgctaagtaatttagataatgatggtgatgatgacaattataacaaaacctaataaaagatcatgtagataaattgcaactgtcagtttttgtagtggaatctaactcagtagttaattattgataaatctgatttggaactaggactttttagttatttctagctttatagttgagtactatcattgcttttaagatttcatggtggaggcaacctttttgtttgtttttgcagatgttggttatcaaacttgttgattctggctctttttttttaaaaaaaaaatctttttattcatttaatgtatatgagtacactgttgcaatcttcagacacaccagaagagagcatcagatactattacagatggttgtgagccatcatgtgattgctgggatttgaactcaggacctctgaaagagcagtcagtgctcttaactactgagccatctctccagcccccaacctttttgtttttttaagaccgggtttctctgtgtagctctggctgttctaaaactagttctataggccaggctgaccagcaactcagataccctcctgtttctgcctctcaagtgctgggattgaagacatatatcaccacacccagctcatggagacaacatatgaagctagccactgaaaatagttacgatcacagaaggatgaaaggataatggctaaaaaaagaggtatctggtgggtacagtggtacttgacttgggaggttatggcagaagggtgaccaagttccaagccaaactgagctataactgtctcaaatataattaaaggagcctttcagatgataagaaaagcatgaagaggttaaggaatgtagctccgtgttagtgtgtaccccgtagaatatacaagccctatgttttattcccaata

SEQ ID NO: 27423 - DNA, 1146 bp, Mus musculus
acagtgcagtttttgattctaggtataggactgaggcccaaaacttggtatttataacaaacttgcttgtgatggttttggtctgtgaactacttgagtagcaaggttctagaggaaggtcttatttacgctttttatgtgggaaatctgggcttgcctgctatgaatatatattcttattcatattccacccacgtaactttgaagaagaaagatgcctatttcttttccccacaattcctttcttccactccctgcccctatcctttcctccccttcttgaacagaggctgcttagcttagcagtggcaggagtccttctgaggatttgatttttaaaaaccattgaagaggtgtaaaggaccctgcttgctgaaaggaaaaggaagagtggctgggccttccccaggtcatccctgtcctgagcaggcacctgggaacaattaactggcatagtctccaaaaaaagacccaggtaaatatctactaaagagaaggagaaatttttaagtagatctctgacagtatgttactctgttgttgttatcactgtgtgtcagcagacctttgtacaccttggaaaggtgagccatcagtcatgacctctccagtgttcagtgcacatagaatatgaatagtgtgcctcactgtttggaaccattttcttccttcaggtaaagttatgaagctgagtcctaaagcagaagaagtagctacattctttgcaaaaatgcttgaccacgaatatactactaaggaaatattcaggaaaaatttctttaaagattggagaaaggtattgtggcccatgtgttcatatcttaatcatttataaaagtgctgacttagaggtatagctcatttgttaatgtcttgtttgtttaaaaaatgcaaagtatagtttaatgtatatcttttttcccttactattttaatgtggtttttgttcaacaagaatatatcccttctcagctttcatgtgactgcaggaaggagcttatcagattaggttaaacagaaaacctcaaatccagttgagcaaaggaagcattgtttctgcagggactgtcctctgatgcctttacacagggtcagtctgaccatctattctgtattgatataaaaaagtaccattgttttcaattt

SEQ ID NO: 27424 - DNA, 1180 bp, Mus musculus
cccagaaacattttttttctcagtcaaatcagagaccattttaaatgcagaagtgagaaaatggtgaataattacgcctattcatggaagcttttgtcttccttggtaattacatgttgttgtcttgggttctgtttctttgataggtccctgaaaccgctatggctgtcttgaatttaatggaattcagtgctagcagagaactggagcatgcattccacagcaaggctgtggtgcttctgaagcaatggagatgcttacatcctttatgttgacagaagtcagtttgggggcatgcttggtggatctcacaagagtgggaaccattttttagataggaaagctttcttagcaattatacaggacggagtcagtagaatagcaagtattcttgtcatgttacatgccccagactttctcttcagttctatgcttttccagctttggttaaaatcaggttcctgttttggggttcagagctctaaatattcaatgtgttgctccactgcagggtgagaaagactggcagaagtatgagactgcgcggcgtctgaagaagtgtgtggacaagatccgaaatcagtatcgggaagactggaagtccaaagagatgaaagttcgtcagagagctgtagcactgtacttcattgataaggtggggacatgttcctttatccacattggacagttctgtttacaggtatagggaatgtctacagtatagggatcaggaatgtatatctgctgtgtgacttataatccaaatttacttaagtaggaagagtagatgtggatacaaagaaagaggcatgtacagtatgttggctattgagcagtctctataacaagaggatctgcataaactgaacattattagttagtttgtttgtttgcttgtttttggtttttcgagacaaggtttctctgtgtagccctggctgtcctggaactcactttgtagacgaggctgggctcaaactcagaaatcttcctgcctctgcctcccaagtgctgggattaaaggcgtgtgccaccactgcccggctgtttgtttttttaataactgtgatgctcaagatttttgaccataatctgcaaaagtacttactttatgtcaaaatccaacataacagttttatttatgtgaaattaaatcgaaagttgcacaaaccactggtta

SEQ ID NO: 27425 - DNA, 1445 bp, Mus musculus
gaggagaacaaacaaattgccttggggacctccaaactcaattatctggaccctaggatcacagtggcttggtaagtcttaggcctgtgtagatttcctgcttttggttaaggaaaggcagaaagtctcttggatattgccagctccttcatgccgtgtctaagtttacatttcttccaggagagcctacagctctggttgctgaggtacatggaatatcctaggtgccccatgggcacattagtatagtagcccatgcctgctttcgagatctctgagataaagaatgagctgataaaataaagtcctttgaatatttttgtgcaccagaaagctctggacccctgctatgggttatcattgagctagactaatctcctttgttgtctccatatttattcgtttcttttttctttctttctttctttctttttttttttttacaggtgcaaaaagtggggggtcccaattgagaagatttacaacaaaacccagagggagaagtttgcttgggccattgatatgactgatgaggactacgagttttgaccagtctcggcaggggttctgtgaaaaggaacagtgtggtttggggaagatggataaactgagcctcacttgccctcacacccgagggagaggccacaagtcttaacaaaccaacatctttgcaaaaagatagacctggagatactataagggagagctgagccagttgtcctatggacaacttatttaaaaatatttcagatatcaaaattctagctgtatgatttgttttgaattttgtttttactttcaagagagcaagtggatgggaatttgtcagcatcctgccaggcaaattcagttttgctgcaatgtttggattctctcagctactgtatgtgaagtctgattatattggtgcgtttttacagttagggttttgcaataacttctatattttaatagaaacaaattcctaaactccctcctctcccctatttcaggaatttaaaattaagtagaacaaaacaaaaacccagcgcacctattacagctgtcattctatcgtcatgggaatcagttttcattaaacttgaagcagttgtgacattggcagtgttttggttcagacacctattcacagaaaagcatgatgggaaaatatttcctgacttgagtgttcctttttaaatgtgaatttttatttcgttttaattattttaaaatatttaagccttcttcttgatcttaaagatcgtgtagcttggggttggggagggatgaagggcgagtgagtctaaggataatgtaataatcagtgactgaaaccattttcccatcatcctttgttctgaccattctttgtaccctttaagagatccatctttttctttggaaaccccagtctttcatttgaaagatgttattgtataaaaacttccacaggtcaataaatt

SEQ ID NO: 27426 - DNA, 1129 bp, Mus musculus
atgtatgcacatgtgctgtactaggttaaaggatggggactgccctctgctttactccacacaatccaatcccactgtctcacctctgcagtgtgcagtaaaagccctcttcgactacaaggcccagagagaggatgagctgaccttcaccaagagtgccatcatccagaatgtggaaaagcaagatggtggctggtgagataaaccatccaggctagaaagcctgtggtgtggtgggacaggaggccggggcctctgtggagctgtcactgaaagcacttgtgacagtatgctttgagagcatctgtctcatgctcactagcagtgtctgccttggcctgacttatgtgtgggaaccccccaggaagagcttgtgagtttggggcagttgctggagtcagtaccctgtggcttccacaggtggcgaggggactatggtgggaagaagcagctgtggttcccctcaaactatgtggaagagatgatcaatccagcagtcctagagcctgagagggaggtatgtctggaaccactctgtgtcacgggtttgtttccctgtccccaggttttcttttgatgtgtctatcacacccaggccttcctgtcatctgtgagccacacatcctgtgtggctacactctagtctctcttgtacctatgtcatgcttggctggtcatgagtagacctaaaagatcgtcaaaaagttccctcagctgagcctgcggcagcgatgctgaccatcctggggttttgcttcctacagcacctggatgagaacagcccactgggggacttgctgcgaggggtcttagatgtgccagcttgtcagatcggtgagatctaattcctagctcatgattcctcttagtgtcagggtgtccttgtcactcctcctgcttctggagaggaatccagtggccgagttcccagaggctactcttatactatggaagtcccagactcttttgtcatccccaaattttaccctctgccaagtacagtggagtcaaaagttggcagagatgttgacagactgacatccagtcctaatggtttagaccacagcattgtgacagaagcttggagatgggttagggtgggggctacagtgcatggctccaaggaaga

SEQ ID NO: 27427 - DNA, 1157 bp, Mus musculus
aagccccttggaaagagaagttgcctcagttggtggcataggaggtctcaaggagctgctgacacattcctgaaagaggagaaggagaaggaggaggagccttggtgggccagggaaacaaagtttacattgtcctgtagctttaaaaccacagggtgaaagagtaaatgccctgcagtttggccctggagccaggacagaggaatgcagggcctataatgagaaggctctgctctgcccatggaggaagacacagcacaagggcacattgcccatggctgggtacactacccagcctgaaagatacaggggatcatgataaaaatagcagtattaatttttttttcttctcagtggtattgtaactaagttattctgtcctgctcctcaccttggaagggaagacccagcacagagcctttgggaacagcagctctatggggtgttgtactgggagagggcactgtcaagaagggtggaggggcaggaagagagaagagcaatgtctaccctggtgagcttttttgtttttatgacaaagacgactcgatatgcttccccttaggaatggagatataggtaagtggagtcaggcagtaggtaccaaattaagctgctgcttggtgcagtttctatgcagttggtaaaaagatgcaaaggagatgggaaggttgggaaggtaagccccacctctgagaacagaggctggggtccaggcctgtgggtgcaaaggtgcctcagcatagccagcatcagcacacgcaaacccactgcccaaatttgggctcagggttggccatttgctagttctgctgccctcttaagatctgactgccaaataaatcatcctcatgtcctttttcttttaacttgtttgtttcttgggggctcaggagaacatggtgattgagaatagaagcaagtgtggtataatatccctggagacctgggaagtcacacagctcttccctgtggctctaaaatgtgaggcccctctgccaccccatcttctaatggtattgttgaagcctgcccaccccatcaaggggcaagctcagtctccattgcacagaaacctacttcaaaaaagtagcatttggttatgtgctgccaggtgcgtctgtttgcctcttcatctgccagttagaacctctgtg

SEQ ID NO: 27428 - DNA, 2953 bp, Mus musculus
tgatgtaaacacagacgctctggtagacgacaagcctggccctagtccgttttctgatcagtcagaacccacaataactactagtagtcctgtggctttcaacccatttctcatcccaggagtgtctcctggactcatctacccttccatgtttctttcccctggcatgggcatggctctgccagccatgcagcaggccagacactcagagatggtcggtcttgagacccagaagaggaaaaagaagaaaactaagggggacagccccacccaagagcctgcgtctgtgtgtgaaaaggagccaggcagtgatcagaactgcaccgagtccagtgccactgtgtccccagagagagaacacgtggcacaggccagggaggaggggctcaaagactccaatgaggataccaattagaactttttcatttaagaaatgattgtggcttgtaagtttcttatcccataaaggtttgtcacttccctcacttcaccttcataagaacctgtgttttcatcagtaatattacctacctaatttcctgtctgagaactctggtgacatgttaatagttgcagggtcttgccactttgttaggtaagtgtcacctgcctagtctaggcggcacagaatccttccttttatccagttcattccagcaatcacagttgatacagtgcttggtgacataccaccttccccttctctttcaagtcccactcatctgaggaagaaaatggcagaagaaagctgtgtagggattcactgtggggccaaagagcaaagatgaacgtaagtgcaagctcgttcttttgtgagcaactgaataaaaagatcatattgaggaaaccaaaaggcacatgataggaagtgccggtgcgtacttttgtagttcaggtgtcctgttgtcttggttactgagtagcgtagtctacagcatataaactaatggttcaaaatgcatatactgatggcttctaaaaacaggaaccttccagatagtaatacagtttccccctcaaggttttcctcctcttcagcaagaagaaatactggccagctaggcagtttccctatcgtccctgctgagtctgagacacttcagcaccttgagttactgcagcaactgcgagggcgctgctcagggtccacagatgctgctggcatttatcccaggacaactgctgccacccgtttccacttttaagaaacttgctggatttttgtgttctttcacccagagcaaggctttttggagcctagtaaggtaatcgctcagcacttgctagattctgtcattagcgtagcgtgtcaaaacacgcacaccaccttttacattgcaactgtgaagttttgtccctcccattttctcactactcaaacggtatcttagtattgggcccaaattccaaattgtcagtcaggcaaggttctgttaagtcagcagcatacactctccagctccgtgttgaagaattgagcagggaggagcccactcggtggcgcttcagttcccgttttctttcccctcacccttacatcatgttcctcctgagggtctcctccaaggacagcccctgctgagacttgaaccagccaaacctagttctctggagcacaggctcaggggctagacaggtggcgggtgtcccgagtaccaggttcacttcggtgttacaattaactgtgttttttttactgtttctgttacagttttgctaacttatcagaaggtcggaaagtttggctgtttcagtttgcattatttatttatgatgatttttgtcattgtcttttatacgtttgggttataaattatgtaaatgttaaaatgagcatctcaaagaagtctgttaaattgtgaccggaaaaaaaaaaacaatcaggtgtattttcaaaacagagagtcccagttttatgaatcatagatataaactagaaattctataacgatctataagaaagaagaatccaagaactgaataaatgctatttaataacctccttgtagtgtagaaggtctgtgatgctggtaacagatttcttagaaatgctgctcactgttgaactaacatcctgttcagttctgctccggcggaagcagaaaggtttctcggctgttaaatcctaaagatcaatataatttatttatgtaagagaaacatgcaatcaatatatttttgaaccttttaagtactaattttctttttatcaagtagaaaaaaatgtatttgccctaaatccttaaaaatacaaatgctataaaacctcctgtattttgcaagccttactgcaatgagcattgtagacacccagcagggtctgctcttcctgtcgtctcccgtgttgtctcatgtggagagctcctctcccagcttccacctaaacttccaagtaggtcacagggtccgctgcggacccaacttaaccaccagcatgcgcaatcccttgttatatcttaaccgaacctgtatgttaactctcgggtgttcaggcttctgttgactgctgttgtgatactgtttgcaaaatgaaattgacactgtggattatttgctctgtaaggcataagtgcttcttatgattattttaacgttccgagagcaaaagccaaatttaaactctcttcagcaaacttgagcctcttcatctaattccatgtcactcatagccataacttctcttggtcatcttcacccatgtttcacataataaattgtctgtggtcttgatcctggatttaaaaaggaagttcaaaattcagatttatattaaggatttcattagtgcttagatgtctggctacctgggcattttatgaatgtattgtgtataccagggatctacagtccttctgggtacctgattcctgctgggcaacactcttgggagctgacctgacccatctccactctcagaacacagattaaactgtgccatgggaaggacttagca

SEQ ID NO: 27429 - DNA, 1109 bp, Mus musculus
gtgtgcatgccatggtgagtgtgcagaggttgcagggcaattggttttcaccttttataaagtcttttcacctttacaagtattctggggattgaacatggatcctaaattgaacaggaacatctttgcctgtaataagccatcttaccggctcatgggctaacttgtgacatattatcagcaccatgatcctgcggcataaggccacagatggctgtgtcctgcttgctactgtatcccaaggcctagtgtactggaactaacacttagtagcaactcagatactcacttcttactgactaaatctatgtcttcaaacctaatcgcacactttgtgtggagcagtgagagagtaatgtgcttgctttctctttcacagttgtccaagttaagagctttgaatcactccccaatgtcggatgcctctgttaactttgactacaaatctccgtcaccattcgattgcagtcctgatcagggagagaacattgaagaagctgccaatcattgtctgccccataagaacctctatactactgaagaggaagctgacacccttttttctaggaaattgacatcccataatgggatggaggatagtggaggcagaggtactggagtaaagaagaaacggaagaaaaaggagccaggggagcaagaggggacaaagggaagcaaggacagagagcctaagccaaagaggaagcgagaacctaaagagccaaaagaacccagaagggccaaggagccgaagagagccaaggagcccaaggagacaaagcagaaagacggtgtcaagaagccccggaagcaccgggaggcctccggtaccaaggaaggtaaagagaagagaagctgcactgattatggatccaggacaaagtccaagaaggccaggtgtgtgctttcctccttgcccttgccttcatggggctgtttgcctttgccattaacccaacccctaggcctgacttgactatacctgtgctggcccaagctgtataccttatttacataacttctggcattgatggcaggtggtattatctaatttctaattattttctaattctgatttccaaaatcacacttcaaaaacactttgcttt

SEQ ID NO: 27430 - DNA, 1163 bp, Mus musculus
ctgaactattctatacacatgccaccgatcttgctttggtctcagagcttgtttgctttgagcatgaaacttctgtagggacgctgcatgatgcagcatgcttcaggcttcctcacagatctacactctcttgaagggctcctactaaacacaatataaaccacaggaatgtggacacgatagtggtcattatatgcttgatgaataaattatggaagctggaatatgttaaatgaaggccccctgaaaaggaaaatagtaacttatatgaagtattatcagataagatgatccaatgggtgtcacttaagagagtgtaagtggatggtggtaaagattgcatgcaatagaaactaataccttaaagggtattgtgttggttctataaaccccgtggtggtttgtatatccttggaccagggagtggcaccagctgaaggtgtggtctggttggaatgggtgtgtcactgtgggtgtgggtataagatcctcaccctagttgcctggaagtcagtcttctactcgcagcctttggatgaagacatagaactctcagctcctcctgcgccatgcctgcctggatgctgccatgctcccaccttgatgataatggactgaacctctgaacctgaaagccagccccaattaaatgttgttttttataagacttgccttggtcatggtgtctgttcatggcagtaaaaccctaagacaaacccctaaaaagaataattgaagaccactgggaagaagctaccaccaaagatatattaaataattacattgcaaagtgtccttagagcatcaatccccatattgctaccccttgcatcagcaaagtaagttctctgtcattaaaggcattcaaaaataaacactgaaaaactttgacttaatgtggtaatagtaaccaaagaatgttgtattagggtgggtgagcatgaatgggaaggtgatggatggcctttgtgaatttttccagccttgtcaatgtgtgatgttgatggatacaactactaaaccaaggaaatagcggagtatttgacataaacagtttctttgtttttttctaagattaaaaaaataagtttttgaatgtgattctgggctgtgataaggggaacaattcatacagtgaactaaaatatcttccttgtatccgg

SEQ ID NO: 27431 - DNA, 1136 bp, Mus musculus
tttcccaggatgccaaacaaatggcccttgtgggggattcctggcatgcggacttcccggctcgttggtatgctgaggacttcttgcttacacataagtgcttgtttctgagctgaggctgtgttgctgggtcggctggcaggttgcaccaggcaggcttgcttcctgcaggggattggggatgggctttttgggctttttttttcctttttttttctttttccatgcaggagagagaaggcagggggatagctcctccctgaatctgtgactagtgggtgtgcaatatgcacagcagtgctgtttggaatcaggttagcaatgaagccatcttgacctgggtgcggtaagccacagcgatggagttaaactcacctcggggccacgaattgtctctttcagtctcaaaacacctccacctctccatcccgaaaggaatatttgagggtcattatcagtgtcttacatggaaggggtgttctgcagcctgagaacagtgccataaaccggaatgtactctgtgaaaggaccatggagctgtcatcatctccctttatgtcagaaggctggagttggggagggggatgagagagagaaaggcaatggtaattcttcatggccggcatcctacctgaggctctgacaaacatttttctgcagaatccacaaggcaagtggctctgagaggcagcgtttcctgccattttataggtagaaagcttgatgttcacagaggagggatatactgccccagtattgggggacaaagcaacattaatgatagtgttgtagaagatacagggtgctcacctatatccttgaggaggacattccctctgcagtgtgaccagaggattggcaagctgacttccaactgggtctcttttaaaatcagaaagattcctcatcatcccccagcccaaagcatctctcaacaagtgacaatgatacagggctggaaggactggtacccaactctctcatggcacaggtgtgaatctgacatcttcctcacttggctttcagtttctttatctgtgaggtgaatgttgctaggtctcagtacgtatagacctaaggtaagcagaggttcccagacatgctctttccctgcacagaggcctgagaagcactgc

SEQ ID NO: 27432 - DNA, 1148 bp, Mus musculus
attgaatttagatcctactccgacatgaagcgtgctttggataaactggatggtacagaaataaatggcagaaatattaggcttattgaagataagccaagaacaagccataggcgctcctactctggcagtagatccaggtaacgagggctggggggaggcttgtcatttccagttgttgcctagttgtatttacggtgtttcttggttgtagtaagcagatattctagccacagatgggtagttaaaacatattccttttttttttttaagatttatttatatatttatttattatatgtgagtgcactgtagctgtcttcagacactccagaagagggcatcagattttgtaacagatggttgtgagccaccatgtggttgctgggatttgaactcaggaccttcagaagagcagtcggtgctcttaacctctgagccatctcaccagccccctaaaacatattcttgaaaagattaaaacatcactgtctcttgtgtgtagatcacggtctagaagaaggtctcggagtaggagtcgcagaagcagccgcagtagatctcgaagtatctcaaaaagtcgctcccggtaaataatgtggtattgggtctcttaattttttaccacttgatggagtataggtgttttctgacaagatactgaaagaaatctggcttttcttgtacagatctaggtctcggagcaaaggtcgatcccgatcccgctcaaaaggcaggaaatccagatcaaagagcaaatcgaagcccaagtctgaccggggctcccattcccactcaagaagcaggtctaaggataagtatgggaagtcacgtagtaggtcacggtctcggtcccccaaagagaacggcaaaggagacataaagtcaaagtccagatcccggagccagtctcggtcccactcgcctctacctgctccaccctcaaaggctcggtccatgtcccctccgccaaaaagagcttcaaggtcccgttctagatctcgttcaaggtccagatcaagttccagagattaaccctgacctcgacgttctttgcacactataacagaacactttcctacttgcttaggcagttactcttccgagtttatactcgcctcttctttaagaggatttcctgaaaaggg

SEQ ID NO: 27433 - DNA, 2711 bp, Mus musculus
ccttctttgtagaattaagataattttgattttgtagcctttgagctaaaataacttttgtaaagattaagctcatttagattttttttaaagtattgcagcaggatctgctgcagggttctgttgttttgttttgcttatttttaaattaactgttcaggctttggatactgcaggctttagagggagaacccaaattttcaattatgttggctttttataaagcttgagttatgtaagatttaaataaaagtttgctaccaagatgattgccttattgaataggtcactactaaggcccttaagtgttgatacctgccatgtgtggagacagtgtaaattctacatgagtgtgaaacaaggcaagtctcagaccagcaataaattattcagtttggctaaccttattttgtgctgttaatctaccaaagtgttttgtctacccctttaataagttgagttaaaagtaaaaggaactttatagttagtgccacaagataaataaaagaaactaaaggattacaatttgaacttttcaagaagtaggtcctagtacttgggatcttgttagatctgtgctctggaggtggtctgcgtgattagtgttagtgtatggtttggtggtctttaatgttttgaaaaacggaagtgattagaagttaagttactgttcaaagttgaaaagcatatatgctacattttctgctgaaaggtgattatatttgacaggtgcttagacatttggctaagatattttccaatcagtcccctttgtattagtggggcatttgtggttagtttgaaaaacagacatggataaactaaaatgcttcatactttataagtaaagcgctatgaatgctgtggagaccaaggtgaaataaatagtgcaaatgtgtaggaataattagattgcagtttccatacatccgcaagcccagttagttgaaactgcaatcaatatttaccttacaacctttccattattcagacatttgtaaagtcatttcatcccaaatacttaacctcattctttagtaatggtgtaggtggattggctcaggtttaatacatctgttattatataatctagcaaaagttggattatagattataacgtagagttggtttgtagggccaaataatcagaggacatgcaataaggcaaggctgagtggaaaatagaggttcaagggcctaggtaggtgtctgtagctgggaatacttgggaacaggggaaggggaatgttttcaagacatttatcctgttagaaaatcttacagactagctttaggaacatagtgtcaaacaaagctgctgctttagtcttcttttctttgatgctttgtttagatgtttataagaaataggtttatttttccagtgtaaatttcagaatttaaagaaaactggttgtagtttactattttacctacctaaaaacagatgtgatggctctttaagaattgggtttgaccaaagttctctttgttttcagggaaaactatataaaagctttctgagccacagccttttaaaaggggaaaggctaatagtaaaatttgactttctgactgcatgcaactgctgggcttgccttctgttagtgtggtagtacatgacagaggcattagactattttttagctgccctcataaatatataacgaataggtaaatgccaatacccatacagtttttctagtggggacaaaggccgttttattagaaatttaggctttcatgcctgtagaccctagttattaaatgcactaaacaaacaactgcatttaaagcattggccttagcagaagtgactgacttaaagtgttttagtttcttactgatgagtgaattcagttccctaccaactaatgcgcagaattgaagaatcccatcctgcacacattggttggtgccctgggtggaatagcaacgacaccaactgataaaagcacaagagaagtggggaacatcttgagtcctgttggacgtgatagtgtttcttgatctgtatgccacagtgcctttatggccagtttgagtcctacctacttcagtttttatgttcccactcctcctgtgttaataacattgctttcatcttggatattttttttctactttgttaacctactttatgctttatctcaataaaatgcttaccaagggaaagacttgttcttcatttattgtgttgtcccttggcaccaaataattgccaggtagttcttttgaagtggagttaaccattagctaccattgatgtgttctcttgttttagctctaaaaagcagggtttggggacttcaaataagtagatggtttgttttattttcatgtgtttactcgtgtccatttttatctgtagttgtttttaaaacagtcaacttaggaagttttaaatacctgaaatgcttaacctagtgtctgtccttaaccctggacctagggcacacttgagctttgcaagtttacccgtcaataccatcgtattccctttgcttaaccttgttctcagaagctttgcctgtggttgacctgattgcggatacgtgatgtggaaccaagtgtggagtttcactttgtgtttatagaaataatccagggcttcgtgtgtggctcaggttgagcatgtgatcttagcaggtacacaatcctcgttggtgtgctgctctccctcacatacagactcataggggcaaattata

SEQ ID NO: 27434 - DNA, 1234 bp, Mus musculus
ctagagatatcattggctggggagaagaagggccatgtgatgtgcaaggggagagagcagacagggcccagatgctggaggtgtgtatgttgtaggaagagtttatgggctttttcttatcacttccagtttctcactgtaataaataataaaaaagttgttcattaaaattaccttaaggagaattgtttttgacaaagttgaagtgattaaaaaggatattgatggataaaggtggagatgtgagtaaatttgagggcgaaagttgattgccaagaattcaggaaagaccatgatagtaaaagggaactcgtcaagtcagcctggttccagctgtgctcagtggtgcaattgtgtaattggagagttggactctgccagtccagtgagctttgtgcctttttctgcataaagtgttcagttgtcagtgatggaaagtggcgggtctcttggcaaggaaatagaagttctgtagattgagacccaagatggttgatgcttgacagattaaactcccatttacttgtgctgaaaggaactctctcttggcttttagatttccgactacacgatggtaccagacacagccaccctctcagagcagctccgagtgtgtctgcaggagggcgatgagaacccccgtgactttaccaccctctttgacctgtccatttaccagctggacaccacctgcctgcccaaggtcatcaagttagtactcaggctgcctgggctacacgctgcactccactctgcttggcttgagaaccggagcctggggataggagttaggtcacacagctgtaaagggatgacgttctcagatctgtggaagtcagtagggaaattggtgtagggggtgtggatgatgtaggggaactgctattaattacaatcccctgtgttccaggatctatgggacattagagtaaccaagccttttccacttcgccaacagcttttctgggttaacatagagtcctgggttctaggcatatagtacacagatttgtgtacttcccttagaagcacttaaacatattagagagagcactgaggctcttggggcttgtccatcacagcctatagacacacgctggcagactctttcctcacagagatcctttaaagctcaggtacccttcctaactccacctgccagcactcctcgtctagtcagtcagtgacagacgggtattgtgtgtgcagcttggtgcaaaggctcctgcctaac

SEQ ID NO: 27435 - DNA, 1400 bp, Mus musculus
agttaagggttaaccagactgttctgtgtttaggtactgatgaagacctggaattctatgtcaggaagtgtggcgacattcttggagtaacaagcaaacttccaaaggatcaacaggatgccaaacatatccttgaacacatcttcttccaagtggtggagttcaagaaactgaaccaggaggcccactgaggtggcagcccttcaggtgatgtcactcactctttgcaacattcattagttcttcagtgcttactaagtgtctgtctcccagatgaacaacagatgatgatccttcgagaatggaacttctgttctagctggagggtccccacaaacagtagcgtaatctgtaagcaaacacttagacgccagaggatggtaagtgctgtggtgtagaaacagtagagctaggctggagggatctagtgtgccagcgttcagcagagtgagcagagctggtcagtacacactgatgccagcgtctgctgtgctgtttgtgtcagaacctataacagcacttgagtgacacatggttgctgtggcagtgtgcacaatctgtcctggagttgtaagaacttcatcctgggcttagaatcagcctttaggccagctaatccccacttatcccagctaatggtgattttgaatgtcgaattaatgttcaaaataccaaagagttcctgtttcaggctctgaatttaaataaaataaaattctgtgtttcctggctcatctggaacatgatattgatgtgactgaaatggcattccagaacttctgacgactgtaaagtaccttctgcccgcccgcccgctgagctctgtggttttgaattcttctcaggaaagtatctgtacttgtttttctctaacgctgtggaaggtttgcccatcctttgtagtgcccagatggaagagatgattcattggcataaattaaatctgtgattgagcttttgtaatttataaaatggtctgtcattgatatccttttttctcattcctgctcaagatttgaatctcttttttttttttaaaagatttatttatttattatatgtaagtacactgtagctgtcttcagacactccagaaatgccagatctcattacggatggttgtgagccatcatgtggttgctgggatttgaactcaggaccttcagaagagcagtcagtgctcttaaccgctgagccatctctccagccccaagatttgaatctcttattaaagatgtacctagtgcccggcatggtggcgcacgcctttagtcccagcacttgggaggcagaggcaggcagatttctgagttcgaggccagcctagtctacagagtgagtgccaggacagccaaggctacacagagaaatcctgtctcgaaaaaccaaaaaaaaaaaaa

SEQ ID NO: 27436 - DNA, 1196 bp, Mus musculus
ctaggactcccactgcagagaggggaatcagcttgagtttcggccgctagaggccgccagctctgccgatgcacgctgtcaagctgcggagactgccgatgaactcgcgctgggaaagagccaaggtgctgactgacaggtcttcaggctccatgcttcttccagtgagtctggagagacccctagagtgatgcaaaaggagaaaacttgctgtgtccccctgcgagcttctcttcttctcttcagccattgtcactttttaaagtgggattgcagttccaagagttttatacagatggcagccatcatcctgttctcaggcttcttttagcaaagcatttcaaaatcaatttctctctgtaatttgtttacccaggcagttgttgagggtttgggatgtcttcagtttggggctgttgttaatatacatgtgaaaatctgtgtgggcatatacatttatttttttgaaggtttgaccatacaatgggtgtatagatgaaaggtttcccttcctgttttgggggagcagttttgagtgggtttggttggttgatttggggtgttggtttttgagagtttcactgtagaacccagggtaatctggaatttaccatgtaggacaaacagggctcaaactttcagtgatgttcctgcttccgcctctggttgcaggtctgggccacccggcctggtttatgtgggtaatagagatcacacccaggccttcatgcctagtcagtgaacacactaccaagattctttctaccccatcccccactccccaactcttgctttataggccagccattggatctttagcaaccttgcctctacctcccaagtgccatgtgtacagttttagttacagctgtgtgcttgtcttagttagggtttcattgttatgaagagacaccatgaccaaggcaactcttaactggggcaacatttaattagggctggcttatagtttcagaggttcagtccatcatcatcatcatagtgggaagcatggcagtgtgcaggcagacatgatgctggaagagctgagaattctacatcttgatcccaaggcaaccaggaagagactacttcttccctgcactgggcgggacttaagcatagaacctcaaagcccacctccccagtgactcacttcctccaacaaagccatacttactccaacaaggccacacctc

SEQ ID NO: 27437 - DNA, 1532 bp, Mus musculus
gctggaggcccattactgggtagggagaatgtctccccttgtcgcagcgagtggaaggcagaagcctgggagacacttgtcgatcaagagtggctcgaatttgctggcgttcctttcttgttagcattccgggaagcacaaagcccctgggccctccgcgggatgcgagacggggaattcgttgtctcatggggtttcggcggccggttcggtttggtttcagaagccttcttcctgtcccacgctagttttgggcagttggggatgagtaaagactattggtgtgcaacgagactgctctgctagcagcctctgagccaaaggcaggaactgggtttccctcttagttccctagaggttaggtggctgggtcaagtctggacttttgggacacctgtgtatctggggcctaatcgcggggctttccagcctttctaaggcgtgggataattgggttctgctgtgttccttctgggtctttccaattcagaacgcctttccaccgtcttcagatggccgaacctggcctaggatgaagataaggcacagagatgcctgcttgcttacttgcagagttcttcgtggctgggttgggtattggtttggtctgtgggtgctgatcagggtggcttcccatgccccggtgtctaggacagttcagtgcccaggaagggcatctggaagtactaatcccagagccccgggcttatctgagggtctcttttgtgaagtgtggactctgtgcccctgcatcctcacgagcctttctctgccacatggtgtgactccctgtaccccagtggcccacttccctcttggcctctgactcacctttccctggagcatagcccagaacgtacaagggcaagagaaagggtatgtgtatatacaaaagtgtgacttttctttaaacagcacactggcctctgcttttcatgctacggttcctagggaggttagggtgtaaaaatgtggagcttggtgtgacataatcgttgtcggcctcacttttcccgtctgttaaatggagcccttgagaatgcgcaagaaggtgtgtgactgatggatactcccatctgtttaatagtgtgaccatgccgggtagcagcaacacatgtctttaatcacagcactcaggcaggtgaatctcttcagtatacaggacagcatggtttgcagagtgagttccagggcagccaaggcaacatagagatacctatctcaaaggacccccgccctccaaatactgtcactattacacagcactgaggcttcaggctctcttacacagagccttttccctaggacaccggctgagcttctaatagaatctgggcctcgtgctgggttttggagaagcaaactcaactgataatgtttagtagattttgcctcctgctttacaatggtaggtggggcgtgcattgggtcagcactgacaatacaaatctgctttctggattctgtgacgcgtattgctaggcttaggaacttcttttcgttttcgtcgggatttttttttagaattgttt

SEQ ID NO: 27438 - DNA, 2037 bp, Mus musculus
atatatggagagcccttgtttggctgttgttttctgaaactttcccactctgtggctgctcttggatactttataacaagcacattgaaccttgaacatctgctgcctctaagtacctaagtcagtcctactggcctatctatcaccatcatcctctccagccatagcctcttccctcccttctccccagtttagctatctcttattttaaaactgccctgcctgaagaagaggcggtcactgtagctcccagtttatcctccagcacagaccggctccacttctgtttgcctgaggctttgattggcatctgcctcccttcaagcagttttgtggcttcctgctaccgcaactaacacacttggcacttagtaggccctcagttcctgagaaatgtatgaatatgactgctatcatagcgtctgtaagactctccatacatgtgagctaaaccaagccttgtgtctttcttgcattggcaggacgagcagttgagggccctggtgaggcagtttggacagcaagactggaagttcttggccagtcactttcctgtgagtattgcctcccccagagcaagggttctgggtggccccttgtgagtgctgtctagaaagcttagcataggtgagctgaggctgggaggccaggcttcctgcacaggccttggggaggtggaggctggtggatctcttgagttccaggctagcctagtctacagagtgagttgctagacagccaggaatacacagagaaatcttgtagtcaaaccaatttatgcttattcctgactagtttacgtacgaataaactagacttggactatggtaattttatttggctttgacaattactgggggggggtcacctctaatctactctcctgactgctggtctggctacctccccagccctgtgccccagatacttcctgtttctcctggccacgtgcttatggcacctctcctctcttagaggcttcttctcccctcctcctccctctctcttcctttccttctcccccccccttcccctcccttcctccccctcccctccccctctccctggtctttcctcctccaaccaggtgactccaaacccacccacctctagtccctccagtaattggctccagccaattttatttaaccaataattgtaaatcaaggaacaaggtttgcacaacaaaagctggtaaactggagaagttagcattataatagcagtagacctaacctcgaccaacccctgtcagtctgaaaaaccaaaaagaaaagacaccaatcaaataaaacaaaataagaaagcacccaggaaccggatctcacatggctgcctaaggtgcttgtaccctgccccctgagctcggggctcaaccagagttcaatcttgtcccagcattctttctgttctagaaccgcacagaccagcaatgccagtaccggtggctgagggttttgaatcccgaccttgttaagggaccatggaccaaagaggaagatcaaaaggtaagtgctggctggcaaaggggcagcacacacagtgggcttgcagtgagtctgagcatccctgtaccatccaacaacttcagggacttgtgcgtggatgtgtgttgtgtgagaggccagctttgtagttctgctggtcccatagtcatgctatagcataagctgacctagggtactcctcaaaccccagccttctgagtgccaggctgagcggctacctcgccccatggattatccagacagctgtttgttgttggggtttgtttttcgagatagggtttctccatgtggccttggctggcctgaaactcacagaaatccacctgcctctcatattctccctcggcctcccaagtgccaggaaccaccactatccagtgaaactacccagcttttaactggtaaccatgcctgccactagggcaaggataggtaatgaatgggtggtccacataagaggcttgcttagccagtggcagcggccattgaggctatgataatgtgatagtcacagtgataaaggttatac

SEQ ID NO: 27439 - DNA, 1187 bp, Mus musculus
gtggccaatgcaggaggcaggcagatctctgtgagttccaggacagccaggggggctaaacctggagaaaccctgtcaggaaaagcctaaactgacaagaattgaggcgtgaggcggggcccagcactggtggctctgactgttactgtttatgtcctgagcaagagaaccttactaagaggtgatggaagactgaaatctaggtctagttagtcatgacttgaggctgtacagtctcctggtttgatgtccacagaagtgctggagggacaggcattatcatgtcctatagtatggttggggctgacctcataggcttttgtagctctataaactctgcaaagcgaggcccactggatatctagatgcttgagtgaaggcgatgcaggggctggtccctcactgatgttccctttaaggtcattgagttggtcaagaagtatggcaccaaacagtggacgctgatagccaagcacctgaagggccggctggggaagcagtgccgtgagcgctggcacaaccacctcaaccccgaggtgaagaagtcatgctggaccgaggaggaagacaggataatctgtgaggcccataaagtcctgggtaaccgctgggctgagatcgccaagatgctaccagggaggtgagctatctcctggtaggtgggtataagtaagcagggtgctgttccaggaggtgggctatcacctggtaggtgggtgtaagcaaggtgctgttccaggaggtgggctatctcctggtaggtgggtataagtaagcagggtgctgttccaggaggtgggctatcacctggtaggtgggtgcaagcagggtgctgttccaggaggtgcggcccatatttgtaataaaggagtgtctcagagtactgtgagcagccctctatgttctttaacattcagccagccaggtcttatagagacatgcattaaaaggaagtaggcccccccaggaatggcctgtctaaagagacagcaccaggaagtctggttgtaccctattagaaggaatataatagaaacaccacttcctgtccccagacccgtgttgaacccaagctgacttagaactcaggaccttggcttcacaagtgatatggatgtgggtgtgtaccaccatgcctgaccagtctctgtattaagtatattctacttaaaagtggtgttttttgt

SEQ ID NO: 27440 - DNA, 1238 bp, Mus musculus
gatgcagatttccatggaaccccagtttctgatctgtgttgtggccaaggttgctgggattttctttcattcttttttaaaaaagatttatgtatttacttatctcatgtacgtgggtacaatgtcactgtcttcagacacaccagaagagggcatcggatcccattacagatgattgtgagccaccatgtggttgctgggaattgaactcagaaactctgggagagcagtcggtgctcttaaccgctgagcaccgtccagcatcccgcccctgtcatttctcaatggtttctccagatgtgcgctctgggtcagtccagcttgttctccatcctgccttgagttccacatttgctcatttcatagagctaatgaggaaattcactaaaccttcgagggctggaaacagtgaggcttcactgtacagctggaggatgcctgtgtccagcccttcacgttcaggtgtggggagaagctgcggcagccgagagctgcgtgtcagaggccccgggttttccccacaggacggacaatgctgtgaagaatcactggaactccactatcaaaaggaaagtcgacacgggaggtttcccagccgagtccagggactgcaagcctgtctacttgctcctggagctggaggacaaggaacagcaccagggtgtccagccggtggacggccaggtgagtgctgggcggtcttgcgctctggctccgggctccacaagctggctctgggctgccgcttgtgggttggtttgctttgtttcctggtcatctgaccctatctccccaagaacttccccagagccacccacccatttctgctctagggtctgagagtgagtgagtgagtgtggccagcacgtttctagaacttaacttgtgacaaatcaaccctagttctctttcaggcgaagtgagcagcatgatgggtaactgagaacgggctggggaggggttctcagcctctgtcctcagcaactgtcttcttgtcaacctgcccatgtggaggtcagaggacaattcatggtgactcatattttctttcctttttttggtgatgtgtgtggcggggtgtcttgagacaggctctttctatgtagctctgtctgtcctggaatgtgctatgcaggccaggttggcctaagactgccacccaggtcctgggattaaaggaagacatggaccgccatgtttgttctgccttcagagaccaatgtgtaggagttggctct

SEQ ID NO: 27441 - DNA, 1196 bp, Mus musculus
cactgctgtggggtttaccacgcaacttctggggcagcagacaagtgctgctgtggccagcattgattccagggcctctgtctcgtctatagtctgtgttccatttagttaatgacagtgtcatttatgcatcagcctcattggcctctgtcatgatactaatatgttttgaagtgctcagtacagttgaaatgtctctcaatttctgtccctgtgagttcctttgatgcttgatttgggttatgtgtttttagctacaagctgcagcacggtcaatatttcaacaaaaatctacagtgtgcccttgtattctacagggaagtctcgtgagcagctggccgctggtgccctctattgtgaaggaggagagcagcgaggaggagattgccatagctgctacttctgctaaagaactcggacatgagcctgtccctgctgatctgggagaagtgcgcaccccagagcccccagaatctctcaagcgtgaataccaggagttctcctccccggaaacgagcctgccctacaagtgggtggtagaggcggcaaacctcctcatcccggctgtggggtccagcctctctgaagctctggacttgattgagtcggtatgttgatcccagcaggtacacagcaggtaacacttctcttgtgaactgccccttccccaacctaccatttattgaatgatgggggctgcccagctctgagcaggctggggacaccagctaggtcattacaatatttaccctccagcatggagtgggtgagaaggcttcccagagatgggccgaattggtattacagggttagatctcactggagaggcgccgccaagggccaggagtcatggttgctctggagcaacaagagggtttggctgctcagccaaggccatgcttgctgccgtgggccgtgctccctgtgcggcttttcctgaggagacaaatacacacctgtttaccccagacctgtactgaggacagatgaaggaagcaattgcgcacaggtctaacatggcagactaatgaaatccttggagataccagcaggattgtgggtgacaggaagattcctgcatgaccagaagaagagtgacagactcctaaaggcagtctccctggagcttacagcccaacatacatgaaacctgggggcagaatctctttttcaccagcagttatttattgctttat

SEQ ID NO: 27442 - DNA, 1140 bp, Mus musculus
ggatctacttagggcagcgtctccaggatcaaaatggaagcttctgtttctagaaagctttgggtaaagacagaggacatgtggttcctgtttgttcttaggggcttagttagcgtgggttccttgatgtgaaagtgagcaaaggagctagtgagacggctcaggggatagagagaggtgcctatcaccaagcctggccatctaaatccaatcctcaggacccacgagctaggagagacctaactccttacactagcacataaacgtatgtaatgaaccataaaccagcaaagccatgttttcccagccggttgctatggggactgtaaagctgctgatgggcaagcatcccattcaagtttccgtatatgtagaacactgaagaaatggatgtagacagtagttaacagtagtgactaagtggataagggaccgaacttgacactggtcacttaagttctgctgtgttaggaggacctttaacctccctctctggcaggaccctgatgcttggtgcgacctgagtaaatttgaccttcctgaagaaccctctacggagggcagtgtcgtcagcagcccagtgcagccccagacgtcgcagcagcagcaggaggaggcactgcagtcatcccagcaggctgccacgccggggcccagtgtgactgagtaccgccttgatggccacactatttcagacctgagccggagcagtcggggggagctgatccccatttctcctagcactgagtttgggggctcaggcattggcacacctccctcagtgctcaagcgacagaagaaacggcgtgtggccctgtcgcctgtcacagagaacagtgccagcctgtccttcctggactcttgtaacagcctcaccccgaagagcacgcctgtcaaaaccctccccttctctccttcccaggtgtgtgggcacctctgcctacctccgcttccatacataaatatctcgtgcccagcgagggcccggcacaggtacacactggataatcagtgttcaccgattatctccctgtgcccggtgctcaggtgcccgcagtgagcaaacccagagctggccctgcccccttggagctaacactctaggctgcgggtccagacgagtggtcacatggagaagga

SEQ ID NO: 27443 - DNA, 3035 bp, Mus musculus
ccagccctggccccagtacagggaatagtggggtcgggggagcatgaatgaaggatatgaattgctaaacatatcttgcaagtagggttgtgtcctgtgtccttctagaaaagcgtttgaccagggaagcctgtaagactggggacttgctcacttcagtcagacctttggctacttagagtcctttttttttttttaagcagtactaggggttgagcccagggcctcacccacccactgtgggcatgagctctgctgtggacagatggtcgtgggaagtagttagcctgtgtccccagcctcagttaggaccttaggaaaggcagtactgagcagagccgggagcgctcgggcgtttctagagcaggaagctggatcctcatgtgataggagctggcattgctgggcactgaggtgggcagctcggctgctcctttaattctttaagcaaaaagattaagggggctcctctagacttccggatcataaagggacctgggccttggagaggtacgtcctgctccgaatcggatcgccgcagccagggggggtgccaggttgtgttggttttgttatgtttttttgtttgttttgttttgttcctccttgcaaagatcgtgtggcaaagtggtgacttaactcggttttgatttcagccaaccagtgtcacacccagctcctgtggcttcacctcgccaggtagcaaagagggtaacagcctgctcaaccagggtttcctacaggccaaacccgagaaggtggtggccgcccagaagactcggagccacattccaacccctgcccctgtgagtgcagtaaacaggtcccactgcccgccctttcacccccagggcctgacttgtgagttcctgtggctgcttgcctcattgacttaacttttacagtcttagcccaaacgctacttcctacaggaagccattcctgacctcactggagagatgccccagcctcatttccttcctgaggtctggacttaactgtcactaggatattgtctgttctaacagagctggcctgggtcttgcttcccagtgccttcatatgcttgactggctccttgggatctgcccctactttcctgtcccagcctcctgctttactgttaaagcccaaggatggggcctgttttccctggatccaccaggaaaatggagcacaggctggcaagagggaggggtcctagaagcgtccccgctctttagtcaggaccactagggtttatacagagctaaccctctcacctcctctcagatgacccatgcctggaagacggtggcctgtgggggcaccaaagaccagctcttcatgcaggagaaagcccggcagctcctgagccgcctgaagtccagccacacatctcggaccctcattctgtcctgagggacttgaatggcaagagccggctctcatgtttacaggggtagggtgtggggtaaggttaaagtcacattaagtgaccagcttcaggatgtcttctgccagcccctcaaactacttaggtggcagaagtcacgtggtaataccccttccctgagtctagctttgggaagttcctggtgctaatagaacaaggtcccactcctgggcctgcctgtcctctacccaatgctagaaggaaccctatcagggtctcccaggctctcatccagtctggcctcatctcagactcctgcttaggatgggggtgtggctaggggtgcgcctttcctcgtctcctgttggtacactgtccccacaataaaatgccattctccctctgccgccccgactctgccctctgagtcctgaagtgcctcgatggccttttcctgacatgtagacctttgtcactgggtacagctttgccctgtgagtatctctgcaaagctcccaagaactatgtatgagtggatgaagatgggttctgagaacttgttggagcgctgcattcaccttggccttaatgcatcagagtcataacgcacttggcttgggccatcttccaaggagcggctgccttaagttgagccagcccttaggtaagaccattaatagagggctggcagacctttcaactctagccaatgtgcagaaggctgcccagcccctggattctgtatcatgagttggtggcagcagttgcctcggctgttacctccctaggaatcagtgggtagagtgtggcccatagctggtgatcagtctcaaacttgaaaagggagatgctgagcctaaagtctagatcaggaagtgttttcagtagccttgcctgggtgtccttgggttggggatcatatgggagccctatacttagtcctgtttgtaagggagatgaggcaaaccctctccaacagggcaagagacaacatctgaagacatgaccaagttagcacaccagagtctagacactttcctgctcttatgcaaaggatgcaggaggtggactctactatcccactctgcctcatcctacagcctcctgagccccatgctcactgagctgcatctgcctcacccctacttgttttctcagtatgactaaggcaacttagagtagctacactcattggtgtgtggtctgtgctaggaaaggcgtgggtagggtggggtgaggctgtcaagcagaggatagaggctgctggtgcccacctggctttcctgccgtctaggatctctccatgggtgctgccacctgcattattagggtggctcttttaaacctggaatttcctcgcagacacacccaaatgtgtcttctggtcagccaagttgacaataaagagtaacacattgtagtgtctgactcctcctttttctgctttcttggggaagaggcctgaactgccttctttccaaaggttcccaccaagactctggagtgtcatggctgcctgctgttgcccagaaatacaggtctaaaggctttcaagaggagccctgtcccctggaactttggctgtgctgatgaactagcctaggagagacacttgtgctgcggatgagctggaagggacctcagctgtgctaaatctttg

SEQ ID NO: 27444 - DNA, 3018 bp, Mus musculus
tttttctgtgcttttagagatgccatattaaagtaataatgtcctaaggaggaaccacttcagggactgcatttccactttgccaataattagagtaattcagatagtactgaataacattgctgaaagaatagttaggtcttagcaagaaggaaaatgcttgagagtcacagtcctttggccataataactgaaagtagcttctcagctccgtactagaacagtactagggttaatggtgccagctaagcctcactgtggggtcttttggtgttggtcaggatgggtggaatgggagggatgcagatttgcaatactaatctctttctccctccctactctctgttttcttagccctgatgccaaattccagaaggtatccagcaagtggctagctgtgtggttcaaaatgggctccagctggttgtgcctcctcctttacctctggactcttgtggctcccctggtcctcacaggtcgggacttcagctgagctcagtgtgtcaaggacactgataaagctgaccagagtctccttttctgaaaatgcatatccattttgcgtttcatcaacgagactattaagtgaacgctttgcagatttggctgtattcaggtttatatcaaaaggcaagattgagtaatgcttgatgcagaatctgagctttcatatatatatatatatatatatatatatacacacacacacacacacatatatatgtttatttgtaaggctatagcacaaagggaacatttttgtgttttaacatgaactacagctgtgctgtgaagagaattctttataaagacctgtagattcctacaactttggtttaagttttaagttagaagattgttggatatttaaggctatttttaatttctattacagtctccttaaaaaccaaaaaggaatgcattaatccacatttcccttcttcagaggtgtagtgtcctggctcttggcaaggaattatgtatttaggtcagtccccagaaatgcagctgctcatacagctgagagaaggctattattgagttcctttacttactttttatactacactgatgctgcttgatagaagtctgtggctttgtcagatatgtcacccaagtaaatgctttgtagatctgattaaaatgaaaagctcacttgagaaacactgcagagttatgtaatgatcttgttgtgagtgtgtgaaagtcaaaggcatgtcagtttattacatttgcaacataaaagtacttaattaaaatagatatttagtttcttgtttgtttgtgtatttgtttagaaagggtcttttccacataacccagacttgcttggaatgcagatcatcctatctccacttccaagtactgaggaggaggtttctatcaccatagctagtcttttcttaaagatccttctgcagtggggttgataggttttcttttattgttgttttcttgtttagagagtcccaaatcaatctgacatttcaggcaaaatgctcctcttctaacacttaagatttgactagtcaagtttttaagttcatttagaaactaccctaaatattttctctggggaagatcaaagtaggtaagaaacagtttaggcactgtcaaaaaagatattcctgaaaagcagtgtgcaaaggaggtatgataaaacaggcttttcaagagaaactagtatcggttctgcactaggccctgttggggtgaagacaagacagacattcttccatctaaggaaaatgagcggaccagcctggtaaattagtgctgaaaactcataaacagaaatcagtggatagaggctagcacagtgacttcctcgagagagtgctgttaggatttgtaacgtaggttcacaccaggtatcagggcagttcatctgagatttgaactaaagatgtaagggggtttggggaaaaattgacagcttagagaatttccacattggtgtttaaggggataggaaaaacttatttccagtttaatctgtgtacataggttctgcttgggatcctggttgggatggaggtggtcccttcatatgatgaataggtttgggagtcagacctctggggtctgcctgacctctgctattttctaggttgagtggctgtctaatgctcactgagtacatgctgtgcttgtgaccttgagcactctgcctgggcctcatgcagaacttagtaccagagattatttgaagataaagttgtctcagaatggatatgttgtaaggatgtttgacagtaagtgccaatgtcactatggattaaagcaagactaaatgtacttaaaaggtcagaagtgttcagaatctgatagaggctgggttgaatgtagttttagagaattaaacatagttgtaatatagacagctaggtagagctggaggctagggaagctgggtttgatgggttgttggaactactgtcctttaggatcatgtgtcaaagcaaactacaaaggatttgtgaagcagataattgtggcccttaagcttaactgtgtgagacaaatacctgtttttaacagtaggggaaccataaatttcaaagcggatcctattctttgtcttatatgattaaaaataaatggagttctaaactaccaaataatgtaatagagttcaataaagggttttttttttttttcaccatgataccttagattaatttgaaataagttctcttaaaaacagagcaattctactgttgcttggctgcactctaagttaagtctggctgttaacatgaaacagttgttcatttcagtctcgtgcagaactgtacacaggcgtgaaataccggcgttttgagtaagcctgtgggtatacttcagaactggacatagttttgagttatctcatgccagatgagtccacttgatatttcatcacagactcatctgtagactgagggccctgattcagatgagtggcatggtctaggaattcattgaaggcaacagcagaggctggctacagctggggaaactagttgacccagcttg

SEQ ID NO: 27445 - DNA, 2066 bp, Mus musculus
cattttagtctttaaataaaccatcctgtaccaagggcagaagccactgcccagcctcatcaccttggctcaaggagagatggcgttccaggaggagggatgcagagctgtaagtgtaagaatttagaggctccaatgagacctgggcagctgccttcctgtggccctccctggggcctgcgggagcccttttgcatgcgagggaggacacagtcaggcccctatagaagcacatttctatcacccctcctgggaggcgcccagcagcccgccagtcctcctcactagtccctgctgtgtagggtgtagtccaggttagctgggtagttagtgttcacgcctgaggcctgttagctcagatgtagtcttttttttttttcttcaagccccgggctgtgaggagagggagaccccagtacattccagaagattacagactctctctagcctgggctgggctgggctgggctgggctgcctggctccctggaggccagcccttccgccttctccctgccttcctctctcctcccttctagggttgtagccctaactgttcatcacactcagcacgctggtgtcacaccttcagcattcccgagggttgttgggccttgcagaggggcctggactccattagagggtgtcattttccaccaaggatgccaggactctattgagtcccacctggttcctggttcatctaccaagaaattccttctacttggaaattctcccattcccaggctggctaagcccggagtgccctttagggttctgtccagttctgtcatctccacatgcagctgttgacactacacagggaaggggctgtggacaggcccctcttctcccattggtcttcagagtgtcattgggactgtggatgggcaggcctcctgaacaagggagcagggctctcgatgggctcctttttgaggcccacagttagccatcaccccattttttcaacagtgtgatatcctcactgttaggttattactcgctgtttggaatattttgagccaggagggcaccttccctctccagctgtcactgctgtggttgttcagggtgggacagagcctggctgtcacgaccaggggggagagactcagctctaatttgagagagagagagagagagagagagagagagagagagagagagagagagagcatgatagcaccaaggagcactgactccaaagcaataacaccctgaggtggtcagtgagacccctcagtgactttcttgtttgttctgtgaaatctcgctcacctcctggaggggtagagtgaggggctggagccccatttcttgtaccattgtaagcgtgtgccccacttccaaggggctgtgaccactgggtgtgggagccatttctgtcctcaccaaaggactcggggcagagtgattttcatccatagcttcggggaccaacaagcccagcctgttcccactgctgtctgaccctctgtcaactcaaactctgccatcaggaaaggagcagagggggtggagttgggggccctttctggtgctgtgtctctaagggtgtttctttttttttcccctctggacaaaagtcatgtataggactgccatgtaaaggggccatctccattttcctcacccagaatgcctctgcgttctgaagggaagggcctgtagatttttagcccatttgcatttttaaaaagaatactaaggccctgcgtgaggagagccaacgtggggtccttggtatgtccggtggcatttccgcctaggggtccccttcatgtctcatgctgagccagagtcagggaaggatgaaggggacagccatttctcatcctttctgctgcttttctttggagcctcctggtggctcccagttatgtcaggacaaagctgtagctcatctgagaggttaggaaactcgggccacagcaggcctctcagcaacatgcactgggggacaaagctgggagaccactgctcaagggcaggttggccaccatcattatttccagccgttaggcacaggtggccctgccctgcttggctctcttctgggagaag

SEQ ID NO: 27446 - DNA, 1099 bp, Mus musculus
gggtgttaggtaggcgaagaaagagggactgtttcatttttccttgtctgtgccttcctccaaactagtagatgttgtgtaacccatttcctgttgaaattggcccggctgctccaaatccatgctatgtaagtcttgagttatgtaagtaagcatcagggcctttagttagtgttttcttgtgtgtgtgtgtgtgtgtgtgtgtgtgtgtgtgtgtgtgtctgcgcacaattgaaagttttagaaaatacccgttttctttttaaagacatacatttatgtctgcagtaacatgatggtttttaatcttcaagaactctgacagtgtcaaagaatcttaaaatagttattttggatttgtttatttattttgatttttttgagacagggtttctctgtgtagctctggctgacctggagcttactctagaccaggctggccttggaactcacagagatccacctgcctctgcctcccaagtgctgggatggatttatttctttttatgtatataggggtgtgtgtgtgtgtgtgtgtgtgtgtgtgtatgtatgcatgcatgtgtatgattatgtgtatgcatgcgtgtgagtgagtgtgtgtgtacgtgtgtgtacgcgcgaacgtgtatgcttgttgctcacagaagccaaaagagggcattgcatcattgaagctagaattctgggtggttgtaagctgctacaagcatgaagggatttgaacccaagtcctcttgaaagagcagctcttccctgctgagtcaactctccagcccctggcacttctctttgatgctgcatgtctagtgtggcatagtccctcaggaacttgttctgtagaaagtcaccattggtgggctgcgcataagaatgcatggacttgtaggtgacagctctaagagaaaggcctagggttttcactggtttttgcctgggagaactgtcatttctgctgacatttcttctagccagaatgcttgctgtttgactcttagctgctgtgggatgctgtgaagtagacagtgagaagggtcttctgtattggcagggtgtagagctaaggttactttaaaaaagaaaaagcatcatgtatgta

SEQ ID NO: 27447 - DNA, 2402 bp, Mus musculus
tctcttatggcttcctaggacataggcatgcaaaaggcacacagacagacatgcacaacacccatacatggaaaacattttagtttttttcacaatggtaattaagtgaggtaagctatactggacctcctcttgaagaaaacttggaatgaccttaactttattacagctttttgtttctttttcttttgcagctgtggacgtcagaaaaccagggggatgaaggagatgctggagagggagagaactaatgtctgttgtgctctgtgatctgtttgtgtcactttgtatcctccacattatgtccctttgtgcgataaacaaaaacaaaaaatcgaatgtggactttcgatttttcacagcctaagccttgcaaagatggtccctgggatgaacagctggtatttgtatctaaagctcagactggtcccttaataccatggtattgtgaagtcttgattttgatcaacattgacaaggattactgtgtgtttaatttttacaaactgaacactgtgatcatggggttttataacttagcagaactctttctggtaggaaaaatagacctgaattatgtgtaacttcttggaaagtttaatctgatatcaaaatggtcactgaaatacaattctgttgtaaagctgtacagaaagttctagagattctgtggtgatgctgggacttggtgagatgctgaccaccggcatcctgagtttggtaactcacagtaattctgcctgtggttgagggcttaccaacccttgatcattcagggctgttgccactcaaaagttcatgaccacaaatatctgcagtgtcttctgaggaaactcaaaacctgaaagtgaacttctttggccgataattgggctgtgtcaccacaataaaaaaaggtcccgtgctcataccacctgtgtgactaaaccctttactatagcagtgtgttcctgattagcagcgtgtgaaaacagggctgttaccccctagctaaaggagagggggaaggaagagagaaagcagtgtatcttacaaatggccagaccagttttctggatgattctttaagaataatgtgttgaggcggcctctcgcctgaggagcactcatagtcttggggttcttctagcttggagggtggaagctttgaaatttaacgttctttccgccctgtccttctgactgttgacttttttccctctttaaatttacagctttctgcttccttgggtggttttctttggaagcctgtattagtcaggactgtatggacagggcggggtgttgagcacagggtgagcaagctttgctttaaggtgttgagaaagaagaccttccagtgccaccaccctgccttcctccagttctcagcacagttgttcttcatagtgtgactcatccaaaacaaacaaacaaacaaacaaaagtattttgaagtctccatgatttccccctattgcactcagccctgacaatcttgttagtgcctgtcaccagaccctccagtgtactcatctagcttcgtgctcagacacgtctcaacaagaccttagaacacagggaagttgcatggacactacagtcgagacaaccaagaacagccaggccttcagtctcacagtctcacccctctaccttgacattccatgtagccgtagacatagtccatctgtttgtccatctgctgaaatatgaaaagaattcatgcactgatttaaaccaaaaaaaaaaaaaaaaaaaacccacaaaaaaaatctcttctttctagctgaacaaaaaaaaatgtgcagttaatacttggcgcttgacaacgcagtagtgagtgtggaaccaagcctgtctgtatatctggtagctctttgctctggttttttgtttgtttgtttgttttgttttttcccttaccagtattctgcctaatgtttgcttctgtggtggttctatttgcctagcaagcacacccgtgattgtgaaaatagtgtagcaaaaaagaaaagaaaccccagttactgatgtgctagatccgtgtatgtctaaacattctagtttcaccttacacagagtaatcaggaaaatgtaaaaacttaaagtgaaataaaacattttatcagttagttgcctgtggattgatgtgtcaccgccacccctctcgttctcaggaccattcccatcccgtttaattttggcttcttctttaaagagtaaatagtttttacttcaccccttagaaccagcagtagagatgtcttaggtggctgtctctgataagttggatgtgatcactgccggcttgaaccagagcagccatgatcgcctgtgcaagaccctccctcgcctttcttttcgagggggtggggcgtgttccgtaaggtcacatgagcacttgggctggacaggcacag

SEQ ID NO: 27448 - DNA, 1412 bp, Mus musculus
ccatgatcttgcatcagcagctgtcatctgtctgtccatccattccccacccccgtttttgtgtcctctaggtcccctccccaactctctttctcttttataggactataagtcaagcctttcggatatcagcagcctcctacaaattgaacccaggaatggccctgcacagaagttacggcaggaagttaaccagaacatgaactaaaccgtagagggcaacagggaccctgaacttgaccttcccagagaagccagggcctcccttgcatctgccccaatgcccagcatgccgccaagggagtgcaaaatcaaccccactttgactccttggagaggtagcagcctttcacctgacacattttacttgttcagattaagtccattacagacaagcacaggactctttttttttttcttcttttttttttccagaaaggtccccactagaggtttttgttttgttttatttttaatttaaaaaagcgtgacgccaacagccctggcctcattcgcttgcttctgcctggcccttgtcaacacagtccttggcaactgtccctgacccagatatgcacagactgggtgcctgtgacttcctctgccgccatagctctgcagttcacctgagtgctgacaggctagaagtgcttgctcgtccgcagccacagcggcctgttgagctggttctccaaggctgcctgccatctcctcgaggagacagctgctgtctgcaccctgtccttgacacagtgtcctgtgttgagccccagtgcctttagtccaggccctttgtgggaaggcagagcctaacccttggaggctctgtgttgttgccttctgtctgagctacctacgatgttcaaagagcccagattcctcctgcaatggggagagaggcctccttgagattagtgtccctccagtctgagcaggaacttaaccttttcccccatagcagcagcccctcgggctcctttgttttgttttgttttgttaatatgttggagttaattgaactgattttattgaagtgtgtgttgctgttgcattaaaaggttttcttctatacagctggctctgacgcatttgtttatgccttctcgggtttgctcctgcaacttggtcatggtaacaactgactataacacacaagacaggaagcaaaggcaagctaaatcttatacatactttcttgtactactgattttcaaccctgtaaaagaagtgttaaaattttaaatatttcctgaataagatttgggatgatcaaaaaaaaaaaaaaaaaaaaaaaaagccgggcatggtggtgcacacctttaatcccagcacttgggaggcagaggcaggcggatttctgagttcgaggccagcctggtctacaaagtgagttctaggacagccagggctat

SEQ ID NO: 27449 - DNA, 1219 bp, Mus musculus
ttcttcaaaccacaggggaaccttgggaccattttttatatctcagctttaagacgatttttctaattgcacatataaaccaagggagtgttaccgagtgtaagaaggaaaacatctgagtagctctgccctctagctgtgaccgttcctaacagtgcttatcactccaggctgctcttgtgcggccctggcgtttctgttgactgggtgttgcattctcttgactgttgttttgttttcacagaaataaagctgtattcttcaatattttgtaaactatttcttttggtgttgcaatagcttacacgttttccatacctgttttcatttgaaatagaggtttgctatttagttctgtctatcctcaaaattaagagccttttgctgtgtctctcgtgtgtgggctgtaggtgaatgttcactctgcctgcctcttgagagaatttttaacatggtatttcagtatatacgtatgtattgtaatatttatttttctttttgagcagggtcttactaggtattcctggctggcctggaacttgctatgtagatcagaatggcctagaaagcatgcacaaagatctgtttgcctctgccgccttggatgctgagattaaaggctggtcttacttatttatgattttgagactaggtttcattctaggttccctgccattctggaactcactgtgcagtccaggctggccttgaattctctgagatcttcttacctcagctccctgaggactcagattacaagtgttaggcacctgtgtggtgatttcttaaaaaattatttttattattgttatgtaactcaggttaggtgcttaattattgagacagagtaccgcagcattgtcttgatcttgagctatgttgttcaggtggcctttggagtagctgaggtagaggtgtccctggcttggtagtcacttgaacattctacttttgtgtgtatggtttagggtactcacatgtaaggtaaatgtctagaaagatacttggttagagagatatagatattttaaaaaagtttactaaatattgccagttggtgaggttgtactttctcatactccagtgatcagatgtttcatgtatgttttttattagtactagtttaaatttaaaaaattttaataactgtattttaataattgaaaatctttatggttcttggccatttgactttctttttttttttttttttttttta

SEQ ID NO: 27450 - DNA, 1181 bp, Mus musculus
tgagcgtgactttttcaattccccaccttatctggccacttcactcttttctactcataatctaacctatctcacacttagagatacttgctattagggcttttgttccaaatccaaatccaaatattggatttatatatgaccgagccaacctgacctgatataaatttccctgtttttaccttcaggatgccaggataatttgttaaagaaacatgcaatacagtgtgcatgtggaggaagaaatacatgcacaccgcagtatacacgtgggggtcaggacagtgcatgggtttgagtctctccttccactgtgtaggtccccgagacccagtacaagagcataggcttggtgacagctgcctttacccactgagccatcttgccagcctgagaattctatctctttctttctttctttctatctatctatctatctatctatttatttatttatttcggtttttcgagacagggtttctctggctgtcctggaacttactctgtaggccaggctggcctcgaactcagaaatccgcctgcctctgcctcccaagtgctgggattactggcatgtgccaccactgcccagcctagaattctatttttagaaaagatattttttatgtgtggatcggtgtgagtatgtgcacatgaatacagtgcctacagagaccagaacatgagatgtcctggaattggaattacaggcagttgtgagctgtctgatatgggtgctgagagatgaactcaggttgtctgtaagagcttacatactcttaactatcaagctgtttctccagtccctacagaactcattctttaaaattctcttttaagggcatttcatagttgagtaatgaaagaaggtgggattaagatgtacatgaagtaattctaaagatcaagggcaaactgtctctaaggcctccatattgaggccttatcacagtcctgaagcatggatttggaggtagtctaaaagatggctcacagtgcaccagcagttgaccaggagatactgaactagaatctgaggacagcaccaggtggtgcctcagcctgccccttggtgacactaagccatgaagtctgacctaaaagatgtcagagtgtagtatagcatacgagtttctgtttttcttactagttaccataatggcagaggcccactgcattgt

SEQ ID NO: 27451 - DNA, 4112 bp, Mus musculus
cagccaatcctggatgccattgaagccaagaagaggaggcaacagaacttctgacaacaccagcccagccttggtggcttctgggttgctagactcatgtctgttagccagcacttctgctctgtcatctctccacagcacctttgtgaactcaggaatgtgcgccagtgggaagggctgcttggcagtcacagtgccatttggtgtgtgcatttacactggcaaggtgtatcttgaagggtttgtattggtgcttttaactcagaattctagaccccaggagcagagactcctagttcagtgatagctgggaaattttttacattgtttctttttgttttccttctagtaatagcttttggttgctcgccctggaagactttttaaaaatctataaatatgcatatattatatatatatataaattataaatagattccccactctgtggtggtgtctctgtacaggtacagtttcaaacactttgcctctttcctgtgagattatggtactgtgcagcaagcgggcagaagacactgggaggctcgtaggtggtcactgaatcccagacgtcagcttcacccattgcagggttgcatggagaaattagtcttgggatggttgtgccaccacagtgacgagcctcccatggtccccactggcctcggaagctgtcggtgacgccaggaaaaaatgtggagaacttgagagtttgctcttttcccaggagacgcctgcaccctctttgcagagtagcctttgctgtctcaacgcctttcatccatcgccaccctcccagctgcctaaagtcgcatccaagatactgcccagtgccttaagaggagacacatctgtgaaaggacaggctttcaagaactttccagcaaaccaggccctatccagtccagaaaatctcagtgttcctgggtaaaatcacacacggcatttgttcttcatttcgtagatacagggtaaagggcattgcttccatagtccacatccaaatacgtgattgtttattttttcattcactgtggaggctctggcaagggtaaattaatgcccaactgaggctcactcccagaaggcttagttggattcagaatggtagggaagggactgtcatagtcatagtaggtctgattgtattgtccaggtggaaaaatgagactcagaggagaggtgacattaccaacaccacaaatcagggtagactagaagtagggattggaattcagagcatttgtcctgtaccactggaccaagagcctcttcactgagagaatgaagctaccactgtacatcaggttggcccaggaacccctgctctttccttgcctctttggtacctgagctgctatggaaaggctccccagaggagccgtgtcattcagtcccagctactagtgggttccttactgtgtcccagagacagacagtctctcatggagggcctgcagcagggtagaggactttgcagaagacagttacggagtcatccccgcatctttggctcaaaactgcagtcagaaggaactgggaagccagtcgccctattatttcttctcatttcatccctccgatgggagccctgatggggctgcacctgagcattctgaaattcgactccataattgcttttgctccctaacctgagagtcgataaagtggcaggggatgttctcttctgtgaccagattctgttctttgcaattaaagcaagctttaaaaaatgcaagaggcagctggtctgcaggacttagccaataaggtaactgtgtgacagagagaattaggacaattcggggatcttgctgagatgataaatggctgctaggacttcctgggaagcacgtgtcaggcactggcctaggtgtactacaggtttcatcgggattccctgggcttattaagttatttctcacatgatgaaatttcgtttgaaaggttccttcccatgacactgtggattgggatgcatgacatcatcctgtggggctggtagtcacagggacagcaaagtcctaaatgcttagaatgaagtgaccgtggcttctcacgaagacttaagtctaagtggtatgttcttttaaagcttagaaaccaggtgaattaatagtctagtccccaagtcaagaaagcttttaaaacccagtacacagggcctgcataacatttgctgtgctacttaatagcccagcttcgagctctttcctcttgaaggaaaatgctttgggctttgccagacaaggaaaacgcccacagctcccttctgaagcaagatgggtgtacaggaaaatagcctttcctgtgactcttctgcagccatgaacctagatctggagtctatttggttgcaggcaggcatgcatgtctgcactgcgcccacagcttggtccacagtcaggtgcctggcaggtcagctcaccagccgtttgccggaagccggctgttttggattcctggcgaggcgtatgtgctgttcggtggcagaagggagcaaactgtcctttccttgaggaccgaatccaaggaaccccgtctcacttctctagagcttgaacatttgtggctcaggcttgcagtggactctctgcttccaagatgtggaggccacacataaatcttcttactagcaaacaaacaaaacctcatactctctgaacatattgtagtgttgctcccattcagaagcttgaagcacatttccatctttatttcctttatatacatttttattttatataagattttacattccccagtagattggacgagaatttgactggctggacgtgagagaggttgctgggtgtgtgaataaacagagtagtaatcggaagcctcaggagttgggtcttgagttccttacactgtagactagcacctgacaatgccagattcttattttaccatttaaaactcagtacccctgtctaatgtcaggaatgagagagatgacatcactgcagatcctgcagacactcagagactagtagtaataatattatgaacagcttcttgctaatacattccccagcttaagtgaaatggacagatacccagaaaattacaaaggaactaagcttactcagagatgaaatggccaatcgcaacagcccccagccccttttctaccggaacttggtagctctgagagacatgggactgacgctccggtaacaactgtccctcagtgtcatgccagcagacaagtcccattcttatgccactggccttcccagcctaagtttcaggctctaaagattgctgtcctttattctgggggaagtttttccagctcaaactacaccctcaccctcaccaccctttttaaagcactgtttttgtatttttattagaattacatgcattgtctttggaatccgtgttctttgtgtctcttccaccagcctgcactcagaccaacttggagagaaaaaaaaaatcttaaatgctgttgctgatgtaaatttaaaaaaaaaatgtgaagtttgtagctttaatcttttgtaacaaaaactaattaacactggctgtaagtgctgactcgaaatgctattttgtaaggtttggatgtaaataatagaggtcagctgtttgtatatgtgtgagacatagcttcttccactgccatttggtcttaacttgaggtacttcctgtgtgcttttatgttagagttgtcccctcatttctcccccaacacctgtcacccttgtgttaaataaactgtcctttagaccacagtctgtcccctttcttcacatgaggttttcatacatgtcagtgctgtgcagtgtgttgtgattcttgatgctactgggtggatattctggggtccagagccaggagagaggtcagcttgttgacacacgatgacagaaccagttggcaataccattccaatgaactggaatggacatagttgtgtgtgtatgtacgtgcgtgtgcgagatcttttaaaatgttttatatatatttactatataatatatattatctccccatacacatatacacacacacacatacacacacacacaaacatctccccatccttgcctctttcattcttcccatccccctcttctgagatgtcccctgagctttg

SEQ ID NO: 27452 - DNA, 2747 bp, Mus musculus
agtgagaggtggaagagagaacaagacaagataagtgggggggatgagtcagagccaagtacatgaaatgtcacataaggaaatgtcacaaggaaatccattcttttgtactgtgctgaagaagaagaaacatggataaaaataccagattgtcaagtctgagataggagagctatgtggtctccgagagtctgtctaatccttttccatttccctcatgcaggcttcagagattagactttgagaatatgcatctgacatggaccattgtgccttgtgacctcagtgctttccatatgccaagaacgaggtcttactgagcttaataataaaaagatatggtaatgtcgatcttatttatgggtcaaagaagaaaatccatgtccaattctccgtatcaaggacacggatatcaaaaaggagattaagattgggggtgggcctagagagggagctgggagaagcagctcgagtcagttgatcggcataggcggcaggcagagctagtgaagctgtctccatgctcatgccagccgtagagggaagtgtggtgaagggaaagctaccattgggagtacccatcttagtggatcttagtgggatggctttgttcttggatttcttaaagacttgtgggtaaaactgaacaagttttactatctaatgttttgtttctagatctcaaacctcagattctttagagcaagtggaccctcatgccacataccctcactttctgctactgggattgtggcctctttttgtccctggcctgatcagatctctccatagactctcctaggaattgatagaggctgtaggcaggtcctccctccccgcacccctttccaggaaaggttctagtagttcttactggactcagaaaatgttaactaatctagaagctgacactagctcatgcgtggccacaagctgttcacatgtggcctattgtgtgggaaaatttttgttgaccacgacgtggcttagatgtgaagagaacctttgtgtgatacagaggagatactgacatcatagttatgagattaggaaccctttcccacctctcccctccacttcctgtaagggtgtgtagaggagccacacttttgtgggtctgggaagtgattgcttaggaaagtccctaatgcgtttaatgctgaccctggatcattccctgggttggtatgctaaggaagctcacgttccctgttcaccaaagggaatatgcaaagtaaggaggggtaggaccttatgctgcaaggaagaaggaggtaaggtgttgaccgtggtgaggaacatgcatgcagtctgagaggattagtacagactgctctgagcttcccttggtagcattgtgggcacctgcacttggctttccttgtttcgcaggggtttttggaagcagtgtgatgatgagttcaagcacgggtgggattgttttggacactgggtcactgttccccagatgtagtgtgttctgaaaaatgaagagccctgagtgttttggctcctcaacaggagctgcctgtaggagggagaactgtgcgtacttcttaggtcgaccgtgacgtctgttcaccatcagcctccagtgccctcagaaggggcagctctgtcttgccaacgtttgtttgactttgttgaagggaggaaagtaactaataccctgacaaaacgcaagacagttcttacaagttacttaaaggtcatttttcatgttgatattttaaaaaaattctttatgctgattgcaacagctcaaagcaaagaaaatcttttaaaaatctcttgtgtatattttcagttctaataaaacaccaggcactttcaattattttgaaagtttttactaggttcaaaacacattttgacacactctgctagcctgtatacagtgcaaatcaaaaaggagcaaaaaacatgtcctgacatgagcttgagacattgtggttagcattattacactcgttgctgtcgtgaagaaaatgattttcctgggagaggttgcagttggaggtttgaattcatgaacacataacagtctgaggctacacttttatggttgaagtgattgttgtcagcaaagcttttgttgttgggttttttagttgttgttgtttgttttcctgttagattatcatggcacaacttgaggacatgggcatgtggctgaggtgctgagtgtaggtgcacacttaaagaatgacacagcattctatggaagataattcattgaagaggaaattgaaatatattgtaaagtggggtttgaacagtaagtaggtttgcttaagttcacatatgcttacttagcaaatttgttcctgttgcttcaaggaaggttctagaattactataaagactgtacttgccatacttgtggtggtttcacccatgtcctatcattgagagccttgggtttgtaggagttggcctgataggaagaaaaggaggaaactgtggtgggtctcacctggttccatatgcagatggataggaaacctctgtaaaccaaacctaccacttacctccgcttcacctccagccccaaggacatggcccagactggcccagaccagctcagcccagaccaggagtagctcagtcagggcagagagtagagaaggaaaggctgtggggggaagtagatgcccagagctaccccaaccttggtttttcaatatggattagaagaaatgtcaggtgacatttgactgcaaagatatttctaaacagccttctta

SEQ ID NO: 27453 - DNA, 2335 bp, Mus musculus
tgggatgaaatagtggtgttggtccactctagctgtgatcttagtctttcctctctgacggaagtcatgaaggtcgatgctaatgaggtgtcctcttgcttggtctagggggtgtggttatggtgagattgactggcggtgggcggggctgaggagcacatggacctggagccagctcaccccttgctctctcctactgcagctctgatcgtgggcggcgtggtaggcatcctctttgccgttttcctgatcctgctgctggtgtaccgcatgaagaagaaggacgaaggcagttacgacttgggcaagaaacccatctacaaaaaagcccccaccaatgagttctacgcatgaagcttcctcccgcgagcgctgcttggacttattggggagaggagtggagggttgtgggtggcgggcgttggcagagagcagcaggcaccttaatgctgacttgtcagtatctccatctctagtcacctttctggtgtcagaagagatgtgatcttctactgtgctgcctgagagagagagagagagagagagggagagagagagagagagagagaggctgtgtctgtgtgtctgtgtctcagttgctctggcagaaaaatggggttaaacttgccctttctgaaggcaagcctagaattgggtcttttgttgtcattgttccaaatttccagaatagaatataggaccagtttagatcctgtagtaaacatgtcccatctatgactgccttgattatagaggcaaggggttactgtgtgaatcccggctcccttccacatgctgtacaccctatccatctgtcaggagctggggcaaggagccagaaccctctgcgccttgagatgagtctgccatgagaacttgctcacgctgcagagtctctgtggcgtacctgggggcattctaagtccagtgacttttgaaattcaacctttttttaaaaaaaaaaaatctagggagggcggggtgaagtgctgaaagctcacactgaagtgtgtttgtaggagattcataaaactaagtttttaaatggttcattcctttatgggagcgtctgcgcctgggctgagtgtgggggatacacagatgttctatctagaacatttccattgcaacagctaagtttgtgtttcgtggtttttttatgttttgtttgttttttgaaaatgagagaagagttggagatatgatttttatgatttttttttgttttttactatttatagcttcagacagggctgcttttcatctttctattgtcccccatgttttttttttttttttttttttaatgctccgtgtccttgtttttgaccttggcccttcctgaagttgctttatcttacgaagtagctacagggttctagcagtttccagaatataatgtagggggatagcgggatatttttgtttgtgttcttgtaatatattatccttccttggttctagaagaatagataaatatatttttttaggctatagaatgatattacaggtcccatgttggctggatggttgcgtgagttttcgtgtggctgaagaggctgctgccctcttaccttgccctgttcccggtgccttcttgcgaatgagctagagtagtttagggtccctgactcgaaccctcactgtgccttctgccggggaggaggggctcctgggcctgcttcctccaggcgctctagatgcacaatccaatacagtggcctcgtgtggctgtataactcggttcacttcagactacgtgattggaagtcattcctcggttgcactagccacacaaaatgctcagtcaccatcccccgggcaccgagggttaagctggtttagcaggtcattgctcagctttgcttgtctccctgggcaagggaaggggaccaggagaaaggtgatgaggccccagggactcctgtcatctggtactctccctcttacagaggagagagctagtggcttaaaaggcctggggtggtggggagatcacaccactctcaaccatactctgttcctgtgaggcccccatcaccacctccgtgcagggtcctagctggctgggtcctcttctagccttggtgcctgctccttttctgcaccattcacactgttgtctgttactgatcttttttttttttttttttgataaaaagataataaaacctggtactttctagattgtcagcctgtcagttttatttttggtttctcaaaacagggtttctctgtgtagccctggctgtcctgaaaagcattctgtagatcaggtgaacctagaactcaagaggctgacctgcctctacctcgattaaagaggtgtgccatc

SEQ ID NO: 27454 - DNA, 1496 bp, Mus musculus
tctgtaggcatctgattaggatgacccttgcttctcacttaccgtgcttgcttctgatcatcatgatgtcatcctaactgtccccacttccccagaaacctgatgtaaggccaggacaacccagtgacaactcgctgctatcctctccccacagtgccctgggcttgctgtacttcatccggcgagggaagcagtgcctggatttcactgtcactgtgcatttctttcacctcctgggctgctggctctacagctcccgtttcccctcggcgctgacctggtggctggtccaggctgtgtgcattgcactcatggccgtcatcggggagtacctgtgcatgcggacggagctcaaggagatccccctcagctcagcccctaagtccaatgtctagagttgggccctttggacactctgctggcacttgggccccatcaccttgggctgctcagacctccagatggggtctggcccaagtctgagcagaaccctggaaatgtgaagtctgttggtggagagataatgaggtcccatcataaaggcaggtagcagccatgatcacagatgtaagaatggcctctgtctgccaaagccttgatatctggaggccagtaagggacctcatggagggtagtggcagatttggaaccatgtcacatgagccatcatactgtcaccagcctgttattttaaaaagaaaaaaaaaaaatcaaggatatctgattggaataaaccactcttctcgttgtctgtcttatgcccatgacagccagtacctttgctgtgttgccaaaccacagggattctctgtggagaaatacctgatttctgggtccatagccacagaaaaagatgtaggtacagagtgctaggctgctgacaggacgtcgaggggaggaggcatcaagcacaagaaaaatgcatggccgtgccgttagacacacacacacacttttgtgtgtgtccaggacccatgactgtctccctccagttccctgtatggactctgccttgctgttgtcactcagcacagccagagacaggacccagagaaaaccccagcatccctcccagccttcccttcataataaaagccattgtctgctctctggaagtgagcaggcagccagcttctactggacctcaactgtggcaggagtttctgtttgctgtcttttgagttctgtgatagggagggtgtactaaaggtgctggaggctcaccctgctaagctttcttccaagtggtttcctcaggaagggctggcagctgtccttcctaggtacataaatacactattttccaatcctttggcttgtacttaagtcattgttgggaccaagagagatcaactgtgcacaagagctataaataattagtattccttcattcctgagccccagagttatttctccaggtaaaatactaaatgccagagtaagtgtggtagcactaccttgccctaagacttgggagactgaggtatggggatcat

SEQ ID NO: 27455 - DNA, 1102 bp, Mus musculus
ctctgtctagtgtggatctgtaaccacaggccagtgagtaggtttgtctctgtctagtgtggatctgtaaccacaggccagtgagtaggtttgtctctgtctagtgtggataagtcctggagggagctcagcaatgtcctctcggggatcttctgtgcatccctcaacttcatcgacgccaccaataccgtcactcccaccgcctccttcaaacctctgggactggccaatggtgagatagccccgggcctttcctccttgtaccctccatgttcgcatccttccccttgggctcctcttccacagcggggctagatgctaaatgtggtgggtgtacaggtcccaggtagcttcctaagactgctgtctctgcattgcttcctccctggagtcccacctggaggggggaccacttggcggtagtactagagtggtccagcagtgggtggatgaggtcacctacatctcggagggacaggacccagctctgtctccctcagacactgacgactacttcctgcgctacgctgtgctgcctcgggaggttgtctgcactgagaacctcacgccatggaagaagctcttgccctgcagttccaaggtgagtgaggacgggtggggggattggagagggcagatgtgtccctcacagcctggcagccagggtatagttaagggaatctgtgccctcatgtcaagtggggtactgaccagccccgtgtctcttcctgtctcctccaggccggtctctcagtgctattgaaagcagaccgcttgttccacaccagttaccactcccaggcagtgcacatccggcctatctgcagagtaagtcatggggagtaaggatgggtgttatccttggctcagagaggcagcaagttaatgtgcctgactccggggctgagtagcgagtggctggagtgctactctggatgcgggtattggctctgcaccagggtaattgagcggctgtctggggagcattcaataaatcttcctcatggagcacaaaatcaggagcagcagcctgtgaatgcagcgctggctcggtcactcgccagctggcatgaccttgaggaagtcatttcatttccttgaa

SEQ ID NO: 27456 - DNA, 1216 bp, Mus musculus
ggtgtgccccctctctagtccggcgtgcccgtggtgtaccccctctctagtcctgtgagcccgtggtgtaccccctctctagtccggcgcgcccgtggtgtgccccctctctagtccggcgcgcccgtggtgtgccccctctctagtccggcgagcccgtggtgtgccccctctctagtccggcgagcccgtggtgtgccccctctctagtccggcgtgcccgtggtgtaccccctctctagtcctgtgagcccgtggtgtaccccctctctagtccggcgcgcccgtggtgtgccccctctctagtccggcgctcccatggtgtgccccctctctagtccggcgctcccgtggtgtgccccctctctagtccggcgagcccgtggtgtgccccctctctagtcctccctttccccagcaactgcagctgcactcgtccgacccgagggagcagggcagggctttttctgccacccgctgtgtctccagagttagcttttgaggctaactccctctggagctggtctgggccaaggcgtggtttccagtgtggtagacttgagccaaatcccttcccatcctctcctgtggcagccgtgcttctgcctacaaggggctcgtgctgcagtataccggacagcctagcgatgcttccgtctttactggacattctgatggcccaggcaatgggcgcagtagagctgtggtgctgtttgggggtggggtggggtggggtggggtgggggtgagtgtctgtgaacttactgatgtaataaagtggcagccttcctaggtcgttgcttccttcctaaggcctgggaagagttcccagctaaagcctgtgatgcctatgggcccaccccagacagaaatgccttctcgtctgtgtatctcccacccctctcgtaatgactccccaactctggttttggctgggagattttctgtaaatataacctatgatcatgaaaatcctcctagcaaaggcagagcagagtggctaactacagtgtgtcagaatggcggactctctgcggtgcctggaaatgtttggtattaaggaccacttcttagccaggtgctgcacacctttaatcccagcgctttggggggcagaggcaggtggatttctgtgagtttcaggacagcctggtctacagagcaagttctaggacagccagggctacacagagaaaccctgtctcagaagctaaag

SEQ ID NO: 27457 - DNA, 1246 bp, Mus musculus
gcctgatatgcttttcagtgggtaggagagagctatagttttcctgaactctgctatgaggctaatggtctcttatctccttcaatgccaaactgcacagtgggcattgcaagtaggatgaccacaatgcagactccagctctgacccttacctagcctctttatctccttgcccacagttatgtgctttcggtatggggataaagagcatctatttggtcaatttaactcagctcaatctaaggaatgaaggcatggtggggctttttggtgatagaagaaagattcttagggaaataaatatttatgggtctccagagaggccacaacggtcattaggaccattgtatatccaagtaggtcctggaacaggtttgatttgaagcataagaggcaagcctggaacttgctgggagatgcagacagaggccacaagaaggtagtgctttgctgtgtgtgcaagtgtgacaggcttggtgggagctgggtgacccttgggtctagtatgacatgttattgatgacagcgccatggtctctccctccagcttcagcctccagcagcctgaggaatggagagaggttgtttctgccggactgtgcatctggagtcgttcctgtggcctcctttctctctggtctttgcatttcttcctggtccgatgaaagcatctcctttttctaaccaataaagtgatcgctttcagcaatggagaagctataacacctgcttgcctcactttcttctgtttctcttgacttgggttagatgggtgggacagtgcgggacaactgggccatcaaggtacaaaatccagggagggattggttctgaagttgtgaacagtaattcaggtgtgcccctgcggtgttaggatttctccagtgggtccttacaccaggcctgtggggctggttatttattctccaagggtcatggagacaacgtggcctcagagaggtgtgggaatgcttctgaaatcactcagacccactgctccatgtgttgcacgtctatgtgccagccacagtgctgagagacacactccgagccctcagggtaattcatagcaatccagggggctggcgagaatgctcgctgtcagctaagtgcccgctgtccaagcaagaggacctgagttcaatccccagcacacgtgtataaaacaactaagtgcaacagaatacccgggggtggagctggagacaggctaactcccagatcttcttggtcagccaggctagcc

SEQ ID NO: 27458 - DNA, 1238 bp, Mus musculus
aaaaacaaaaataaatagtattggggattaaacctggggccttccacaagtcagataagctactctgctcctgagccatatatatccccagcagcctgccttaccttcgcctttaattgattttttttgagatggggtttgtgtagcccaggctagctttaaacttgccagataatacaggctgtcgttaaacgcctgctcttgcctcaacctctcaagtgctgggattacagatgtacaacattcctggccttttggaaagcctattttaaaaatttgagacaagcactaagcctggcctcgaacttgttctgtagcctagtaggctttgattaaaaatcctcctggtcaggctggtggcacctttaatcccagcacttgacatattgggactatatctcaaaagaaagcaaacaacaaagaaaaacaaacacaaaaatcccctgcctcaacttcctgagtcgatgggataacaggctcatgtcaccaggcctggccacctccagctttaaaaagacttgttgctgcccctctttctcccctccttcttctggggcagggtctcactgtgaagctatggctggcttggaacttacaatgctctggcttcctctgccttccaagtgctgggatgacagacgtgtacagcacacccagctctgctcatgtttctacttcaagctatgctgcatcctatgttgtaagtgggacaatttggaactatttataagagggtggcaagtcacaacataaaagcaagctctcactgccaaaaagcagatggcatgcacaggaattcaaggccctgagagtcttatgagcagttccaacagtgctcacgtagagaacactgcctgtggagaaagccatcacagtcgtctcaggacacacagctatcctgactgctgctggatttgagctgagttggcttggagtagacatgaatgtggaaagtgctgctaggtttctttttccttttttttttttgttattttttgagacagggtctttctgttatgtagtcctggctgtggctgccttgtactcacagagatccacctacctctccttccaaagtgctgggattaacggtgtctgccactatgcctggctgttagcatctttaacttgtgcccctactgtgttgagaaggcattctatagctgtatctgtgatttcttgtatccctactatgctgtctggaaaatgctgtggtcaatggacaaaaaatcttatgt

SEQ ID NO: 27459 - DNA, 1271 bp, Mus musculus
gtccacagaacccaacatcgatagccctttgaacacacacgctgcggaactctggaaaaaccccacaggtaggaccttgtccagctcagggtgatccttgccagcattcagagagaccctgagggccgggttggcttctcccacatccgtcctgctagtgcttccattctcacatagatagatgaaggggtctatgaatagaatatatctcctgatccttccctggactctggaaaccaccagacggcaacatgggtatctgctggacagggagaatgggccctgccgccccttcccccacgccccaatccatcactcactcgagccccatttgttctcttccagcatttaagaaatacctgcaagaaacctattcaaagcaggtctccagccaagatccctgatgcaagctggccgccctgcccctcttttgtgttgtcttttttcttagactatctgtcctttctccttgatttctaaactatgttatttttgttttgtttcgtttttaaattaagtctgcttgactagccgggcgtggtggcgctcgcctttaatcccagcactcgggaggcagaggcaggcggatttctgagttcaaggccaacctggtctacaaagtaagctccaggacagccagggctatacagagaaaccctgtctcgaaaaacaaaaaataaataaattaagtctgcttgaacccttaacaatgtatattaaataaatacacattgattgttttgtataaattgttttctcaagttaccctcagccagaggatgcagggggggggtagcttaaatctgtgttctggcccattgtctacagtgttggttggaagcagctgattgacagtgggagtcacatactgtgtatttgcctagaggtatagctccctggcagagagcctgtttgatccgagtgaggtaccagattcaatcccagcaccaaaactggtgtccacttgtaaggagttagagcatgcgctaggaacacacagtgaccatcggggacagttccagttgggatacagatgcgactaaaccagaccctaagctcaagaatctatagaagtgccagacactcactttcatgttaaagatctggggggtggggggcctgactccggttgccctgtagcaggcccaagctctggaggatagaaaggttggctctggacccgggtgggtgatttcatctcctactccatctccacgaggtcttatgggccctgcccaagttgtcagctcattgagcagttgtgcagccct

SEQ ID NO: 27460 - DNA, 1604 bp, Mus musculus
cacggggccagccgcccagctttgcctaggcgagcttgcggtcgtccagaaatccatgcacctcattggctccggctccgagaagatgagcatccagattctggaggacacgcacaccgtccagccccagccccccgccagctgcagctgctactttaaccaagccttccacctgccctgccgccacatcctagccatgctcagtgcccgccagcaggtactccagcccgacatgctgcccgctcagtggacctcgggctgtgcctccagtctagacagtatcctaggcagcaagtggagtgccagcctggataagcacctggctgtgactctgctcactgaagaggtgggtcggctcttacagcactgcagcgaggaggagttcgagcgtcgctacagcaccctccgggaactggccgacaactggatcggcccttatgagcaggtacagctctaatcacgtgtacacgcccagtactaggaactgaacccagaggagtcgacgggttaggcaggctctactactgcctctttttatgtcttattctgagatagcctctcactaggttgcccaggctactcttgaactcactctgtagacaggctggctttgaacttgtgagtctcctagctaacctgcagagtaagtgggattatagcctgagtcagtaggctcaacttctgattgtatttgtgctctgagttcacacacatacgagcattcacgtccttccctctgtgcttgcttccaaaggcttctgctctgccccagcctcttgtctagaacgtgtcagggagtcagaaaatcctttctgctaagggctcagtagtaaatatgtaggctttgatggccaaatacagtctgctgtgcattctggcttcatttttgacaactgaaaaggaaaaatgatttgtagctccagaaatttctggaaacaggtgattccttaagagaaatagtgggtggtgaggctgaaggttctgtgttggtaactcctgctcacccgtgatgtgattcacctgacactggccctggagcctccccacaaaggcagagactatggtgaggccgtcaagcttcccagttctcctgtcccacctgggatcaataaagtgaatgtcctgtccccactcgtgtcttgtctggtttatgcgtggtccttttgtgtcacgcaccctgagagtgctgactctgttctcaatttacctgctgtagttttcaggcctggttcttccttcactaccagtgagactccaagaaaacgctctctaagcttcagctcatctgtaaagggggcgtcctcacagggttggctggagtaaagaatgggtttctgtttgctcgttcaagtgttcatttcccatcacttgccttcagtcccatctcccttcagcaagctgggacacaaggcaagaggaaaatccatactgtctaggacttcagacaagaaaatttcctctgctcccccaatagggcttcctccttaggtatcttgacttaatctgctcaggtctgtggtggtatgaagaacttcctgcggtgcagttggtcagggtggctcagttacccacaccctcttcccatccctgcgagagccatcccc

SEQ ID NO: 27461 - DNA, 1736 bp, Mus musculus
ttaaaaaagtgaacaatgagcaaactgtcacgtgatgcagatgctcacgtgaccagagctacacatgacttccagtccaaaggcgcctcctggagagcaaggacgcaaggaagcagaggtacggagatgcccaaactggtgggcagcgaaggtggctctgtggcccggagttggatccgagcgggggcttctcccggagatgtgcgccatcgtctccccaggaactgctgcaccgaagcgcaagggatctggggggactggtaaacaaacatcctccaccgatgcttcctcctgcagatgcccggaaccgcgctgtctccactgctcttgttgctgctcctgtcctgggcgtcccggaacgaagcagctccggaccaggatgaaatcgattgtctccccggcctggccaagcagccctctttccggcaatactccggctacctcagagcatcggactccaagcacttccactactggtgcttggcttggccctaaagttcctaggagggcatgataactggacgagcgaattctaacgaccccaggcaggacctggactcacaccaatcctttcctatccttcccaggtttgtggagtcgcagaacgacccaaagaacagccccgtggtgctttggcttaacgggggtcccggctgcagctcgctcgatgggctgcttacagagcacggcccctttctggtgagttgaccactatccccctcccccatgagagagggcaggagactagttagagacagctcaaggaaaaggcaggaaggggaaggggagaaggaacctgtggcctaagtttgctttccttaacaattctgttttatgtggtggcccttgccctaactttccgtacctctcatggagtgtgagaatacggaaacgcactgtggctctttctctccacccagctgctaaccggcaccctcacaggcctctctgtctttcctccccagatccagccagatggtgtcaccctggagtacaacccctatgcttggaacctggtactcctggagctgtgggtctcttagggatgtctgggtacttgaagggttggggaccccctcttctgctcattccctcctccccctagattgccaacgtgctgtatatcgagtccccagctggggtgggcttctcctactcggatgacaagatgtacgtgaccaatgacacagaggtgagtctgttgcctgaccacctgccccattccccgtttccccagagatggcttgattaggaggagagcatggcctcagagtccactttgagccctgtcatgtgctctggtaaactcaaccagtccacttcctcttatacaaaataaaatgggttgaactcattatctctgaagcgctttctaacttaaacgtcctcgggtctcctgactcttccatcttggcatcctcaggtggcggagaacaattatgaagcccttaaagacttcttccgcctctttccggaatacaaggacaacaaacttttcctgacaggagagagctatgctggcatctacatccccaccttggctgtactggtcatgcaggatcctagcatgaatcttcaggtgcagggcagctacctgagggaagggaggccccacagtgctgtgacctaggattagggaggtcagcctggccgctccctcacagcctactggctggccactggctactccgatagcttgctttgcctcccaccacaggaagctcacctgtctgtct

SEQ ID NO: 27462 - DNA, 1350 bp, Mus musculus
ggattcgctcaaccagaaggtaaagttgccagggagctgggctggctagggtgccaggagagggcaaaactggagagcagctttgagcaaggatgggggttgccactggctatcgtctttcccgatgggacagatggaggtgcagcgccggccctggctagtggactacggggagagcggagaacaggtagctggtttcgtgaaggagtgttcacacatcaccttcctcaccatcaaggtaggactttgtgcctagtgagggacagccggggccagagcgggggagtggtgtgacttccccgtctctctctgatgattctgggtcacccttgatgcattgggcgagcttgcagggtgaggaggtgaagaaggaagcggctggaagtgaggggtgatgcatgttggggatccagatctctcataaagctttgctccccagggtgccggacacatggtccccacggacaagcctcgagctgcttttaccatgttctcgaggttcctgaacaaagagccttactgatagcttccgctgcaacccatggaaatcctcagtacctgatcagcccctctcggcctctctcagcagagaggagtcctccgctaatgctcccgtggggcaagtcctgtactaaaactgcccagacttctcacagcctggtgcatcccagcctgggcctcagggcgtcacagacagcctaggaccaagtgagcactttgttccggccatcgtggggtggcctgacctccccgactgcataaaaactgaccaccccaggaccccaacagagctagagaaacccaaggaggggggtggatggattctaattgatggttgactaattctggaattaaatcgggtatagcttccaactgggctcttctctgtggcaccgggaccactaacactgtagatgggaaggggttggcagggggtgcagagaagacttcagttaggttcctgaatgccagccacccaggtggggtgatgggctcaggcagctgcagcagagggtggggggacatgggaggccgcaacgtctgcaggacggttcttgtcaatcacttctcgaagccctttggcaaagtggaggtcagccccaacagtgacgaagccctgcgggaggggacagggagcctggctggttcagttgtttggaaacagcctccaaacaaacacaagactcttgagcaaatcccctcaggggccccagctgctttgcggcgtggcgtatgttctctggagcatggccctgcttctaagttaaatctttactacttaaataatatatatgtgaaggagcaactagtgtaaaggggtttcgggaaaacagacaagcactggggtgt

SEQ ID NO: 27463 - DNA, 1201 bp, Mus musculus
gacacagatggactgatggacacccaggctgagcttgcctctctcatccacagagcgtacctggcgtggggtgcagatcccccttcctgagggtatcaacttcgtgcgtgaggtggtgaccaaccacgcggtaagtacattgtggaaaggaggccgtagaccagggcattcctgtccctacaacaccccagtgcttgtctgttttcccgaaacccctttacactagttgctccttcacatatatattatttaagtagtaaagatttaacttagaagcagggccatgctccagagaacatacgccacgccgcaaagcagctggggcccctgaggggatttgctcaagagtcttgtgtttgtttggaggctgtttccaaacaactgaaccagccaggctccctgtcccctcccgcagggcttcgtcactgttggggctgacctccactttgccaaagggcttcgagaagtgattgacaagaaccgtcctgcagacgttgcggcctcccatgtccccccaccctctgctgcagctgcctgagcccatcaccccacctgggtggctggcattcaggaacctaactgaagtcttctctgcaccccctgccaaccccttcccatctacagtgttagtggtcccggtgccacagagaagagcccagttggaagctatacccgatttaattccagaattagtcaaccatcaattagaatccatccacccccctccttgggtttctctagctctgttggggtcctggggtggtcagtttttatgcagtcggggaggtcaggccaccccacgatggccggaacaaagtgctcacttggtcctaggctgtctgtgacgccctgaggcccaggctgggatgcaccaggctgtgagaagtctgggcagttttagtacaggacttgccccacgggagcattagcggaggactcctctctgctgagagaggccgagaggggctgatcaggtactgaggatttccatgggttgcagcggaagctatcagtaaggctctttgttcaggaacctcgagaacatggtaaaagcagctcgaggcttgtccgtggggaccatgtgtccggcaccctggggagcaaagctttatgagagatctggatccccaacatgcatcacccctcacttccagccgcttccttcttcacctcctcaccctgcaagctcgcccaatgcatc

SEQ ID NO: 27464 - DNA, 1192 bp, Mus musculus
aaggaaaagagaaagtgttggtgggggatggggggctgttcatcctcctgagatccaaacttgtcacgaggcagttgcacgggggaaccgagccccaaatcctttggaagcagggcgcaagtcttatcgtgcttcggaacctcggttttgcatcaggcaaagacaagatgattggttccgagtgccccaaacactttacgggcagtaacggtccgggccagcactccgttctagttgcatgaccaaagagtggttttgagcctctcagatgacacctgcgactcgaccccaccctgcccccaggcttggtcgccatggtcctgctctgggccctcttcctagcgctcctggcaggtgcccacgccgagctcccgggctgcaagatccgcgtcacctccgcggctctggatctgggtaaggcgcgcggcgggagccgtggaccgggtggggtgctctggccccgggcgcgggacctgagtgtctccatgctatctcagtgaagcaggaaggcctgcgctttctggaacaagagctggagaccatcaccatcccagacgtgtacggcgcaaagggccacttttactacaatatctcggagtaagtaaggctcggggggccggggtctcaaaggtggtgggatgacctgggacaccgccccagactgggcgggtctgggcgtggccaattaaatgaggtgggatccataataacgagtaaggctactaggtaaaaagactggaggtaggcgggtccaagaaaggggaatacgaaccagcagaattgtagcttggaccaaagaacaccgcgatgatacactggaagaatttacctgtgggtgagagtggagtctatccagagggtggcgccaaaaagagggaagcccaggataggagagatagaggtgaggcgatgtggggtgagttaaagtgatggaggcaaagtcaaaggaccaggtggaaagctcagtctggcgcacgcctgccaaaaacaaaacaacaacaaaacagaaaccaaaaagacgaaaacagatctagcaatcacaatgtggacagaacacggaggtgtaagcaagaccatagtttttacttatttatttttaagattttatttaattttaatgtatgtgcattggtgttttgtctgcatgtacgtctttgtgagagtgtcgggtccccttggaactatagttaca

SEQ ID NO: 27465 - DNA, 1155 bp, Mus musculus
ccggcagcggtggctgatgctgccatggcccaagcccagggcctgtttggcactgaggaggcagtgccggagcagatccaccagctgcagcatcagggcatcgagtacgacgtcattaccctctcggatgactgagcctcaaaggcccaacgctgactgatcgtggatatcaggggccggctctcctggagactagggagtttcctgtcctacttagggcctccagatactggacagttagtgtcccttgactccaaaggagccagacctgtgctcttggggggcagccaagggctccagccaggacatgctgggtgcctcagcctgctggcaggctttgggagagaaatttatttttgttttgatggacccactggctcctgtctcaataaagggaccagagtccagcccttgcaactctctttgtatatgtgctaataacctgaaccaggtaagggccaggaaaccaggcagaggtcccaacaagtagaggctacctggctccacagccagctggctctaccttgtatgaacagcggttgcagtacaggccaagccagcttcatctcaggagagagctgagctagtgagaaccctgcttcctccatgggctccctgtctccagggtctcagagggcaggtagtatataccctgaagcctgcagtgcctcgaaggcaacacttcctcctgagcagatggaaaacatcagccagcctggaagtctggtgtaggcgggctggaggtatctgggcaggctcagctgtaggactctggactcctccatcctactgcgctcaggtagacgcctctaaggattcagtactaaaaggacctgtggatggatttgaaggcctgggtaccttgataaggggcacctagggagtggtcaccgaggcaaccgccccaagaccctcacacactcttggggagtttctgtatttccttttacaaatgaaacaaggcagcaacagggtctggggctggggaggcacgggcctatttacaagggacttggtgaatcggaaagggtgagagcagggagggggatccctggcagagccgtaatattcctatgtccctggcagctcaagtcctgctgccaccccaggggagagccctgaggctgagtcctagcagtctgtgacagcacccct

SEQ ID NO: 27466 - DNA, 2477 bp, Mus musculus
ggcagcaggacttgagctgccagggacataggaatattacggctctgccagggatccccctccctgctctcaccctttccgattcaccaagtcccttgtaaataggcccgtgcctccccagccccagaccctgttgctgccttgtttcatttgtaaaaggaaatacagaaactccccaagagtgtgtgagggtcttggggcggttgcctcggtgaccactccctaggtgccccttatcaaggtacccaggccttcaaatccatccacaggtccttttagtactgaatccttagaggcgtctacctgagcgcagtaggatggaggagtccagagtcctacagctgagcctgcccagatacctccagcccgcctacaccagacttccaggctggctgatgttttccatctgctcaggaggaagtgttgccttcgaggcactgcaggcttcagggtatatactacctgccctctgagaccctggagacagggagcccatggaggaagcagggttctcactagctcagctctctcctgagatgaagctggcttggcctgtactgcaaccgctgttcatacaaggtagagccagctggctgtggagccaggtagcctctacttgttgggacctctgcctggtttcctggcccttacctggttcaggttattagcacatatacaaagagagttgcaagggctggactctggtccctttattgagacaggagccagtgggtccatcaaaacaaaaataaatttctctcccaaagcctgccagcaggctgaggcacccagcatgtcctggctggagcccttggctgccccccaagagcacaggtctggctcctttggagtcaagggacactaactgtccagtatctggaggccctaagtaggacaggaaactccctagtctccaggagagccggcccctgatatccacgatcagtcagcgttgggcctttgaggctcagtcatccgagagggtaatgacgtcgtactcgatgccctgatgctgcagctggtggatctgctccggcactgcctcctcagtgccaaacaggccctgggcttgggccatggcagcatcagccaccgctgccggggagggaaaagcacagtaagcctgaggctccaagagcaaggcctcacctcaggctcctggctggcagtatccggtccatacctgtgacagcggagtgtgcggcagcttccagctgagcctgggtgacaagctgctggctgggggagacaggtacatactggatctagagaaagaagccagtaagacgagccatcacggaagcttcactaccccagctctgcctgggctcccagggaccctacctgggactcctgcaggaatggagtaccttgctcatactggatgtgtgtgatctggccttcctggacctagagataggaagctgtccagtgatcctgtaaggttgcagccttcctccaaaccccaccctgccccaggcctggcctacctggatatgatggccatcagggaccacaacgtactcctgaggcagtaagtgctggacaccatcctgagagatgatatactgaacctaaggaaggggaggaggcagctgctggggctccactcagtgggagctgggtaagggcagagtagaagacacagctatggacaatggcctcagggacaggaggttacctggttgtctgaggtcaccagatgctgtactgtctggccatctgctgtgatttcctggatgtaggtagcttcctcctgtcaagggaggagtagcctcagttctttaccgagctcatatgcttatattcagtgtttttggagttctgtgtgccccaacctggcatggaggccggggctcagcagggtgccaagcattgctcgccatcactttttgcttgttctccacccttcttggagcatgacacgcggacacctagcttgttatgtgcttgtgcaagcacttctaaccctctgagccatctctctagttcttctagcctgtctgtctgtcccaccctttcttcagggtccgcagacctcagtcttacctgattggtcactgtctgttcctgggccacaatgatgtgttcttggctcagtgcctgctgtagccgctctgtacccagaaccccgtgactggactggaaggcagctgggcagagagaagggaactcattggggggttagggaaaacttgactgacgcatccctggggttcctttgttgctagtctttggacccaaatggtccactgcatggcccaggagtagcttactgtgtagtgtggccagtgtctcctcttcactattgaggatgatggtctgggctggggctcgggctgtagaagtcccagtctttctcccatcaatgctatgtagccgctggatgtggaatttgaggtgcccgttcctgttgaaactgtggagagggaagagtgggcatcagatagctctaccaggtgtgtgcatgcaagtcc

SEQ ID NO: 27467 - DNA, 1437 bp, Mus musculus
tagccccacccttccctggcccctcctacttcatcctaagtagagttgtttggaagtgttcgaaacactttccaggtcaacatcaaatatcctaagtttctctcaccactccttcctgcggctgttgcttatcacttatcagaatcagaacttagactgcattcggggctggatcttttgtttgggtagaagataagtgttctgggatctgggctcagcttctgtctgggatcgctctggcacctgcctggcagatttggaggaacaggaagaagccaagcgcagctgccctatgggaacaccatttctggaggcagtggtcatagccttagttttcacctccacagcagccagagctgcgtcctgcctggctcccagtgaagccaggtggtcttggcagacagtgtcatcattgttccatcagagaatagaactccaaggactcaagagtgatttctctggactgtgaagtgccatgtggcagccagagaagagaggactcttgtgactgcatcagagtggtcccttgaagttggtttggtttcgtattttttattttcctggagggtctgcagacaagtgagcagctctcttggcactttgacatgaactgtgactctggggcccactgctctccacagcgttagctgcacctttctctccggctgcacctcatgcagtcagcactgggggcagctccaggctctggagctggacaccttggtggtccgtgatttcttttgagccccaggcttttgttttcattcagactcttgttctgttttctgatgagcaggagacggggaccacttgatggtagactgtggtagttgggtatgttctcatacagaagagcattcgtgtaacttctgagacagggtgatgtttagagaagggctctggctgctgccctgaatggagccagaggaagaagcgccttttcctttgggaaaggctgctcattaaatgaagtgaggatcaggtcaggggagggtcaggcctggctgggcggcaagagtgctaactccagtccagtccctgccagaggctgagcaaaccagtttcaaaagctaagtccccaaatggcagcagtttatgttctgatctgtttgtgttatacggtgggtccccctccccctttggaactcttgtgttgttgataaaatgaaataattactttttaattaaaatgaaaaagtcagacctgtgctaatctttcttgggtgtgtctgcagcagcacctctgctgagcactttccccaagagcagagtctctgtgcccagcctaaactcgctgtgctgcccgccagtgagaagtgttgataggaatgcctacagcagactcacgctctgtgcctgctgctagagtcggtgtattgcaggtgtccaagataggttacggggaaggaagccactgtgaggaagagcctctctggg

SEQ ID NO: 27468 - DNA, 1222 bp, Mus musculus
gagtcagggctactgagtaagacctgaaggacacgggtagggacatggcagaagctgcacaggaaccccaggtgacaggattcacgacacgtaggttgggaagtccaggaagccaggaggaaaagcaggctgttgtggggttaaggacaggttggagacccacgtaagacacccaaagtgattagccaaggtagccagggagagagagaaacagtcagaaggtgagaagatgagggaggctggggcgccaggtcagagggatttgctgagctagcattgggaggataaggggatggctaaaggacaggcaggggctgacatggggtgacaggaaaggaaaggatggggagggcgtgtgagggtgcctaggaaagccagtggccttccttataggtggctccatgtcacttagggtggcctagcctcgagcctgtctagcagtggcccttttccacgtgctcgctggtgctttggctttagtcctgtgaggggcaagcctggctgggtttagctctgctggcctgctctctccctgaccccctctctctctgggccccctcccgcccccacctctggtgtccgaggttgaaccgtcattctctgttccacttcccctgcccaagagtggagaggaaggcctgtgtgaacctactctggccgagtctagcccccttccactcaagaacatgcaggcaccatgactggaaggaaaagatccctgtccagtgtacttaacacacacacacacacacacacacacacacacacacacacacacacacacacacacacggcactttaggaaagacagtgcactgagtctgtgcctccttctgcctttctttctctagcatgtgatcagagggaatcgtccaatcaaaacagagatggcccatcagctgtatgtccttcaggtcttgacctttaaccttctggaagaaagaatgatgaccaagatggatcccaatgaccaggcaggtgctgggggccatcctggtataagctgtgctgtttcttcatggctgtggtctttccgcctacagtgtgtgctgagaatgctgtgtgaagtggtctcctcaaaactggtgtgggccacatctcccgaggacttgggacaaaggcctcttctgtccttccatcctcccgctggtccatccctggagactggcttgggagcacgtgccctgctctctctcttccctgcttctcttgggagctgatc

SEQ ID NO: 27469 - DNA, 1218 bp, Mus musculus
cacacacacacacacacatcacttgtttcccatctgagctttctggaaacaaggactcagccatttttgaccctctctccctcctgacggttggttgatcacttactaagccaacagtgtggtggcaacaataagaagtgtaggcttcgtgagtttgtgttgccggctcggatccaggctctggtgtgccagggtttggccttaaacttcctgctccagctgttggtctcactttcctcatctctagagatgtaagtcttctccaccttctctacccattcggctcaaaggagagttaaatactagtacagtggccggcccagattatcacccaactcaaaagctgggttttagtgtgtgtgtgtgtgtgtgtgtgtgtgtgtgtgtgtgtgtgtgtgtgtgtgttttgcaagcttaccttatcaggatatattttttagcctgtaataaagccaggtgccacacaggtacctctgggagcctgtccgtgatggtgggggcgggacttctgcatagaagggtggtcacacagttgattggctaacactgactcttacaccttcctgcctgctggactcaactggaatggcccagttcccctatggggccctgaggatgcagagctccaagacagtctcccagatgcaaggcggacgtggcttcccccaggagcagctcaggagtggcagcgccctcaatgagctgggcccctaagtcctcaatgtcaatgattaattaagaaaatgcaccactggcttgcttacagcctgatcttgggaaggcggttttccaagtgaagctccctcctctcagatgagtgtagcttgtgtcaagtagacataagactggacagcacaactgactacgtgtcaccttaaaagacaaacacatcatcaccatgaagccacctttcccttcttgttcatcccaagatcacacattaataaaggcaccacaatcgaaaacactttacaaacttaaaagctccacagccttacaaaattcaaacactttaaagttgcccctttaaaaatatccagtctctttaaaagtccaaagtctgtgtaatgctctcaaatcttttaggtttaaagcctctcaactgtgcactcctgtaaaaatgaatgcttccctatgtcaagagggaagaaccagggcagtcacagactgaactgtaaataacccggtgcccagtgtctggggttccatcctctgagg

SEQ ID NO: 27470 - DNA, 1137 bp, Mus musculus
ggacgccattctgtttggttcgcggggcttgtttagcgctcgggtccctccgtttctcatttctctgtttctgcttaccgtccttccctctccatttggtggtcttaagcagtaggtgtcctgacaggcgggtggcaggagccgggctctgtggattcacattctccctgcattgtctccctcgtagccattcagcgagtcgtctagcccagttaccttgtatgtcaccggaatctcagggatattgtggtcattaaagaaggcatatgcatcacatgttcttatgctgacatagttcagtaaatgtttgatttcattaaattgttattcttttctttaaaaaacatccacacccccacaaaacaacaacaacaacaacaacattactccagagaaaatgagactcaaagaggggaagtgcctgaggttccacagctaccaggcagcctgtctgtggcccagaaccaccgagcctttgctatttttctctttaatggtttttaggtgcccactgccaggacattgataggtgccaggagccaggggaaatgcagaagtgaacaggcctgtgcttttctgccctagaggggcaatggagttataaagaagtgttcatatattctcctttaccttttgtaagttttatcagacatgggtgggggctaccttggtaccccagtttctaggaaactgttctgaacttggttgacattcaggagagactcctggtgttaactggaggttttgttaccactttacagttgtggagactgaggcatagagtagctaagggaaccttgaggtttcacgcctaataagggatctgaacctgcctgttccagagcacagatgagcctgtaaggtgacaccctgcttagccacttgcctggtgactgtcaggtagaaactgcccagactgcaggatgctttccttctggcttcttgttttgtttgtttttagggagcagcaatgaattccagtcctcaggtggcttgagaaaggaggagcaagccttgatacttccagacttaccctggcctggtctcaggccgtagtcctgcagggctttaacagggcaagctctggataaattgtatcattttccacagtagtctaaaccctgttccaaagctgtc

SEQ ID NO: 27471 - DNA, 1124 bp, Mus musculus
ggacaccatcactcgctaacctcactctctgctagtgtgacaccttttgacctttcagttagctatagcccaaagccagctgccctcactctgtgttctacagccacagccctgggatctcaggggcagctgtgggcgtggtccggttggagtgggcgtggtctggctggagggagggaaggtaacttccagctgggagatgagttgaggaaggtggggaggggagttgaacacactgcctttccttcacagaccattcccggagcagcaaggcaggtttgtggagcagcagcgaggagaagcgagcgtcatcccgctctgagcacagtggagggaccagcacgaagaacctcatgcccaaagagtcccgggagtctcggctagatgccttctgggactaggggtgcattgtgagccagaacacctccctataggcgggagaaacagcccaaaccacaggaagcaacagaaactggagaaccgccacctttagaatttccaacactcaggctctgcccgtcggcttggctgcaggacagagacttgactccatcccagctctggtcttggctgggatggcactaccctgtgagccaaacactttaggtgtaagtaggtacacttgtgacgtcactgacctagcgtacctttccttttcatatctacactgaccttaacttataaaaaaaacagaaaagaaaagcaagttttatatatatacatatatatataaagatctacaattaaaagaatgttttgataatccaggggctggttagtgagcccgctggcctcactggggtgtcagggctgggcccagggattgctattttcacgtaggcccttgtccttggatacccaggggagggagccactgtcgccgcagcacaccaggattggggctctcaggctgtgctgccctagacccgccacaccaagccatccgcccctcacagaccctacaagacgatgttaggaaacacatgcttgctggccttgaaggacacagagagaagtatgtgtgtgtggtgtgtttccagctctggctcccgaaggggcaaagcagcctcctgtttacagaaggtccacgcgagctatccccgtggcgttacgaatgcagccag

SEQ ID NO: 27472 - DNA, 1187 bp, Mus musculus
tgagctacaaggcaagctcaatccagatgaaagaattcacattttataaaatgagaaatggttacagagatgcctcctcagttaaaccgcactggctgtaactttggaggctcaggactgagtcccagcactgccatggtgacttagagccatctgcaactccggttctgcagaacctcatgccttctggcctccacaggcaagagacaggcatgtggcacacagacactcatacaggcagcacacccatattcataagagaattgaaactgtatcagaacacccagcccaaaacagtaagacttgtaaaacttgcttcagtcacatggatctgcacagggtgggactagcttccaagaattacttgtaaagactggcccaggatactgtggtaaaacacctttgcaagccaaggctctgcccaaggaagcccctcctcaccctgttccccgatttccccttgcctccctctacccaccaacgcctttacattttctgcagagagaaaggagaagttcaaggacaaagggtcattgctgccagacacacacactcacatacacacacttcttgaaacgccactgacccaagttcaggttcaggatgctcccggtggtggaggtggaagtcttgtcgggttttgtcatgatgggtgtcggcgcttgcggagagaaaggctttgggctgccagacaagctcccggcttgccccgtcttggtggaggctggagaagctagaaaagtatgtcagggttagaaagctggctttacagatcagtaaaccaataaagctcccagggtcggtcggtcggtcggggctgaggacaggagagaaggggtgtggcgtgcttcactgcacaagtgctgttcagggtcctgggtgggactgggaagatgggcagccatgaactgccaacaaagggctgtcaccaaacacaggctctgagccaaatggctaggctgccactgaaattgcattggcccgtttatgggtttaagccataagcaaaacccccctcatatgctgtatgcacgggtcaggagcatgtaggcatgacagccattggtaagagtctggggacagctcagagccttccccacctgtctctgaccagccctggggagggctacaggaaagcaagctgggcatcgggtgaaggggtagagatgttggcaaattatctcatt

SEQ ID NO: 27473 - DNA, 1201 bp, Mus musculus
tatttattattatatgtaagtacactgtagctgtcttcagacacaccagaagagggagtcagatcttgttacggatggttgtgagccaccatgtggttgctgggatttgaactctggaccttcggaagagcagtcgggtgctcttacccactgagccatctcaccagcccccgaaagcttagtttttgatacctttgtgttagggttgacttagacgtgaggagactgaggtgaaaattgatcccccttgcctccttcagggctggcttttccagctatgtgtcgtagtttggagacaacaactggtctctaattgcaggactccccatcagttgatgtggctttggggacatatttaatgtctttatgccttagccttcccacctctaccatggcgaccgtaactggctacgccgagcctcccctatgtgtaagctctgttgagagcacaaggagtcaggacccacagtaggacaggagcactggggcagtgttgaccatggaattctttttcctggtgatctctaaagtgctggctgcgaggatctgagaagagatgcaatggaggggtgacttaaggaatgttcttggcaggaagatcctcccatctccctcttccacgggctgggcttacaggtgtaccccaccacagctgccccattaaaacctgcttgaagttagcacatcgtaaaataaagtgtgttcgtgtgcaaactcccctttgctctcttgttccgcatttcaaaaaaaaaaaatagagctttataggaatctaagaatggttgtgtttaatttagtgtttgtcttcccttgggtgggatccgtggcatcgagctttgcggcaaaattccttactcactggcagagtttttcttctttttaaagatgagaacttagacttcaaagaccctattctaaaactacacaacctactcagcccaccttgcttgacacttgctaattccgtcataaggtggccatagaagacgctactgtgacagcacatgccagtgtggtcaccccagcatttgggaggtaggggcagggggattaggagttcgaggccttgactacatgagatcctgtctcaaaaatactaaaataacaaccaaaaaacccaaaccctcaacaaagaaagagggtgacactcagattgttatactctcaacaaattgcgtcccttgctgagtgggcccacagt

SEQ ID NO: 27474 - DNA, 1317 bp, Mus musculus
cgggtgagttgtaaagacagccgagaagacgaaatggagtctgatagtgtgctctgcactcttgtcagatttttgagtgactctttgtggtccttctcttgacaaccaaccacagtgggagcttgttggaaggccccggagatgtgacagatggaaactgattccaaattaatggagaaaatgttgcatctctccttcatagcccgaccggaagagtcctctacaccttaggatttgctatttttttcgtttgttgccacataaacctcagagtccccgagatctggtacggtgggtgtgggggtgctttcaaagcagtctggctacagttgattatctgggtcttccctttgataaggatgtctcttatgaaatgaagattttgagcctggtgtgatggcacacattggtaaactcactgtggaggctgagtcaggggcattgggagtttgaggccagcctgggctacaatagagtctgtctccaaagagaagagaggaaggaagggaaaggtgaagaaaaaaggtaagggatggaaaagggaagaaaagggcaactggatatggaggcgcacacctttagccttgacactagggaggcagaggaagtggttctccgagagttccaggccagcctgggccagcctagtgacaggttttataacaaggaaaggaaaagggagaggtttcctcttgcagagcgtccttgggcgtggaccagtggagttgtgttcttgttggctgatcccctcctctaattcttcccagccctctgtgccagccacatttttgagaatggctgtgccggactcctcagccatagcccagggcccaggaagttgtggatggttgtcgagctcacaggcccactccatccactggtttgctggttcagtttttgttgttttctgagacagggtttctctttgcctgagtcagggtttctccctgactgtcttggaactcacctggtagaccaggctagcctcgaactcacagagatcctcctgcctctgcctcccaaattctgggatcaaaggtgtgcgccacctccgcctgactcacactcagttcttaagacccaagggttgtggtcctgcacggtcccaggtcccagctccaaccacgatgccttcatcggcctgtgtcacctcccggcacagtgtatgtgtggattgatgactgaagtctttgcccacagatctcatacgcgttggtcttgtggtttggagtcctttcttcccgtgtaggtgggaatgactcttacctgtgagtgcagagatagaaggagactaactggcggtaatgtgtctttccc

SEQ ID NO: 27475 - DNA, 1124 bp, Mus musculus
ttccaatgctatcccaaaagtcccccataccctctcccccaccccctacccacccactcccactttttggccctggcattcccctgtactggggcatataaagtttgcaaatccaatgggcctctctttccagtgatggccaactaggccatcttttgatacatatgcagctagagacatgagctccggggtactggttagttcataatgttgttccatctatagggttgcggatccctttagctccttgggtattttctctagctcctccattgggggccctgtgatccatccaatagctgactgtgagcatctacttatgtgtttgctaggccctggcgtagtctcacaagagacagctatatcagggtcctttcagcaaaatcttgcttgtgtatgcaatggtgtcagcgtttggaggctgattatgggatgtatccttggatatggcagtctctagatggtccatccttttgtctcagctccaaactttgtctctgtaattccttccatgggtgttttgttcccaattctaagaaggggcaaagtgtccacactttggtatttgtagggttaaaattcttaatgttaggagatcagttatcaatagaatttcacacacacacacacacacacacacacacacacacacacacacaagaggtaagtagggagggagggagggagggaagggtacacacacgtaggcttccacatgctgggcattatattttgagacagtctagctgcagtggaacttgtcatgtagaccaagctggccttgaactcaatgcctatgcatgcctcaggctcctgagagctggttttccaggtgtgtattgccatgtcaaccccatgggtatgcttctgtgtttgtcctttctcagtatgtgtcctcatcccagccccacacagtttagatattgtcttgaaattagatctaaatcttccacctttattctttctttcatttttttttttttaagattctttaggatttcatgtaatttttaggatagagttggggatgtatgtacttgaattgataaaagtgcccagcattcccaaagccctgagttccagccctagtactaaacaaactgatatattggcactttaatccc

SEQ ID NO: 27476 - DNA, 1212 bp, Mus musculus
tttttttttttttttttttttaaagattttgtttattcattttatatatgtgaatatactgtagctgtcttcagacacaccagaagagggcgtcagatctcattacggatggttgcaagccaccatgtggttgctgggaattgaactcaggacctctggaagagcagtctgtgctcttaactactgagccatctcttcagccccctggaagagcagtcttaaccactgaaccatctttgtagcctgttttgtttggtttctgtttctgtttctgtttctgtttctgtttctgtttttttccttccttccttccttccttccttccttcctttttttttttttttttgggagacaggttttctctgtaacagccttggctgtcgaagaactcactgtgtagaccaggctggccctgcctctaactcccaagtactgagatcaaatgtatgtgccaggctcccttctctctttgtccctgttctttcattagggtttttgtttttgttttcattactttttgctgcattttctaatataactaaagtttcctttccaggaaataagcatatagttggcacagtggtttaaataccagtaatctgagctctggaggtggcataggaacaggagcacacacaagacactgacttacttcatcagtacaaattaagaagacttatatagggccagagacatggctcagcagttaaaaacacatgtgcctttgcagtttctgttcccagtgccctcatggtacttctggggaatttgatgcctcttctgaccttcattggctcctaaatacatgtggtgtacatacatatacccagtcaggtgcacagcagatgtttatacaaatctttttaaaagggggctaatatgatctagttctttgcatctttgtataaaacagtatatgaccataacccttccttgagaggttagggtctatttggggacattagaaacaaacaggaaagctagataactagaaaagaattatttcaaggagtaatgagataaatttagcaaggcaaatgcaagattaattttcaaataaattgtgctaataattgcttctagatgaggaaggaggttgaagttggtttgtctaggttaggatttaaatatatttctgtaacatgttttgcttgtgtgtgtgtgtgtgtgtgtgtgtgtgagaaagagagagagagaacctgcaagagttga

SEQ ID NO: 27477 - DNA, 1438 bp, Mus musculus
tgggtatataacttagaacaaactactgcagtgttttgaaaacatttggcggtgcattcaggagtgtacagacagtggccgattttctgctgcgctgaccctgtgttcttctgttaacagaaatactgctgacatctccctagtgggactgactgtacagatgacactgcacaggatcatcaggacgtggcggcgagtcattgtctaagcatccagcttggaagcaaggccagcgtgaccagcagcggggtctgtgctgtcatttgagcagagctgggtctcgctgaagcgcactgtctacctgatgccctgcctctgtgtggcaaggtgttctgcctcatgaggatgtgattctggagatggggtgttcgtaagcaccgctctcttacgtcactcccttctgcctcgccagccaaagtcttcacgtagatctagatggctagggtttctgtcttgcagcactggacgagggggcacagtctgccttctcgcgtgtcgtcagcaagtagttcgtgtcgctctcctgtccagtgcaatcagtgtttctgcgctcttgtcctttacaggtgtagtccccagagtctgtcgtcctaggtctctcctggtgaggtccccgtaccctgtaattctcaaggatttgtcattgatgttaaatggctttgaagaagggaagatgagatggcaatattgaattttcccgccccaatgtgcagccaagcgcactttactgaggaagtcacggagaaatgcaatattcctgagggcgtgaggaatggtgaaccacattcctgctttctgtctgcactaatctgttaggacaagaacacgattgtcgtttgtttgtttgttgtttctttcaagtactggcgtcaccctttgcctatatggtggagcaataatgctttgaaataaacttgtgaaacccaaggccaggtcctgcactctgagtcagaagcgagcagtgcttctgtggacacacttccttccctttgtaaataggatctttaagatattgtattatgtgaaaatatgtacataccttttttgtaggccacagcagctcatttttacagagtttgtgaagctaaatatttaacattgttgatttctgtaagctccacgcagtgaggttacaggcagcggagacatctggaaggcccagcctggggcagggcagcctgcagctcccctcgtgttacaggcctcactctttaaaaaggctttttaaagggatcatttgtttagatgtaggcatttaaattttttaaaaattttctttaccagagaactacgcactttgttaatttgtggggaaagaatagatatggggaaatgagctttaaacgaaaacagaaaaccgccaagagtctaaaaacaaaaccgaagcaaattgattttaaaaagaatcttgtgttttttaagcagtccataaattaaa

SEQ ID NO: 27478 - DNA, 1559 bp, Mus musculus
ccccagctccaggccaactggttggtaccccctttttatatggggagacaaatgaagtttattatgtttttatattttctacttactgatttttattggtgccagttcaaaattcggatttccttttaatagcctctcagataatttgttgtttttacctgaattgtccttaaatcttttttgggtcattctctttgtactcttcttgcctacctcgcctccactcctccctggcccctctttaaacctaggtgtccttggggcaaatggtataaaagtattcttttcatctgcttttatgatgtggggacatttccagtacctaccttttttttttttttttttttttttttgctgaatccaaagatatataaataaaaatgtattttatgaagatccaaatgatattaaggcaacatgtttcttcaaaaataaatgaagctgtactgttgctgttggtatcagaacgctttctctctaaactgtgcccctgtcattaacaggcctacccggttcatcagcattagatgctgaggtgggtcggggccagaggcagtgggtactagggcacataattggcttgattcaggggtaggtgcagctggactgtgcagagagtttccagtttacaacacgccagtccagtccctttctatctgcagtagagtgttaccaggagcagacctctaggtgagctcgaatctggccctgccatgaagcaacaggtgtgtttacctccagtgcaggcgattaaaaacagggcggtgttttgtttttctcttgcctcctccctttttctcttcttttgaaaataaggagttctgaagaagacggaaatgtcactccaagagcagtaaattctcaggaactgaccgacaccactgagaacacatttggggttaatcacatttatataagtgtcacttaagatggtgtcattctttacaccgcaaggaatggaaaccattcggtgactcagttgggtgagctttggatgccttgccgactgtctggatgctcttgtaaataaaggtttctatttaagcctccgcctccgcatgcttttcctctctccacacccagggcaggggtgaaagcgggataaggagtgaggaggacactgtgtctgcgaggtcggaacagttcgttctcctgggagcctggaaaactgtgggatagtttagaccagtggttctccagcatccctattgctgcaaccctttaattatgttcctcatactgtggggctccccagccaccggtctgctactgttgctacttcttagctgtgacttcgttactgttgtgaactgtaacatttaaatgtgctctctgatggccttagggacccctgtgaaagggtcgttggagccccagcttgaaaactgctggtttagagaaatgtgagccccctctgctgagtcgggttgggctgacatttccacccccacctccgaagctctgacagctgctttctggcagccatattgaccaggttaccctacctggatgaacaaagggttggtgcagttggatgctttgcttcacagatcgatgcc

SEQ ID NO: 27479 - DNA, 1766 bp, Mus musculus
gttctctctgtaagtctgggggcttgagctattatgtagcgctgagaagtactacaggtgacagacaccttgaaggatgtggctgcagaagcgctgacagggtgtgtccctctcagcagaatggctgtcaagggccatgtgcagactgcagcaacctgcacttgacctcatgtctaagggggttagggggtggggtggggagaagagccaatcgttccccaaggggtccaaattctttgccagattctctcaaaagagcagttcttttccttacggcctaagtactcctttgcatcagccacatccttgaggcaacgcttgcagtgtggggctgacttaaatccagataacactgtaatcacaggctgatgtgcactttgttctgcaggggacagctatgggaaggttgggaaggctaagcggccatagagagaggaacctccaaaaccaggggcctcgtgtggctgcccaggccatgcaaaaaacacccgattcccagaagatgaatgttggaactgggagacctgacagaaggcagggcctgctcttgggacaggaaatcctggaggacagcgcctggactttccgatgctcagtttctttgccctgctttgctctggatcaaacctcactggctgctctgggatgcgtgctcacacctggagtctctgctcaccctttcagaggctcacaaagacaaaggaactaatttccatggacacttcctccagagatggaaattgctgggattcgcccactcctcccctgcacccctcccccagtcatctagggaagcaagcttgttttaaccttcttactctttggagaaagcacggacatcccaggtgctgtcaacctcacagtcttgacaaagtctatagcacaaaacagtaccattcaccaggctggttgacctggctggctcagaagctgccttcaccacatacatgaccgctcacacgtaaccaacacagggaattgtaggggaatctcactaatatgaaatcccgcttttcaagagtcgcggtgtcaataaacgctgtggctaggatcaaggataatcccttgagctttcagacatttattcctgcccgggattcgttcctttgttatccatcccagaactgatgtttttctaaggtaccgaaaccccaagttgatgtgtgtcctgtgttttaatgacattgtatttgtaaagttttgtagtataagtaccatcttacagtgttcctgcccccagccaatgtctagctattggtatgaaaaaaaaaatctttgaatttttgtaaaaggctatcttgggacttttttgctctttattattatcatttttttcttgaagcactcaagatgttgtcgaccttcagctgagggttggagaagcagagggtaatacattaatagtaaacctctccgattcaagggacctcataggtaagtctcaccagctttggggcatcgatctgtgaagcaaagcatccaactgcaccaaccctttgttcatccaggtagggtaacctggtcaatatggctgccagaaagcagctgtcagagcttcggaggtgggggtggaaatgtcagcccaacccgactcagcagagggggctcacatttctctaaaccagcagttttcaagctggggctccaacgaccctttcacaggggtccctaaggccatcagagagcacatttaaatgttacagttcacaacagtaacgaagtcacagctaagaagtagcaacagtagcagaccggtggctggggag

SEQ ID NO: 27480 - DNA, 1199 bp, Mus musculus
tctaatctggagcaggcggaaatgataaggtcaacgggttctcaaacctccctcaaatgaccactctaatggtgagagcagcagacagacagctgagggactgacaagaagccaagtggcatgtttgggccttaatgtccaaagaggtctagttatgacttgaaggaaaagccatcagagcatactgaccacgtgcttccacagtccacactggcagatccccctgctcccaaaacgcatctgtggcccacacgtgtggaggtcgggtcatcttgcaggagttagctctctccttctaccacacgggccacggggatcaaactcaggtgtggaagcatctttacctgcaaaaccacctcactggctctcctgacgttcaagttgtttagcctgcccagtgtaacgacctcccgatgacccacttccggggatagctctcccaagcccgcacagcatgcaacactgagactggaacttggggttttacccctgtcttgattgaaggcccatggctggggctccctggacagcctgtcccagcctctctgacttatcatccctcctggcacccacagagtataagaccagctatgcccggaaccgctccatccgttccgtggccatcgaggtggacggtgagatataccacgtaggcttggatactgtgcctcagccccgcaaccttagcaagccgcactggccaggggcccctgaagaccaagatgacaaggatggtggcagtttcagtggtactggtggccttccagattattctgcccccaatcccatcaaagtgacccatcggtgagagtctggctggaggttgggggtagagggacaggctgggcctctcttctcccctcggggccggccactcatgaccctttctctggagcaggtgctacatccttgagaatgacacagtccagtgcgacttggacctgtacaagtccctgcaggcttggaaagaccacaagctgcacatcgaccatgaggtgtggccactggggcagcacaggctggcggccagcatccacaggaagggcggggggcctggtgaggggagaaagcaagattggtcccccagaatccatgaccccatcccagaataggaatctgagtcatggggtctggaagccagccaaaggtccagctcagagatggctggctggctggggacagcgcagcatactttattt

SEQ ID NO: 27481 - DNA, 1186 bp, Mus musculus
ggcagcagaaaccaacctgtctgcttccaccatgctcacggccacaaaccagagtccagggctttatcatccataggaatcactgacttgtttgtttgtttgtttgtttgttaagacaagctgtagccctggctgtcctagaactcactctgtaaaccaggctgaccttgaactcagacattcccctgcctctgtttcccaagtgctggtattaatggcatatgtcaccaccacctagcttgatctcttattttttaaaggacatattatctattgtaaattattttagtatttctatagccgtatttcaagtcccttgtttcttccctgtgaccctactatagactttgaactcgtacacatgtacttctgtgaggaggggccctgggctcccccttcctgccaaagggcagaggggtgtgttggtctctggctgtgaacactcaagtcagtcagcatcactgagggttgccaaggccagggctggctgctctcttgctcacctctgatcgccgatctcttccagctttcttcggaaaatacctcaatgagtacaacggctcatacgtgccgcccggctggaaggagtgggtcggcctacttaagaactcccgcttttataactacacactctgccggaatggggtgaaggagaaacatggctcagactactccacggtaagctgtgcacccccaggccccaccaccgcctcccgagccaggggaaccctactcgtagctcaccctgtggccttggagaggatgctcgtgcctaattagatgtgtggccttgagcatcgtccagtgctgcttctcaggttccccatcgctccactgctagagttaactcagatgccacctcccgaaagaggccccctcactgttccagctaaatgacgtccccaagcccagtttctggagtctgaactccaacattcaacagtgacccagaacaccttgatttctctgtaccttcgtctctaaggagggattgttaccatgtccattctcagaggaccataaacactcaattgtggtatcgttattcttttgctgcccctcccgccatgttcccgactctctcctgctctcttttccttcgccaaacctcgagtgttgtttcttttgtttctgtgataccctgacaaaagcaatgcctacatgccggggctgttccgttcccctg

SEQ ID NO: 27482 - DNA, 1148 bp, Mus musculus
tgtttgtttgtttttgaaattttgaaacagggtttctctgtcctggttgtcctggaactcacgctgttagaccaggctggcctagaactcagaaatccgcctgcccttgcctcccaagtgctgggattaaaggcatgtgccaccactgcccagcttaattttctttctaattgtaatatattttaaatttttatttatatatataaatatttatttatatatatatatatgtaaatgtgaggatatgctgagtgtaattgcccaccatggccataagagggtgccagatctcctggagaggcattgtgtgcaattgtgagccacccagcttgggtgctgggaaccaaacctgagtcctctggaagagcatcatgctctcactagctagcatctctccacaccccctctagttatcctagggggaggagtgatggtgttctatttactttcttccttgttgaagtctgagccagcacagaaagaatggtgacaaggttgggagccagcctggatctgggaaagccacagcggaagggcctggcttcttcctgatggcatttgggcttcctggacgtacacacacacagagagagagagagagagagagagacagagagagagagagagagagagagagagggagggagggagggagggagagagagagagagagagagagagagagagagagagagagagctctgttctcaaaggtcccacgtggaagggcccagcactgtcctctgggcccagagcagcccagccccctcctgccttcccctgcaagcaattccttccctatctctctctcttattttgagagttgcaccagcacccactggttactccacagtcacggggcacagctccgatcagtatgctctcaagttatcctaccctcctaccacagtcaaggtcctgggctggccttgctcatagtggagtgacttgggacctcggtgtccctgtctggaaatagaggactggggtataacctatgcgcagaatagtttgtcccttaccccggggagaagctctgggtctcccctcctgattaatatggattgctgtggttttattaatggcggcatcattgttgaccaatacagacacagaaatccaccgtggccagatggccccaccaccaa

SEQ ID NO: 27483 - DNA, 1152 bp, Mus musculus
gggcagacagccaaagggtcagagagaactgcggtttcagagtcccccgctctggcagcctgtaagtgacttggacgggatattcaaggagcgtttccatccacagctggagttgatgatgagagtctctgctgtgtgcagcggtggaccgagactcgtgtagacatgcatctagacacggttaagtgctactgagcacaacgcctgcagaacagcaggagcgaatcaacacggagtcactgctttatattgtgattgccggttgaaaaatgagattctcggggctttgcaaatttctgttatgtcctggcaggcttcctctcacaatcctaatggcatgtgcagctctggctaagccccgccccctccagtccctctccgttttctctgtgtgcaggtgtgtgtataggtgtgcgtgcacatgaaggtcaaaggtcaactttaggtgctgttcctcaggctcaccaaccttgagacagaatctctcacctgcttgaagcttgaaaattaggctaggccagtgggccttgggatcttcctacggatggctaattttccaacggtctgcctctgaaccaagcttttccctggttctggggatccaactcatccccccacagcaagcttctctccctttctagatgagctatgctgaccacccagcaaccttttcctcccctaccatgaccacaggcgacttggaaagagtgtgttcagtttacagattgtcgtccatccctaagggaagtcaggacagggactcaaagctggaacctggaggcaggaactcaagcaggggccacggaggcatgctgcttactgactggctcagcttctttgcaaacagcgcccctgtccaccaatccaagtgtagtaccgcccacagtgggcggaaccctcttccaccaatcatctacggaggaaaaaaaaaaggttcaaggacttgtctacagaataatcttacggaggcattttctcagttaaggttccctcttcccagatgacccaagtttatatcaagctgacaaataaataaataaatcagctcaagcatttttttttggtttttcgagacagggtttctctctctctctctctctctctctctctctctctctctcgatcaaagaaagttctcagctctaactgtgc

SEQ ID NO: 27484 - DNA, 1194 bp, Mus musculus
ttacatttccttttttttgttgttgtttttgttttgttattttgagacaaagtctcttgtagctgaggctggccttgaactccagagtgctgggactacagatacgagcttccatgcctggttagtctaaggcaatgattctggagcctttaaatacagctcctcgttttatggtgaccccaggcatacagctaataaatatctgatatgtaggctatctgatgtgtgacccccggtgaaagggcagttcggtgcatatagaagtcacaacccacaggttgatcacacccatgtaagcctttatcctctgggctatatcacatccccagcctgtgagaagtgcttacagctgggtccagcagggggcagcactgggcatccatggggtcgctggtgggacttccaaggggcaaagactgctgggtagcttccccctctctctcactgtggagtcagagatgaggtgaagcctgctctttgatgagccctgtggcggtgccctgccagcctgtgtcctcaccttcaaggcctttccctcgctctggcaggctgctgtcaaccatcacagagcccacatcagctgcccctgcgccctgtgacccatccttggtggaggagacctcatcttccccaccggtcagtgaggagagtgaagtggaccggactgaccacagcggcatcaagaaagtgtgcttcaaggtgtcggaggacgagcaggaagactcgggccacgacaccatgagctaccgcgactcctacaggtgcgtgcggcccacaggaggtcaccggacaactgaggcttctgacctgtgggaaagtcaagactgtggcatttcccaagatgaagggcatcagtctctggggctaacgatgtgtgtttggtggggcggagatgcagggccgggggcttctgatcctctcagaggatgttccacagaacttgcctgcttgggtcccttgccttgagctgaggcctccgagcctggcagatggacaccattcattctgtgttactctgtatgctcgcaggctggacgagagtctgggttctgtggtgtgtggggcttctgtagatccaaggagtcagatgttttcttgttttcctgcctccgaggatgggagtggtatttctgcaattgttaaatttattttgaaaataccagtagggtgttaattagttaaccaggcaaaacc

SEQ ID NO: 27485 - DNA, 1174 bp, Mus musculus
caagcactgtagatttcatttctaacatcaggggacatggtctacagacgtacagagccagagaattttgggctttgtgtctctcgtgagagcagcacatggttggtggcccagaacaaccagggccgcctcatgaggtctttgaggatccccctctctgtttttctattctgccaccattacagtgttttaccctgaggtcacattgtgattgcagaagcaccaggcatcacatcttagttccaggcagggagtcaggaagaagaggacagcctgtgagcacaggaggtttgccacaacacccttattcctagagggttttgttgcgtctcattgtccaccttaactgccagggtggtcgtgaaatggggggagtttcagggatcaagaaagggctgttgctaggagtttatcaggaatggttcctaacatttctggggaccttggtccttagtatgacaaatctctgccctcatgcaacttgtgtttcccgatagtagcccatcttaaacgattcagtgctggctcccctcagagcagcctcttctgttccatttcagggggactgccagacacgggaggaggccgtggcgcttggtgtgggcctgtgcaacaacggttttatgcaccatggtaagtgcggggcctccagctttgcttagggccctgagagccaagagccagctttgcatacccggtgtctcagcattgaaggtgaatgctttggtctcccctgctcccaggtggcctggtgtcctcctatgccccactcccattacctttcttggttcctctctcagagaaactgagttctccctttgagtctctgactcctccctgtgggtggccactgtgcacccaccatggtgccatattgtagtacagagtggtaaacgcagcggggggcttggggctcgggatctggcatatgtgcatgtgtggatcctccttgtatatcagacagacacaacccatcttgtgtatgctgataagctggtactgtggtccaaatgctgaggcttggatacaggtacagactgcagaagtgtgagctttgttctaacttagatttagtgaacttgctctgcaaagggccaagcagctgccacaacactggaacaaaatgggtgtggctaggtgccaataaaactttatttaggaaaactggccgggg

SEQ ID NO: 27486 - DNA, 1120 bp, Mus musculus
caggagatacaggtattttaagttcaggctggaaaacacaagacttcaaatggtaccactaatccaggcctggtggtatgggccgattatccctgctatttgagaggatgaggcaggagaattataagttctaagcctgtgtggcctacacatggtaagttcaagggtagcctaggcaacctgatgaaaccttgctgtatcagttacccaactgttgctatggcaacataccttgataacagcaaccttaaggaagggaaatactctggctcacaattccagggtacagtcagtcatggcggagagggcatggcggcagaggcatgaggcagccactcacgttgtgtctgttgtcaggccacttggagaggaactctgccctcagcatgctttctcctttttatgcagtctgagacccccagcctgtgggatggtgcctgccccccacattcaggatgggtcttcccacctcaccctaacctaacataatccctcactgggtgtgcttagcgacttgtctcctgaggtgactctagatcttgtcaggttgacaatgatagtatatatctatggccataccaccctgaacatgctctatctcgtctgatctcagaagctaagcagggtcgggcttggttagtatttggatgggagacagtgatagtatagtagtcttgtattgccacaagacaagaactgaactgagagcctgggatgtagctcattggtagagcacttacttgtctggtgtgctgaggtcctgggctcagtctcttaacactgcaaataagcccaagcccacacaagtacaaacaggatggggtacgtgtggccatgctggtggtgtggtcacgctgggtgtctggctccttagtggtggctggcaggtgtccgaagctttcttaggaagcacggtgcccggagcctgtggatacccagctcccattcccagagacccctgtaatctgcagatgggattatgatggggctagatgctcacctacagtctcaagtattttatgtgcctgcatcactcctgtgtatcacatgtgttacgtgatggcctctgacgtgctccctgcaggcagagctctcactctttctttgattcatagaggag

SEQ ID NO: 27487 - DNA, 1204 bp, Mus musculus
gccacatggttctgggtcaggcttgttcctgttctaacgggggccctcactgagcggggaggggttagaggttattttggggtccctcatcacctttttgggccctaaaatcatgaatgctccctgaatggcttacagcagccatatgatcctgggctaccgactgcgtggtgcctcagtgtccccgtctgttgttggtgccccactggagttgcctgacatgcagacttggttattagcatgcacgtgtgcacatgttctcccatcaggcagaacgggtgccagggtggctatcctcccacgtgcaccaccgtcattgtcgttgtcatcatgtttctgcagaagtggggttccctcgtgcacgtgacgctgcacagttggagttgtttgctgtatgtgagcgtgtggtttattcacacccactccccccccccacttgctttcccacatttccagaaataaatgcaagctggggtccttgggccgccgaggctgcagcatcagggatgttccagcggatggtggagggacagggcgggtggtgtgaggagccctgagctgggctagttgtgaccccacagtgtgggtgtgaatctctggtgggacccctgcctgcagagtggctgtaggaaagtgctgggctctgcatcactgtcttgacctgggctccctttggatggaagataatcagtttctcccggtcctgcccaacaggcctgcggagcttttctctgctacccacacctcctgtttcttctccccagcatatggctcacacacatttggtcctaagctccgtggagattgatataaaccaaagcgggcagagtcagcgcagcagagacctggccagcttcttgtcttcctgctcacctccccagttcctttcctccaccctccaacccatcctccatcttacattaccttggccctcgccctctttccctgagcacctgtggccacagaggcctttgctcccacagccccaccccactccatttttggttgcagggcacggtgggggtggggggttgaatccattgcctcgccacaccccagtctcccttttactttttattttgagataggatctcactaagttgcccagaactggcccagaactcacttaccctggagtcttagcttagtgtcctcctgcctcagtatttggtgtagctggggtttacagacccaagtcagtggg

SEQ ID NO: 27488 - DNA, 1150 bp, Mus musculus
catgggctgagtcttttgtttccaggtgagaagctgcggtccttgtgagggacactggccctgcaattagacagagtcctgtccccagagccttggggactgtcaccctataatccagtgtcccagaagtgagtcctggaggagccagctgcttgtcaggatatgctgggcttgcagttctacagagtggggctactctgtgcattgtggaacaatttcagtgtcatctgtcaccagctagatgccaggatcagcctctgcccagtgggactgactatcaggaaagtctcagaagtcaccagatgtcccgtgaggggcggtgtgagcagagccttctgataagaaccactgggctgggctctctctggcttccagctttgggttccaacctttgggtgctcatgtgcactggtagcaatgtggggacccactgtgtgtgtgtgtgtgtgtgtttcggggaggacctggtgtgttgtgcttctcacccagcagtgtggcccctgtgttctctctcctcttacaggtaagagcaccaactctggctgcgctcatattttggctctgttcctgggaccttggacctgatcctttgcctctgtttgcccgcctgtgaagtgtggctgcctggagccatccaggatcccttcctgcagtgcatgcagtggtctgatctgggagaggggctcagtgctctgggttttctctggtggctgcaggttcacggtgtccctggaagttggggaggagggaccttcatcctccctgtgccggagcacgggaagtttcatctgtttcttcactttctcgggcagcagggctcttcctttgtcttgtggtcaggcgctcaatctgtgtttgtcagtggtctggttcctttccccagtgtggagctgacagtgctcccttgactctgggcggaggaggccagggtgtcatagactggtgttggtaggtggctggcagcctctggggcctgggtgtcttctgcctggaggacagagcagagtgccttcaccgagagcttttattcatgaattcacttcccatttggtcgggggacacaagtatgtactaggttctgagtgtcttgttgtgtctcacagagtcctcagataccacagaaagagtccttgaaaatgatgaattgttg

SEQ ID NO: 27489 - DNA, 1102 bp, Mus musculus
gctgctgtgtgggtgctgggaattgaacctgggtcctccggaagaacagccaggcctcttaaatgctgaactatctccaaccccaagaagaaaaatgtgtttaaagatactatatagattgtcattaattttggtgagaactctaagtgaccaccgaaagctagagtgcttgactgatagagttcttactggaacctgtttctgtgacaggttatagccagttatagcatgtcaggggagtggggagggcttcagggcttcatctcaggtcttgagaagtcagccttctgggattcaagacttcctggattcaaatcccctcccttcccttgctgtatttatagttaatcttacacgcttgtcagtgttgctgttaaaatgaagttacttggcatgtgcaaactcttggggtagagcaggtgctctgcagatgcttgctgcctcgattattagcacagcatctattagtctttcaggagtcacttagtgatctgcttggtttgtagatataataaataagagtaattacgggactggagagttggcttggcaaataggagctttagtgctgatcccttccagaagactttggtttactctgagcacctatatagtaagtggttcgcagcagtctgtaactccagtgccagggcatctaacaccctcttttggcttctgtgagcaccagacacacacatgatatgcgctgtacatacgtgtagacaaactcacgaaaataaataaatctgttctaaaaaaaaaaaaaagaaagaaagaagaagatcctgtgacagaaggctgtgctccttacagtgctgatctgttaaatgcagtgaggacaggagttgtcttttgtaacagcagcgatgagcagggtagaacaggattggagtgactcagtgagtcatctctctgagtatcagttgcataggtagatgactgtccaaatcagggctggtgtcctaggcaggggaaaccaagggcctgggagagtatttctccccaaggacactgttgctcttgtccctttaatgaagcccggacatgccttaatcatctcctgactttcggctccagccctctgtttgggagtttaattcca

SEQ ID NO: 27490 - DNA, 1149 bp, Mus musculus
ggccgtaaaccagcttccagctgaagaaagcacctgtgttttgaattgttagtgaagctttgtggttttgagtatatatgttgttttgtttgtagtttacagattaattctctgtgcatgctttgagaactagggacacctgagcttatgaacatgggctttctagactgatttcttggattcatcccagctctacctggaacgttctctggctctcatttcctagtctgtaaggtttacagagtctggccttggattctggcctgcttctcttgttgctgctcttcagttgagccactgagcttgtgcagagcctgcatttcgtcctcagctgatgacgtactctttaagcacctttcccacctgtaggtgtttgtttgcagccagtgaagtattgcttctgagtccttcccattccttgaaagagaaactatgagccagtagcttcgtggccagggcggccaggagatcagtcttatctgggcatagttattatggaaaggctgaatttgctttgagttgcaatctgaactttcttgtaaagtctgggcttgcccactgggataatcagagcaaccaacatcctgggttagagtctctagagctgccagtgccagccactgaaggctactgctctgctgtccctaagatgttttcttcccgatgcctctcctgacatttcgtgattggtgtgcataggctttcaagtgtgtagccctgagtttagtcttgttggttttggtgccttgcatcgacagtgagcggctgtactggtgagatttgtgtatcactggcttagcaccattggtatccagaacagatggttggagattcagagaccaccagcctctagcatgggcttggccgtatctgatgcatctgactgagccctaagagtgctgctcctgaccagaagaaaaccttacacttgagttggcagcagggtgcatccggtgtgtcacaggaacttgcaaagccattgcgttatgtcagatgatggaagctacatcctgtaggccagtcttgtagccttctgttggaggtggatgagttatgtcctttaaggacagggtccatgttggctgttcctttcacaagctcgggtgtcacaggcctcgtgggcagttacctgctgctttgttaggcagg

SEQ ID NO: 27491 - DNA, 1786 bp, Mus musculus
acttgtatgtatatgtaccatgtgtgttgctaatgacctcggagatcagaagagtgtcagatctggccagacagtggtggtgcacgcctctaacttcagcactacaggtcaatctctgtgagtttaaggccaaccaaggctacacagagaaaccctgtcttgggaactggagttacagatggttgtgagccactatatagatgctgggaatggggcctgagtttttaagcaacgagagctcttaaccactgagccatcattccaacagatctttttccttttgtttgttttttgatagagtctcactttgtagccctgactggcctggaatttgctctatagaccaggctggcctgttaactcacagagatccaactgactctcctactcaagtgctaggattaaagatatgtaaccactgtacctggtggatttttggctttttatatctgacttgatggtggtaaggagattctttgagactgatagataaagatccctggattgggtaattgctatgacaaaattcttgaatttaaagtttattttctttggtttattttggctcccaatttgaggactcagttgttcattgtggtagaagggcctggcagaaagagctttgggtggctagacacttagatccgcagttagcaagtagagtgtgacggaacctggagcttgcctccatcctcacttctttgcaggctgggactctcgcccatggcatggcaccacagatattaagggtcagtctgtcccttaatgaacttaatctgaactccctcaatcatgcctgaaggctcatctccatgatgactgtagagcctgtgaggggtgagaatgaaccagcacaagcccgtgctcacggcagatgaggagggaagagtatggggctgagtcttgtgcacggacacagcctagggctggctcttcaaactcagctcccacctgggtcctgtcctttatccactctgtgttggggacaggcaaaagggagtaggaattggaccctcttgttctcagggcctgcagggactgagggacccatcctgtgctctctgccttcatcctgttggcacgtaggggctgtttttatttcttaaatcattggcctcggaggtctgcttggctgggcacagtgtgtatttctgtaatatcagtctttgggtggtagaggcaggaaagtcaggagtttaaggtcatttttggtcacatagtagctggtaaaagatcaaaggcttttcaaggaacgtacagttttagtttgtaacgcccaatatttggcaggcagagtcagggtcacgagttccaggtcagctggacacagtgagaccctgaccagaccagaaacaaaaagcagcctcctgcctggcgttctacgtcctgtgcgccaccactgcctctcgttctctctgcaggtcccacgagcttcgttccaaggtggtttccctgcagctgctcctctctgtgctgcagaatgctggcccagtcttcaggagccacgagatgttcgtcactgccattaagcagtacctgtgtgtggccctttccaagaatggcgtgtcctcagtgcctgacgtcttcgaactctcgcttgctatttttcttactcttctttcaaacttcaagatgcacttgaaaatgcagatagaggtaatacttcagctagtgtttttatttggggaccttaatgccagataagaagcctgcttgtgagccactagcctgcaatcccagcacttttgagttagaaacaaggcaatcaggaagtcagggccagcct

SEQ ID NO: 27492 - DNA, 1196 bp, Mus musculus
tcctgcctctaccttctaagtgttgggattacatgtgtgcaccaccacacccagtactaataagtcttggctgaaggaattatttaattaaaagaaagaaaactattctttcccacccttccctgtgacagtcttcctgtatctgacctcagactggtcttaaacttacaattctcttgcttcactctccccatacccatttcttaactcaagcctagagggtaatcacctgcattggctcccagcttcgctagtcagggttgtggtgtaacatttaaatctgggagcagtctgacgtagctaggagtgaagaaagagtcggtaacactgagggtgcttacggtgctgtggactgacagggccgcaccagcagttccagagccattctgtcatttgacagagtgagggcctggtgctctgcccaggccaacacagccagtgtaggcattcagtaggctgctgaaggaatctggctgtcccctggtgtgaagtgcccactcctggcttgacatgcctgtctcttacctctagagtgtgcagtgaagcacttgcctatttcattactgtgaactccgagagccatcgggaagcatggacgagcctcctgctgctacttctaaccaaaaccctcaagataagcgatgaaaaggtacagagtgaactcctcttccctgttcgctctggtcacagggacaggtgtgcttttcctccagctgagatgactgctggagacagttcattgggaaagtgggtgccttcagataacagcttttcccaagaaccccagctgagaaaggatgacatgtggaccgtgtgtgtgtgtgtgtgtgtgtgtgtctgtgtctgtgtgtgtgtgtctctgtgtgtgtgtctgtgtgtgtgtgtgtgtctgtgtgtgtgtgtgtgtgtgtgtgtgtgtgtgtctgtgtctgtgtgtgtgtgtctgtgtgtgtgtgtctgtgtgtgtgtgtgtctgtgtctgtgtgtgtgtgtggctgttgggctgagaagggatggcgtgtgtaccgtgtgtaccgtgtgtgtgtgtgtctgtgtgtgtgtgtgtgtggctgttgggataggactgacctcagtacagaagaggctgtggccgtgcagtgatggcgtagactagaagcccactctgcaggttggaagaagcctgctgaggccagcgaggctgtttgttagaaaag

SEQ ID NO: 27493 - DNA, 3613 bp, Mus musculus
tagaccacactgcccagctagagtaagtttcagtagcgagaaagcgcagcaacggtactccaggtgccgtagcttaggctgaggtggacacatctggaaaacgggtgcagaaaggaaggtgttccatggctaacttggctctctgcttcctcctgcaagttcaaagcacacgcgtcaatgtactacccctacctgtgtgaaattatgcagtttgacctgatccctgagctccgagcagttctgcgaaagttcttcctgcggataggcctggtgtataagatatggattccagaagagccgtcgcaagtgccagcagcactgtcatcgacctggtagcactggctgcatggccactgctgtggttctgtagaacatccgccatgccgtcccagctggcggagggggagctgcccacctagctgggtttggacctggagtgcagtggcgtgaaccctggtcagcacagtccccagcggaggctcatggtgtctcattaaaccatcacataccagtaactcggtgggcagggagtctgttcccccgtccttgcattccgctggctgacctgttagacctgtccttgtgaatgccaccgtttcctctaagactggccattaatgtttcgtcggcggaagtcgctctcctgggaggcaatgagcattgccgtataggttcctgtttattagagagtatgctaataaaagtccttgtaatagctcacagccacctaagtgcgcggtgttttgttgtttgactgtgttagagaagtttgaatgtttgtgtcagttttgggtcagcctagataaagatgggaaagagggagtgttccttatgtcttgttttgtaattgtttgagtggtttctaaaatattttacaaagatatattattaaaaatttgattaaaggcagagtttagtagacttaagagcttgcaaggttttaagaaaatgtagtgcctcgtggctccctggtttagtaacttggagagacagtctgtaggaaaaagataatctaaaaaaaggtgttagccttccttgaagtatttgtgggtggatgttccgttaaattttccagaatgcattgcacatctttttatgaaatctagactatgaaaaggtgataaacatgaagtaactgacccagagttggtttatctttgagtaaacctttttagtttttacctcagcagagtgttagtatggctgctttgcagtccctgctaaagggaccaccagagggagggacagttcgtacggccctctcagcacgcgtcatgagtgggactggagcccctgcgggactagcacagctgggctgtgacagtggcagaggtggcacccagagcttctgttaacttgagccgggagctgggttctttagcaagatgagcttctggggtccttatgttggtaatggtgccatgtccagacccacagcagagtgaagtctgagtgctcctaacaacccacagcagccacgctagaagcttaatggattcggagcccatgagagaaagaacacaggcttcctggtctgccctccccctccgctcaccaggagctaaactgagaggctaaactgtgtcatgaagcgcgttggaaacagacttctgcctacatcgagtcctacgaattggggttgtattgatgtcactctggtgccttagaagtcagtcgtccttgggaaggtgtctgcgagactgggccctttcttctctccagagcaggatgcctggtgctcttgctattctctctctcgtttctgacagccttggcacatgctcggtttggccagtagaatttgtatttatgctttttttttccccaaaagtattttaatttctctaccaaagggggaaaagaaagcaggctgaggttattattgctaacacacctcagccgagcaggctatgtacctcgaagggagggcctgggggacaatgttaccgagaggagaatgtgagcacatttgactgacacggcctggaacccagtgcatcttttcacggcactgccgagacgtactccctggtgttgccgctcacaggccctcagctgtcggtggttcctgcagcttttgttcctcgcatgtaatcagggagcacgcatgcacgttgagtgggtgcatcctgcctaagctgtgtccctgagtggtggctttccctcctgtcacgtgacatcccattcactcatctacactagcccagtgctcccattgtcccctgcctcctctgtaatttttgccccttccagggtacggaatgtgtcagtgcattttctccttgctgagagtctcagctccaatctcttcataattttgttctgtaaaagatgaacctttccgagtgatgcattcaaactgtctagcaatagatcttttaaaacgatgtaaaaccattcagggtaatttttcttgtcagtggccagtggcatccctgacctccagaaagaagccatgcagtataaactccttgtggtgaacaagtctgttcatggcaaacgtggctcgagcccaccagacaccagcgcagagcgggggcagcctgccccgctgtagcacaggagcaatggtgtagcgtcttccaaggccttacttttttttcagaatgctttaagtgttggctgtatgtgctgggttctctaaagaagtttctcttcccgagctgtttttccgagcagttttgttcgtgtctcttaaggaaatcaccagctttggcatctgaccaacaaacagtgagtgggagacgtgatttccgatgcgcatcttcagagtcaaacacaccctccctcgtgtacaaccaaagaacaggcattatgaaattgtatagtaatatctagaaacaccacttccctccaacctgcgacttttgtacaaaattcagagaatctgtaaagaaccccccacccctcaaaaaagcctaagcacttgctgttgttcttttgtgattatggctgtacatttagttgtctttctagttatgaaaagaacgttgacacacgtaggcatggccgccccactcaggtgttcgttgttacagtgctaatggatcctgggtgcagtaggcgctgggtcctcctgacctctgtttcactgtttgtggtaaggtagccacacctggagctcacgtgtaacctggagcgctgtgctaccagtagctttggggttttggaagcagacacaccaaagccgagcatcatagagaatgaatccctctggaaacacttactctcagaaaatgacactcttcccacatgtggggttttctcagtgttctaagtttttaagaagttttatcttgtgtatttgcatcaaacatttctttatgtgctaaatgtttgctctttaaaaatgtctcagagttagttaccagcttccttgatttcatctatacacaatgattaagtgcatttaatattggtaatttaatgaaaagcattccttgcccaatggatgtaaacatttttgaaagaataaagcagaattatataatatgaaatgctatgtaaagttttctatgtaaaaaaatattatgtataatactgttaaataccccatgctttgatcaggtggaaaaaatcaataaagttttaaaaagtaaagctgctcccagtg

SEQ ID NO: 27494 - DNA, 1177 bp, Mus musculus
agaagctcaccaattagctagacaggccggccagtaagccccagcgatcttcctgtgtctgcctccccaggtacggaattgtagtcaggctggcttttatgtgggtgctggggattcgaactcccgtcttcttccttgcgcagctatcacttgcttaaccaagcgtgctatcccctagcttgaaattcttactcattcgtttattctatttgtcctagaacagacgctctgctctgtcccttcgctcaggcgtgaacgagcacgttccatccaacagttagaagccactaggagccactcgcagaacctgctagggtctgaggaaagaaacccaaaacagaagcctgcgtcaaaaggcacggtctcttgtgacgtcaccgcagacccgagcaatggttccgattggccctcgcagccggggtggggccaaagcattcctggctccaccccgcgtcccggtctcactcgcacatgcgcagtggccgccaccttagccgccgcgccattttgccagggtttgaatgtgaggcggagcagcggctggagtggggtagtgtcggctgcagctctcgcttgggattccctcctcggtctcggcgtccccacgaggtgaggcatggagcgagcagggtggccgcggggacgcggctgagggaggggccgatcgctgggaggtggatctgggcctcagcccgaggacgcgcgcctggtcttccccgcacgccgcctctgggtcgggcctgaccgctccgggaagctggggcagcttggggctcggcctcacgcgagcttctcgagctcccgccccttcccttccagcgttgctgggattggtcgcgccgccgcgtaggcgtccgcggattggtcaagcccgcgcgtccgttctcggcgcgccggggcccgcagcgtgagcgctgttccgcgccgaggcctgacctggccgagccggtctgggtccctggttctaaaagaggccggagatcgcccactctgacttcgcggggctttggcctccgccagagtggacttggccctcgggtttcagctggctgtgacgttcgtgtccctaggacctaaggaacctacaggcgaatggtgttcccctgcctggggctcgccggctttccagttagataatctgtccccacgcacactccgtctttccctaggagtgtaa

SEQ ID NO: 27495 - DNA, 1217 bp, Mus musculus
gcataaaataaatcttaaaaagaaaagaaaaaaacaaaacaaaaattaagactcaaaaccagatctaccactagccctcttgagtctttctttgtaggaggactgactgctttgagttgaagttgaagccagcttggacaacagtattaagacccagatggaaatctaccaatgaacccagaagagcctgcgagtcatgctggaatccatcagggttagggttaggaatgctgaccatcagtttccagtggagaagccaagagcagaagacaactatcttgcctccccaggccctccaagagttagccagtcaattgtgcagccacaagaaagcctttccccacactctcagcaggaatactcaccacagcttagtgtactccgtgtccatcattggtggacactctgtgagtaatttggttatgccaactgcacagatttttttctccacgttcccagataccttttgaatctctggaataatgattttttccaaaaccattccaaacattctattaataaaagcagaacaaatgcactcaatactaagcatgcattatactcagacagtaagatagatataattcatacttagtgacgtggtgtgactggagcccagtactgaatagtaagggcactccccatgagtctgtctcagactgactgctatggcttctgctgattacatagtgctgtggggttacaccttctcttaagcagtctttgcagcttttggggggaggttaggagaaaaaatatttgcttaaaatgttactcaaaaattgttaaattttaaatgaaaaccatagttaggatacaagaggcagccaccactggcaaggaccattgtggcaggcctgcaccaggagcttcgtctttgctgaagtgcgtttgattagtcctcagctgagtcaataacctctcacattctaaatgacgagctccttatccctgacgagtgcagaaagcagatcacaggcaagcactctgctcactgtgaagggggtgctgagtctggcagcacatgagcctcagatagcccacaacccctactaccacaagatgactgattttttaaagtcagtttgcaatggctgggagagttgcccacaaaaaatttcccctaaccctatcctctactcatccgttagccttccattgccctaagggtcacacaactaaacatgttctttgcataaagtcacaaccaaattcca

SEQ ID NO: 27496 - DNA, 1784 bp, Mus musculus
actgtgagagagagagagtgtgtgtatgtgtgtgcacgcacgcatgtgcatgcacgtgtgcgagatctttgatccccccccccaggggggggcatctatctacctttattttttgagatgtgtaaaggtcacagagctacttgtcacttttcatcttccaaggagtgggtcctgggaagcaaacttagttaggcttggtgctcagtactcagtactcctatgaccacaccacaagtatctttgctcggctgctgtggtgaatgcctagctgttttgaatgtctgaaataagttagattatttggctctccagtggacagtgactggctgccttttccccacatggtggcagcgtttcatttaggccccagtttgcatttgtacataagagcctcctacaccatgtggtttcactctcctgtaggttccctcgatggtgagcaccagcctcaatgcagaagccttgcagtatctccaaggttacctgcaggcagccagtgtgaccctgttgtgaactccatcttcctgaccatgcagcggctgaggatggtttcttagaaccatgtggacttctgagcacggccctgctgaagcaacacaggtttccaacctcttgaacttgtcacaaactcttacagaggacagaaaatattgctgtaagccaatgaggttgtttgtcttgatcatcaatataactgataacttgtctactttgtccttaatgggacaagtatttacaatcccatgtatggccatggtctctgttgaacatttgcacggtttgggttatttcaaatttttggcaggccttgactgtggagacttaatttctattgttttgaagcttgtatttctcttgtcctttgtggattttgtctgtttctttaaacttttattggacatatgaaaaagtcttgttgacttgcaatgcacatttcgtagttaaagtctgtaatcagcaataaaaacccaaaatgtgtatctaaaagtgtcttcaggacaggatttggtgctttctgaaactttgatgaaatgaagaatttctttaaatctactttccccatctggactccataaaaatactaatttttaaatcatttaaactcagaatggtggtttttattgttttctttttttaagagtctaagcaaaacagtccttcgggcagatctggagcttgccaggcatcccagactgagttaagggcttcctactgacaagtcctgtggaagggttaggattagagcagccgtcattgactgtgctttctgctaaaaggaactgtatttgttgtttttaacctggaccttcatgtggtcacaggccaagcaattttgttatggacagcttaccaaatgatttctcttccacgcaattcttatgcgtgcctatgttggttgtcttcttccacagtgagtcttctgggactgacccgggtctgtcaggtttggatttaagtgccttggcctgctgaaccatctcaccagcccatggagggttttttttttgggggggggggggtttcgagacagggtttctctgtgtagccctagctgtcccggaactcactttgtagaccaggctggcctcaaactcagaaatccacctgcctctgcctcctgagtactggagttaaaggcgtgcgccaccatgcccacagattgtttttttcttaagcatttttttttaattgcttggtaggtatcaaacaggtttttgtttttttaagatttattttatatacacctgcatgttaggacctctggaagtacaaccagtgctctc

SEQ ID NO: 27497 - DNA, 1204 bp, Mus musculus
tgatctctggcttagtgtctaggagtatctgagagcccagtgcaggagtctgccacgacacccagctgagctctgcctgggacttaagtgtgcatagtaatgatagattcttacacagaatccattaaagataaaagtttttagactctgcccagcttcagacagagcttatgttcatgaaagcaagatatagagcaaccagaacaaagtgctctatttattattattatatatatgttctagatttacttatcctatgtatataagtgtggctatatgtatgtctatgcaccatgagcatgcctagtaccagtggaggccaaaacaggacattggagaccttcaattaagagttatggatggctataagtgtgtatgtgagttctggaaatgcatccaggtcttctggaagagcggcctgtggtctttaactccggagccagctctctagcctcatccatattatttcaaaattcgtgtgtgtgtccctgaatgcatgtgaactgtgtgcatgtagaggtcagaggataacttgtgggagtcaatttttttcttccatgtaggtcttagggcttgcactcaggtcctcaggcttggtggttaatgcctcttaggacaagcgtagccatttctctggcctccaagccccaccatatttatttatttgtttgtaaccaggtcttttaaaaaaattatagccgggcggtggtggcacacgccttttaatcccagcacttgggaggcagaggcaggcagatttctgagttcgaggccagcctggtctaaaaagtgagttgtaggacagccagggctacacagagaaaccctgtctcaaaaacaaaacaaaacaacaaaaaacaaaacaaaacccaaaaaatttatttatttactgcatataaatacactgtagttgtcctcagacgctccaggagagggcatcagatcttatttggtggttgtgagccactatgtagttgctgggatttgaattcataacctctagaagagctgccactgctcttaaccactgagccatctctccagcccccttgtagacaggtctttatgtagccctggctgtcctagaacttgctctgtcgaccatatctgcctgtcccactgtatttttgagacagaatcactgttcggaagctcattgctaaggctggcaggctagcaagccctaggaacctgcctgtctctt

SEQ ID NO: 27498 - DNA, 1123 bp, Mus musculus
tgtctgttttcggctcagacttcatttactctgacttccccagtaaactccataagggcagggacttgtgcattctcactgtattctcagctttcggtcttgcacgcagcagcaggttaacaaaagttagcgtagggaaaaaggggtgactgtaggaagggaacagaaagcctagaaaagaaaggaagcgaggcctgtattccctgccgagaccgagctcctgggaaactacaactcccaacatgcctcggacccagcgcagccgtgcccggcccttgtgggccttgcgtgcctagagagcgcatgcgggacgcggcgcccgctgggacttgtggttcctgccgcggtgtgtagggggtggggccggcatggaggcgggcgggggccgggggcgggcgcggcccctcccccgtcacttcctgccaggctgcgggccccgagccgctcttcagcgtttgcgctggctgtcgtcgcgtctgtgtgcgctcccccttcttctgagccccggcctggcggcgcccgccttcgcctccgccactccgcctcttccctcctctggtcggtccctttttcctcgccgtcttcacttgcttcttcacctcctcgccgccgcccaagaccgccggccccgggacgagctctggggaagcagccaggtaaggcggccggtccgggccgggtcggagcgggtcgcggaaggacccacgcaggcacggcgtcagcgggaggtgggcggcgggtgggctaggccttgcgggcgcgcgagccgcggcccaggcccgtctccgcctgcggggccttcccggaggaggcgggccctccgcgccgctcgtgggccctgtgccggagttaacgcggggggcgcgggcgggcaggggcagcgtcggtccggaggccccccgggtttcggtgctatgcacagtgtcgcggccagtgccgagccgcgggatgaggtgccaattcccggctcggcccccttcgtcagtcacttcgtattctttgtgtctctgttatgagggggagaaggagggggaatagtattaatcctgtcccaacccggtccctgcctcttcaggctgtgaagttgtgcagtgaaatggggcgtgtaaagtgcttatcagtg

SEQ ID NO: 27499 - DNA, 1155 bp, Mus musculus
agatagccttagatagggttaacagcccaggctggcttggaactcactgtagtcaaggctggctttgacttggtggctttttgcctcaaccctttcagatgctagattacagctatgagcctccatgcctagcacagacagtcctcttctacactagcacttgagtcctgaccccgtgacgcctgtttggcgtcctttctgagttatgtgtatctttgacctgcaatgattttctctccagcgggcagccactacactagatgagaagattgagaaagtccggaagagaaggaaggcagaggtgaggctgagacccggctgcggcggttgtagttgcactctggcctgtggctttgagaggggcgggaacaggtgctccggtctgggtggtcattactccttactgtctggccttggagttcagcatcgcttctcttaggttctgaatttcctggtgtttgtagtcacacctacttcatttgatttttcctcaggacaaggaagccaagtctgggaaggtggaggagaaagaaggccaggcagactctgacctgaaggggcaggagaatccgggtgaggatgaggcaggctccaaggatgaagactctgagactgactactcctctgaggatgaggaaatcctcaccaaagcaggtaggccgatgcaccttggctctgtaggaggttgtgcagtctttgtgctggagcctgctggtccccacggtgctgggatttgttaggataaattgtctctttactggccaccatatcagggcttcttctttctggggacctgcttctctcctcattctcagctccacggagtgttggcttctctacagctcgcctacttggggcgactcggttgcattgggtttgcctctgtagttgggggttcagtgagcattttggtagaattcactcaggtgtcacagtgttgtgttaagagcctgccatctacactgtactcactaggctagtgtcctgtctgcgtttgcccttacctgtgaaaggagtgggacagcaccctccctggacagcaccaaggacatggggtccagaggcaggtgctgggtaagaagcactctgcacactgctgtgttttttcccacagacacactcaaagtgaaggagaagaagaagaagaagaagggc

SEQ ID NO: 27500 - DNA, 1099 bp, Mus musculus
cctggtggacacaatgagttctagatcagcaaagatgcacagtcagactctgctaaaaagaagacctaaccttgagaaagagaattcagggatggggatgtggctccacggcagaggagctgtattatgtagcttctgccagtctctgggttcagtttctagtaacacacaaaaaacagtattattttggacaggagagatggctctgtggttaagagcactgaatgactgactgtatcccagcacttgggaggcagagacaggtggatttctgagtttgaggtgagcctggtctacagagtgagttccaggacagccagggatatacagagaaaccctgtctccaaaaaacaaaaacaaaacagcactgactgctcttccagaggtcctgagttcaattcccagcaaccacgtggtggctcacaaccatttgtaatgggatctgatgccctcttcccgtgtgtctgaagacagctacagtgtgctcatataaataaaatatcatttattaaaaaaaatccatagtattatttcccataaaatcttttgtgatcctagcacttgcaaggatgaagtagggctcattgacagccagggctacatatgtgagaccctgtctcaaaccaataaagaaagatgacttaaccttgataatgagaattcggggtggggtttggctccccactgatgctcattgagaaatcacgttgccaaggccttcggcttgcttgtttctctgtgtgctctacatttggcctgagccccaggccgggggccccactgatgaatgagtgatcaggccatccgtggggcgttttctgcaggtggcctggatgtgaagtctcaggaagccgctcttcgggcagcaccagacatcctcattgccacacctggccggctcatcgaccacctccataactgcccctccttccacctgagcagcattgaagtgctcatcttggatgaggctgacaggtgtgcctgagatggggcctggggatgctgtgctgttcccctgcgtgctcgctaaggctcttggtgacacgtgtgtagtaacaccattgctgttcacattgggtttttgtccagattgaggtca

SEQ ID NO: 27501 - DNA, 1178 bp, Mus musculus
gagcagatgaaggagattatccgaatgtgttcccaccaccgccagaccatgctcttctcggccaccatgacagatgaggtgggtgtgcctcgttgcgtgcagaggatcccagctgggcaagccctcttttcttgttctccatctcagagctgatcagccatgaccttgtacttggtaggtgaaagatctggcttcggtctccttaaagaatcctgtgcggatatttgtgaacagcaacacagatgtcgctcccttcctgcggcaagagttcatacggatccggcctaatagggaaggggaccgggaggccattgtggcaggtgaagactcagggctggtctgggcagggtgggtgtctgcactcaggctgcctccatccattctccccagctcacacggtggcactgcctgttacctagtccacgccacctctcccaggaggctgctagcccgctgcctcccgtttcctcagtccgtgctgttgactacgcttgggagttggcttctctggctttgccttggcccgggagccccgcagacagttcatggtcggtctgcccggtgctggctcactcttctccctgcagctctgctgatgagaaccttcactgaccacgtgatgctcttcacccagaccaagaagcaggcccatcgcatgcacatcctcctggggctgctggggctgcaggtgggcgagctccacggcaacttgtcacagacccagcgcctggaggccctccggtaacgctcggtgctgccctccttcctggtcagcccaggggaccatgctgggagaaaagagttgtgttagagcagaggcaggggacacaaacaatacagtgccccactttaagcagttgtacaccagtgtctgccaccacccctgtagtcccagcaggtgggagagggaggtgggactcactgacacctcattgggtttaatgtgagcgctgtgaggtgatgcacttagaactcttctgaccttggagcgggttgctcactgtgctcctgtgtgtggctttcccagagcagctccagtgtcaagtgattaggcctcgcccctggccagcagccatttcacgagcatgtgctctgcgtgtgcgtcatggttcctgtgtggtttgtcattcagttctcaagagcagaggagagctacaggacaggggcctgcagaacgc

SEQ ID NO: 27502 - DNA, 1197 bp, Mus musculus
agaagagtgggaggtaaaccagcttccttgcctgaaagagaggacttagtcttcccaggcagacttggagtgggctctgctggaacaggccctggcgatgttcaggcccagtttggccaacgctgttattactgttacatcatcacttcatccacagctggctgacataacctgagggtagaaaagctatggtctacagagtgagttccaggatagccagggctacacagaaaaaccctgttacaaaaaaaaaaaaaaaaaaaaaaaaaagctatggtcggtcagaggggccctggcaggatcgagcaacttagatggtgtcacatcacagtatggtgctttgtcatctcacacaccttgtcagccttggggtctgtgagcagccagtgcagataaccgaggacctcatccttagtcgccctggaatccagctcttatctctgagccacggtggtgtggtgctgtggcttaggtctccgataggcttcccagtgcttgtgaagcacttactctgtgctagcatgtgaacaggagacctgctactccacataccaacccgtaaccctgactgagaatgaaggcctcttaaggacaacatggctgcagtaattttcaccttagcgtctgtctgtgccttactggctcaggttagtagtattgtgtggggcagaggaataagcccagttcttaaaactgtgttgggcttctctctgctgtgtcacttgggattgggccctttagtgtggtgacatcagttcacatgccagtcctcataaaatcttgtagcttcattcagcgacagatccagaagggataagatattgtgtgcaaggaccattgtagctggcctatgacagaccctgtatcaaacgccagctcctaggcagtgacccagagagcaagagcccgcgaggctctactttgaggatacatacctactgtagaaagaggaggaaatggttgtcaaagcgagtccaggcaggagtagcagggaaaggggaagctagagacatggcccaaacacagtcagaaaatgtcacgatgacatctgagacattgtggccagtggtcagccattgctggccaggtgaggtccttcccagggctcttcacactgccaagcctgcagcaagcaccctaggtcacatcacttgagaagagtcaggacagatttggggcccaggcaggtctctggaa

SEQ ID NO: 27503 - DNA, 1231 bp, Mus musculus
tgtcatatcatttgcaagtggacagtgccagtcagagttgtatatgtgagacagttgcatttagggtttggtgctggagtcatgggcgcctcaggtcatacgtgaggcctcctggtacataatgttgaaactttccaaggcgattgtgattatctcagcaagtcccattcctttagctaataattggagacactggtattacagctgtctcctgtaaaggagatgtagtcctaagtagctgtctacctagcccttgggatcaggctcagcagcctcccacagacaggcatgtgtgatgacacaacttttttccccatcagatcgaccatgttgatcacattcttttaagccagtatgtctgacatgcctgcctgacagtacccactgctgctgtgcccttggcgctcaggtagttgacaggttatttctgcattttatctcaggtttgctgacagacaaaaccgggctttgaatggagcgtgaactcctgaggcgagcattggtgagtggtttccacgtgtccctcttccagtgtatactttgtttctgacataaacttggctggtgaactgatgatatcatttctttccccgtcagatcgaccctgttgatctcaaatactaattgccagttttgtctgatgcatcagccccaggaataattcattgttggctttaatctatttcacttgataatggcttcgatttattttctacaggcccgagagagccgaggatgcaggtgttggtctgatcttgatttcaggtgaggttcttttactgttttaacctgtttctagggatgttataacaagtgtggagagtaacgggtgtttgattcttggcttttgctgctctgttcatgctgttaaggttcctggtgggattcaagttcaccatgttgcttgctaagtgggggtgggggatgtgttcagccagaaaagcctatcaacattttacttttctttttaggtacttttggaatacagaataccagatgtgttcctgctgcccagccccacaaggctatgcagaatgcaaagaagagttactttttggctggggagtagtggtatcatgtgcactattgctggaaataataaatattggcctatctgtagaaataaaaatctgactaatgatatttatctgctgtgtcttgagtttctgggttgggtgggcctacagctgcttcctgtgaacatttcccactgccttaagtgggacagctg

SEQ ID NO: 27504 - DNA, 1231 bp, Mus musculus; identical to SEQ ID NO: 27503

SEQ ID NO: 27505 - DNA, 1211 bp, Mus musculus
cctgatcaaaccccgaactgccgcccagtctccatctaaccccaacccttccctcacccacgcccaccagagcccctgatagggagctgtgagttgaggtgttcagcaggtgttactcagagtacctagggatctggcaagaactgggggtcatcgggcaaaaatacctcacaagtcagaaaggccaggaacaaaagagccaatgtcacatggtgccattcatacaattggtaaatgcaccatttagggctggttgggtcagaggaccaagggaagggtaagtctaacagggacagggtttcttttggatgggagcaatgctgttccaaaaggacattctcgtgggtggtttgaataagaatggcccacacaggctcctgtagttgaatgtttggttcccagttggttgaagtgcttaggaaggattaagaggtgtggccttgttggggaaggcgtgtcactgggggtgggctttgaaatttcaaaagcccatgctaggccctgtctctttctctctgtctttctgtctcttcccctttctcctctctgctacctgcagataagatgtaagctctcagtcactgctcccgtgcatgcagccctggtccctgccatgacagccatagactcccccttcgacactgtaaacaagcccccgttacatggtttcttttataagctgccttggtcatagtatctctttacagcaacagacagtggctaaagcaagcctagtgatgcttacagagttggttggcatgcaggatggacctaacagtgctctggtatgcagaaccaaatggcagttgttcatgggtaagcagcgtggtgcgtgcctgagtgggatatcattgagggtgacatggcacagctgactcccaggaacagagacttcttttgctgcctgaagcctctcttggcttttcttttttcttttctttttttatttttttaagatttatttatttatttactgtagctgtcttcagacacatcagaaaagggcatcagatctcattacagatggttgtgagccaccatgtggttgctgggatttgaactcaggaccttcagaagagcagtcagtgctcttgcaagctgagccatctctctagctcctctcttggcttttcagtcatctaggggtgagccttaccagggtttggtggatcctggtcgcctaacagtcactagcttcctgctagacgaag

SEQ ID NO: 27506 - DNA, 1146 bp, Mus musculus
cacacacacacaattttccccacccccgcagagccccagcgacaggagagaccctgagagccacgacaagtctgtggacaccaactaggatggggaccacacctaacagcttcttccttagatggcaggagcagagctgacagccacatactcctagtctcctttagaggctctgtctgcctctgagtgcgtcatcgccatctctcatggcgtcagctgaggcaggtgttggagcaaggggttgctagtgagagagtgggctggccaagcagtagtgggtgtcccccctcttgttagaggggtacagaggacacttgatcctgagggagtctccacttcatcagccacactcctagggcataacgcttaaacaagcagcggctcaaatgattcagtattctgtggtatctggggctttagtctgagaagctgtcaggaggagctgacaatttaaactcaatcctttctgctcacctggcaatccagaaagggttccaacagttggcacgcagccaaggggatataagccagggctgtcacaggaatgcgggtcccaaacagggctagcccggactgaaaagataagcgtcaaatatgcaaacgagatagattattcaaaaagactgtgtgtgactgaaaaacaacattaaaaaaataataaatttcattttctacatgaaaaaaaaaagaaaaaagaaaagaaaaatccttcactgaactgccctgtgaagaattgtgactactttctgctgtggtgtggtagggaacacacctactatgagaggaagttctctctctctttttttttctttctttttttgtttcctgtagtattcaagctaaaaaataataataataataagttaataaaaaaagcactttatgtttttctaatctaggttctaccagggacagtgtcaagatctcgcactttaaaacaagcactatttcccctgggccgtaagctggccctgcacttggggtattacttgtgcccatttctggccacagtgggtctaccgttaccacatcagagtccggggcttttccgtgacccctcaggatcacccctcatccctcatgggacaggagaggtcctcaggtttcggaggcagggatctcttaaagcctgcgtacaagagacac

SEQ ID NO: 27507 - DNA, 1471 bp, Mus musculus
tgttttgttctttttgtagactagtgtggtaactagggaacagatggcactgcagagtgcttcccgctcatatgagagagcaggtgtctgcccttgagagctggtgagccgcgtcatctgtttgcgctgggcaaggagctgcaccgctgcgttgacctgccttgtcttacggtacacacagcaataaagcctgggttccgcccggtctccaccctccctccgcctcccttggttagtttcacagtgctggcaatgaagcccgtggcccaccacgctaggcgagtgctctgccactgagtcacggcccagccctctctccctcattcttctgtttccataccaaaggccaggagtgcttcactgtgctggagccatggtgtcctttggagggacaacggtgcacgcggcatgtatcctggctgaagcgctgcaatcttacactagccacagggtactgttttgagccaaaggctgatacttaattgaagagggaaaatgcagatttggggacaaaggtctttttactgctcaagtagggtcgcttctgtcctgttgcaatcatgtccaagtttgtttttagtgtggacttttgtgggcactgtctgtcattggccacccagtcacgtaccgagtgggcagtgtcacagccaaagctaccactgagccacagcgtaggtcattgcttgaaaaaaatgacagtgacaatggagtgtgaccttggtgtactgtggcagcccagatgactgagtgctacagacgagtgacccttagatgacctcctcaactgcctgccttgtgtgtgcgcgcaaggcccctctctgcacaggggttcttcgggggagggggtatttgcaaaaccttaattttgttaaaatgggggactctgtcaggggactctgtcatcgcttcccttcctcagaggacagcacagagccgcggcgtacacactgacgtacccaccaccaacagattgaggcactgacgcagccagcttagcccagcattactgtctctgttgtgagcttgctctttgttttaaaaggtgccaggggtacatttttgcactgaaacctaaagatgttttaaaaacacttttcacagaaatagtccttgtcattacattgttcactcatgtgtttgtacatttttgtatgttaatttatgaatgattttttcagtaaaaaatacatattcaataaccaaaccttggtagtcgtctctctgtctagctgcctctcagggtggtttcccttcctctgtagaacaccacacactggcgacaccagggaatgaagatctggctccagaacattctcggtgggcagtcctgggttctttctgccagaacattctcggtgggcagtcctgggttctttctgccagatcctgctcgtgttgtaatcacaaactgttaggaattgaaggcttgtcattcccggtgtgtgtgcattttgacttattttcccatctc

SEQ ID NO: 27508 - DNA, 1828 bp, Mus musculus
ctacaagggagtggtagggctctaagcctgacttctttctgcccctcctctgtaatctccggagctccccagttctgacctgggattcgtctctggagcctccgtttccttgggcctcagaggcattagatgagatgctggaagacgggtccaggcatctgccctggacttgtaaagctgggcgtcagctctcctccctctctgtcctcggctccccaggtacgctctgctgaggaagtcaaaggagcggcaaggactggatggcctcaacaacctgaactactctgcgaatgtcacgtacgacgccttgtataaaaacataactgtcaacttgacacccgagctggctcaggtgactgagtactgagatgcgaagagaagccgcactcacctacccaccgctcccttggacgggctgcgacccgccatcctgggggtcaacacaggaggacagaagagagtggagcacaggaccataggggttccagaaaactgtcacagagcacacgcacaaaggccttcgctgtagggcccaacagggacaggagacttgaggacacctgtcatcagcactggtgtctattccacaagacagatgtctgccctgccactcccttccgtccgtccctgtccgtccccccccccccaccgcccccaggtcctgtctcagctgcaacccatagaactgcagggccaggctaggtgccccttggatagatgggtggccaagccccctggcctgaaggcccgtctctgcatctctacagttctctttggttttcatttttcatttggcttagtttaggggtttttgtttgtttgggtttttttgttttgttttgttttgttttgttttggttttggtttgtttgtggggttttggggttgtttttttttttggtggttttttttttttttttttttaaagaaaaattttctgctttgggtggggactgaggacagaggggagggacttggtgtgatagacatataacagtcacttcttgaagaagtgcagttgtaaataagccatgtaaaatgcctttttaaagtttaattttatagctggctccacatcaaagtgagggcctcatatgttagatcaccttgggtggcaaacaccccagttcccacgcagttgagtgtcatcacccaagtccctgtcatctaggaaggaagtggatgcagggtggaacaaagaacctccggtcactgtagcccctcttctctgctctgcccctcctttcctgtcccctcctttagccccttcccccaaggacttcctcctggagactcagcccctaagctggaactgctgttaggggcacagtgctctcccctcttacagacccagcggagccagctgggatgtgcaggggaggggaggcaaaggcccagggcacaggcttatcactccagtatggatggcgggagctagagaccaggagatatgaggccagtgtgagctgtgtcacaagttccaggtcagcctgtgctgtgtagcacagtccagctccctacacctcctcacacacacagtggctgctgggtgaccgttcccttttttctttggaacttggccacagtttctctgggctgtgcctgcatgaccagctggcttcagtgatttctccgtttccctctttagtttctaggaagccactgtgctgtgctaagaagcagttggtcaggagggctcagcccaggagcaggtggccctggggtgcatgtcagccaggggccagtcagcccagcagtctcccctgctccctgacatgagttcctaaagggcactgaaaagggcacctccttcctgtgtctgcctcca

SEQ ID NO: 27509 - DNA, 1197 bp, Mus musculus
ataactgtttcatggaagccacagggttcccttgtgacagcacaacagcagggctttcatgtaagagaaaaataaaaaacaaaaaggaaaaggaaaaacaaaacaactgtagttggggagggtggcacacacctaaaatctcagtgttagggctggggctggagggttgtgagtttaaggccagcctgaactacacagccagtttaaggtcagcctgagtttttagggagaccctgtctcaaaagaaccaaaaagcagggctgtctggggagatgctccctggataaagcaccttgttgcaagagtgaggaccttaattcagcacccgcataaaggctgggtgtggttggtgtggccctgaaatcccagcactcagctggcagagaccggaattgatctcccagagctcactggctggccagccgacacaactgctgagcaccgggttcagttagagtccttgtccttaaaaataaggtggcgagagatgggaggtgaagacatgacgcttcctccacagacgcactacttatcccttacaaatccaaaccaaacagagagctctgagtggtagagccagtaggagccgcggtttatcctacctctcccagttgctgctgagggtgctcggaagtcactgcagtgtggatgaaggtctccttagaaagatcaagagagacaacaaaggcacaataactgtgcaccttgtagcactgtgtctccctccaggtgtgcccttgggctagccaccttagtgttatcagtgagcttgatacaggttctaggtccaaccctgactgctccagttcatgtccctggggggcagatgcatgatcctggctttctgagccctccttgaggaaggctacaccaggggagcacctctgttggaagaacctttgcagctcacgggtggggaggattgtctgcagtgcctaggtactctgcttcttccctaaccatgtgactagggccagagagagacctagttggtaaagtgcttccaaagagcctgagttccgttcatggcgcccatgtgaaagagccaagtgtgtgaagccatccatgtgcttgtaaccccagccccgggcaggggagacctgagcgtctttagtactcacgagtcagccagtcttgcttaattggtgagttgcaggccaaagagaagccctgtttgaaaggaggaagatgccgttc

SEQ ID NO: 27510 - DNA, 1169 bp, Mus musculus
cctatgcccccttctggcatgcaagtgtacatgcagacagagcactcatacatagaatcaacaaatctttaaaaacaactgtgaaatcaaggcaggatttcactcactctgtagcctaaacaggctttgaactttgaattgttctgccagtgccctttgagtctatgggcgagtcctgtgtgttaaaagacaattatatctcaatcaagataatgaatgatttagtatatggagtgctagtagtttgttaatattctaaagaagtactggactgaagattatagagaaagtacacttgctacataaccaaatagatgtttttctgataaatactggactgttcagattcccttacatacgtcacggcaggaaaaccctttgttgtttctgccttaaaaatgccttctgaatgtctccatgtccttactatatgaattttctggaggaaatacagattggggaatctgattgctttgggaaatgaaaaacctcctgctaagacactttctttccccttcagtgttcttttctgtctcaggttcacaaatgttgttctgttgagacatggtctcatgtagcccaggctagcctcaaactctccgtgtggtcaagcatgaactgaacagaattctggtctttcttccttcacctctcaagttctagacatgtctttgaatagtgccctccctcccttcctctgaggaacgtgtatagagggcaggctgacttgcagaaagaaaagtaccgctgctgtcagggctccgactaggttttctgtcctctggagagttcttgctgtcaaggagaggcctgaggtttggggttgagctggtctttggccgtgagaacaggtgctcctcctcccagactttaaggtccatagagctgagatcatgacagccaggaaggagagcccctttgccatgtcttctagagttctttgagagagtgacaacccaaagccacaatcgccaagacactatggactcaccaagacaccaccaactcactaggacactgctgactcgcctggtccctttgcttgggtttttgtgaccgtaacgggagggctgctgtggtctgtcggggaaaatcaggagttccctgaagctgggtagataagggctaatcagaagccagcagggtgggtgtgagcagagaggaggcct

SEQ ID NO: 27511 - DNA, 1163 bp, Mus musculus
ccgcaccatggggcctgcagaactctagggaagctgctgtaatgggtatcacccactctagagtactgcccagtccagccaagtagccttgtgctaagtttctgctgtttgctttttccttccaggtattctcatgggagcagtaataaaagttatagagtttaaaaagctggcaaattggaaggtaggtttgtcataatccctgcttttgctttccattgtgtgtgtgtggctgtgtgtgcacatgtatggacgaggtgaacagtcttgggtgtcagtgttcctcaggtgctgcgaagtaggtctctcactggcccagatgtatgtaggccatgtatggcaggccatggacgctgggattccaactgtgcatcctgcctttatgtttagctcctctggctcctgaaggctgaggttacaggctgtgccatcacactccacttggtctgatttgaaacagtgtctctctttgctcaggcttgcctgagattgtcagtcttcctgcctcagcctccaaagtgaccaggactatatataggtaaatctgtagactctgttgggaagtcctttttgttatttggtgcctaggatggagcttagggcatactatgcatgggcctttccactgagctgtaccccagcttacaattgttgttataattagattagatgcaaatgaagtcaggggcagctcaagaggcacagcggaggagtgctatagtgcaggctgaggtgttatgaatacttggccatttgaaaagacacaaatggtggaggacagctatggtcaagattgcttgcttgggtagggggtgggggtggcacacacctttaattcagcactcaggaggccagcctgagtttctatcttttttttttttaagatttatttatttatttatttattatatgtaagtacactgtagctgtcctcagacactccagaagagagaatcagatctcgttacggatggttgtgagccaccatgtggttgctgggatttgaactcctgaccttcggaagagcagtcgggtgctcttacccactgagccatcttaccagcccccagcctgagtttctacagagtctatagagtgagctccaaaacagccaatcacacaaagaaaccctgcctggaaaaacaaacaaacaaacaaaccaa

SEQ ID NO: 27512 - DNA, 1194 bp, Mus musculus
aagcccttcacagtgctgcccgagtggagtctgcagagtcctagtagcttcagttctccctgagtggaactataggaactgtacctgtgttgtttggactcagatcttttcttgtatttcatggcttgggttcctttgagatagagcctcatgtagtccaggctggctaggaactatatggctgaggatggtctggaacttgtcactcccctgcttgcaccccccagtgctaggattgcaggcatgtgtcccagcacctgtgtgctggacttgaacccaaggcttcatgtacgccaggcaagcggcctaccacttagccctgtaccctggcggagccctttgcttatctgtttgatgatgctaatatggcataaaggactttctgatggaaagaaaaatgaggaataaccgttcttagatatggccaaggaaaaggcttttaatgtagataggaaggagtgaacaggtatcaggaagggtccagactgaacatggctagtagaatagacctagccatgagaggagagagagaggcaagagagggggcaagtggaccgagaggtctaggagtagagccaagagaacctgtgaccaaaatgtcttaatgttatgtaggaaagagaaagtgggggcagggcagaaaagctgggggctaaagaggtttagggtaggtagggactggagtgagaagtactgagacgaaccaggactacctgggattttgaggacttagcagccagtatctgctttgatgtgttaatgggctctcggacatttgtcccaggtttctttgaacctaacactgaccattgtccagtgtttgaacttattagccttttcaaaatgcaccctttaattgagtagaaaactgtgatagtgtagattttagactgggatagtcacggaccatgcttgtttctgtcatacctgggtattgagcatcatccataggacagatgccattgttcctactgagccttgagtcttgtgggaaagacagctgtcagctgtacataagcaagtggggagtgcagctaccactgagggagcacagccagatcctcctaagagctaccttgggacaagaccaaggaaacccctctgcagaagggttagcatgaggcacacaaaggatcagggtgcactctggcggctagggcccaggcagtaaggtagtgtcctgccatgggacag

SEQ ID NO: 27513 - DNA, 1212 bp, Mus musculus
agactgagcagagagtcttcttaaaacctaccctaagggctgccaggtccatgtgcccgtggtaggtctggggccaggcagctgctgctgtcctgatcccccctcccttagctatggatccttgtagtagaggtcagccgctcctggcgcaaacaggatccagtagctgtctgccacccacgaggtttctaagataccatgtggagacagggtcctccccatccttttcagaaatagcagcttgttttctctgctggcatgtgtccagggcaccaggtcccagcagggggaggcagactgttaactgaacgcgcataggaacaggaggcagcgagagcctgtgggaggaagggccttctagtgaccctgcttctccatcctgcctccctcctgtccacccagtttcagagttgggaggggaggagccatggctccctcacccaggcttggtggctgtggccctgttttagagccatggcagcacaggctggtgagtggtagagttgtactgaaggctctcttcacaagcctgggtttctttcttctctgacatggagggttttggaagccctagttttctgttgtgatttaaggagactggccgggagccattgttcaaggtccctgaggcctttgctgctttgggaagggcctggggtctgagcttgggggggggggaagctgtcgctccctcatctggagcttccctcttgcctgtctactcccctcaccctcactgctgaattgggggaagggtgccccaggtcacatgactggatagttagaaataaagtgctatgtagtcagctgacctctgttgtgtcacgtgtttgcatactcctacatgtggttctgggtccccacagttgtgcaggacagcagcaggcacattccaagaagtgcagtgttcaggagtacagctctggccctcggtgaacaacagcacttgaggcagaatgctcatgccaaccatgacttcctcccaggtgccaggaagccattgctctgagcctgtggctgcttgagtgtgttcgttttttgacagcagaaaatggagaactaacttctccatggaatctgaaagctgaggatctagagcctctggtcttcagttcatgaagaaaggccttctgtgaggtcctgagtcagctcatgcacgcacacttcctgaaggagctgctgccagggaaggctacctgagtgtgacatccc

SEQ ID NO: 27514 - DNA, 1207 bp, Mus musculus
cagctagggtggagctgggagcctggcgtaagggactgataaagcccatgttccttcccatggtggtagagagctactgtcttccctacggtaaatattatacacctacctccagtgtgcacacaggggttagcatggtgccggggcaatgacctcagtgacaagatggggacctcagcccccacgtctatagctctgtctggtcttggtgcctgctgagcatgaatcttgtaccctgaaccttgaatctcagaaggaagttcaggcggtgggtgcctccacccccatctagccttcctcactggttcccggggctgtcagcgcggctctcagtctttttgcactagggcgggcagaggtgggatgcgctccttagatgcctctccagtattcagtgtccacacttcctgggataaatcccacctctgggttttcctttttggggagaggggcagggcaggaatttgaagctgtcacttccttgtgaagtgtgaacacagtttagccataggcagttgtgatgtccagtgtttgggatctatgggcaagtagttttcccaaagcaggcattcagttctggagcaggcttgactctggccaaaccctgagccactgtgaatttgctggtggtcttccgacttactggagtgattttttaggttttccaaatcttatatgactctttttttatctctagctgatagaccgcatgtaattaggtgtacatacagcagactctgggcagttttattcctgagactggccttcctgggcagctctttgatgtcagcacctcagacctggcaaggcctggccctttcctgagagctccagctctgcattccagtcactccagcattgcagggactctcttaagatggaggacaggccacctgaggaagtccagtgtgttccaccaggaaatacagtgtacagactggcaaggcctctcccctcctaggtgtgtctcactataggagatcgctgtgatccgggtagttgagtatatgttaatttaaaatgcacatattttgcatttgatttctacggagttgaaatgttgagagatttaaaaaaaaaaaataaagtgtcttccattgttaaatgaagtgttcatggtgttacagccccttctgtggcttccctcatttatttgcagcatgtgctggcctagacaccacagttagctcaagtgacaggactcaga

SEQ ID NO: 27515 - DNA, 1680 bp, Mus musculus
catggcaccagacagggtcacttcttcaagggtgatggggccctagggcagagagagccctgtttcctctgggctcttgccagcattgtcttccccactggtgaccttgtttgtcccatggtctgctttcaccacacctcagctactgcctgctttaagaagagcccagcttcttctcctacaggatcttaatcgcattcatcctgttgcccagtgttcatctctcaggtccttctagccagccaggaccttccctgggctgtgaatagcacaataaagcagggactcctttccttggccctgaggtgccttggttctgcagtttactgggccagggctctgctcctctcctcctgggtgacatcgcagtctgatgggggaagttttggttactgctgtttccctacacctgcacatctgtacacctgagggcttaaatgcctgatggtgcctttttaggataaggtatcaccatagaattgtagtggaaatgttgggtagcaaagatggggtgtgttcatgtgtaagtagggagaaggtgtagggtgtgtggctttttggtttactttgatgctgatgagtgttctcaggtggctgggtcgtgtgcccctcttattgagtatatgctgacattcttgctctgaagagtgttggagggaggcaccgactgctgggtgctgcttggtaacttgatgagcctgagcagtattgctgcctccttgtgcaagtatgttttaaaccctgccttttgttgtggaggcagtggtaaagccagggtcatacctgggaagttaaagttaggcccctgcacagtcgagggaggcggtctgctgaggctttcttgagcagcagctataacagctggaaatgcagtcatgttacagagcacaaggaagagcacctccagtcagttccacaggacagaccctctaccaggcctggggcttgggagtgagtcttctttctggtcatggggctctggtccatctgagactgcatgtaacattgtacttgtggcaccacgcctccacagtggtgcctctgcctgccagggccaagccagcccagatgccagcagagtcggacaggatcattttcccaacgttactgcttcttcactgtaccctctggaaaggtttgctcaggagatgtgtggagggaggttcaacaagacctgccccgagcaactgggaaaggcacaggtgtgccacagtgcagcagggacctcttgtccttcatcacactcgctgtttctaatatgactttccagaaagtgtggttatgttctgtcttatagaaagtgaaatataaataaatttcataatttatccaaccagtaagctgcaatgttttcatttaaacagctttttctgaagtgtgggcccagcagcctctagaaggttgttactccaagggaacactcttgtctgtccctgagtcaacctggcttctggtcaattctgagagcaactgagcctcaagcacctggcttctctgaaaactgagcagaagtctgtccatctgcccatgtccctatgtccccatccccccttaaaataggggaattcacaatagcaggccaggctctcgcagctgcagtgactcgagtgtaactcagacttcaggctgtgcatgtgtgcattgtgtcagttgctgacacctaatgaaccatctgaaggg

SEQ ID NO: 27516 - DNA, 1199 bp, Mus musculus
ggccttgggtttctcctctgccgggagggagcaagtccttccaggcaggcatcaggaaacatctccgaagctgctaggatcccccagggccatgcacctttcccccagccgccagggccccagctgctccgctcggaccaaatggcaggtgcgtgggaatgctgtgcctgtggtcaccaccttctcaggatccccagtttccccgtgtggggagataaagccgacgtccctctctcctcatggcggtcagcttctctgaagccccatttgctctgaggtggaaggggatggtgtgggtggagcagacgcggctctctcaggaggaaatgctgttcagtctcccttacaaaaggaggaactgaggccgcggcgaggcgggttctgaccctggcccggtgctcacagtgaactgggcattgggcggagccctttgaccccagctgctgcgcctggttctctcggcaggcaaggtaggaagcagccgctgggacccaagctttcagtgaggaagtaaaatgcaagctaagaggaaaggcaaggccaaggccaggtcacaggggaaatggggacagccaactgcactccagacccagggacaccaacctgatgctgctggctgtgcaggcaggatgagcaacacacacatacacgcacatgcacacactcacatacacacatacacactcatacactcacaccatacacacacacacaaacacacctatatatacactcacacacaaacacactcactcatacatatacactcactcatacatgcaaacttacacatatacatactcacatatacatacatacatgcatacatacaaactcacatacacatatacatacggtggtagtagagttgggttttgggggttttttgttttgttttgttttgtttttttgttttgaaagatttatttattttatgtatatgagtgtactgttgctgtcttcagacacaccagaagagggcatcagatcctgttacagatggttgtgagccaccatgtggttgctgggaattgaactaaggacctctggaagagcagtcagtgctcttacccacagagccatctctccagcccgttttgttttgttttgttttgttttgttttgttttgttttgttttgagacagggccccatgtagcctaggctaaactaaaattcactatgaagctgactatgatt

SEQ ID NO: 27517 - DNA, 2304 bp, Mus musculus
tctacacagagaaaccctgtctcgaaaaaccaaaaaaaagggggggggggaatcctagtgatttggggagacctgagggagggccccaagccgcacttgaaagaggtctctctctttctgtgtgctccaccttcttctgcctgtctcctgagggctctccaccccagggctggctctcctcactacccccataactgtgtctgctgcaggctggctcaactaccccctagaggttataggcttctggcggcgcctggaggatctcatccaaggcctgacgggtgagaagccgagagcggacgacatgaaatgggcacagaagatcaagtagcatgtctggactcttggtcgccaaccttcccaaacctgaactgaagccatctgccaaatcccggcgtctctgagctaccctccagtgaagagaagtcccctgggctgggcccgggcacccctagcccacccccagtgacacagaatacttgagccacccacttttcatttcctcttctccttttctttccttgggccttcctggccactgagctgctccgaggccaagcctgactgcagacgggagcccagtcctgctggccagccccaccctatgcatctgctctgcacgcctgctccctgggccgatgtagggtcacagacaacaagtggtctgtctcggtgacccagagagcccccagaacacgtaaatgtccctggatcatgattctccctcagccctgtagacagaccccagaggcctaggtgggtgggtcaccccagctgccacccaagggaggcagagctgggcaaaggtcagggggcaagctgtcaaggagaggccatgatgccccgcccactctcggatactctcctttcccctagttctcctgtccatgtgtccagccacttctgaggtctccctgcagagacatcttcatgggcacagctcttgtgaagggcttggtcatctggggaagggacactgtgtcccttctggccagtgtgtcagaggaagaagaataaggcttttttattcggattttttttaaaggtgcttgcttgtcaatgtaaataatagaaagccttaatatctttctgtaacatggagtaatattttaatgtcatgttttggatgtatataatatatttataacagaggaagcatctccttcactctggttgccgtgtggtgtttccggatggctgcatagagggagctagccctggcctgagggatgggggctttatcccccgacacagtgaagtggtctagatttatttattttatgttttgcccacatgtgtgtgtgtgtgtaccatgtgtgtgcctcgtccccacagaggtcacgagagcactggaaccctggatctgaagttacggatgctgaaacactgtgggtactggggaaaaaccgggtcctcttaagtgctcttaaccagggtgccatctctctccagtactgaatttttgtttaaggcggtggtatatcatatactccaagtgacctcacacttcttatagaaaccaaggctgaccttgaattcctggtccccgtaccctcccaagtgccaggatcacaggtgtgtgccaccattcacatgacctttcacctagattgtgctagagcagtgctggctggcctgtcccagaactcctttaagaggtcattggcatctgatgtatgtcatggctctggcctagacccagaccaccagactgactgactgtggtgggagctgatcaaaaaaaaaaaaaaaaaaaaacaataaataaagagaacgtactacaacttctttattatatttttttgtttgttttaatactttgttctttcaagaggcaagggtctccgtatatagttctggttatcctggcacttgctctgtagaccaggctggtcttgaactcccgagattcacctttgatcccagtgttggaatcaaagcttgcgccaccatgcccagctcacagtgcagtttcacaaggtacaaaggccctggggcaggtgcagacttgcagttagatgctggggtgatcagcaagaccagccagcacagaagtgaggagagcagctgtcgcgaagccccgggccacctgatggacaagcatttccaaggcaccaggatttagtagtgaacacacattctggtgtgtatctggtcaggctgtctgtggctccaggcctgttgattcaagcctgtaatcccagcatttggaaggtgaagataggaagattatagagggtcaagttcatctttggctacatagcaagtttgaagccaacctggactatataagaacctgtcttt

SEQ ID NO: 27518 - DNA, 1210 bp, Mus musculus
atgtgctgccccgtccagcagcttcctagcgaatgcacgatctgcagtagccatgcactccgtaggcgcttcgcagcgcgtactccctgcctccagcgcggtacgcgagttcgcggggcgcagcggggacgcgcacatccaccctgccttccgcgtccagctgcgtccagctgcgaccccgccccccggcgccgcggttggctgaggcccgaaggcctgcgattggccgggcgcggcgcgggcgcgggctccgattggctgtgacgcggggccccgccgacgccccgccccggccgccgcgccccgcgccggccggtcattgggcggcgtgatatcgccgcggttccgcggccgccgccgctgcaggcagagcgcagcgggcgggccgggcgacgggccatggcgggcgccgaggacgcgccgggccggcagccggagctggacgaggacgagacggcggagggccggcgctggggcgcacagcacgcgggagcccgtgagctggcggcgctttactcgccaggtaggacggatggagggcctgcgatctgatgggtgctcggcgccgggcccgccccgaccgaaccccaggcggtccgaacacctggaccctaacccatctgagccctctggatccgaaccttagcccattcgaagtccccggattcgaaccctaacccatcctgagtccacggattagaaccccaacctattcgaacctcacttcgacccaacccgtccgaacccccacgaatccaaaccccagcccatccgaaatgccgagatctgaactctacccagatccgaactccagcagcccatttggacgcccttggatccgaaccgcactccatccgaaccctagccccatcctaaccctgcccccaatctaatcccagcttccacccaaagcggaactccagggcttccaactttgcaaagagcacccctagatcttgggaccctaactaaaccccttcctactccgagccgtgaggctttggggttgcagagatttaggaacagccccaatgcacctgcgcatccagagtcctagccccagggcaccttgggcagtttaggaaccccaccctggcctgccttgtcttcctaaatcccagtccaaggcttccggttctcaggcagcgcgaagccttagacatctcagtcgcaggcactgcccttagccacctaaactcacacgcagtcc

SEQ ID NO: 27519 - DNA, 1202 bp, Mus musculus
gttttctgtgatccggtccacttgaggggttctggtggttcattaaaaaaaaaaaaagtattatgaaagtagggttctcccccccaccccccgccatgtatgaaacagtgaattgaaaatgcaaagatgtctttgcaagcagctaagtcctctaaagaaaacaaatcttccgattaaatgtcagtgcgggggttgtgaggattaaccatactcgccaggcatcttaaataagcatgtgcaaaatagatcctgttcctcgggtaaagagagcaggcggtttattctgctttcagcttctaggttcaaaagacagcgggtgagacccatcagctggaaattgaaatctattttgagcttcacttaggaaagtaggcaccctcaggctgttgtttggtgttcttgactgacaaaaccttttttggggggttgccttggtttccagattctttgacagggttctttttacttgggcctcggtgtgctcgtcagcttttttggggggcagatatttgtagctagtgtaatctgtgtcagtcgagcgatcaattgtaacatttgtattgcacgtctagtctatgaattggctggacagattccactaaggagtcaggtctgtgggcagattttctgtatcagattaaatgcaaggggatcccagtgtaacaacagcacgtgaagattgttctgtaagccactctgatgtgtggaggttgttggctaaacagaccgtcccaagtggagaccgttgaatctttagtactgagacagacttatttggtaacaaattggcatcattaataagttatggtagaatgtggttttttacgcttttaggttagagtggcctgccccgacatctaagccttgttaaagctggcgcagagtgggctggctttgaaatctgttttcttcattcttctccaatttctcctccacacttaagccccacacgttagtaaattgctagtaatagtaatagtaagccccacaagttaagtacgatgccagggtccgcacagcctgttcacaagtgcttgtgcccttggttccccagtgtgaaggttttatgttctctctctctctctcttctttttgttttttagagataaggtttctctgtgtagccctggcagtcctggaacttgctctgtagaccatctggctggctttgaactcagagatcaggctgtttttgtttctgg

SEQ ID NO: 27520 - DNA, 1153 bp, Mus musculus
acttccaccctgtgccgggaagcatgctgggatagagtcaaaagctgtatacttacggtattagcatcagcctttcggtcagtcgcaggttatgttgagggcctgccctggcctgggtctgagattagaaatgagggcctctctcttaatggacacctgactgctttcaggaagccatcctgctctgccctgtggcagacagttttaaacaaataatgcattcttccatggagcaagaagaagtcattcactgcatggaactaaagcagatgtgttaaagccagtgctgctgtttgacttagcaaagtattctgtgaaaatctggaggcatttctgtgtggctggactggatgttatccctgtttacttccaaaagaaatagagatctcagtcaaggcaggtcagctgctttgtcatccacgttggtatttctgactaattgcatgtgagagacacttgaatcagcttccctaaatgcaaaaatatcattctgcttatttcttgttcatttgttctgttttgagacaaggtctcattatgtagaccaggctgtcctcaaactcacagcaattcacctgcctctgctcctgactgctgagatgaaagctatgcagcctggtgccagggatcattttgattctttgaggtgggatctagctgtatagctcaggctgacctcagcctctgagtactggcatcacagatgtccatggccaccatgactggcactcggaccgtttgtgtcctctcaccatggctttaatgctagctttgtgatcagttcactttctcagttcaggtttttgtggagtcatgcagctggaggctctgaaggcctgccatgcatacctcgttctcatgcagattctgacgccctccttctcccatctcaattggaatcccctgttggctagcttcaggtcagattctcatgtcttggggagtatgctggaaggcggcttgacgctgctgtctttctcatgtcggcagaaggaagcgtacagtcaggctgtgctgcccttccaccgtgaactgcctctcaggctctggggctacacagtccagagaaggggttgtttctctgcttctcatgggcacttggtgggactttctattgtctcagtacctgtagtttactatattttactttagc

SEQ ID NO: 27521 - DNA, 1223 bp, Mus musculus
acaagcagggtgctctgtgctcggtggggagggttcatttctccaggtttcctccatagagatggtctccttttccatctactcagggtaggtaaccaacctgtctcttcctctctcctcagcatgagtccagacactgaagttaggagacggatggtgggtggaggtcttcaaagtgctcaggcgtctgtccccaccgaggaagagctgtcctccactgaggaggaacacaaggcacattggccaagtcactggaagcccttcctggtcaatgtgtgcatggccacgctcctggccaccggcgcgtacttgtgctaccgggtgtgttttcactgacagactgggaggcactgccactgcccagcttaggatgcggtctgcggcgtctgacctggtgtagagggaacaacaactcgcaagcctgctctggaactggaagggccagccccaggagggtattagtgcactgggctttgaaggagcccctggtcccacgaacagagtctaatctcagggccttaacctgttcaggagaagtagaggaaatgccaaatactcttcttgctctcacctcactcctcccctttctctgattcatttgtttttggaaaaaaaaaaaaaaagaattacaacacattgttgtttttaacatttataaaggcaggtttttgttatttctggagaaaaaaaaaagatgctaggcactggtgagcttctctcgtgccctttggcatgtgatcagattcatgatttctattgatttccagtggaaggatcccgctgggcaggactgtaaagttcctgctggcgtgggcagcccccactgtgcacccggagcttgcaggtgccctggagccccatcctgttgtgaggagggcagccacatgggctgcctctgaacagcaagcccggctctgcttcgctcaggtgtcccccccgcggttccatccttctcggtctcctccctctttgtgagtgccatcttgcaaatggcccagcccttgccaccctatccctgtaaatccctgagggccttgcctcggggtcagaggtggctgccagcctaagtgctggggtttccatttcatttggaaagtcattactactctgtgtggaagccactctactgaggtgcaagcaagactggtgaaggagaaaggagccctggtgtcatggaagcccctcggcaggacctgtacccccctctgaaacactgttccagt

SEQ ID NO: 27522 - DNA, 1140 bp, Mus musculus
gctgcccagcagcagagcctgcatgccagcctctgcgctgcaggccacaatggccatggcggcccaaagagtgagctgcgatggaggcttatcacatggagctgccttttcaggctatgcatctcccttcctgctttaccctctgcttccttcccgagtagcaagcccaccatcatgaggagtgcaagggaggggcaggcattagagcggggtgcggctttcgaggtgaggccacctccgaggctgccctcctcttatttattcactttgcccggaggtggcccccgcgtgagcatgccctgaaactgaccgtgtctgcctgcacccatgaccgtcaggtcagtcctggggttgaggcatgagtgcaggactgacaggagccacagtatggccagtgctggggccaggagcaggagcaggagggtgtgaagagcagccttcaggagcataggacagtggtaatgcgcagagcccctgtggctgctcctgcgacgtgcagggtggaggctgggctttctgcccacgaccttctagatcccattcccggcctctgctttccctgtgagttagaagatacacagttctgtgctggtggcaccttgtgcttgacatgggaaacttagaagcctgctcactgacaggcacctcccgtgctctgaccggaagtggccgtcgctgagtaaccaccgccactcagtgagagcagtgctgtccagtcaggtgccacctgactcctggcaggacacttcaggcttccgtcctgccactccacgccacgccacgccatgccccgctggatctcagacattccacactcacacctcattccctggacacttaggcaagcagggttcttccacctcttggatcagcccctccattccaagttcatgctgtcctggagcaggccaggactggaagcaaggcagcttgtgagaagcaacctcctgggaacagtatggatgacagccttagagtcggcctgctgtcattgctggccccagggccccttacccagaagtgtgcagctctccggcctgggagagacggatgacggtgctcatgactcttctgggaggggaagaaccgagccttcacattgggtggctttttaaaataagcgaaggcagctggaactcc

SEQ ID NO: 27523 - DNA, 1697 bp, Mus musculus
gtatgtgtggtgtatgtgtgtgtgtgtgtgtgtgtttgtgggtaggtgatagcatagttagttgactcccacactcttcagtgtaccagacagtgtggatcatgggataaaaatgcccccaggttaagagacttacacacgatatagatgtgcactttttattcaaaagacggagttttcttcctggggattctagggtgctgcccacatttggggaaacccgtgtcaagtacaccactcgcagggctggtgattatttgagtctatttattctcttctgtgcgtccatttgggatgaggggaccgcagttgtcttcccttacctggctccctcctgttgcatgcacagtcagcgagacccacgtgtgtggctcagacttccctgaggcccaaggctctgagggggacagttatttatttcttaaccttgtggtggccgagtgtgggtgcctcataggtgtgtactgactccgagttgaaggactttttcctcgtagtaagagccggcagaaatgaagtcttgatccaatgaagggcactgactgagcgagttatctgcaggcgcctggcggaggctgggtgcagtgagcctgtgactgttgaattcactgagtttctcctctcacacggcacccaccgcttgctagcagtgctccccctcgctccccctctgacactgcgctccctgcagtggaaggcagccataggcacagaaggctcagttgcatatgtaacttaggggtgcatgggctcagcattgtaagtaaagatatttcacatactacctctctcttctctctttctctctctttttttaacagagttttaacatagaacctttctcttgggggaagaaatacttcagggcttgacttttgtacaaattttaactgaaaaacagatttctcttctgtctgaaaacggagatcagagctgctgacgctgattttaatttcaaggacaatagtgtttgttagtgatgaggtcgtaccaatgaagtcaatgtcagtagaccttctgtgaggccagtgagtcttggctgtggaggtcccgtcccgtcccgtcccgtcccgtcggctcagttcttgagacacctcggaacaggagcgtaagcgtcggcagcttagcgtgcagttctgttgtcccgaacgtcgagcctcactgtgaattctgttctgtcctaagtccgccatgtcaaccagatgctgtgctgttgtgaaccatgaattttctaattaaattttacatgctataacatacatgctataacatgatttttacatgaatgatactttgtttaaactattaaatgtcagtattttactacaattttattataaaatgtacattatcactaaatgaactttgattttaagaatcaagttagctttagttacatattattttttacaaataaaaacggacttgtataaaggctactttcttgtttgaaattacatgaagagaggatgtaaggatgtttgccaagcatccttagttactgcatagggagtgaaactgagtcaccactgattccttgacccttttccagggctatgctgagccccaggcctcggtccccacatcccccacctgtccaggctgaaccccagctcggggcactcggtctctcggagctggaatgacagacgcaggccatgtggccattccctagttgttttgttttggtttttagt

SEQ ID NO: 27524 - DNA, 2067 bp, Mus musculus
cctaaaattcccagtgataatttagaggagcctgtaccgaaggttattccggaaggtgctttggaatctgagaagctagaccaaaaagaggaggaggaggaggaggaggaggaggatggttcaaaatatgaaactatccatttgactgaggaaccagccaaattaatgcatgatgcctctgatagtgaggtagaccaagatgatgtagttgagtggaaagatggtgcttcaccatctgagagtgggcctggttcccaacaaatctcagactttgaggataatacatgtgaaatgaaaccaggaacctggtctgatgagtcttcccagagtgaagatgcaaggagcagtaagccagctgccaaaaaaaaggctacagtgcaagatgacacagagcagttaaaatggaagaatagttcctatggaaaagttgaagggttttggtccaaggaccagtcacagtgggaaaatgcatctgagaatgcagagcgcttaccaaacccacagattgagtggcagaatagcacaattgacagtgaggacggggagcagtttgacagcatgactgacggagttgctgatcccatgcatggcagcttaactggagtgaagctgagcagccagcaagcctgaggccctggcgtgccatagcatatgcatatgggccgtgttgcatcctggacttctgctctccttccagtctgactgcaaagctgtcttctaactggcactaccttgcaaggactggtcagtcagcaggctgtggggatgtgtgaccactgtagtctcagtggttatttccaagtctatgatagatgactggttgatctttgttcagactcttctctggtagactcggtgatgaagtgtgaaaaaccagtaagctggtagctcatgaatgcacacagggagaagtagttccttacctacctgccttctcagcatttcttcccctcagatgtttggttggatgtcctgggaaagccttatcctgattcacatagtagtgcagggcgggcatacacactaccagtcaaatgtgtctagtagacttgggaacatggaccgttttttcatgtatcttctgaatagttgaaatgtatatttgtacagtcttttagacctaaagtgatgcttatgacactgttactgtgtgcccgtcatagattggtttttagtgttgcccttgctgtgtgataaatgctatatctagtttacctagcagaagcttgaccctgcgatagtatggacctttggacagacttagtttttgcacataaccttgtacaatcttgcaaaagaggccagcaacataagatatatatctggactctcctgtattatagaatttttttcttgttctgagtatccttgacattacaattgtcaaaaatggtatttcagatctctttctgagaccttttaagctaaaataacatgcaagaattgattttacagctactaattttgacaccttttagacctgtaagagtgttgtatcagagcaacaagcacagttgagtgctgcgtttgggatatttagtttcctctttagttgagcaccactgggtgtattcatttataccatctaatatatgacacactgttgtagtctgtatgattttgtggtctttatttctctttgtattcattttaagcatctaaataaattgctgtattgtgcttaatgtaaatatttgcttttattacacacgacagtcctgtgtctattacatcttttgctgtttgatgccacagcaccctgagaagagatggaagacacactcacaaagaatactgtgggaaatcacaatctatcatttgcttaaagcatgctttctctccaggcacctgctacaattttgtgtatatgtttcctttttgctgcaaaagtaaacatccttgaggttttcaattccccttttgataaggagcattgcctctgtatgtagacatggtgaaggatggaactatgttggcccctggtggtctttcttccctgtgtactgtttattccctcctatggcaacacttgtaccaaacaggcattaactattttgccctgaagag

SEQ ID NO: 27525 - DNA, 1170 bp, Mus musculus
aggactatcggacaaaacctttttgctgcagtgcttgtccgttttcctcaaaattcttctctgcctacaaaagtcatttccggaatgtccatagtgaagactttgaaaataggattctccttaactgcccttactgtaccttcaatgcagataaaaagactttggaaacacacattaaaatatttcatgctccaaactccagcgcaccaagtagcagcctcagcactttcaaagataaaaacaaaaacgatggccttaaacctaagcaggctgacaatgtagagcaagccgtgtattactgcaagaagtgcacttaccgagaccctctctacgagatcgtcaggaagcacatctacagggaacattttcaacacgtggcagcaccctacatagcaaaagcaggagaaaaatcactcaatggtgcagtctccctgggcacaaatgcccgagaggagtgtaacatccactgcaagcgatgccttttcatgcccaagtcctatgaagctttggtacagcatgtcattgaggaccatgaacggataggctatcaggtcactgccatgatcggacacacaaatgttgtagttccccgagccaagcccttgatgctgatagctcccaaacctcaagacaaaaagggcatgggactcccaccacgaatcagctcccttgcttctggaaatgtccggtcgttgccatcacagcagatggtaaaccgattgtcaataccaaagcccaacttaaattcaacgggagtcaacatgatgtccaatgttcacctgcagcaaaacaactatggagtcaaatctgtgggccagagctatggtgttggccagtcagtgaggctgggactaggtggcaatgctccagtttccatccctcaacagtctcagtccgtgaaacagttacttccaagtgggaatgggaggtcttttgggctaggtgctgagcagaggcccccagcagcagccaggtactccctgcagactgccaacacctctctacccccaggccaagtgaagtctccctctgtgtctcagtcacaggcatctagagtattaggtcagtccagttctaaacctccaccagccgccacaggccctcctccaagcaaccactgtgccactcagaagtggaaaatctgtacaatctgtaacgagcttttccctg

SEQ ID NO: 27526 - DNA, 1126 bp, Mus musculus
aggtgtcactcactgtgcagggcttctgtcattgagagtataggtgcccttagctcagctcatgatcctctcaagcactgggattctaaatgtgttaccacccagccccgcctgacccttaattaagtactttaacaggtagcggcctgaggaaaagcatggaggcctttgagtccttcttcatgtcatgtgtagtaattcagacatggactggtgttttattaaaaccttcttgcttggtttggtgtaaggcccagggagtatgaaggagaaatggtaatggttgctcttctggggagagaaagcactccccagaggtcttaactcataggagtttatctagcgaatgatgaggctgggaagtgctgagttttcagtgaatgttttgatgttgggagacccagccaaacgttggtacttcttaatgggttattctgagacctgtgacttaccggaacatgcccagattgaggcttgcagtcagtgaaggtgttggttacagtgagagtggaggtttgtcaggccccaggtgctggtgctttggagtcgattggtgtttttttgtggctttggtcttagagctatttttattctccagaattttgttggacttacattattataaaaaataaggttacattcaaagccttaaaaatgtcgcctcaatttttactaatcagttttcttaaataagcaaagtgccttgagttttaagaaacttggaaaattgatctacatttctactttgaatgcatttggcacagtcaggtgcctttttgattcccttaggcacaagtgcacgaatgttcacagggtttttgttttttttttttttaaaggatcccagaaagacaggattcactgtatgttctgatgccacaaacatgctttttcccatctatgtgtttattctgtggcctatgtgaggcctttgccctgatgtgtttccacccagggagccagtcccaccaccatttgggactttggtttgaggaggagaccgaaacagtcactgaatgacatgtggcttctgtgagtgtcatggccttgatcaggacatttcagatggcagaatcctcccctcagcactgaaagctgagtgatgctgtgaagctcggagtggctc

SEQ ID NO: 27527 - DNA, 1172 bp, Mus musculus
gctctgacttggctggatagtgactgcttagcaatcctagctcttgtcccttctttctgaactctgtgcggagctttgtggttgtctgctcactttcagaacagtgtgtggtgagaactttgcatatggtgctgcggcagctttacattttaagttgcaggtgtgagttctaagttagaattcttactcctgtgaaaggtgagctggggctgttctgattccagaagtgccccaactcatgaaaaacagcaggcgcaaagcacaaatgaaatgcctctggttgagccagcaagtgaatccctagtgctgtagaatctctgtgtgtggtagtgcctggctttcctgaaatctcagcaccaccgagaagtaggggtaggaggaaaggtaaggtaactgtttttctcagctgtatgggaagttgaaggttaacctgtttgggaaacatgccttttgttaaaccttgaccctgggagagggtgtagaaaaacagcttgataacattgcttaaataaattgttctgttattttaaactggtgtagaaaataatttctcattgctgtggaaagttattctggggtggttttgaaagagtagagtttttacataaacttagttacaatcttagatacaaccctaagattgagatacaaggatactttgttcttgtgattataaagggcacatctgcagtgcttaggcccactgggtattcgaattgcatacaccccagcttaccaggttgtccactctactatactgacaggaagttctctaagccatggagctcttcaaagcgcctttgcaattgtctagatacatgtttctcactcgtccttatctctgttttctttttaaagattacatcaccgagacatcatcttttcaagtaaaatatgagctcttaaattgatgggggttaacacgccagacctggcattgcatcgcagctttctctttgttccttggacatggggttagcaatagagtcttaaaagttacttgcgtaggtgtggtaagtgtacaaaagtcccagtagacaaatatttgaagtaccactgaatataaaaactagaatgtgctaatttgaactgctcagttacatgtacccaaattattgccagaaccactacagtgtgtctgtgtgagtacagatgctcattatgctgtgtac

SEQ ID NO: 27528 - DNA, 1225 bp, Mus musculus
tttctttataaatctgcattgttgcttctggtttatggtcatggagaaaataccagcccccacccaaaaggcactgcagccaagtcggttaaaggcactgagtgtgggagtcagtagggggcgcattccctgcactgggtaaggctgcagaggggggaagggccccagaactagaacaggatgtgctaaacagcgccttctacagaccatgggaaaatgggtccagcaagacttgcactgggtgagctgacagcaacatggcgaaggattaagtgaggctagagagattttatttaagaaagccacttctccgtttggaaagttgtctttttttactttttcaaacctgttcaccctcagactttgattgctgatcagtcaccttggtgcacatccttgggtcataggttccctttctcaagaattccttcaccttaaggtttgatgtgttgacatctctttcctaggctaggtggtaaagggggttgtttaaaacctgaaagtcacgggcttgggagatcaggtcaatccaaatctctccgactcttttgcgagtggaaagtcattcttgagaggttttatgggttggtgattttgacagccatgaaagatgggtgtcaggatttgcaaggctttgttggtaaacatcaggtccctattgagttcttcattgtcaaacttaatagagttcactgcaaaattgtgttgccttccactttcagcagtacactgtctgtagccaactgcctttgcaagtgttgacaccagtcttggttcggtgcgcacccacctttttagggtgtgtggatttctgtagattttactcctgttgttatttccataggtgtgagatgcacagtacgaaacctaggccccagcttttacatcgtgatgcacagggttgcactttttgtactgaactgataggtggcctagtggttattccctgtactgccattttgaggatctggactccgttccctgccttgctctttggactgcattgtcaattcacaccggtgggtatatcattttggagggtggggactgcagcatcaggaaagctagagacttcctcctgatcaccaccagaacatgaactttcaaaatttcagcctcgccacattcctcaaggaactcgttagagctggttgcagtaatgggttttgaacgtttaaaatatgtgtctcttttaagagaaaaatttaaagtcgatgatgttgtt

SEQ ID NO: 27529 - DNA, 1189 bp, Mus musculus
gggatgtctctgtcctcacctcatccagtcacagattaagatcacctcaactgggggctgaagagatgactcagtggttaagagcactgactgctcctccgaaggaggctcacaaccatccataatgagatctgatgccctcttctggtgcatctgaagacagctacagtgtacttagatataataataaataaatctttaaaaaaaaagagagatcacctcaagtatgaaatcttgggatagtcatttaaaacatctcatttttctgtaaaacaaagagattggatgaatagtggttttcagtctctcctaaggagagaacacacagcaactcctgcccttctcatacctgttgcctaccatgtgactgagattctccaaaggctggaggcagactcagctggagctgaaaacaaattattaacctccaaagacattttgaacttggtcattcactcacctatgaattaaaactaggaagtccaaacaggagcacattctaccttttagtcgtggcatttagttgtatttagttttgactggtgatagtagttactgtctgtattttgtaggcctcaggtctcattagtgtagcccacaactagaagtcagactcacagctggtgactcttaacacactttaatcaaaatactctaaagatgtatgtatgtatgcatgcatgtatgtatgtatgtataagagtatgctgtagctatacagatggttgtgagccttcatgtgattgttgggaattgaattttttaggacctctggtccctctggtccctctggtcaaccctgctcattcaggttgcccccgcttgctcagtccctacttgctccagcccaaagatttatttattattataagtaattacactgtagctgacttcagacgcaccagaagagggcgtcagatctcattacagatggttgtaagacaccatgttgttgctggaatttgaactcagaaactttgggaagagcagtcagtgctcttatctgctgagccacctccccagcccattgaaaattctccagttcaaggttaggttgaaccacataagaagtccacaccatccatccaattaaaaatccatcatcaccaggcaatctagtacatgcctattggcccccatattcaagaggataaagcaggggaattacttaaatataggcttttaggac

SEQ ID NO: 27530 - DNA, 1197 bp, Mus musculus
tctactccaggagccttgcagcacaatctttgagcagtggaagacccctggttgtgctgacaaaaaaaaaaaaaaaaaaaaaaaaaaaaaaagaaagaaagaaagaaagaaaatttaagtgggcagtcagttagctaagactattgaacctcccatcccccaacccctcaccccttctgttttttaagggccccgaatttgggggtttaatatgttttgttttctcgtcggatgtgataggatcacatgctagatgctttgaggacacggtaatcacagaagcagcttggtagccccacagtgacttaagtatatgaactaaaggacagagacggagagagctgaactctttaccacatgagcaagaagctgggggacttgggtggggcggtgatgtatcactgcgtaggtagacatttgtattaaaatggctaaatgatcgtcacaaggaaagatgcagaaagtagcatctaattggatgcctggtttgggttgtcatctcacatctttttaaaaattctctctccctcttctagttaatgaaatcatcaggaaggagttttcaggacctccctcccgaaatcagacctagaaacaaacataatctcgcgacgccttctactctggaccgcttctgtctcctcctgccgtctgtgactggaacactgcgcatgcgcacagtgcacgcagatggtgtcagagcctgggagcctgctgccgcgcaaacagcatcttagccgttgtccatggtgactggacacgaaaagcaactgcctgctgaccaaagcctcattctcaactcaccaggatgctgaacctgagacgccaggctgcgctggcaggagaactggagaaactgcgatagcccacagacatggcttcattttttttgaattttctctttccaaagccaaacagccttgccctgacaggaccacctgtcccaacttctcagccttaagttataacacacgtacgtgtctgccagcttctgggcctttgctgtgttttcctctgcttcaaagagccaaccaaggaggccgtgggctgagagccctctcggccagctattccctaacctgctgcctacaccagactggctggtggcatccagtcccggctgcctgttgggaaccctgcttctgaaggttcccctctccaccccctccacccagaggtcgggagaaccttctggat

SEQ ID NO: 27531 - DNA, 1231 bp, Mus musculus
tttttttttttttttttttaattttttttaattaggtagctctgttgttttgtattggggattgaacccatggtcccacgtggggataagctcagagtcctacgtgctgaacagcaggagggagacactcaccactgttaccataacatgtccagaccccttgtctctctgctcctctccatagcaatcccaggatccacctgctcagaagggccccacggtcaccaccaaggttcggaggaccatgagcagccgtgtccacgaggctgtgaaggccattgcactctgccacaacgtgacacccgtgtacgagtccaatggtgtgacggaccaggctgaggctgagaagcagtttgaggactcctgccgagtgtaccaggcatccagcccggatgaggtaaccctggctgggaaggaagggtcttagccacaccacttcctccatcactgctcagtgggaccctgactgtccacgttcgctctgtgcctggccttctcaattccctccctcctgcccacaagacttggcttctgatagcagcaacggtttttggttttgtggacagtgtctcatatagcatgaggttggagtggcttcaaggtaccagggctcggtggcccacacggctaggatatagcaccgtgaaaaccttttcttaagccataggtcaagggaaactgggatatctccctttaagccctgtcgctttgcccctggggaagactcttccttgtactctgtgtggtgctgtggggtagctcagcccaaaaaaccgtgcttgtccgtgaccactgatactcaaaacaagcgttttagggaaatgtgggtgctgggagctggggaccctgtgtaagtggagggggcggtggggctgggctctgctccactgttgtaactgacgtcatcattgcttctccagctccctgggttcagtcctttgcaccttgtctttcaggaacagaattgggaccctccggggtttgggctgtgggaaaggatggtatttttttcttggtagtttgtgactggggatcaggaccatgtgtgagcgtgtgatgacgttggagtttgagatactgatgctctgcacggtgtgcctgctctgccctctgtggaagcgtcgggtccaacctgccagcttcctttatgcagggtcgctgtgtctgttttagggccgtgggagggtgctctgaggcgatctcgtcatctgtcttgtttctccaagtttct

SEQ ID NO: 27532 - DNA, 1201 bp, Mus musculus
aggcctaccttggactggaaagaagaaaggaagaggaatgttccattttcccaagttggttccgagtttggttctgaactctgtggtccagagcacaagacagcggagacgagagggaaagagttggggagagaggcctctcatgtctgggtaagccagcccagcccagtgactctcctggttctgtccaccatctcatagaaggccagccaaggcattcctatctgttcgctccgcacagtcacccaaaagccaactgaaatttatagcatagcacgcagactaaaaatagccccccccccgcccccgtcctccccccatgactcacggattcatgcactccgtaaatatttactgtgtaccgacactgtggctggcaacttcagtgctggggacaccagaggcacactcctggcggtggcagcttgcatgcaccaagacacatcgtgtgtcctgggaaggcttgggtgaacttggagtcttaggtgtcagccagcgctctgccctaggtgtgtaaagcttgtctggggaattgtgtgtgctccgtgcagtctgcagagcttaaagaactccacatgcccctgccctgcggccaccctgccctcccggccccccatcctttctgtttgctttctcctcccccttcctttcctcccactctttctttctctccctccttccatagcccctgtttctaggccttagtgaggtctccagacccttctcagaccctgggtctcagcttgcagactgaacccatgctggcctggtgcttgaaggtcgctcattcctgtcccagcctgtgcatcacagctgtggtatcactgagactttccagcagtcgctaacccacgggctgagccttggggtcatagtcacgagtgtccctcctgagtcagtgggtatgagaatgagagggcctatgggaccaggaagaccttgtacagcccagaactacagcgagaaaccccggctctggggccccagtgggatgattgctttgaggcagggcctcatgtagcccaggctggcctcaccctgtccttacctcagaggacttagataacagctgtaggtcatccgatgagctgcccagtggggtttttaaatcacagcccttccatctgggaattagagtgatagttcctggtgcagcacctagtgattattgtcccaagtcttggtgctgggttgggatgca

SEQ ID NO: 27533 - DNA, 2235 bp, Mus musculus
gagaaaagctcgctgttcccgacggcatggccaaacaccagttccctcacttcctggaggaaaataagattgctgtcagctaaggaggaagaggagaggagtcttctgcagggagattctagaatctgctttattctttagttttttgtttttttttttttttcttaacccacctcctttttttattttcttcctcttcctgatatgcaagtgatgtggcttgtgaccatagccttgggcaatcctacaatcacgagagttgctatgctgctttccaaaaaaaagatgaaaaatggaggaaaagtgaaaaacaacaaaaacaaaccaaaaaaaaaaatgataaaaagccagactttttgtttttgtttttaaaccattttggaaagaagcgggttttgaaaaatagttctgttaatttgggacaaattatattctagaagctttgtgtgacctcatggctgtttccaaagactgtcatcaacctgtttcgaagtgaaacagttgggactcattggaccacagtggaagtgacaactccttaacccagtcctggggtgagggtgtggtgtccttctgtggtgactaatgcgggtaaatgtagggacctggttttatgcctcccgaccctgtcttcatcctctgtttttttttttttgtttttgattttgttttttttaaatgtactttaagagaaaaggagaagagaatgccagaaaactaagatggttcaattaatccacttccttcagccttatgcccttggataggacatcctccatacaccggccatggtccctcggaaagcccacaatttctcctgctgcttccttaaatatttcagagcccttagagtatgcctccaacccctgctaccccatctcccacaaaccaccttcccaggccccagggtggggacaggcaccagagtgggcacctcaggagattttctgaggttgtcttcagtgcccgctacattggaaaactgcctgtttcctagtggcaccaggagggttgcctcgactccacgtgcatgctatcctttctgtttatttcggttattccaagacccaaagaccttcacacccacccaccctccgccgcctgccgtcatgaaggttatagagttgagaccagcaagtcttggatgtgagggctttaatttatctacctcaattatctttatttttgtagccaaaagtcttctctattttgctatttttgcgaccacccaagtattgccaggtcttaaacctaagagttcttatactggtaagaaggccccgaagctcaagaagtcttcgtggttggttctgtgggttttgtttttgtttttaattacatttttgttcgtgtaataattctgaacagctgttgtaacagtgttccaatggtttagtgaggtaggagagatttctccagtctctgggtagaaaattctgcctgccgtgttgaatgcccttgccaaatgaagatggagactctcgcccagtgtttcctctgacttgttgcacctgattttaggatccaaaacttgttttgttgttacttctttctttttctctttctttttttcgccaagtcgtgcctttccttctgggattgtaagtgaaccccgtgatcaagtgttcaccggttcacctgtttacactgtgaagtgggtatcttacggagaacacaccagccttggttttctcacgccccgtgaatgaatgtgtacgccacagttttacctgctgatactgtaaggtctgaaaataaagtgaatgttttccctccatgaggcgggcttgtgtgtatgcttttctggtatggtctgctttcaaagcactcccccgatccaattttagagtctgacacacatatatgtggttaggtccattctggcccctaatgtagggggcatgtgtgagggttgcgtttatattaacacacacacacacacacacacgcttgcagaagactgcttgtggaggacacacacacacacacaggagcttgcagaagactgcttgtggaggccagacacacacggacacacacacacacacacaggagcttgcagaagactacttgtggaggccagacacacacggacacacacacacacacacacaggagcttgcagaatactgcttgtggaggacacacacacaaacacacacggacacacacacacttgcagaagactgcttgtggaggacacacacacacggacacacacgcttgcagaagact

SEQ ID NO: 27534 - DNA, 1194 bp, Mus musculus
ctgttcggtcctataggctatatataggagacttagtgtcccttatacaatcctcctgagtcaggacatgtgctgatggggaattgattactgctggtcacttgacatcccttctcagggcatcctgctcacctttttctctcctttcacaggtgctccagtgaactcccctgggaactgcgatgaagcctcagaggactccataccggtgaagcggccccggcgggaggacactcacatctgcaacaaatgctgtgccgagttctttagtctctctgaattcatggaacacaagaaaagttgcactaaaacccctcctgtcctcatcatgaatgacagcgaggggccagtgccttcagaggacttttccagagctgccctgagccaccagctgggcagcccaagcaataaagacagtctccaggagaacggcagcagctcgggggacttgaagaagctgggcacggactccatcctgtacttgaagacagaggctacccagccatccacaccccaggacataagctatttacccaaaggcaaagtagccaacaccaatgtgactctgcaggcgctccgcggcaccaaggtggccgtgaaccaacggggtgcagaggcacccatggcgcccatgcctgctgcccaaggcatcccttgggtcctggagcagatcctgtgcctgcagcagcagcaactccagcaaatccagcttacggaacagattcgcgtccaggtgaacatgtgggcagcgcacgcgctccactctggagtggcgggggccgacacgctgaaggccttaagcagccatgtgtctcagcaagtgtccgtgtcccagcaggtgtcggctgccgtggccctgctcagccagaaagcctcaaacccagctctgtcgctcgatgccttgaaacaagccaagctacctcatgccagcgtcccctccgcagccagcccgttgtcctcggggttaacgtccttcaccttgaagcctgacgggacacgggttctccccaacttcgtgtctcgccttcccagtgccctgctacctcagactccgggctctgtgctcctgcagagtcccttctccgctgtgacgctcgaccagtccaagaaaggaaaggggaaaccccagaacctctccgcctctgcctcggtgttagatgtcaaggccaaggacgaagtcgtcctcggtaagca

SEQ ID NO: 27535 - DNA, 1168 bp, Mus musculus
aattctcccatctactacacactaatctcttttttttttttttttaagttacttatattgtacatgcagatgcttgagtctgtttccaccatgtgagctggctggcaggaaaccaggcttggtgacgtgtgccctacccctgctgagccatctcaccggctcaacccagcagcagggcaaaggccccgccccggtgttacgctgccggatctgccctaggggagcaccccgggatttggggctccactctcccaggccggcagcgcatcctcctggcatctgcgaaggaatgagcgtctccaggagggcaagatgcaaaggcgcaaggcgaccacagagtccctggcatgcctgggatagggtggagggatcggtgtactcgggtcttagactccacgacctttcccggttcctcgggagagcaccgcctgggagtcgggctgggtgcaaggggccagcgccctctaggcagcggaagtggcgctggttgtacatccgtccccgcctcacagagttgggagaagactggctggtgcgggaaatatgcaggagaaaagtctttgcataatgtagagcgagccgtggggctccgggagcggcgccccaaggtctggggccatgaacgcgagcgtggaaggagacaccttttctggatcgatgcaaagtaagtactgaacagacgcagctggggcctggcccggacagagccagcaggccccgggatcggggtgacggcgcaccttgcatgcctgtccccgccagcccagtcggcgtgtcaggtcgggagccgcctggaactcttgcagtaccccaggggaggcaagaccaggggaggccacgcggcgaggagactgtcaccacctcccctgccccgccgggtggagtttggggcgcagaggagaggagaaagtggggtgatccaggccaactggtagggaaacttctgcttcagtggctcaggttggagcatccctgaggggctcgcggacaggtttgcagagccatcctggcactcagggtaggggatgatatgggtgtgaaagacctggctgggggtgacttgcagtgagtttgaggttctgctattttcctgacatcctataagctattgctatctccatgtgcctttgttccccaaagtacgggccacggactgaaccgtggaccg

SEQ ID NO: 27536 - DNA, 1152 bp, Mus musculus
cgactatattagctcattagtcaatttttctttttgttttttgttttttgatttttttcgagacagggtttctctgtgtagccctggctgtcctggaactcactccgtagaccaggatggcctcgaactcagaaacccgcctgcctttgcctcccgagtgctgggattaaaggcgtgcgccaccacgcccggctattagtcaatttgttaacttgttaagactgtcagatttattatcaaagacgcacagatttcccttgatcgcggcttcctgatgaagggcacacaagttcagatgcacgctctcacagatgtagccttctcttactcccccaaactcagctcccagtgactcaatgctccagatttcctttccttgctatgtcactgtcctaacaccaatcagtatcgttctcataaatgaccctacgctaatacagcattccactaaccgggccaactgtgcagtcacaagttcacattctaagtttcctttggttgtctttttaactttagacttaaagtgtttctcatgctaaatttatatgatcaactatcgtgttcacaaggtcaaggtttggagtttccgctatttgtcttttaaatgtaaacttaaaattgtttctcattatgatacatatatatatatatatttgtctcctagacagaagaaaaaaaggccttcatgttccttctgctccacaaaaagtttttgtctcccctcagctcacctttaagactgttcatgctgctaacaaataagctccagaaaatccacccagatctacctctcgtgcaccaagcagactccatctggataaggacacctgccaatcattagcctgagccccacttgctccctgttccagagggtgggagtcctttcctgtttctgggattgggactcccctcaccccaaccgccaagtcctaagggtttcaaatgtacacctaaggaaaaaagatgtccccaaacgtacttaactttattctctacctctgatatgtgtgcttcagcatcttgtcaagtccaggcatctactcaaagtctacatccaggacagctccagaggagcaacccatagacacagccagatgtgcctggcttactataaaaggggctgttttttcctctctcccttactctctgccc

SEQ ID NO: 27537 - DNA, 1192 bp, Mus musculus
gttgtcccagtggtccttcactgcatcatcagtcacactggggagaacccttgggaatcttgttagtttcaggaacttcctaagacttgcgagctggttactttaggagttttaagagcctcttttctctatcctccagcaaatgtttcaatttagaggaaactgctacattggtaaatccaacctgggtagtgggttaacttggtaactgaggatcattaaatttgtgtgatttctagtcttccaagaaggattctaggaaatgtagggtaaaaggtcagagctcacttctgggtttgaaaaacccatgaaagctcaccaatccttcagcttgaaaacacatcaattcctgagcttgaaatcccaccaacccctaggctttccccaagttcagaacttgacatcccaccaatccccagcctggaattctctaccatggacgactccacccgaagaaaccctaaataaacctgcctcctgcttagtccctgctgcagcatactgacaccctgccctgggggtgttcactgtcttttcccacaaacctgcttgctttgaaaacatctcccagcaaatgacgagacaaatggtgtcctaaggcgagctgtgttgtggagtcttgtgagcgccggactggccagcagtaacgacgctgcaacaggatccttctgcacacgtttattgggagagcttgattgcagaggcgaagagaccctgagcccagaactggtgctgcttatataggcctaggagaggcgtgtctcacacctggattggttatgcactaagcctcatttgcatgttcctcatctgattggctactctctctctgtacctcacagagcctcattatcatacctcatttgcatgtctcacatctgattggttatacttccaaagcctcatcatgcccgggccaggcagtgtctttgcaaaaaactttactgcatatgtacacattggttgtttgtccaaacttatgcgtggtggccagcagtagtcagtgccactctgcaacggcacatgtggcttcccacagtggagaactgtccacccgatgtcacaatgatgctgtgtagaattgtccaccaatgtcacaatgatgctgtggagaaatgtccacccggtgtcacaatgatgcattgcactgccaggcaggcagggactctctgctccaccacttgaagactga

SEQ ID NO: 27538 - DNA, 1148 bp, Mus musculus
gggggattttttttgtctctctctgtgtacacacatatgtatagatttacaagtatatatgttgtgctcattttttttttgagacagaatctctcactaggatgatgctcaccaaatagggcaggctggccagccagagagccccagggatccccctatggctgcccctgagcactgggattacaaacacatctgactcattacagtgtgtgtgtttgggaattaactcaggttcttgtgcttctacagctaggccatctccccacttcctgcaatgaaggcttctgaagttatgagagcatcgaaggagaaagagtcacaattgattggtaatgtctgccctggctatagaagttatgcatgacagcacacaggatatacgttcataatggctgatttaaatgcatgcttgttcagagatggagggagtgagggatagagagagggagtagagagagctagagagacaagagaggaagaagaggagggaaaaagaaagaaaaggagacaggaagcaggaaaggaagagaagcatgattgattagtaatgtctgccatgggtgtaggagtgtggggacagcacacattatatactgatagtttctgatgtaggtgtagagcacagctctgacataatttcctcgaattgtctttggtaggtgaccgagtttctctctttatacttcttgctcatcagcagatgccctttagttgtttagacctaggctgtacttaaaccacattaataaagtaatgtcacaatgggtttctcagacacgaaggtggtagatgggcagtggcacataccattgtgtaggtgtggattctagtggcactctgttgtgtgacaaagcactctaaccaaaaacaattaagggaagaaaggacttacttgcttatacctccaggccacagtccatcaccgaggaagtcaggccaggaactcaaggcaggaacttgaaaacagaactagagagaatgagttgctctcttgctgctagtccatgcagtgttacctctgactgtgtcactaatagctgagaggaggtacagcaggaaacagagaatgtggcttgctggctctcatgcaggctcaagatcaggtagctttcttgtatggcccaggaccatgtgcctagggaatggtt

SEQ ID NO: 27539 - DNA, 1570 bp, Mus musculus
tattgagctctctaacgtgggtgcggggatcaaaacttgggttctctggtagagctggtgtggtagctgcggagcggtctctacagcttatttcttgcaatcctttaatgattgtgtgttttctaatcactttcaatgctttcccattaggtccctggatgcaagtacacacttccacggaatcatacattggttcatcttctgagagcgcacaatagctactgaacaagctgtgactgaactgtacatagacctgagaggagcagagaaggaacactacattctctaacgttctgttaacctttgtaccaaatagcaataaaaacgagtgggagccgttgggcggtgcgccagagggactgaaatctattttgtccctaaatatttttttaaagaattgaccaaataagtttttttttttttttgcatacttgagcgctgctgaaaagaaatcatttggggtagggtggggtggggtgggcaggggatgttgtaaagcttgcacctcaggtaactgtaaataccgacgtggtaaacttgcttgagtactgtgtgtctccctcatggagtgcgaggatttgagcattttctgcttctttatgctttttcatttaaaacatgttttaaagcatattctcactgagtctattgtttgtcttcacattgctgatggaacgaaatgttgacactcagtgatgtgctgtgcatcttgaggtcagcaggcactaacctggcaccttttactccagctggtagagctagagctaatgtgtacaggtgtcctggagccccagcttgctgcctggggtcttcggggggaggggggcttttgagtgggtgttgcctacagagaagctgcctctgtagagtggccgatgtcacagagagccaggctccatggggagccatctaagttcttttcttttggaagattgggtgtctcggagagttgccatatctccttgtgtgaattgcgtgcttggaagcaatttttaaagggagtggaaagcttagggaaatcgtttgtatttggagtcttgctgtgtctggtattggaggtgtggacaccttgagtctgggtgagttgctgctggctgagccctcctggcaggcagggagagaagacgcctgggcctctccattgtttgtttcccagggtgatttcctcagtgcacaggcagctcgagatggagggaggacagccaccaactagctcactcagcattttaaacttgagttcctttgatatctgagtttattcaacagttcttgggtttagcaaacccaaaatattttattaagaaactgtttcaaagataaatttgcactgctcctttttcttgccccacccctcctgatgggacaaaagggtgaagagctcaaagaaccccgactcccccctcccctcccacctcattgtgtaccatgaggggtccttgggaaatgtcttacctcttgtgttgaatggagacctgggttgagatgtgtctgctcttgtaggaagatcttttgtatcaggaacatgtacactaggccctgttcccgtccacaagctgagccatatgtacat

SEQ ID NO: 27540 - DNA, 1173 bp, Mus musculus
acaggtcatgggcaagttgggttggtgtgtgtgtgtgtgtgtgtgtgtgcgcgcgcgcgcgtgtgtgtttttactaagttcaccatcttttttttacctcagaaatgaagaaaattaaaaacaaaaaatcaagttgagaacaatcactgcacttctgtagacactgaaactctagaaggacacccccccccccagccccaagtctgaaaagacgtcactctataacagagtgagatagtgcaggggttcctccaccttgtattcttgacaaggccattttaggtttaactagattttcgtcttgatagagattcccgtggaaaattagccagctctgttctagaaagcagaggtcgggttgccttgggttctagctcctgttaaatcacctgctgaaaacctcagagtgaggttctgcctgccggaggccgcagtggtgcagagacccccgggtgaatccacgtcccatgtctgaccaggaggcaaaaccttcaactgaggacttaggcgataagaaggaaggagaatacattaaactcaaagttattggacaggacagcagtgagatacatttcaaagtgaaaatgacaacacatctcaagaaactcaaagaatcatactgtcaaagacagggagttccaatgaattcactcaggtttctctttgaaggtcagagaattgctgataatcatactccgaaagaactgggaatggagaaagaagatgtgattgaagtttatcaggaacaaacggggggtcactcgacggtttagataattctttttattttttatttttcctttccctcaatccttttttatttttaaaaatagttcttttgtaatgtggtgttcaaaatgaaaattgaatactggcactccatctcttagaacatatgaattctagtgttcaatattcattattggttgtttttgttgtgctgatttttggtgatcagacctcagctcccttaatactgccctttttcctttaagagatttcatgtgtgcacagagaggccaccctttttaggactgtgcattttcaggtttgtgatgataaaaagatcgaccaatgggagctttcctatgacctttcaattggctctgaagttccagcatgtggttgcttcactcctggactgtgattttcagtgggagatgggaatttttc

SEQ ID NO: 27541 - DNA, 1224 bp, Mus musculus
gggtgaacttgaagcagcttcaccaatgagaagcctccgcactgtggataatggcttcccagagatgcatagacatatttcctaactttccgttaactttcagtactcagtatactctgatacctcccaagaccacaagaccatgagcaactaaggaagaattacagaaaactggcccaaaaggtaatggatagaatacctggaatcttaggtgagggtccagtgaccctctctaacccatcctcttaaaggtcgagatctactcttcaaggtctcttgcaagtacagccttcttcttcgggaaaacaccaaatggcagatgaagccgatgtagcaggagggcccagaggacccgggggcccaggattaggaggccgcttccgcggaggattcggcagcggtcttaggtcgtagccgaggccgcggggctcgtggaggtaaagctgaacacaaggagtggatccccgtcaccaaactgggccgcctggttaaggacatgaagagcaagtccttagaggagatctacctgttctccctgcccattaaggagtctgagatcattgacttcttcctgggtgcgtccctaaaggatgaggttctgaaaatcatgccagtgtagaagcagactcgggctggccagcggaccaggttcaaagcattcgttgctgttggggactacaatggtctcattggtcttggtgttaagtgctccaaggaggttgccactgccatccgaggagccatcatcttggccaagctttccattgtccctgtgcagagaggctactgggggaacaagattggcaagccccacactgttccatgcaaggtgacaggccactgtggctctgtgctggtgcttctcatccctgcccccagaggcactggcagtctctgctcctgtgcccaagaagctcctaatgatggccggtatagaagactgctacacttcagccagaggctgcactgccacccagggcaactttgccaaggccacctttgtcatttctaagacttacagctacctgaccccagacctctggaaagagactgtcctcaccaggaattcactgatcatcttgtgaaaagtcacaccagagtcccagaatctctgttcagaggacccaggctccagctatggctaccacataaggggtttgtacaaggaaaagaaaggaagaaagagagagagagagagagagagagagagagagagagagagag

SEQ ID NO: 27542 - DNA, 1262 bp, Mus musculus
ggtggtacaggccagtaaagccagctgctctggaggcggaggcaggaggatctcaaattcaagcctgcttaagctacttatagttcagggtccgcttaacaatttataagactgtgtcttgttcaccagtgagagagggctgaggtcattactcacctggcacagacggcctaaatgcaatccccagcacaaaaagagactgcctacaaattgttcctctagatcatcggggcagaggtgctgtctataaagcccccccgggggctaacctttgctcagattcttaaaaagcagtggttaatttgctggcttttcaaaccctgcccgccctggtttgcctgcggtttaatatgcaatattcagcagacagctgctggcgctacaattagtgaggcgaaaataaccacgatccacattaccatcaagcccttgacattcgcagcacttgctgtggggaaagcaggccaagaacttgtcatgtgccccatccacttcgaggctggatgggatggggctccaagtctgagatttcattgatactaggcaatatggtttgtaaaatacagaaacactgcccaattgtgatgttgtcaatgggctcctgatgcccatattctggggaaccttagatactgccatagaagctaaaagcaccctagctttcttagacaatccacttagctatctgaaacttgaggcattccagacctgacatgtttacaatgcaccactgaacttttttaaattgaattaatcagatgtatatttgtaccactttggggggtggggggaggttgagaggaaaatattgctcgttctaactgtaaagaaaccaagaaataatacaagctggggaaaagagatgtcttaattagggtcctattgctgtgatgaaacaaaatgaccaaactcacggttccatacaacacttcatcaaacacagggagggcaggcacctggaggcaggagctgacagcagaggccagagaggagagccacttactggcttgttcagctgctttcttacagaacatagcctgccagctcatgggtgccagtggttctcaacttgtgagttgcaactcctttgtcaaacctctagctcaactcaaaacagtagcaaaattaattgtgaagtagcaatgaaaataaccttctggttgggggccaccatgaggaactgtactaaagggtggcagcatgaggaaggttgggtaccgctggtgtagagggaggttggaatagaaagtcaagcagagact

SEQ ID NO: 27543 - DNA, 1521 bp, Mus musculus
gagcgctcatcacatcaccacatggtatgtctgtgtgtcaaccccagtctccgtttggtttaggagaaccacaatgtgtggcaccctggactacctgcccccagagatgattgaaggccggatgcatgacgagaaggtggacctctggagcctcggcgttctctgctatgagttcctagtggggatgcctcctttcgaggcacacacgtaccaggagacttacagaaggatatctcgggtgagctgctgctgtcaggcttctgccgagggctggtgttttgtttattcatgttcacctctgacccatgcttgtgttggtttatcatttattctgcaggttgaattcactttccctgactttgtgacagagggagccagggacctcatttcaagactgttaaaacacaacgcaagccaaaggctaacactagcggaagtccttgagcacccttggatcaaagctaattcttccaaacctccaactggccacactagcaaagagccaaccagcaaatcatcttagggaatcctgaaccacggccaccgtgcaactgtgagaaacaccctattgaagccaccctcctggaccctcatggctgccctcagggtgccttgctgagcaactagtccttggccatgcatccaggaaaccccaagaaccatgctgcttttcctgatttagtaatctggagggaaggttccactgcagctgtcccctaccctcaccctgggcctgtgccccaaggtgtccttgtgggggggggggtctcactgtgggaaacttaccagagatcacctgtgtcgtagccttcaagtgccagagtgtgtgtataacttattgggtcaccaggcctagggaaactgttggaatgggtatgtaatcttttaaatgtcaaaataaagatttgcatagactttgacttttaagtgacacccattcagggtcttgtttccagtcgtctgaagcccgtgcgggatttggatcctcagccactgctacggagcctgtgccttgtcttgagacctgactcgggggtttctttttctgcatgttaaaggctattttttatgttggagttctgtcatgtatgcaaacttgttaaatatatatgtataccatctacctggagtacgtgggtaatcatttgagtatctcttcactgttggctagccatgagcgactggtgtttttctggcctgctggatagtggccagtgccatctgtccatcaaccagagggggaacttggaattagagaaacaggctttcatggccaactggaccaccatcaggaacttgagaacatgcctgagtggaagtctatcctcttgggacaagaggcctctagtcatccgtcctgtgctaaggctttgttgaagtagcaatattgctagtactgtccacccaagctgcagttaagtgagatgcaatccagggaggcaaactgagcacgggacactgcctcctctagctccggctagtttgtgactatcctacatgcagaggagtgccacattccca

SEQ ID NO: 27544 - DNA, 1137 bp, Mus musculus
ctcggtctcccgctctcttctagaaaaatggaggagcgaatcgtgcccgatcgatcgctcggagtgcacacccagtgcgcacgtgcaaagggcatgcagccgagcgccgagcatccctgctccctcgcaagtctgcccttctcgccatcttactcactggcacgttcgagacgctcattcaccgtctccgaactaatcacctccgcgactgccttgaatccaaagggctgtgtgtgactggcgaacgcctgatcctggggagcacggcgggcgatagaacggccgcagatcggacgggccgttggtgcaccacttccgggctccgacagctcagtgcgcctgcgcccagctacggcagggaacgagcttcccatagtcgcgtttacggtgagccaatcacagaacggcattgctccggctctagccaatcagctcttggagtagagggtttgactcctattttaaaaggagaacctttgaattgtaacggctgagctaccgggatcgcttggaggcttcggtcgggagcaggttcctgcctgtgagttggaaagggacatggctgttgagggcgagcctggatgctgcaaacggatagggaaggctgtgtggcgtcggggtaatggactgtctcagtgggtttgcattctgtttaagaaaggtccagacgtttaagatttcccggcttggttttaggttcttgtgggaatggggatccagaccatcagctaaccgagtaatttgcaaaccgatggtggatgcgggaactgcggcttattggggactgcttcgggtggagaatcagagtctaagtcgactcgacgagtctgtggatgaacgggagttccctcgtagagtgcccaggactggtgctgctcttcccgcagccttctgagcagtttatgtcgggactacttgagggtctgtttcaaagcgcagacccgctaaagctcagtttgtagaatattccagaagttttaggattgaacactgccttcgtggtggccgccgctgtttattccaacagtaaggtggtggaggcaggatcaagtcaaaggtcatcctcagctacacagtaggtccgaaaaaccagcctaaattacatccacatacgtccctacctcaacacctccatcc

SEQ ID NO: 27545 - DNA, 1278 bp, Mus musculus
gtggtatcttccaaatgtaaggtggcttttcagataagcactccctcaatggcttggccatgataccgatttgaacctcttgctttgtgtgatttgaagggttttctgggtcaaaagactagtaaattgttttctaggtcacctcaaggtgcttacatgaggaagatagctgcttattattattatttttttttttggcattgctgtggaacgtgatttttctgcagacaactacaccatctagtcctcgttcaaggacaaacaaaatatcaggcatggcaactcatatttgtaatcctaaaactgaaacagcagaggtgttgggagtttgaggtcagcccagactgtactatgagttatagcccagcctgggctacagaatgggaccttggctcaaaatcaaaaagatgtttaaaagtctcaataggcgagccgactcgttcctttctcctcgttgggcgtctgaaggcaagatgggtcaccagcagctctactggagtcacccacggaagttcggccagggttcccgctcttgccgcgtctgctccaaccgccacggtctgatccgcaaatacgggctgaacatgtgccgccagtgcttccggcagtacgcgaaggacataggcttcattaagttggactaagcgaccttgaatggattcgactgactactaccaagtggaaccgatcatgctagtctttgtacacaaagaataaaaatgtgaagaactttaaaaaaaaaaaaaaaaaaaaaaaaaaaaaagtctcaatagacacctaagcaggcatgtggtattcggcacacaacagcagcttgtgctgccttgtcagtagaggaatgaactgtttgccagagctggggagatgatggctcagtaggtaacagagcttgccctgcaagtgtgaggaactgagttcaaatccccaggacccacgtaaaactctgggcatggccatgggtgcctgtagccccagtgctgaggatgggaacccccaggccagcctgtctgactggcacatcaagtttttgttccagtgagggactccgtctcacaggaatacagtagagagtgttagaggaaggcacaggacatcctgtgtggccttctcactcatacccatgtgacagacacacacacacatcacactcacacacgcagtcactgtgcacaatactctctctcacacacaaacacacaccacagtacattttttttttttaattgagggtcagtgagctgacggcgcagactaaggccctcgctacacaaacccaac

SEQ ID NO: 27546 - DNA, 1215 bp, Mus musculus
gcctcttaagggagtgagagggggatgatccttggggcggggaaacgcgcccttcgtcggcgttgcgcattatccgcgctatttgcgcgccgcagcgacatgggaggagggttgttgaacgagggcgctgtgcgccgaggtcgccgcacgccgaacccctggggcacgggtaaccggactgtggcgcggaacgcgctcttggcacctccaagcgacgcagcgcgggaaccttcgccagagggctcgaaggattcgtcccctcaggtcttagaccgataggctcacaacgaagtccggggagctcattgtccccgggggctctcgggctctggggcggatcgagacgggtggtgtgagcttggtggggcgcataggtgcccctctcctggcttgcttgttcgctgtagcagggtttcgtactaaccgggtctctcctgtttctctcccaggatcgccacgactcgagcagtaatggcaaccctcgcatccctcacctctcctctccgggacaacatctctacagtcccgcgccgcctctctcgcacaccggggttgcagagtaccagccgcctccttacttcccgccgccttaccagcagctggcatactcgcagtccgccgaccattactcgcatctgggagaggcttacgctgccgccatgaaccccctgcaccagcctgcggccaccggcagccagcaacaggcctggccgggtcgacagagtcaggagggctctagcctggcctcgcaccacagccgctctgcaagtctaataccccatatttcagggctggaggggggctcggtgagcgcccggcgggaagtctaccgccggtccgacctgctgctgcctcacgcgcacgccctggaagccggcctggctgagaacctggggctgcacgagatggctcaccccatagaggaggtgcaggtgagcagcgggggcgggaggctgggggtggggtgggggttctaccttaccctccagcctttccaccttcctccaaacttaaaagaaattgtcatttcccccccagaatgtggacgacgcgcacttgctcctacacgatcagactgtcattcgcaaaggtaaacactgactctttccgcttgtgtctaacacgtggctctgaccagtgaagttgccccttttctgcaaaggctggggtattaagtggccaacacggctcacgtagtggagaagaccacgcttg

SEQ ID NO: 27547 - DNA, 1285 bp, Mus musculus
ccttctggtaggaggcagaagtcagagatgctcttagcaggcagctacttaccagtggtatgtgacaggcttccagctactcattcaaaaaaggggtcccctgtttttaaggaacttgaaagcaaagcctgctgtttctttcctgtttccttcctcttttaaaaaaatattgaaagtttaaaattctttagataataggatttttaaatgatctgttcctttaaggtagagaagttttatttgcatatttatttcagatcttgatttttttttttccacaaaacttgaagagggtaggcacacagcggcgcctgccatccctaagtccccgaggaggctccgtgctgagaaactgttgagtgtacagattttatttatgcataatttaatgggatctgtaaatacttcttatgactttttgagaaatgggattcgattttaaaattaccttttaatggtggtgggtcatgtagcccctctagcttttatgcgagtgcacacagggtattgaaactgaagatgaagctgggcttttctctcttggctggtcaagtattatttgattggagctgtttaggaagcaataggcatctcatttctgcgggctgaaccggaagagaatggagtttagtttgtgtgggtgacgtgtggattgggactggacctctaagcctgtccgtgctccttaaataattgttgtgtgtgatacctgtataataaaaaatattctcgatagaatctctgaaagtctggttctgaccctttttttttgcggggggggggggggtgctgagtaggactgatcagggctaacttgaagcctgactgtggcttagctaattttataggtaagagtaagacagggcgctgtggaaagatcttgaggcttctttttcctcattagtgaggctgctcagctgccccacatcattctggcttccatctcgtcctcattagctgagtaccagcacctgggggtactggggctgcgctcggtgagcggcttgtcactgagagagggggttcacttctgttgtgttcctcgtggtgatgggtctggtatgctgagcctgtactctgctgctctgtgggtaccccaagcctaaggtcacagtttgaggagtgtcgaatcaatggatgactgttgaatgggcttgccgccgccggcctcaggttttccttgggcagatcttaaggagagaaaaacaatcaaccccaagaatggtggcctgcggcatcagcgagttcactgaaaccgggcttctccagcattgcagacagcgaa

SEQ ID NO: 27548 - DNA, 1192 bp, Mus musculus
tttggaagcagaagctacccagggcccaaagagagccagcttggtgctggccaggttgaagtctgtgctccctctcaacccaggcctcatcagtctctcgcgcacagcttgccaccctgaaccccagagcgaatcaatctctgctagcatttcccccctttgtaacctggtatttctggtgccaaccgtggcatgttcttcagagactctcctgtgttcctggtcagctctcctcctagattcttccctaccccagaatgcaggcaaactcgagatgctcttccccctctcacaagccaaaaagaggccagagccagcagctgccattcagaactcaagtctctcacagccctgccttggtactgaaaggatttctgctaggatttctcagctgcccaaccagaggagctgtgtgaagttcaatggtaaatcgacagaaactgtgcaccacgggggcgtgggtaaagaaaataattctctgtctcatgtggctgaaaagggcatcactgtccacctgcactatggacctgcaattatctgctgctttcaacttttctttatgtgtcccagttgttaactttagatacaactcagaacgggctggtctcgaactcacaggatctgcctgcctctgcctcccaagtgctggagtcaaaggcatgtaaccaccacctgggcccactttacaactttagacacaatcttagtcaaggatatgaaccacactcacctgcttcagctagcttaggtgtgaaaagcctttttagctttgtttgtttgtttttgttctagggatggaacctagggcttgacacttgctaggcaagtgctctgcccatgagctggactcctagcctacaaaacacttccagaagatgggttggtttaaaggttggttggggaagttgagggaagggaacaaagtccaacgtattgaagaccagagaaggaatccagatctcctcccagtccagtgtgttcccaaggaggaccttgaaccccttgccttcctgcctccacttctctggtgtgcacgaccattaaaatagcatttggggagctggagagatggctcagcaatggcgagctcctgtagttgagtcccatcacacccttaaagctacaaactccagttccaggggatttgatgccctcttctggtttccatgggcactgcatacatatgatgcaa

SEQ ID NO: 27549 - DNA, 1213 bp, Mus musculus
actttgctgacacctaaaaaaaaacctattttgtttacacatttaatatattatataatgtaaatataatatattaaatatataaaatatacaatctaaatattatatatgtagggattggagcgatggctcagtggttaagagcgctgcctgttcttccagaggatccaggttcagttcccagcaccacacagtggatcacaactgtctataactccagccccaggggatcccacagttctgagggtactgtacacatagggtatacagatatgcatttaggcacataaaaattaaattacacaaaggtaggttttctttgtgtgctggtgggtgtgatctcctttacccgtggagccatttagccgactcttatgcctgggtctggcgcaaggagaaagatgtaacttagcagttgaagtgtagctgaagccaagtgtctttgtttactgacttaaaaatggtttatctattcatttattttatgtgcattggtgttttggctgcctgaacgtctgtgtgagggtgtcaggtccctaggaattggagttatacacagttgggagatgccctgtgggtgctgggaattgaacctgtatcctctgaaggagcagccaatactcctaacctctgagccgtctctccagacctatttatttttaatcttcttttcacaatatgtgatttcttcaagggagggaatatcctgttccaagtgctgtcaccctcgtaggatgttgggcatgacagaacacaattaattccagcacttgtgtgttccaggtcagccaggaccgcaaagtgaggtcctggaggtgggggagggaagaggaggagaagagaaggggaggaggagagggaggaaagatgtgagggaaggaggatttagaagggaactttagtttgacaaatattccttgatttttaagggtcctttataggctggtgagatgggtcagtgtttgctgccaagtcttaagtgcgatccccagagccctcatggtggaaggaagggttttggaaaacacttctttcaagttgtcctctgacctccacaggcactccaaggcacatgtcccctttaataaacacgtgtaaaaaggtgacattgaatcacaggcctgcgaagagactgaggcaggataacaccatttaaaggatggatttgtaaacggaaaccacccttgcaagcttgtcaggggttccagagccc

SEQ ID NO: 27550 - DNA, 1199 bp, Mus musculus
gtctctgtgtagtaagggaatttgttgatgacttaaacatctgtagtccaactcaccaaacagtggtcagcagcagctgtgaatggaagttcaaggatctagcagttgctcggtcccacaaggcaagcaggtgaagacgagagcaaatcttcctactttcaatgtccttaagtaggtctccagtaaaaggtgtggcccagattaaaggtgtgtgccaccacctctggatctgggacttgctttgtcccagatgactagaagctctccctgccttagtcttaggggattcatagccactgtgcctcaagatctccatgccaagatccatgtcagaaacttgtatctcctggcctccagattaggatcacaggtgagtcttccagttctgaattgtagttcattccagatatagccaagtcgacaaccaggaatacagctggaatagcaccctcgtggcaactaataactgtagctccagttgtagggtctgatgccctcttctccgcctccccccatggagttcacaggcacataaacagctgtaaacacctgcacttttctgggagtgttggctgagactgaggtggacggatcacaaagccaagactcccctcaaacttgaagtgcctgtatgtatagctcagtagccgagtgcttgcctggcattgtgacaaggcccttggttcagtccccagcaccaccaaagacaaatgtttaggggggaaaaattcctgcatcctccctggagccacgtagcacttatgctcttgtgtgctgcccaaagccagaagtcaaacagctgagcacacctttaatcccagcgctggggaagcagaagcaggtgtattctactgcgttcaagaccagcctggtcttcatagtgggaccctgtctcaaaaaaccaaaactgaaaaaccagttgaagttgtaatttgttgaagcttgtgggctcacagtgttgtgtggataagtagaaacaggctcaggaatcctctgatcggaacaggagcatctgtctccagtgtgcagcctggacatagccattccctaaagctggacttcacatcctgtgataagctaccattgaccactgacacactctagagctttgtaatgctgctggggtgagactaaaaatagcaagagtgtgcttcagctgtgtcacttctcctggccacaccttcccaagtctcacctca

SEQ ID NO: 27551 - DNA, 1155 bp, Mus musculus
atggatgagttcagccctttgtgaaacctctggtcagggctgatgctaatcctgagaccctcagctgttgccttggcagtgaagtcattgacggaataccacaggcgcctccgagggtagaggctctgataacacagaactgttaacttccctccattcttactctgccttctcagcggtggctccagttctcagagcaggacttggtgtgtgtgtggctattgcttttaatactaaggtcatttctttgtttttccttctttagggacatgagttttataatccccaaaagaaaaattacattttcttgcgtaatgcagctgaagagctaaagccaaggaataagaaatagtggcctgaagctgggactgttggagtttcatctcctctctgcccaaacttgggctcaagccctcggtggcccacagccctggccatgggtgtccactcctggagggactgttcttgttgagcatcagcacagcatcctggcgacttgccgtctctccattcagctccctgctgcggttttcctgaaactgagattctcaactggagtcagatcttgggggcactgtgtccagcagtgtgtatttgacagtgttgggtgggaactgttggtgagccctgtgttgtgttttataataaaatattttgaagatggcctgccccttcatccctttccccaactcctcaggaaatagccatcaatctcagaataatgctatgttccaagtttctcatcattttgtcagctcctgagaagctgtgtgagccacatgccacccctgcctcagtgttgagggaaggtgctgctatgatgtcctgagagaggccacggggggtggggggtgtcttccttccacagctcatttatcccacagaaattgtagacagtggatcccaggtgactggcctggggtgcccttggaatcccagctactcatcttgaggcagaacttggagtctggcagacaactcggtttagatgggcagggaatgagggctctctttccagaggtgtctcagctcctctcacggagactcttggcctccatgacggtgagaggagtaagcggtaatgcccaagcccttgagtgtgtggcagttggtaacgagccacaggagcggaatataggagcttcttgcgctcag

SEQ ID NO: 27552 - DNA, 1279 bp, Mus musculus
tcgccctaccttgagtatacaccagccagcccagcctacgcccagtacccgccagccacttacgaccagtacccatatgctgcctcacctgctgcagccaccagcttcgtgggctacggctaccctgctgccgtgccccaagccttgtctgctgctgcacctgcaggcaccaccttcgtgcagtaccaggcacctcagctacagcctgacaggatgcagtgatgcgcgtcctgcccagggccacagctgccacctgccagcctctggagccaccaccatttgggtctcctcaggcccccgggcccacctgccctgaaggcagcagcaagtttcttctgcagccctgccgtgcttgaggaagggcctgaggaggaagggacactcactctggaagctctgcagccactccgtgccaggtgccttaactctgggacgtgtacagacgtcctccctcctctttgggaactgtcctcttggtggatccgggttcctgaccccacctccccccagttgcccctcagtcgaagcactgtgccatgtcctgctgggaattttctgccatgcaggcaagaccatcagcaccgagaaccccaaacctgttttgtacttagagactggctttggtcagtagttcactgtggagacaatgacagtattctctgtgccagtgtcgctgatggagctccccctccccacagggctgccattaccagaccacggccctgcagggccctgggctcctgtctgctgatgctgcccgcctcacctgcagaggtgcccatcagggcgagttctcaggtgtctgttgctgtgccatgggggccttcttcctggccctgtgcccctcaagcaggctctgcccacccaccctcccgttgtcacctgtgccagtctgacctagctgcacagagagaaggtccagcccacgtctaggaggggaggagtgggtatctctggcagcatgggctgcccgcaggctgggcagtgggtccctccacacctacctcagggagccagtgtgcgggcgggaactccacagcatgcctgttagtcaaggcctggaggacagagggagtaatgttataataatatttttattagaatgttctgattataaaaaataaaacttgttttctttaaagaaaaaggtggtttgaggtttttctcaatggcaaggtggtcctgtgtccagggtttttggcagctgtccatggaacccttaccctgcttcagcctctgctgatcactagcttcagtgaccagcagggcttgctccagt

SEQ ID NO: 27553 - DNA, 1381 bp, Mus musculus
acttcttaagagagaagagagaggaagtcaggggacacacaggctgagtggccgtgtggtagttctcctgtctgtgtataaatatttacatgttctgtgtggtctgaatgcagaagctcaaaaagcttgcaaaaaagaaaaaagaaaatgtttctttgttgagccgtgtcttgaaggcaaaagagaaaatgctctactagtctttccttcattgttcttagttgagctctgtgcgtgaatgcttaatttcttttgtttatgacggttttacttaactttaaagacatatttgcacaaaacctttgtttaagatctgcaatattatatatataaatatatatataaaataagagaactctgtatgtgggagagcaggagtatttttgtattagaagaggcctattcaaaaaaaaaaaagttgttttctgaactagaagagaaaaaaaatggcaattttttgagtgccaactccgaaagtgtgtattaccttgtaaagaaaaaaaaaacctacaaagcaggggtttagagctatttatataaatgctgcgattttgcactattttttaatataatatatcagtgcttgtttgatggaaacttctagagagtgtgttgagacttggagaaatgttgagtttaagtctgaacagagcagcaggggtgtgtccctccaccccctgggtctcagagggcccccactgtgcaggaaagccaggctcccccagggccacacagcatgccgcctgcaagccaatggatgcttctgtccagacaggctgtgaacagttacacattccctgccgaaggggacccgtgatgtgtcgtccctctgggttacagctgagtcaggaccgtctcccccgcaccgccccccaacagaggcatccaattccagatgcctttcccaatatgaaaataaactgttaccgaaggaatcttagtttttttttttttcttcctctttaaaacacaaaaactatgaaggttcagtgtttgggggcaaggtgcatccccaaagccaaagcagtccccgaatttggtgccaggtggatacagcagctggcttcatgcagaagcgggttagactccagtgtcccaaggctgggatctacgcagttccaccctggcatgtaggaacggcccagggtgatggctgcttgacctctgaccatgtgtttccctcaatattgattttcacttcaagaagccaattaagagtcagcccaagattgaaagggacaagcccaagtgttcccccaggaagcccaaaggggttaggaaagactgccagcaccagcggcccgtccctccatccctccgcctccagcgtaactttccttctcctcctggactctcccctccgacccggaaagagttgtat

SEQ ID NO: 27554 - DNA, 1217 bp, Mus musculus
ttttacagtcaggggcacataaggcggggacccctgggctgagtcttctttctgacacataaaggaggtggttgccctgggcatgcaccccaacactcaggacctcaggtaggaggaagctgctcacactccagctgtggccatgacgtggggtgaacagctccagccctcttgccaccccagcgtgctcccaggctgaggactttcctcctcctcctcctcttcctcctcctcctcctcctcctcctcctcctccacctcctcctcctcctcctcctcctcctcctcctcttcctcttcgttatggctttgccataatgaaagctgagttgtcactgaacttgtccttaaggcaaaaattccaaaaggtggtatttgagggtaagagacttaaggagtgacgcaggacagacagatagcacctgcccgccccaacttccctgcctgctcctcaggacccccatgggcatgtgccttaagagtctgggccactctcagagttctgagtcctccactgacagctacagctgtgccataattagggctgccctgcagtgattggtggagtggatgatagtgacccgtcactgagccaacgtggggtagcgtgcctgttctctccctaaattggccttgctcaccatgtcaaaagaattaaaaaacgcaccctgaggcaggtgagatggttcagcaggtagaaacatctaccactaagcttgagtctcaggacacacgtggtaaaagaatagaactagttttcagttgtcctttgacctccacctgtatgcctgtcatggtgactcccccacaccccacccccagtaaaatgataaaatgtttttaaaaagtgtgtcctcagctggagttgggagggacccgtcgtaatgatgatggtggtggtggtggtgatgatgtactttttaatagcaatcatgtctagtgacctctttttaagtgacaagggacccctgtccctctaacttcagtctcacattgctcaaggagagctgaaggccacacactgcacagacaccatagagaggagttgggcaaagtctgggatgacggggcttccccccccccacttccctccctgttttcttctctgtagttgaggagctggctctgggcaccgccgtatttaggaggcgaattgctgcccatgtgtcaggcaaaacagatgtggcggggagacaacatctattttcataattcgg

SEQ ID NO: 27555 - DNA, 1196 bp, Mus musculus
ggaaaaacctgcggagaaggagcgaggggaaaagggcggccgagtcagacggctaagtggggaaagcgcgcgaggaagtggtgtgaaaaaaggataaagattgagaaagagcgggcgaaaaagctaggggaaagcggtctagaaagaagaaccacggggcaagagcgatgttgaaaatgaaggaaggagtgagaagaaaaaaaaaaaaaaacggaggagaaagaacaagggagaaacggcgagaaaaagagcgcgggcgccgccatccgccgctcggctcctcgctccggctcgccaaggcgaccgggcaactgctgcagcccgtagctgcttttaagtggtctggtgtagggcagactttgtgtgtgtttaaaccataaccggacctgggagcctcaaaccctgaacgcacgaacccctattttacaaagcgcttgggtgcacagtacacggcggcttcggcacgcccgctgctcccgctaccgctgcgcccgcgcgcggcccacttggaaaggagcaagaatccattaaatgtggtaggggtccccctgcttgttcttataggcaacacagctgctcctgatcttggatctgtagacttcagcgacgttagcggttgcctgaaacacgttgccctgaagttgtgcacaaagtttttcgagtgcgctgcatttcattcaatctagtaaggagccgctggccttgcccgtagcacattcttgtaaatagctctctttctgtttccgtcttaactccattatttttttttctgggttctatttgtcattttctctataagcccagcttttaatttttgcagttagaagctatattgtttcataaattttcaggatagcctattaattttatgcttccataatgggaactgtgcagaaataattttgtatatgaaactctttaaataataatgtaggttttttgtttgtttgtgcatgtgtatgtttgttgttgaattctccacagctttgtagaacagttcatgatgagcaaagcctcgggcagaagaggcaatcctggtctttatggacgtctcccagccctagagaaaaacacagtcttacttgaaaatagtgatttttaagatttcttgatgataatgaaattttataaaaatgccatgccctcaaaggtaacagtgtactcattttgaagggtgatggttttaaaactgggcc

SEQ ID NO: 27556 - DNA, 1182 bp, Mus musculus
tggtgagggcaggacgtctgtgtgttgtgcatggcacaggcctgcttccttgcccatgtgctgctgtgtgcctgtgtggtgaggtacacatacgcagagtttggtatctctaggcagcacctgcttccgatgtctggcttccttgttgcgggcaacgtgtgcacagcctggagggaccccaggcaggacagaggacagtgctgggcacatcggtgctggtggaaggtttgttagctccagagacagtgacatcatttcccaagttgtgtatcctttctggccacaaacatctcaggcggccttcctttggaacccataagctcaggtcttcactaattcctatggtttctttcctaagcagataggtgtttttcatttcatgattaatgctcccacctaccaagtgtaggtggggtctaggagctggtctcctaatcccattgttgtgcaaccccagttagtcctcagggctctgcagtgctgtccttgggtttgtgccacgtgagagagattagagaaacaacacttgctgctgttgctgggcaaaggcttgccttgctctgaggagaggaaatgtgaagacccagttcgccccatgattagtctttgtctgccagtctctgagtgaaggaacccgtgattgccgaagggatgaacaagtggtccacttgtacaggctgcaggcagaggctgcggtgggttgcacagacaacagcttgtcccagtcacagccgatcagggctggccagcagtgacccttggagtctggtggaggggcttgtgtaggcagctctgcctgggtgaggtgaggcctgagagacgagtgtccagaagaggcaccgggcaggaagctggtcatttctgggggtagagaaaatatcaggggatcctcaccctgcaggtcctgttcctgggaggccgctatttgcactgctctgcacatatttacatagctaatttctcactaaggaaggactgttagcttttctcagatctcagaggggtcgctaaccctcagagattcagaaacaaatgacacatttcacattctggctgttgcaaagggcctggtgtgctgtacttgggaggtagacttatcccagcacagtggggagccagctacaagctctgagcattggagaggatatttgtattgtaggaacagcatgcaagggtgggggt

SEQ ID NO: 27557 - DNA, 1195 bp, Mus musculus
caatgaatgaactgcaccccaggccttgttttactgtgggtctttctaagctgtccagcttggccttaaacttttgaccttcttgcttcagcctcttgggtagttgagaaaacaggcgcataccaccagggctggctggttctcctctcctttgttgttgctgctttgagattgtgttttaattataacatttctcccttcccttccatccctccaagccttcccacatacctttcctcgctctccttcaaattcatggcatttatttccatcatttatatatgcatatatatatatatacatgtgtgtatgtgtatatatatatgtatatatatgtgtgtgtatgtgtatatatatgtatatatacatgtacacacacacacacacacacacacacacacacatatatatatatatatatatatatatatatatatatatacacacacacacacacacacacacacacacacgtatctccatatccatctatctatctattcccgatataatccttgggtccatattcttctgctttttttgagacaaggtctcaccatgttgctcaggctggctttgaactcttgggctccagcgatccttctgcctcaggattctgagtagctatgctctgctatggctgagcacaggcttatcttcaagagtagctctaacttttacatttcgactccaactcattttaaatgtccacctaattcccaaactaaaacttagtgtattgaagaagtttgatttctcttgctgcctgcctgacttcctccctccctccctccctccctccctccctccggctccctctgttctaagactgcttcctcaagctttgccagtcttgttgctttccagacagtaccctgtgtgtgtgtgcatcttgtctttctcaggtgtctgtgcctcccctcctgctgctctgcctgctttcctgcatgtcatatgtcctatgcttgggatagtgactcacatgggtcttgctcccatttcctacagtgtcagcctctggggatagggatagtccatgtgctcttgggcgctggagagccttctgctcctttgaatcttggacattgctgaagggattaggactgttcaggggctaatgcactgatggtgcaaacctgaagacccaggttcagtgcctggaacccattcacgaaggctcgatgcagcggagcac

SEQ ID NO: 27558 - DNA, 1134 bp, Mus musculus
atgtttttatctccttagtttgggaagccaaagtttaaaggactattgaacaaatgaatttgggaattactacattgagttcaattaaaaagcttttttagctgaaacatttgtttattgccccatattcaattcctatgaagctgttttctagactgtcttcagagacattcctgcactacagtctgtctttgcctttggtaattatgggttcttttgctgtaaagcattatggcatcttctgtggcttcagagaaagattaccttttgtgcagggataatggacttcaaagtctgctaaaaggacatctttccctgaccatccagtttcattgcttcttttccctctgcagtttcgtgcattggcaccaatgtactatcgagggtcagcagcagccatcatcgtttacgacatcacaaaagaagtaagactttattcttttcttcttagctgccatcatgtattgctcaggcctctagctactctcctttcacactgcaggagacgttttcaactctgaagaactgggtgagagagctccgccagcacggcccccccagcattgtcgttgccatcgcagggaacaagtgcgatcttactgatgtcaggtgagttcttagacgagattcccgggctgattatgtgttccttttctaatgagccacatccagggtaagagtctagcttttattttatctctgacattgaaaaatttcttgtgttacatggttggccctgaagttccaagctaaaatgaaaacttaaggcatttggagttaattatattacatgtagacaggtgcgtgatttactctaacattagtgttatcacacatgacgttatctgagatcattgcttccccaggctgctgtgacacagagcacctgaatacaaaaagtccattttatcgacaatctctctgtatcacatctgattcccaaaggaagggccttggctttgttttcccgggggacgggacgggggacggggggaggggggggtgaggggtgtttaatatagaggttatataaaaccttatcaggaagatcatgtaactggaaagactgcttacatgggggctgggggggtcttaaggggcagaacctctgactcgcagttgttgccttccaga

SEQ ID NO: 27559 - DNA, 1920 bp, Mus musculus
ggtgttggagagagagagagagagagagagagagaaagagaaagaaagaaaaagccaggatgtgcttgacagtacggtttggctggattgtgtctgcccagccctgagctgcttctgaaacgtgtccttgttcccccaggaagaagacggacttcgggtgaggaaggcgatgccgagcaacagccccgtggcggctctggcggccactgggaaggaggagggcctgagcgcccggctgctggccctggtggttctgttctttatcgttggtgtcattatagggaagattgccttgtaggggccgcatgcgaaggatggcaggttggattgatggatctaccacaccatgggattcaaatttatcataaccatgcgtaaaaagaaattaatgtatgacggcatctcacaggtcttgcctttaaatacccctccccatgcacacacaaatgcacacacaaatatagcataatataatgatcttttagaaagttaaaaatgtatagggaatggatggggaaagaatggtctgttgccgtaggacgggccgtgattaaccacagtggcatcttgtagctgtcacgctcaattcgggtaggcctgggcacgtgttgctagatcactctcttaaagcaagaagctcctcctcgcatgttggggctggcccgtgggagcgggagtcctgcaaggtggggcgagctgtctttttcttacccacgtggcttccccaggcctgctgttctgtccaggcatcgtctcctcaggcctacagagctgcaggtgccaaagtgcattgcacagaggccacatctcgtgtacctgtgggtcgtgtgggagagacatgagtggaccagcgggtccaacacagggaaatccaagtctgtgctctgttctcttgaagggaccaagctaaattaccgctggttcaagtagtgaaccgagttgttctcggagatggctgatgcacatgtaacctatttcatctcgtgtgttcctgctgccaccagagcacaggcagtgagtgctgcagaccgccagtgaggagctgctgctgtgggctctggaggtctgagggaaggggagggtctgagtcaggaagtgttttgttgtaggtcagtaatagctgccctgaggaggaacgctctttttaatgacagtcagctctggattacccagtcttctagattgccctaccatccatccttctaaaacataggccagccttgacctgcccttctcaggatgagtgagtcaggctgcagagggtgaagggcatagagggggtggggtggggtgggggagccctcagcaaatccatctgctggtgatgaagagtcctgactgtgaattaatttcatgccataaaagaccgatccagttctgctcaactatgtagcatcttaaaggaagagattaaaataaagccccaaattaagagtccttttgtcattttgtcacatttgctgtgtggggttcttattatcaatcatcgttagtgtgctatggaaggttgattttaaaatgagctctatcagtgggaaacacatgtgtaatgatttgactctgcacacatctgtgtacacacgcacacacatatattactattacttttattattatattttggttggcttcagcttaacagcaggagccatctcaggctggctgtccttccccttctgtgaccttggcccttcagtgacaggcctgagtctgagaggacaagcccatctaaaggaagactggcctagacacccgagatcacactgctgctgtgcctgagtgggcgggtgggagctggagacggggggggggggggggggcactgggcggtaagcagccctgcccgctctaatgcctcttaccgagtttccagaccctttccgtgtgcctgaaggagggagggtacgactgagctgaggg

SEQ ID NO: 27560 - DNA, 1155 bp, Mus musculus
agagtccacgccaaaatgcagtatcgttttgtcattttcaggcttctcaaaattaactggcttgaatgcaaatttctagttacagtttgcaaaaacctttattttaagggagagactgggacacgggacagttggtcctgtgatctaggtcattctgtattcctgagtgacgttctccttcccaggccttctccagtatagaggcccatgctcccctcgctgctgtggtagctgtgtcgtctcctgtggaccctgtgctgtgacagaggggaagagtaaactttgtaagtaaccggaaggcaggcactagactcgtcctagttacatttggccttgtctgctgttactgagaatgaatgcttctcagagcccagcagaaatgcaattgtgtttaacactcccctgcagagcatagatggacagatgcagcataggtgaggctgggcgatcattctctgggatcatggcccgatggctccctcagggttccctggcctgattggacttggaggaggtctttcctctccccagacagagctacaactgtgggaacctttgtcaacactaccctggctgcagagcacctcacaaaaccgcaagttaggctctgccctgtaaaaaagacccagtgcgtggaggtgggcagcattttagtttggaactaaatgagccccagtttgtgtgtgcatgctaaagcactgcttgttggagatctgcacatcaatgaagggaacaaggcggagggaggtatctgctccaggcacctcagctcaccagccgccgcgtctgccaccctgatgcagctgctgtttccaggctgagcaggaggaagagccagggctctagtgtgacctgaacacatcccacaagataaatgcatatggttgtttccatttcgctcactgcccatgtgcctggggaattgtggaagctttagaaagaaaattaccactgtgtctcagtgaggtgaggctgctgtgtctggaggctcctcataacttgtaaattaaatgtgaatgagagaagttcattaaaattggcattatagaagtggcctattgagatttgaaagcagctgagctcatggtgtctgggctccctctaaacctgtggagaaatgcatgaacaagtgacaggcgacagtcacaggagcat

SEQ ID NO: 27561 - DNA, 1193 bp, Mus musculus
tagatgattacaaggaaggaaggagtggaccttgctcactcacaaagcattgtctatgtggatgtctgtagaccaccacccattttagtggggtatcatttgggtcttttgaaattagcatttaaaaatcctgtgttttggaggacttatagatcctttcagatccattctttgcctccaggcaaaataaataaataaccaggctagtccttgtgacttccctcccactctcagaaatttcaaaggcaatatatattgcaaatttaaaaaacaaaaactgtctgtcatttcaaagtaagggaagttcagccagtggaccagtagctgtggcaaagactcaggtggcttgcagaaggcgggatggtgtgcagaaggtggggctggccaacactaacccaaggatggtcaaggcccatgcacagtattgctagtcctgctaagcagttcttggacttattttaacatgtagttaacagtctgctgaggtaactggactaacttgatgtccacagcaggcctgctgcagtcatcacacctgtagcacagcagcgcccagcacactcaccctctgcttcctgctgccttacctcagtcctgctgctgagagacttttccttaaggaactggtctctgacattttcattacatttctgtagccaagtcacgtcaaagtcgtgtccacaagaatgtccaagaaagctcagaagtggtgcatgaaaagataggaatggagctcagactctagtgtgtcagacacaagcatgtgacatgggcacatgcattccccttgcctttccacatcctcagggagggtggggagagccacatccacactgacctctgatcacctcttgatgcccgttatcccctgtagcttgctgatgaccgcatggcgctggtatcaggcatcagcctagatccagaagcagcaattggcgtgacaaagcggtcgcctcccaagtgggtggatggcgtggacgaagtaagtttctgcatgcttccttttgtgggtttgtcttttaagtttggatgacaacacggttgattgagaatctgtcatatgagccagtatggctgcagtgaaagctgtgtcctcagacacagccattcgtgagtttgctcatttatgtaccacacagtaaagcaagactgggtctggatggctgcctgcatgatgtgaacttagtgttagc

SEQ ID NO: 27562 - DNA, 2354 bp, Mus musculus
caagaggggttactaagcaaaacctcctgaatcagaaacttggtcatttgaaccaacctcacattacaagaaagcttgacagtgtgtccccagccatccttcctcagtccattacttacattctagctacgtaatgacctgtccaaacctgactccgtttaatgaactgtgaatttacacagaggccattttaaatgggtcaccccatttaggattagtggatctcaaattattaaccaaacatcactccatttcaaagtaaaatattctacacatgatttgatttatcgactcttgccacttaaatgcccagaaaacgggtgtattcctgaggacagtgagaacgtcagctagggaaaccctgtgtgtgtgtgtgtgtgtgtgtgtgtgtgtgtgtgtgtgtgtgttctgagggttttttggggggtttttgggtttttgtttgtttgttttttgcgtacgtgtgtgagcatatcatgtattatcagatggccaaagtagggttctgtttactccctgttaactctatggtgctcgtgtgctctacagaactagagcgatgcggaccaggctgtcggagctttgagagcgtgcgtatctcactcgctctgtttgcatcaacactgctggagttagagtgattgttgtataactgttgacggcttgaaaaaactctctgtgtctcttaaattatttaaacaccgtggccctgttaagtgtgttatatttttatttagaccaggcatatgaaatgcctctctgggactcactgaagggtgtctcaaaactccagctcagacctagaaatggagtcatgtagacccatcatgaactcactctccctgcctgggccatggaataatgagatctaaaggttttctggattctttggcaatgttagtagagaggcttagaaaagaggaggcagcacccaccccaccacttcagaattggggaagggactctgcagtctctctcaacctctgaggttagacaagctgttcctgggtagactggccaaattagggaaactgcttcaagcaatctatggagatcatgctaagtaattgtgaaagccttgaaaaaaagtgaccttttaagaaaggatcactatttatttataatttatttccctgaatagattttattttggtgggggtgttggttcccccccccccccaatccatccatctggttagaaactgtcccaaggacctatggggagagggactgtccccttctgcctggaggcagtgtggtgctggtctgggcccacgccaccctggtgagagtccggaagggcttggatactgggctttgccgagctccagagctctgtgcactcgctctctggggccccactgccctttgccgttgagcctgttctgggggaaagaggagaagttagtacccatgtcctgctaggtccctcacggtaatggcttttggaagaggactcttgtacctgctgacggccgctgtctgtgcgtccatccttcccttcaggctggccatggaggcgacaatcacacagactcgtctgtccctgtgcctgggaagcccggcctctggacggacaccacctccctctgctgccctgctggcttttgtagaattggggtggaaggggagagggaaagaactgttggtccttcggggcccctgatctttcctaagactagcataaaatttctgtctgtcattctgtttgttgggggtggagggacattggggtgctggctgggccactgtgtgaagcaatgtgtgtctaatttaacggatgtaccattttctctgctaattgagagagcattatttatttgttttgacacaagtgcgtgcagtgtttcatcccagctaatggcttcttaaaggtaataaaacccttcaacctaattggtcagataagactttttccttgtatgcttaaataaagcaattagtgaaacgcttcaatccaaaatgactttttttttgtcctttttttttttttttttttaaaaaaaaagctaatttactgttactggaaactttttgtacaataaagcaatctcacagattgaagagcatccagcattcctagtattaattttaacaatgggggtcatattttcttcaaatgtgtttgtgttagcagagggcctgaccatgtctgggatctttggggccgttgctatttattttgtgcctgaggcctctgcctcagagtctgaaagtcgatttgtctatctaatggaggcctgcaaagggaccaatcaatttgctatccaatatacaaagagagaaaccacataaaagacagataattatttttcgttatggaaacgtgctttactcgagcactagcgcctgtt

SEQ ID NO: 27563 - DNA, 1192 bp, Mus musculus
caccccgagctgcagctattagttaggctgcgcccaccacccagtcaccttgctggccccgagcgtgtcaggacatctgcagggaggtcctgagacacagccttgtgtcccaggacctccatgtggagaaggagggattagaagcctggagagccccttttacagagctgctcctctggctcagacctttccactgtccctgtcctgtctgcagggcgagcgagccacaggctttggggtggctctcctactggctctttttggccgtgcctccgaggacccgctgctgaacctggtatccccgctggactgtgaggtggatgcccaggaaggcgacaacatggggcgtgactccaagagacggaggctcgtgtgagggctacttcccagctggtgacacagggttccttacctcattttgcactgactgattttaagcaattgaaagattaactaactcttaagatgagtttggcttctccttccgtgcccagtggtgacaggagtgagccattcttctcttagaagcagcttaggggcttggtggggtctggagaaaattgtcacagaccccataggtctccatctgtaagctctgtcccttgtcctccaccctggtctttagagccacctcaggtcaccctctgtagtgagtgtacttcctgacccaggcccttgctcaagctggggctccctggggtgtctagccagccctgggtagatgtgactggctgttagggaccccattctgtgaagcaggagaccctcacagctcccaccaacccccagttcacttgaagttgaattaaatatggccacaacataaccttgtctccgctcactttttttctcaacttctttgtcttacttctttgtctaggtgtagagcctgtctgaggctgaggtacagaaccactccacccagcagccctcaagctccctcgctcgctctcctgggcctgagatggctagtggaactggttttacagcccagagccatggagtctggggcccgaggacagcaggcagccctcaggcccaggcctcttttccagttttcaatctccacacatgggggggggggcttctgagaggctctgttcatattggggtagacttggctttcctcaactctgaacatgaatctcacagttcctaccagagaagtcctagggcataaagggcctgattt

SEQ ID NO: 27564 - DNA, 1099 bp, Mus musculus
cacactgcgtcctcgctctctgagctttttgcccatttatttttctatacaaatttaaaaaccatttttatcaagttctgtaatggccttggtggtattttgcctggaactgcattcagtcaataaattaaatgaggaagcaccgtgatctcgtctgcatttagtcttaagcctgaagtctagtctctatgtattcaagtctttcccacattaagagtttgtattttctttatacaatttgaatataaaatgtggcatttgatgcttgaagaaatggcacacataggtttctcaggcatttgatacttgtgttgctttgtgaatgggtatatttttcattgggtttttaggctgtttataatgtgtttatgggatgatattggtttttgtacacttccctcatattctgctacatctagaattgtctggtggatgaggcttccagtagctagctctccagtgcatgctctgctgactcctggagggagtgcggagtgctcagctcctccaccactgaatgcccagcactgctggtaggaagagagacacatagacagggctttgagttttcgtgccaagactaatttagggagggactaacctttactgaggctacctaagcctctttcctaccttttaggtttttatcctattttgttttctagaaggacagaagatgattattagaagttttatatggtaagtttttagatattttaaattaagtgggaaattttgtttttaatcaaactgaattctactactccccaaataatttaaaagagagctgatattaagacacaagacaagccttaacaaatataggaaaatgaatgaatttcttgtgatagacaggtgagtgaggggcaaaagaggaaatcaagaaaccccaagaagcaagtggaaataaatacaacaaacatagtcactggctcataatgaagaggtttccagagcatttatagatctgagtgcttccttaaggaaaaggtcggcaggcatcagactaattcagtctccaggacccatgtggtcaaaagagctgactgaccttcctcaagttgtcctatgatttccatcggtaggtgtgtatgtgtgt

SEQ ID NO: 27565 - DNA, 1105 bp, Mus musculus
tccaaacctggggcgcgctgggaattcagtgtggcacaccgaattcaatgttgcgcaccgggtatcagctcggggacctcaggttgtctccagcgaggcgccagaaatgcctcaccgtccaacaaacctttggcctcccaagcgcccctgggtgccctggagagacttgaagagccctctctccttttccggggtgcatttcgggctgattaatgggcaccgctcccttcccaccttgcctcccatctgtctctttcctcccaccctactgtctcagggaccccagtttggtcagggcaactaacctttatccatgaaaacaaggagaatctggacggagtcacccattagtgacgccggatggggatgggcccctttctgggaggggactccggggactggtcgcgacggcgggctggcctcctggtcttgcagcggcggggctgcctgttttcctccttgcgctcctctggctcctcctcggggtcccgaggatcctgatctaagggccctcgctggggctcctccccctcgcttgcgctctcaggctcctgagtggtgggctgcgcacgtctcggggaggcgtcggcgctctgcaacttcagagcgtgcagacgctgagtgagtgactggttgaaggtggcaccccgggggccgcgctcgtcctctggctcggtctctggctcggtttctggctcggtctctggctcggtctcgatttcggtctcggattcgatatcggactcaggctcggtctcagaatcggtctcggtctcgtagtcgtcctgatcgtactctaggcactcggggcgggccagctcaggctcaacctcctcgtgctcgtgatcagactcagattcagaggactcagggagtacctgtgcggcagctgcagcggcagcggagcggtggtgggcgttaaggaagctccggcgctgggcagcacgctgctgggcgcgggcgttggaagaggctagggcgcggaggagagcaatggagcaggagagccagaggagagcggtggcagcccggcggcctatgggcgggcacaggtcgttgtaattatggcgagctcggcgccactgctgagcccgggacctgcgat

SEQ ID NO: 27566 - DNA, 1203 bp, Mus musculus
cttttccccccgccgcacggccaggccccggccccgaactgcgggtggggcgagggggcgacccctccgtggagccggcccgagccggacgtgggtgctgggacccctgcccggcctctgggcaccgcctcccggcgcccgcgcccgccctcccagccgcggccctcctcctcctcctcttcttcccacccccctcgccgccgtcgcctccgcctccccccgctcccccgcccgccgcggcgcttttgggtcggggcggcgggcccgggccgaggcaataagagcggcggcggcggcggcggcggcagcagctcccgcggctcctgctctgctccgcctcggccccggagcgaggggcggagagccgcgcgcttgccttagtccgagccgccaccctccccgcgttccccgctttcccggcccgcccgaggccgcccgccccgtccccgccgccccgcagcccggccgcgccccgccgccgccatgggctgcctcggcaacagtaagaccgaggaccagcgcaacgaggagaaggcgcagcgcgaggccaacaaaaagatcgagaagcagctgcagaaggacaagcaggtctaccgggccacgcaccgcctgctgctgctgggtaagggcggcccgggggggagcgggcccggcccgggagtgccgcggggcgacccgcaaggccgcgcgcgccgagcccgcccccctccccggcgctctagcgctcgctcccaggccctccggcccgctgggccgcgcgcgtgcagggggcgaggccgtcaaggggaccccggggcggaattcggccgggcgggggctgcaaattgggcgtgggaccccctcgttcggtctcgtcccctcagttggccacactcccccccgtccctggcttcgcgtcctcgcgaggcctacttagtgccaggggccagggtgcgtgtcgggagggggaggggaggctcacagggcccctcggactgcgacagagtagggctagggacaggaaacgggccggcgggcccagggagggggacccgcctcactggggtgtgcgatttgttgggagggggcccaaagagaggccaaggccactaggggggactcggggacctcggccgggagactctggcgagggaagtagccgccggggtgggggggcgggtgacatcagcccctcggaaaggacggggcggtaaaggtggtgca

SEQ ID NO: 27567 - DNA, 1234 bp, Mus musculus
gtatccatgaacccaatgcccaccaacaatgtggggacccaggactcctagccacaactgggggcctgttcaaaagtgctgtgagccacagaaccccaaacaacatcttccctccctggtgacagatgcatagatacttaaataattagatctacaaatatggaaatggaaaaccctaatatcaataataaacacttgtcacctctgggtctcacaaactactgaatcccaagttcagcatgtactaaccctacctccatacaaccctccctgtgctaatcaagagccacgcaggaagcagcagggtgtggttggaatggacagtagaccaggtgcaatttctggtccagttaatcaagatctcgatgccatgtctctaacccagccttatcaggcctgtcctcaggacatgattgggaaattatgatttatttttatttggatgccttcaatctatagatctagcccacaattccttggaaaacagaatactatgctttttagttgacgtgtctcaatgacgataacaccctggtgggcaggatgcaatatgattttcttttttttttcctttcaatcccactgtagtgagaaggccactaaagtgcaggacatcaaaaacaacctgaaggaggccattgaagtatgtgtctagctccttgctcttatcttttagcaagcccctcgccccacggtgctgccccccccacccccacgcctgaccaatttgctaaactgttttcagaccattgtggccgccatgagcaacctggtgccccctgtggagctggccaaccctgagaaccagttcagagtggactacattctgagcgtgatgaacgtgccgaactttgacttcccacctgtaagctccaccctaaccctggtttcctctgcccctctcaccttagtcccagtgggaacacgagggccagacttgcatcaggccagagtgaccagacacatacctgccgtgtgaatgcataagttaactccaggcatatgcctaagactaaaggatgataaagacatgattagggctttgtccaaaatggatgaacaaagttccatcaccttttctagacctcaacctagtcctccatttatcagatagtgagtttttttttatggaggagaggtcctgagctaaggcaagctcaattattcccctcatacacatgaggacagacaaaaccacatgtttgttacacatggcacacaagtcctaattgtc

SEQ ID NO: 27568 - DNA, 1186 bp, Mus musculus
gattaaaacaataagaacaacagcaacagcaacaacaaaaaccaaccctcccaacagggaaacacagcatggattctatagtcatctgattcccatgattcacagagacaaaatggcagcctacccacaatgcatctgatgtcattgacatctgctactctgatatctggacaatattctaaccttggcccatgtccctcccacagggtagtacatatccctcctgtacacataattctagggggagtttactcatttggtttgctcccacccctcacaagactaacagaagcagccacccaagactgtgagcactccccagagatgaaagcatgctaattcattatatagatttctgggagtttaacagaactgcaggctctttccaagcgctggttaacccgggggctcacacttggactcacatagcgagcgatggccttagaattccaggggtggggtccctgattggtttgagctcagtctgtcagccaacgtttttcctgggttctctttcaggaattctatgagcatgccaaggctctgtgggaggatgagggagtgcgtgcctgctacgagcgctccaatgagtaccagctgattgactgtgcccagtagtaagtagctgtccccccatggcaaaacagaagctcagaagccaggaagctacaaacccaccagtagtcagagagttccagtctggttcatttgttttataaagcttttaattgcactttatagaccactgatactgttttacataaacaattaatacctgctagagcaaggcaaaatacttacttgtaataaagtggtataactcacggatatgaactctaagcatttaggggcgcacacagtgtagcaaacacatactggcctcctcatataaaatacacagactttttattgttcagtaccttataaggcacttcagcttcatgatgggagggggacagtgaccctttcctaggctcactctcccatggggacttgttgctacatatatagcatgtcatgacttaatacacacagttatatattctttcaaggaactgaaaagcagccccacaggccccagcccccacacctcctccagcaaagttcctgatttttctcaaaagtttgtactaaaagctggaagcactaattatagaaacagaaaacaaatggagatcctggaatt

SEQ ID NO: 27569 - DNA, 2498 bp, Mus musculus
tctggcccttggcccccaaatcctccaaactagtattaatattactttttcatattacattatctcagtcctgcaaaaggcaaaagttaattttcctgtgtttatagtcgagcaacttttctttcttcttgttttgttttgtttttgttttttttaaactaaaagtttgctatctcaaactttttctgtttcacagacccagtagataggaagggaacttcgtctttgcttcctgttcaaagtggtgaatgcaagaacagcccctttgtgcccacagcttgtcttggctcagttctcaataatgaatgagagtcttccaaagcagacagggagagggctggctctgctttgtcctggacagagacctgtgcacccttaaacccgcacttgtacattgctttaggaaagggatgaagttttaaacttctcttacatgtcaaaagcaagggcggatcccaccaccacttgccttacggggtacacacttggcacacactgaccaccgtgtctccttttctttcaagcttcctggacaagattgatgtgatcaagcaggccgactacgtgccaagtgaccaggtacgcgtgcgcctctgtcctcaagcctggggttccacgttgctggttcttctccgggcaattagggtgagacctactgacccccctctttgttctaggacctgcttcgctgccgtgtcctgacctctggaatctttgagaccaagttccaggtggacaaagtcaacttccagtaagtgaatcgttgtcccgccccaactatctggcctggagagtggtgggcccagggtaacccagtattttccggttccagcatgttcgatgtgggcggccagcgcgatgagcgccgcaagtggatccagtgcttcaatgatgtgactgccatcatcttcgtggtggccagcagcagctacaacatggtcattcgggaggacaaccagactaaccgcctgcaggaggctctgaacctcttcaagagcatctggaacaacaggtgcgtggggtctccctgacttggctcaacctgtaggtctgcagcttgctctggccccagctctcacctggcccctctctcctcagatggctgcgcaccatctctgtgattctcttcctcaacaagcaagacctgcttgctgagaaagtcctcgctggcaaatcgaagattgaggactactttccagagttcgctcgctacaccactcctgaggatggtacggtcatggcgctggtttagtcaggtggttcttgggcacaaggtgtggctgagagtccctagcccctcccactatggggaagccagggacatttatttccctcattttcataggcagagatcaagagtttgggggtgatgagctacaatggtgtcagactaggtcttctaagctaattagcataattaataatttttttttttgtagcgactcccgagccgggagaggacccacgcgtgacccgggccaagtacttcattcgggatgagtttctggtgagtaggacttgtagtcccttactcctcctcacgagtattctccagtcagtgctggatttggagactgagcggtccaggccttccattgtattgtactatgagttgatggctggtcctctggtggtggggtgaggggctcctggagagggttgcttgaccgagcccctctctctgcctacagagaatcagcactgctagtggagatgggcgccactactgctaccctcactttacctgcgccgtggacactgagaacatccgccgtgtcttcaacgactgccgtgacatcatccagcgcatgcatctccgccaatacgagctgctctaagaagggaacacccaaatttaattcagccttaagcacaattaattaagagtgaaacgtaattgtacaagcagttggtcacccaccatagggcatgatcaacaccgcaacctttcctttttcccccagtgattctgaaaaacccctcttcccttcagcttgcttagatgttccaaatttagtaagcttaaggcggcctacagaagaaaaagaaaaaaaaggccacaaaagttccctctcactttcagtaaataaaataaaagcagcaacagaaataaagaaataaatgaaattcaaaatgaaataaatattgtgttgtgcagcattaaaaaatcaataaaaattaaaaatgagcaaaatacggtgttgctctttgatttgcggcaagtgggtcccagggtccatgggtgggattggtctcggcacccactgggaggtggagaacaggtcccagggctaaaagtgggctgaggagttggcactatagactgggggaacctagtttttggcgcatcaaagcttccacccattatcctgcccccaggcagttgctagctgccctttgaccaattacttccccgaatgaggcaagcagcctacagagaaggctggggatgtgatgggtgggggagatgggagttatttgggaaacatttgaaagca

SEQ ID NO: 27570 - DNA, 1198 bp, Mus musculus
gctacgccttgaggaccagctcatgcttgctcctgccatgtgtttcattcaccgtgtgtttcattcgagctgggtcaaaggtccaggggaggataagtggccacaagtggggtattaacagggagacaatcacattttcttgcattatttagctgcctgcagagttaaacatttaactgagaggggccgtatcagagctttgctgcttatgtgggcctgagggagcctgtctggaccctcagattctatagggctagtctacggatggtggctgagggcagggcctgggtctacagaacagagggaccatgtcctgaggcactaatgcagagttcttgctccttacagggtgagaaaggctggatgaggatcgtgaccagcacctacaagggaggcacaggtgacagctacaaccttgccatcgagagtgcctgcacatttggggaccccattgtttaggtagatgtctctggaagcagcgctgtgaaccatgacagggaggggtgattaattactgacactggacatgtccagacagctataaacagtgcttgtggacatgaggaccagagtgtggactgcatcccgagaggagacggtaaaggatgaaacacaactgcactgggaccctccgccgtaccctccaggcctgcctcctccaccactgagccctccaggcctgcctcctcttctacagtgcttgccttcagccacccggagaagagagctatggtttaggacagctcaacttatcaccagatctggagccctggaatccatgggaggggggaacaagtccagactgcttaagaaatgagtaaaatatctggcttcccacgcttgtgtactttatttacacgagactagcacacacaacacacgcacactcccacacacacacatacaactcaacattactcttggaaacttaaagtaactgaccatctgggtcataggaaggaaacttacataaacccttcatgaagtgtcccagctgctagattcccactacccagaggcccactgggtccctgttcagaggtggcacacgcctgggatgtgacatgtagcacagagccacactgcgacacaggggggctgtctgccacagaagctacctttgagaagagttgcctgcttcttcccagcagaccctgcttccaggaggctggttgagcctcttcacagagcagctttc

SEQ ID NO: 27571 - DNA, 1455 bp, Mus musculus
aagaacattcgagtgggggctgccccttcattcctcaagaaactgtagagccacgggaaggaagagggcgagttgggggggggggggggttaaagaccagattccaaggtgtgtgtatgattgatttacagtgttgatataaaaagaaaaggggcgtgaccaagctaaccagtcagtcagcaagacaccctgccactcaattgtacgattctgagaacatcttctgtatacaaaataaaatttgtttctggatcaagccaattgctcaaggcatttggtatttggtaaataataactgaaaagagaaagacagcgaggacaagagatctgtccctgtggtttagttagcctgtaacacacacacacacacacacacacacacacacacacacacaccaaacgtggtcacaccttcactgttgctaacaataaatgcgttgcactttttaagggccgagaagcaatggagtgggtgatacataaactgaacgctgagattgaggaattggcagcatcagcaagaggaagcataaggacaccaatggcggcagcggcagcactggtggacaaatgacaatggaaattggtgtgcagcatcagggctccaggactctcaagctggcatcatattatttgttatttaaaagacacaattattttaggtagatctttttttttaatgaggtggggtaaggctgtgacttttgatctaaacaaaagatccagaacctctaaatcagagggatcatctgaggggaggatgtaagactgggagaggctgtgttcatgtgaacagttaacgggtttgtttgctgttgttgttgttgttgtttaagtacttagaagaaattggtgttgatctggagtctcttaaagctccaggtactggaacactacctggctgcggaccaaccagagcagagcccagccgccctcctgtccacagctgcccgctgctgtgaaccagaactgcctgcatgagggactcactctacaaagagaacctgtaaaatttaaatgacattaatttatataaaataacctgccctgctggaaaccagtgtttggatttggtacttttaaatgatatttttggagtgaaaattaacagtaaggtaatatatgactccagcaaaaatagtattttattgtattaacgggtactataataatttgccaaattttgtgacttagtaaaggcattcccttccttgaatttgtactttgtgatttcgcatgctgtactgtgggctggttatgttaaccgaaaaaataaagtcattacctgagtgtctcatcactcttaacagaacactgagacagaagagcagctcttcccatctctgagcacttcacattgacttataaatgtcatgggtttgtagttgctaagacatggtatgtcaggttatcggaatatgagtacttcttgaggcagttaagaccacaaaacag

SEQ ID NO: 27572 - DNA, 2402 bp, Mus musculus
aatgtagacaaaatgctgagtgtatttaatatggtgaagatttttgaatatttctagagtcttcacaatcaaacaatccatactgcaaagaaatttaggaatataatatggtgaaaccttttcagatttcccaaatcttcatcattatgaaagagaaacccatgaatgcattcaatatggggaagcctttaaacatttctaattcttcatcatcatgaaaataatcatacaaaggagatcaagggaatacaaggcatgattcttattgtcttgcttgagttacagtcctgacaatctttggagataaatatcaatgtggaaagtgtaagctggattaaaccctttcctccccaactgcttcttggtcatgatgtttatgcaggaatagaaactatgactaagacatattggtatgaggagtggggtattcctgtgaaaacctgaccatgttttgggaggactgtggaaggactttggaactttgggctagaagatccattctgtgttaagaactctgtgggatgttgtgtaggagtttggaagataatgttgagaacagtgcagaagatgaaggcctcgcttgtgaaatttcacaggaaaaattaaagactcttttgaggtccattgctattttggattgtgaagattctgtggttctggttagctaggtctgaagaatcagctgtgatgaacaagataccagaatttctagagtgaaaactttgcattactgggactattgatgctggttagctggagctgagaaattagcagtgattaagaagaaaccaacatcattgaggaggcatcatctgggaagtgttttctgagagcacagaggcagtgttagatagtcaaggttgtaccttgtgctgtgcctggacttggtaatgtgttacagttacccacatggtactggttttgaaagcatgaagggataatgcagagcagctgatgccctgccatttgagaggccatggaaggccattggtgaaggtgcaaactcagatgaaattgatgtcccagtactgaagagatcatgtagtgttttggagttactaggtccatgaatgaccaagaacagcagcaacaataaagtacaggcttctggagcctagaggacaatctgtgtgctacaaaggacagggctggagaagtgacccaagcccttggaggagcccaaaagatcgtgagtttgatcccagacattggacagttggagtttaatttttgcttttgattgtgactgtacactaatatttttccctcttgaagggagaaattattttagtggattctatagttaatagacttttaattgtaaaaggctttggattttaaaggatattggatattttaaaagatttaacttttactatgtaaagattgtggggctttcaaagttgcttagaacttagggatgaataagaaactaagggttgaggcttagttgtgatgtgtttgtgtgtcaagttgacaaggggtcaattgtagtggctagttttgtgtcaagttgacacaagctggagttataacagagaaaggagcttcagttggggaaatgtctccatgagatccagctgtaagacattttctcattttgtgatcaaggggaaaggccccttgtgggtgggaccatctctctgggctggtagtcttgggttctctaagagagcagtctgagcaagacaggggaagcaagccagtaaagaaacatccctccatgacctctgcatcggctcctgcttcttgacctgcttgagttccagtcctgacttccttggtgatgaacagcaagcagtatgaaagtataagccgaataaacccttctccctccccccaacttgcttcttggtcatgatgtttgtgcaggaatagaaaccctgaataagacaaggggtataaagttggattgtaaaaaaagagattatacaataaagaaatgaagaaataaaaatattttaagaaaacgatgggcaggcagaaacattccttccaaattatagcttcattttcacaccaatcaggatttagggataggggcttatgtagtttacagtgtcaactgttatagaatatgggtgttatagtttaaccaagcatatggatttgttctttggtggtaaagtacaggtcttatgttttgaggagcacaatgaaaagcagaaagcattgtacagacagtcattatgttttcaagaagaatatatgagtaaagtgaggttggatctccacaagacaccatgcctggaaacttgaacttagtttcagcgtatgagtaaatgcagggtaataacaaaaaggcaatacttagggcctggtgtttggtttggtttggtttttctgcttattcccaatcgtgtattggttctcatgctactcctgttaaattgttcccaaat

SEQ ID NO: 27573 - DNA, 1181 bp, Mus musculus
taaaccctttgaaggaagcagtggtcttgaatataataatcgaacacaaacagctgaaaaaccctatgaatgtaaccaatgtggtaaagtctttgcaggaaggagtgacctttaaagagaaaagaccatacaggagagaaactctatgaaagtatctgatgttgtaaagcctttgcagcaagcattgatctccaagtacataaatgaacacataccagagaggaaccttttaaatgtaaccaaagtggtaaagcttttttgaagggtaaaaggctggaaaacaattttccaagcaaatggtctgaagaaacaagctggagtagccattctaatatcaaataatatcaacttccaacctaaagttatcaaaaaagacaaggaggggcacttcatacacaccaaaggtaaaatcttcaaagatgaactctcaattctgaatatctatgctccaaatgcaagagcatccacatctatgaaagaaactatagtaatggtcaaagcacatattgcacctcacacaataatagtgggagacttcaacacacagctctcatcaaggaacagatcctggatgaaactaaacagggacacattgaaactaacagaagttatgaaaaaaatgaatttaacagatgtctacagaacattttatcctaaaacaaaaggatataccttctcagcacctcatggtaccttctccaaaatcgaccatataattgttcccaaaacaggcctcagcagatacaaaaatattgaaattatcccacgcatcccatcagatcaccacggactaagggtgatctttaataacaacagaaataacagaaagccaatattcacgtggaagctgaagaacactctactcaaggaaaaaatatagaaagaaattgaagactttttagagttaaatgaaaatgaagccacaacatacccaaacttttgggacacaatgaaagcagtccttagaggaatactcataactctgggtgcctccaaaaagaaactatagagagcacatatgaatgaattcaatatggagaagtctttgcacacttttatagtcatcatcatcatgaaagtaatcatatgcaaagaaagtctatgcgtgtaaacaaagtgatagagcctttcttgtatgaggtcctctctgatcccatacaactgaaactcggggaaagcaa

SEQ ID NO: 27574 - DNA, 1187 bp, Mus musculus
tcagatttcccaaatcttcatcattatgaatgggaaacccataaatgcattcaatatggggaagcctttaaacatttctaattctttataatcctgaaaataatcatacaaagttcaaggggatacaagaaatgtttcttattgtcttgcttgagttacagtcctgacatcctttggtatgaatatcaatgtggaaattgtgagtggattccctttcctccccaactgcttcttggtcataatgtttatgcaggaatagaaaccctgactaagacaaattggtatcaggagtggggtattcctgtgacaacctgaccatgttttgggaggactgtggaaggactttggaactttgggttagaagatccattctgtgttaagaacgctgtgggatgttgtgtaggagcttggaagataatgttgagaaccgtgcagaagatggaagcctggcttgtgaaatttcagagggaaaattaaagcctcttttcagggccattgttactttgtgaagattctgtggttctggttaactggggctgaagaatcagctgtgattaacaagataatagaatttctagagtgaaaactttgcattattgggactgttgatgctggttagctggagctaagaaattagcagtgattaagaagaaaccagcatcattgaagtggcatcatctgtgaagtgttttttgagagcacagaggaagtgttctagagataatcaaggtggtaccttgtgctgtggctggacttggtagtgtgtaagtcttaacctcgtggtactggttttgaaggcatgaagggataatgcagagcagctaaggcccagcactttgagaggccatggaaggcaactggtgaaggtgcagactcaggtgaaattgatggcccagtactgaagagatcatgcagtgtgttggagttgacaggtccatgattgaccacgaagaacagcagcagcagtaaagtacatgcatctggagcctagaggacaagtggtgtgctacaaaggacagggttggaaaagtgacccaagcccttggttcttttggagttgtccaaaagatcgtgagttggatccgagacattggacagttggagtttaatttttacttttgattgtgactgtgccctgatgtttttccctcttgaaggaaacaagtattttagtggattccattgta

SEQ ID NO: 27575 - DNA, 1157 bp, Mus musculus
tgggcagccttgtctagtccctgattttagtgggattgcttccagcttctcactattttctttgttgttggatactggtttgctgtagattgcttttatcatgtttaggtatggacttgaattcctgatctttccaagacttttatcatgaatgggtgttggattttgtcaaatgctttctaagcatctaatgagatgatcatgtggtttttgtctttgagtttgtttatatactggattacgttgatggatttctgtgacttgaaccatccctgcatccctggaataaaacctacttggtcaaaatggataatcgttttgatgtgttcttggattcggttagggagaactttattgaggatttttgcatcgatattcataagggaaattggtctgaaaatctctatctttgttgagtctttttgtggtttaggtatcagagtaattgtggcttcatagaatgagttgggtagagtaccttctgtttctatattgtggaatagtttgtgaagaactgggattagatcttctttgaaggtctgatagaactctgctctaaactcatctggtcctggacattttttttttttttggttgggagaccattaatgacttcttctatttctttagggtatatatgactgtttagatcattaacctgatcttgatttaactttggtacctggtatctgtctagaaacttgtccatttcatccaggttctccagttttgttgagtatagacttttgtagaaggatctgatggtgttttggatttcttcaggatctgttgttatgtctcccttttcatttctgattttgttaattaggatgcttttcctttgccctctagtgagtctggctaagggtttatctatcttgctgatttactcaaagaaccagctcctccgagcctcagcagcagcagtcgccatcttgttccgggaaccgccgaacttaggaaattagtcaggacaggtgagagggtgcgccagagaaccggacagcttctggggcaggcggaagcacagagccgctgaggcagcaccctttgcgggccgtagacagccggccaccctccggaccagaggacaggtgtctgcctggcttgggaggcggcctcagcctcagcagcagcagtcgccatcttgttccggg

SEQ ID NO: 27576 - DNA, 1134 bp, Mus musculus
ggagacttcaacacacagctctcatcaaggaacagatcctggatgaaactaaacagagacacattgaaactaacagaagttatgaaaaaaatgaatttaacagatgtctacagaacattttatcctaaaacaaaaggatataccttctcagcacctcatggtaccttctccaaaatcgaccaagagaaccaaagaggattgccatgctagtaaatgaagtggatgcaggcttgagagctgggaatggcagaataccagccatgtaagagccagggaagagagccccagtggcccctcctgtgattgattctggggtagcaaaaatggcatagagactttagtaagtaataattcaggattatcacagaaaagaattagcaatgtggaagtttgagagtgtcccaaccaattagctgatttaaaatagtaaataaagctgtgtatctttatttgaggatctaaagcatttgcatgctcagtgaggaacttgcacaggaagcatcctatagtagatcagagtaaccaaccaactctgcagaatgtacctcacctgtaggcttgaactcaatattaaaaattaattgtagattctcaagtggaaaaccatgtcatgatgtgagataaagagatgtggaaaattggattcttagcagagatgctggtttactggagacatgaggtgtgtcaccaagctgtgcaggttcacaactagaacaaaaggtgagctgaactggtatgcataattcttggttccatgtcataagctgggatgtagcaaaatccccctagctgatccagacatcctgcctttgtctcctgcctagccattggctgttggcactttttttacccatttacaatcagcttggggcagggaatctcagtgtcccaatatgggcttatcatgcaatttgaacaatttaacaggagtagcatgagaaccaatacacaattgggaataagcagaaaaaccaaaccaaaacaaacaccaggccctaagtattgccttttttttgttattaccctgcatttactcatatggtgactctaagttcaagtttccaggcatggggtcttgtggaaatccaacctcactttactcatattctcttcttgaaaacataatgactgtca

SEQ ID NO: 27577 - DNA, 1176 bp, Mus musculus
accatgtgtattgagatttgactccctcttatggagtgtctgaagacagctacagtgtacttacatataataattaaataaatcttttatttaaaaagtatttgaacatttctggatgatcacttgctagatattagtttgtcccattatggctctggacaacccactttcaataaaataagagaataatgtacagaaggtattagagttacaagggccagctttgaggaaagctacaagcaggaaatggaatttactgaaaagaagctatgtgtgctgcaggtgacagagctggagaagtgagagtatggaaaaccatgtggctaaggcaatgtcatcataatctcaagatgctgaacaagaagctataagttttgttgttttcactgataaattttggtgtctttggtcagttcatttttcagatgatttcattatttctgctaaggattgtttcttttgtgacattggatgtgcaaaagagaacaatctctcttaagcatatggtacagtgtggacagataaaaagtagttttcatttttgaaaaaacatgtggtagttaaatgataatggctcccatagattaaaagatttttttaattattatatgtaaatactctgtagctgtcttcagacactccataagggcgagtcaaatctcagcacagatggttgtgagccaccatatggtttgtaggatttgaactcaggaccttcaggagagcagtcagtgctcttaaccactgagccacctttccattctccatatgttcgaatacttttttttttttttagtttatcggactgattatgaaggatttaacatcttctaaccatgcccactttgctagctacctcttgtctaggttcaaaatatgagctctcagctctacctgatgccatgtgtttatcctgccagtattgactctaaggctttggaacagtaagcctacaatgagccttcaattatattttcctttgtctaaggtgtttttcatgagatcaacagaaaagaaatatacagaggagttccatggaaaatcagaaatcagaatatcatcccttccaactatagaaaccaaggaggaatattttctatctctaggtcagtatgatctgtcccatacctttgatttaggagtaatcccaagattgacaattatctacttccctta

SEQ ID NO: 27578 - DNA, 1134 bp, Mus musculus
tcagacactccagaagaggacatcagatttcattatggatggttttgagccaccatgtagttgctgggatttgaactctggacccttcggaagagcagtcggcgctcttaacatctgagtcatcttgtcagccccatatttatctttttaaaaagccaggttttggtattaccttttttttttttttaaagatttacttactattatatctaagtagactgtagctgtcttcagacactccagaagagagcatcagatttcattatgaatggttgtgagccaccatgtggttgctgggatttgactcaggacctttggagagcagtccgtgctcttaaccactgagccatctctccagcccttggtattactttttaaatttcattttctttatgcataggtgccctgatcttttacttgtttctattctccaatgtttccagaaatcaatagtttcattcctatttgtaaagagattacatatctgtctgtttacagcaacatctgtagttcaggctttccttattccatttagttaatacttgctttgagcatttgagcctaaaaactttcttgctctttctgagggtagaagactgatggctactgtgattatcacctgtagcctaacagctgaggattaagcaatgtggcctttgctctatctcagaaggaactgctgggctctaacttttagcctgcaagtcagaagtcacaggaagaaaatgggatgctcaaagaagtggttatggagtttattactaagttgtcacaagttacctatgaaagctatctaagaggaaaagcgaaaagatcctaagtggggaagggcaaaaaacttctcctttctcttttctttatctctttgtcctcattacttatacatccttcagtatacgtgatcacatgttaccaagttcatcacaagttctcataaaaatcaaatcataaactgaaatagaagtttataacagagaatggttacatgcatatccattaggagtaattactaatggctaagtatccatcacctgtatcagatcctcaggttccctgaaggtttaaaaccataactaagttattagtaaagttttgcagagataaacacagtccatattttatcttctagcctag

SEQ ID NO: 27579 - DNA, 1173 bp, Mus musculus
agattccctgccccaagctgattataactgggaaactaaagtgccagcagccaatggctagggaggagacacaggcaggatttttggattcatgacaaggggaacaaagaggatctccatgccagtaaaggaattggatgctggcttgagaggtgggaaagacagaataccagccacataagagctgtggaagtgtagtcccagtgttccctcttctgattggttctggggaagcagagataggctatagattttagtaattcaggagtgccatggaggagccattagcaatgtggatcattgggagtgtcccatctaatgagctgatttggcatattaaattaagctgtttgtctttcatttcagactccaaagcatttgcaagctgagctaggaacttacacaggtggcatcctatagtagagcagagtaacaactgagtctacagaaggcatcacacctataggctgaaacgcagtattcaaaacttactggagattctcgaatgaaaaaccaatgctaagatgtgaaattaagggatggggagaattggattcttagtggagttgctggttttgctgagccatctagttcctcaccaagttgtgcaagttcacaactaaaacaaaagttgagctgaattggtttgcataattcttgggttcttggaatgtgctgggactcaccaaaatcctccaagttgatccggacatccttgttggtctggatttaccatgggcccttctcaaagaattctgtctgtctcaaatagtttgagcttggaggtgcagtacagacagacaggtagctcagaaagaagagacagaggtagatagtagaagctgcccagagctataatcataaaaaagaatagaaatctatgagatttgtttaattgcttttagggataaatgagacagaagtaattgtttaggagtgtttgaggcggtctctgtggagggccctaaggtccccagaggactccccacaaggctggcacattagcacacccagttccttgagatcactggtgagtggaacgcaacatcaattccaaaaaatccagagggtcttgtgctagcaaaaacagggtcaaagggcataggcaggccctagcacacccagaattttgggatcactgaaaccaatttatgcagaagagtacatgggcag

SEQ ID NO: 27580 - DNA, 1110 bp, Mus musculus
agaagtgagaaaccctatgtctccaagctgtgtggtattgctttcacttgtcagtcatattcaaagacacaaaagaaaacaaaatgtagacaaaaggctgagtgtatttaatatggtgaaactttttgaatatttctagagtcttcacaatgaaacataccatactgaaaagaaatttaggaatataatatggtgaagccttttttagatttcccaaatcttcatcattatgaaagagaaaccccatgaatgcattcaatatggggaagcctttaaacatttcaaattcttcatcatcatgaaaataatcatacaaaggagatcaaggggatacaaggcatgtttcttattgtcttgcttgagttacagtcctgacatcctttgctgataaatatcaatgtggaaagtgtgagctggattaaaccctttcctccccaactgcttcttggtcatgatgtttatgcaggcatagaaaccctgactaagacaaattggtatcaggggtggggtatttttgtgacaacctcaccattattttgggaggacggtagaaggactttggaactttgggctagaagatccattctttgttaagaactctgtgggatgttgtgtaggagtttgaaagataatgttgagaaccgtgcagaagatggaggcctgacctgtgaaatttcagaggtaaaattaaagcctcttttttgggccattgttactttgtgaagattctgtggttctggttagctggggctgaagaatcagctgtgattaacaagataccagaactactagagtgaaaactttgcattactgggactattgatgctggttcgctggagctaagaaattagcagtgattaagaagaaaccagcatcattgaagtggcatcatctgtgaagtgttttctgagagcacagaggaagataatcaaggttctagagataatcaaggttgtaccttgcgctgtggctggacttggtagtgtgtaagacttacccacgtggtactggttttgaaggcatgaagggataatgcagagcagctaaggcccagcactgtgagaagccatggaaggccactggtgaaggtgcagactcaggtgaaattga

SEQ ID NO: 27581 - DNA, 1134 bp, Mus musculus
gttttggagttgccaggtccatgaatgaccacgaagaacagcagcaacagtaaagtacaggcatctggagcctagaggacgagctgtgtgctaaaaaggacagggttggagaagtgactcaagcccttggagttgtccaaaagatcgtgagttggatcccagacattggacagttggagtttaatttttacttttgattttgactgtgccctgatatttttccctcttgaaggaaaaaagtattttagtggattccatagttaagagacttttaattgtaaaaggctttggattttaaaggatattggatattttaaaaaggatttaacttttaatatgtaaagtctgtggggctttcaaagttatatatatcttggggatgaataagacactagtgatgtgtttgtgtgtcaggttgacaaggtgtaaattgtactggctagttttgtgtcaacttgacacaaactgaagttatcacagagaaaggagcttcagttgggaaatgcctccatgagatccagctttaagacattttctcaatttgtgatgaaggggaaaggccccttgtgggtgggacatctctctgcactggtagtcttgggttctacaaaagagcagtctgagcaagccagggaaagcaagccagtaaagaaacatcccgctgtggcctctgcatcagatcctgcttcttgacctgcttgagttccagtcccgacttccttggtgatgagcagtaagcagtaggaaagtgtaagccgaataaaccctttcctccccaacttgcttcttggtcatgatgtttgtgcaggaatagaaaccatgaataagacaaggggtataaggtatggattgtaaaaagagattagacaataaaaaaatgaagaagtaaaattatttattttaaaaaggagggtcagacagaaacattccttccaaattatagcttcattttcacaccaatcaggatttagggataggggcttatgtagtttacagtgtcaactgttatataatatgggtgttatggtttaaccaatcatatggatttgttctttggtggtaaagtacaggtcttatgttttgaggggcacaatgaaaagcagaaagcattgttagaaacagtcattatgtttt

SEQ ID NO: 27582 - DNA, 1437 bp, Mus musculus
gagtgagaggctaatgaaggatggtttgaaggttggttcacaaaatccccatggatgactactttactatctgccctcattggccccttattaattttgcttcttttacttacaataggcccctgcataattaacaagataatgacttttgtcagagagcagatcagtgctatacagggtctttttttttttttttttggtttcggtttttcgagacagggtttctctctgtagtcctggctgtcctggacctcactctgtagaccaggctggccttgaactcagaaatctgcctgcctctgcttcccaagtgctgggattaaaggtttgagccatcattgccggcaatgtacaagttcttatgctgagccaacaatatcaaaaagtagaacaggctgatacactgagtcagaggtttaatttttcttgttctatgattagaactatttactagaaggagtggggaatgtaagactccaactcaattgtttcttagacccctagaaacaaagcccagcagggaggagttctttgtttttttgcctttagcctaagagaatgatgaccactgggtgacccaccaaggcacctgacccatagtgtaagggacctagaatgtttgccaaaggttaatctgtaacctttacgtgagagatgagctgtaattcaccatctccattcttaagatgtttactcaccttccccattctttgtggtcttatcctcccctcactttgtggtttattctttaaaaccctcgactgcaactgctgggggtcgatttcctctgcccctgtgtgagttacgagctcggccttagcatgctgatatccgaataaacctcacgcgacattgcatcaagaactttttctttagagttactggttatagaagtttcctttactttttgttaaagcctttttggttcttaccagttaatttgaatctcacttgatagcacctaacaaaggcttatgttctcctgtggtgagtttaaggtgaggtctttagccaattaacatctcccggaagcttttgaaaataaaattttgaagcaaatttgtaccacaattttctagtataactaaaaaccctaaatattaaaaatattgcctctgaatcttatggaccaacaattattctctagaactttaaacttccctttagaggcattggctaatagagtacttttcacttacgaaacaatatatactgaaagatttaaattctttgtttcttgtattgaagcagacaataaaattttcttacatattgtaaagctatgttagccatatctacaggcaaaattatctagtgatcaccagttcattaaaagcaaaactctttgaatttaagcattattttaaacatctgaatagatttgcaataaagctaaaaagaaatttttttgaacacaggggaaactttcttaggctt

SEQ ID NO: 27583 - DNA, 1221 bp, Mus musculus
cgcaagaccctcgtctctctctaccccccatttggttcttaggaggaggtcccctcgagaccctctaataactggacctgttggacgggtcaagtggcgtctaacgtggggcacaaggtacgaccacccttcggacagcagattaaagaggtaccgcgcagacagtgagacagtgggacagtccaccgccacttcgctcaagtgtcgaggacggtcgtctgagaggtaagcctaggcattcagttgttgtcccattaactatggggaaggttctgtccaaagaggcagtctttattcaagagatgaagtgttctcttaaggagagagggataagagttaaaaaaaaaggaatttaataaaatatttttgttttgtggacgagagatgtccatggctggtattgaatggttctgaaatacaccctttaacttagaataaagtaggcaaagatattgatgcgttgataaaacaaggagaagatgtccccaagtcctttttagttattggggaatcatcagagacctccttgagcaggcagaaaagggcggaaaaggtgctagcctcctagcccttactgaagattttttagaaaactcccgatcaccatcgccatctcacaaaagcgaaactaagccaccggtgcacagtatctctattagaaggtttagcaggagaaggctacttaatacccaatgaatgaaataaagttgttcagtctgtcctcactagaggccaatatttaacttggaagtcagagtttagggctgccctgagaagtaaaaccaagagtttaggtataaatggtatgatcaagctttgaaatgaggtagatgtgttttctcaacaagtttctaagtctattaacctggccattagggctgctctacaagtaaatataggagaaaaaacttgatatagatgcaaccaacatagacatttttgctagagaatgccctacacaaacacagaacaccctagtaactgcggtccagggaaacggccagagggcccccccttacaaggcccgtctcccctaataacaactgcagacaaccccctaacccccacgggagattgtgcagggttccaaccgagagcacagcgagctcgggagtgtggccttcttcgccccgggccccttacggcctcagcccatgctgggtgagcccgaggagcccgggagcagcctcggtccctaccctacaaatgccaggagccttt

SEQ ID NO: 27584 - DNA, 1180 bp, Mus musculus
agcgcctgggcaataaccaccttgtctctcctagtttgggccttaagcttacagaccaaccagagaagcaacactaatccacagcaaagtgtatctccaaataatcccactcccacccattctttaaagaaggaaaatgctgaggagatccaattgggtaatcctttggtcagggacaggtccaagcgtgtggagttgacctgaatgatggcaagtctcaattcctgaagggtctgttcaaattcagccatccaattctgtaacatatactgagaaagtctttttgacaaattagctgccctagtaaatttctcatactgaatggaagtaacacacaatctcggaaacttttgttcacatcccagctgagctatttgccataatacatctagtttttcctggacaagatctatgcgttgattaaccagcatgagacctccctgtatcttgaccttagctgaggcctgtttatccatggctgtggtcaccgaggctgacaatgtgttaatggtgtcagtcgtctggacctgtccagacagagccaaggctgtctgaacaaggccaaacccagttccttgttagtggtaaaaagtcgggggaatacttgagcattatacatcaccggcattgggagtggaaatgttgacattatcccccaacgctgctctctcttcattattgtcgccctggacatcaccaagacgagggacatcagtattcccttggtcagtctggatttttcgggtgagtctttctggtatccaaaatgggttgtcttcattctgtggaaaaacacaaacagctcccctggatcttatcaaaataggatccgggccataccatttattatcaaggacatttttccatttaaccatctcattgggcctatctggctctgaacaatgacgttcagccgcagtatggccatgagcatcaagatttaaaaaattgagtgtaaagagtgccatagacagacactcttggtactcggggtagagcctcgactccccctttctgtttttttttttttaaagatttatttattattatatgtaagtacactgtagctgtcttcagacacaccagaagagggagtcagatcttgttacggatggttgtgagccaccatgtggttgctgggatttgaactctggaccttcggaagagcagtcgggtgctc

SEQ ID NO: 27585 - DNA, 1215 bp, Mus musculus
agcagtggtctccaatgccataaaagatcacatacaggagagacaccatatgaatgtaaccaaggtggtaaaccctttgaaggaagcagtggtcttgaatataataatcgaacacaaacagctgaaaaaccctatgaatgtaaccaatgtggtaaagtctttgcaggaaggagtgacctttaaagagaaaagaccgtacaggagagaaactctatgaaagtatctgatgttataaagcctttgcagcaagcattgatctccaagtacataaatgaacacataccagagaggaaccttttaaatgtaaccaaagtggtaaagcttttttgaagggtaaaaggctggaaaacaattttccaagcaaatggtctgaagaaacaagctggagtagacattctaatatcaaataatatcaacttccaacctaaagttatcaaaaaagacaaggaggggcacttcatacacaccaaaggtaaaatcttcaaagatgaactctcaattctgaatatctatgctccaaatgcaagagcatccacatctatgaaagaaagtacagtaaaggtcaaagcacatattgcacctcacacaataatagtgggagacttcaacacacagctctcctcaaggaacagatcctggatgaaactaaacagggacacattgaaactaacagaagttatgaaaaaaatgaatttaacagatgtctacagaacattttatcctaaaacaaaaggatataccttctcagcacctcatggtaccttctccaaaatcgaccaagagaaccaaagaggattgccatgctagtaaatgaagtggatgcaggcttgagagctgggaatggcagaataccagccatgtaagagccagggaagagagccccagtggcccctcctgtgattgattctggggtagcaaaaatggcatagagactttagtaagtaataattcaggattatcacagaaaagaattagcaatgtggaagtttgagagtgtcccaaccaattagctgatttaaaatagtaaataaagctgtgtatctttatttgaggatctaaagcatttgcatgctcagtgaggaacttgcacaagaagcatcctatagtagatcagagtaaccaaccaactctgcagaatgtacctcacctgtaggcttgaacttaatattaaaaattaattgtagattctcaagtggaaaaccatgtcatgatgtg

SEQ ID NO: 27586 - DNA, 1842 bp, Mus musculus
ggggtattcctgtgacaacctgaccatgttttgggaggactgtggaaggactttggaactttgggctagaagatccattctgtgttaagaactctgtgggatgttgtgtaggaagataatgttgagaaccgtgcagaagatggaggcctggcttgtgaaatttcagagggaaaattaaagcctcttttcagggccattgttactttgtgaagattctgtggttctggttaactggggctgaagaatcagctgtgattaacaagataatagaatttctagagtgaaaactttgcattactgggactgttgatgctggttagctggagctaagaaattagcagtgattaagaagaaaccagcatcattgaagtggcatcatctgtgaagtgttttctgagagcacagaggaagtgttctagagataatcaaggtggtaccttgtgctgtggctggacttggtagtgtgtaagtcttaccctcgtggtactggttttgaaggcatgaagggataatgcagatcagctaaggcccagcactttgagaggccatggaaggccactggtgaaggtgcagactcaggtgaaattgatggcccagtactgaagagatcatgcagtgttttggagttgacaggtccatgaatgaccacgaagaacagcagcagcagtaaagtacatgcatctggagcctagaggacaagtggtgtgctacaaaggacagggttggaaaagtgacccaagcccttggatcttttggagttgtccaaaagatcgtgagttggatcccagacattggacagttggagtttaatttttacttttgattgtgactgtgccctgatgtttttccctcttgaaggaaacaagtattttagtggattccatagtaaagagacttttaattgtaaaaggctttggattttaaaggatattggatattttaaaagcattgaacttttaatatgtaaagtctgtggggctttcaaagttgtgtatatcttgggcatgaataagaaactaagagttgagcattactagtgatgtgtttgcgtgtcaagttgacaaggtgtcaattatactggctaattttgtgtcaacttgacacaagctgaagttatcacagaaaaaggagcttcacttgggaaatgcctccatgagatccagatgtaagacattttctcaattagtgatcaaggggaaaggccccttgtgggtgggaccatctctctgcactggtagtcttgggttctctaagagagcagtctgagcaagccgggtgaagcaagccagtaaagaaacatccctctatggcctctgcatcagttcctgcttcttgacctgcttgagttccagtcccaacttccttggtgatgaacagtaagcagtatgaaagtgtaagccaaataaaccctttcctccccaacttgcttcttggtcatgatgtttgtgcaggaatagaaaccatgaataaaacaaggggtataaggtatggattgtaaaaaaaagattagacaataaagaaatgaagaaataaaattaattttttttttgaaaaaggaggatcagacagaaacattccttccaaattatagcttcattttcacaccaatcaggatttagggataggggcttatgtagtttacagtgtcaactgttatataatatgactgttatagcttaactaatcatatggatttgttctttggtggtaaagtacaggtcttatgttttgaggggcacaatgaaaagcagaaagcattgttagagacagtcattatgttttaaaaagaaaatatgagtaaagtgaggttggatctccacaatacctaatccttggaaacga

SEQ ID NO: 27587 - DNA, 1722 bp, Mus musculus
aaattattgtttgcaaggcattccattagttcaaagaaagagatataatggcttaacagatatgatactgtttaaatcaagccatgtagagctatgctgtacaagtgcgagtgtcttcagtcttatatcgcttagatattgcaaaaggaacacacagtgattaggtgacaagtatatgtctaaaacctagtaatgagcaaataatccatagtatatctgagctcaatgatatacttgtaataacattgctaaatttagtgagatgaacagttcataagattcaaaaatggttttgtggaaaaaccttaatctctgtaccacatttctgtgacgaaaaaaagtcagctgtgaatgtaatgtggaattttcacttgttattcttcttttgatgtggatgtcataggttaagatggatacaagtcttgtgatcattggggcattgaaagaagccacatacctttcacttttccagaacaattagaggatatgcagtataacatattttgagcaacatttaaatgtgctatataagtttataaataatttgcttcgaacattgctggggacatttaccaactcaaactgctgaaaatagtaatgagaattaaagcagtagaaaattttttttcttttgcatttgttcatattccaaatgtagtattactctcatgataacaaaatttgtgaaagcaatcattgtgcaaacactgggagttcttcctgttttttttcaaatatgtgagtaaccttttatagaaaaagtatgttataaatgtgagccacataatcagtactgtttccatttcatatatcctcgaagatgtaaaacaattcataatttagtaaaactcctttgaatataaacaaagtaatattacgttaacattagattgctctgttcaatgaaaccaaaatttaaaagaattcatacagataaaaagactcatcagtataatcagtgtaagaaagatttcacgtgtgcaaattttatttgcaggcatgaaagaagttgttctgcagagcaaccctctgagtttattcaatgtggtaaagcctttgcatatgagagtggtagacaaaggcatcaaattaaacatactggagagaaacaccatgactgtaaccaatgtggtaaggactttagaacatggaatgtcctgcaaatacataagcgaacacatacaggagagaaaccctatgactgtaaacaatgtggtaaagcctttgcaagaagctgtcatctccgaatacataatcgaacacatgcaggagagaaacagtatgaatgtaaccaatgtggtaaagcttttaaaagaaggagtgacctccaaatacataagcgaacacatacaggagagaaaccctatgaatgtaaacaatgtggaaaagcctttgtaagcagtggtgaactccaaaaacataaacgaacacatacaggagagaaaccctatgaatgtaaacaatgtggtaaagccttttcacaaagcagtcatctccgaatacataagcgaacacatacaggagagaaaccctatgaatgtaaccaatgtggaaaagcctttgcaagaagtggtgacctccaaaaacataagcgaacacatacaggagagaaaccctatgaatgtaaacaatgtggtaaagcctttgcacatagcagtcatctccacatacatgagcgaagacatacaggagacaaaccctatgaatgtaaacaatgtggta

SEQ ID NO: 27588 - DNA, 1179 bp, Mus musculus
aggactgtggaaggactttggaactttgggctagaagattcattctgtgttaagaatgctgtgggatgttgtgtaggagcttggaagataatgttgagaaccgtgcagaagatggaggcctggcttgtgaaatttcagagggaaaattaaagcctcttttgagggccattgttactttgtgaagattctgtggttctggttaactggggctgaagaatcagctgtgattaacaagataatagaatttctagagtgaaaactttgcattactgggactgttgatgctggttagctggagctaagaaattagcagtgattaagaagaaaccagcatcattgaagtgacatcatctgtgaagtgttttctgagagcacagaggaagtgttctagagataatcaaggtggtaccttgtgctgtggctggacttggtagtgtgtaagtcttatcctcgtggtactggttttgaaggcatgaagggataattcagagcagctaaggcccagcactttgagaggccatggaaggccactggttaaggtgcagactcaggtgaaattgatggcccagtactgaagagatcatgcagtgttttggagttgacagctccatgattgaccacgaagaactgcagcagcagcaaagtacatgcatctggagcctagaggacaagttgtgtgctacaaaggacagggttggaaaagtgacccaagcccttggatcttttggagttgtccaaaagatcgtgagttggatcccagacattggacagttggagtttaatttttacttttgattgtgactgtgccctgatatttttccctcttgaaggaaacaagtattttagtggattccatagtaaagagacttttaattgtaaaaggctttggattttaaaggatattggatattttaaaagcattgaacttttaatatgtaaagtctgtggggctttcaaagttgtgtatatcttgggcatgaataagaaactaagagttgagcattactagtgatgtgtttgcgtgtcaagttgacaaggtgtcaattatactggctaattttgtgtcaacttgacacaagctgaagttatcacagagaaaggagcttcagttgagaaatgcctccatgagatccagatgtaagacattttctcaattagtgatcaaggggaaaggcccct

SEQ ID NO: 27589 - DNA, 2100 bp, Mus musculus
atttaatatggtgaagctttttggatatttctagagtcttcacaatgaaacaatccatactgccaaaaaatttaggaatataatatggtgaaaccttttcagattctcaaatattcatcattatgaaagagagaccctatgaatgcattaaatatggggaagcctttaaacattactaattcttcatcaccatgaaaataatcatacaaaggattcaagaggatacaggggtgtttcttactgtattgcttgagttacagtcctgacatcctttggtgagcaacagcaatttggaaagtgtaagctgaagaaaccctttcctcccctctgcttcttgctcatcatgtttgtgaaggaatagaaaccctgactaagacaaattggtatgaggagtgggtatttctgtgacaacctgaccatgttttgggaggactgtggaaggactttgggactttgggccaaaggacacattcagttttaagaactctgtgggatgttgtgtaggagcttggaagataatgttgagaacagtgcagaagatggaggcctggcttatgaaatttcagagggaaaattaaagactcttttcagggccattgctattttggattgtgttgattctgtggttctgactagctagggctgaagaatcagctgtgattaacaagataccagaactactagagtgaaaactttgcattactgggactattgatgctggttagctggagctaagaaattagcagtaattaagaagagaccagcatcattggggtgacatcttctcggaagtgtttgccgagagcacagaggctgtgttccagagatggccaaggtttaccttgtgctatggctggacttgtaacgtgtaagagttacccaggtggtactggttttgctggcatgaaggtatcagacagagcagctgaggctcagcactatgagaggccatggaaggccattggtgaaggtgcagcctcagatgcaattgatgacccaggactgtggtgtcatgcagtgtttggagaagccaggaccatgaatgaccaagaacagcagcagcagtaaagtataggcatctggagcctagaggacaagctgtgtgctacaaaggacagggctggagaagtgacccaagcccttggtggagcccagaagatcatgagttggatcccagacgttggacagttggaatttaatttttcttttgattgtgactgtgccctcatatttttccctttgaaggaagaaaatattttagtgaattccacagttaagagacttttaattgtaaaagagtttggattttaaaggatattgaatattttaaaaggattgaacttttaatatgtaaagactatgggactgtgatggtttgtatatccttggaccagggagtggcaccatctgaaggtgtggccttgttgcaataggtgtgacctggttggaatgggtgtgtcactgtgggtgtgggtataagatcctcaccctagttgcctggatgtcagtcttccactagcagtctttggatgaagacatagaactctcagctcctcctgtgacatgcctgcctatccatgctcccaccttgaaaatggactgaacctctgaacctgtaagccagccccaattaaatgttttttataagacttgccttggtcatggtatctgttcacagcagtaaaaccctaactaagacagaagttggtaccaggagtggggtaatgctgtgataggcctgaccatgcttttatttgaaagaatgtggattttggactttggatttgggaagcagtggaatgctttaaatggggcttaatgggtcatcctagtaggaatatggaagactttgttgctgggagtgatttgaactgtgttgacctggcccaagagatttcaaatgagaagaatttcaggatgtgacataaagactgtttttgtggtattttgatgaagaatgtggctactttttacccttgtctgaaatgtctgcctgaggctaaggtgaagcgacttggattaattgcattaattgcattgacataggaagtttcaaaaaagcccagcagagactctgttctctggttaagtctcacaaag

SEQ ID NO: 27590 - DNA, 1135 bp, Mus musculus
tgatctctgcattcaaggtcaatctacagagcaagaaccaggatagccaagcttaggcagtgaaggatttagaaaacataaagctagtgataatgtaatagtacaaggggatcatgttctagttcctgtaagcagcagatctcggcagcttcagccatgtggctctggctctagagttaagaatggaaggaactactgggaaaattgatgctggttagctggagctaaggaattagtggtgattaagaagagaccagcatcgttgaggtgaaatcttctggaaattgttttctgggagcacaaagaagctgtgttcctaagatacccaagagtgtacctcatgctgtggctggacttggtaatgtgtaagagtcactcaggtggtactgcttgtgaaggaatgaagggatcatggagagaagctgaggcttagcactgtgagaggccaaggaaggacactggagaaggtgaagcctcagctgtagttgatggcccaggactgaaggggtcatgcaaaggatttgaggcttggcaccctgaagatagcctatgagaggctattggtgaagcctagttggagtggaacaccccagtgtattgaagatgtcagtaccatgggatgatcaccaagaacagcagccgtagtggagtggatcaacctgagcatagagtgctacagagacagagatggagaagtgatgccagcccttaggaggagtccaaaagatcaagtggaatcccagacactgaaagaagaagctgtaacattgaaattgccttggagactcaaagatgttaaagatgccagagccatgggatacatgctgaggaaaactgctaacagggagtggaaccagcccaggagaaagcagtttgttgcagtcaacaaagatgaaaaaggagtggagatctgaagaccactttgacatcagccatggagatgcagagtttggagtttgcccagatggtttcctgccttaatttggggattacagttaattaagttgaatgaatctcagaagagaccttgaactttggacttttaacattgttgcaactgctatagactatgaggactttgaaagttggattaaatgcattttacattatgctatgtttaagtatggcccccata

SEQ ID NO: 27591 - DNA, 1187 bp, Mus musculus
gtctagaaagcacctggagggctcacagtcataatgatggaagtgttagcaggggctcttctttctctagccaatgactagactctggttttacttttttatcgcagtataaatgctggctcatcttggaatcaagtacagcattcaaagactacttcggggaaaaggcagagtggatcacaaggaccccacgtctcctcccagctgaggagcagcctccttgggatctcccagccagcagcagagaaactcatggaaaccgttcccacggaaggaatacaggagcaggctgcgctcagctccaggtatcaggctgcctctggaagcaagctgttccttgacttccactccatggagatcatgaagggtgctgatgaggacagtgccagtgacctgtcagactcagaaagagtggccatccccccttctccattcacgcctccagagctcaacctcagagccgaagagatagacccggtttccttcagtcttcacccagagctgagccaggcagagtccagacaaacctaccctgactttcttccacctccttttaactcctgggacctccgggatatggctgttgtcatgaactcagagtgcaggagtgaggccctgcctcgggccacgggattccttgggaagtacatagacagacttcttcaactagaatggctgcaagtccagactgtgcagtgtgagaaggcccgagccgccaaggccaagccccctggtgcctctggggtgctgaaaagccctggacggggtaagctccttaccagtgccctgtccaaacccttaccatccccagaagggatttcaaagtcaggcccttctcgaaagaaaggttttcgccacgaagaagcccacccatcctactatgcatttgagactttgcctaactctgtggatgggcctggccgacccaggctgtgttcccagaagcaagccccggaactgagaatggagaagaagaagaaatcaagtaagggccctaagcttcagccccgtgctccaccctgcgccgagggcaaccctgcaatggaagccaacggcaacatccgaatccccaggcagtctgcagtgcttctggacccagtggattcccatagggcctccaggacacaggcgcacgtggacctgaagaaaaagggaagtgcaaatacctgtggctatgccccttcatc

SEQ ID NO: 27592 - DNA, 1181 bp, Mus musculus
tgctggatgtgagtctgagctaaaactgtcacaactaaggaatgcaaagacagtgactcatgcattcgttcccagcacacttaaccgaacttggttcctgatctagggactagaattcatgttctgtgtttagacagccctagaagcccaaagcacgactttgtttacctctttgcccaggttgattgtccgagttgagcagtgttattggatctgggtgctattgagcagcacagtttgttacagtcacgttgagtgtagttatttgagcacagccttttccacgatccctaaaaacataccccacgtaggcaagtagacaacattgggcactgaactgtaaactcaataagttcaaggccaaaccagagtatccagcctcagtgacagagggtgcccttctgggaagttcttctcactcagggatggttaaaaggccctcccgtttaaaccagtcaaacccaggagaaatataaggaaaacagtatttcagacttaataacatcaatgagtggagaaaaaaaaaatcacaaaaggttctaagtattcactgatggctttggtcattttccaaatctcaaaggggctgaaggtttgtaaccaacttgaaggtcatagagtatgtggcctgtcacagccctttggaggagaagacagacgccatggtcttcacgcaaaaggaaggcccctgaacctgtgagctgttgggcttatgttctagaagacctaaggataacttcttaggtggcttataccttctttatctttctttccgttcatttccttaaacaagtagaaataggcactcctggaggtactgtgttcgaggtaacagcagtatttattgttttatttgtgtacgtgtagacggctgtagtaaagtgacctataaacacattcagcatgttcatttgctgttgtactgctgtgtgtttggttttatacgtagaaaaacaagtcacgtaagcttttgtgaacttggactgttccttcctggagacaaattaaacaaacgttacctggaactttctggtttgatgtgatttctctcgtttttaatgcagttgtcttcccaattggtctttattttctggttattctcgagagttgcggaggatgggtttccgtccccctgaccttcatgctgatgctgtccaggaacaagtgctgccatgcggatt

SEQ ID NO: 27593 - DNA, 1198 bp, Mus musculus
ctgttccgtctcagattggcactgacggctcacagtgtcctgagccttgctgagcagcaccaggtgtgtttgtagctagtgaggatgaagaagcactcccttccacaggcagaagagtaaagatgaggggcaggtacctgggagtgggcacattatgcttatgttgatgatgtctccattgtatatagactaatatgttctcttcactctatgatcaacccaggtttttttttttttttttttttttttaaagaggttagccaaggctcaaccaagaaaggctagccttacatgttcaggcgagctcccagcatgctcttttgtgctactcatggtcaccgagagaacatcagaggctgcctctgttccagccagacttttccccatctctgaaccccagattcttcagttcttctcactgaagtcaagagtaacgcacacagcccaaggcttgttacagagagcgtcactcgccacccgtgttccaggcaaagtgcgtcctcttcaagcctgcgcactcagcagctgccactggacacataaaccatctcactgaacacataaatgccagcgttgaggccctagcgggtgatgagtcctacctgttcccaagatttacatccagggtgtgaaagtcaataaaaactaattagatgtttacctcatttccttggtaatgacccttacatgccactaattgtcaaattgaatctatatgcagacgttacctctatcagggtcagggctaatttctgcatacacaaagaaacaacactgtggttatttatacccgtggccggccagcatgctttgcgcagatgctcgggagctcatttccataggaggaggagctgcggccgagtttcagtatgctgagcaggggaattaggtatgcaacaaccattcacaataatgagagttatgcacttaattccctggcatcgctttaaaatttgttttattaaataatgctgtaatgttatgttaagtaacattggcttcagcctcattaaataatctccttaactatcacactggaaaactagtatcattagacaaactctatttgtcacgggctgtgatgggctggctacagaggactctgtgttgaagattaatcaataaataaggtaccaccactcgagagtcacagaaggggcagaggagtgcaaggaagaaagcccccaaaatactaact

SEQ ID NO: 27594 - DNA, 1181 bp, Mus musculus
gggactgaatctgggtcctctgcaagaacagccagtgttggtacttcctgagcttcaccgagccatggctcctcacccccaaacattcttttataattcatcaagaagtgtcttttgcccatgtggcttgatgggacccaactctaaacccagtgattctggcagggaggaaggcttgggcaggtgtgaatgtgctcagtgcctgtcttgcgctgagcttctttgagaagctcagtcatgcatgccatgtgattagtaaatggcctggggtagcattcttgctcaacatgcgaccaagtgggaactgctgcagagactgaaatcaaaacatgaatggatgtccggaaccctcagaccccatggccgcctggccatggctctcctcacttgatctctgtaccagcctatttggctgactatgggactcatttaaaatgtctataggcttttacacccacatgccaatgtggcctctttctggtcagtggtatttaattaggttaggcttctgggaaagctagatttaaaaaaaaaaaattgtgacagagaacaaaaggactaagttggccatggctgtgtcctttcccctctgtctggaatatagacataattcttgttggtcaagtagctttttgtgacgatcagaatggtggagctggcctcgccacagattaccctcgaaccttagcaagggtaagacaggtacattggagacagcccagtgagtgactaagagcgacccccaaaggaaggggcagtaatagctgtgggtgccagctgtcaagcccctacctgagctgctgtctctggctcttccacccagcctgagacctggcctccgttcctttgtgctctggagtttcctgctggcacactggtgtgcagggagcgtgtagggcacattggaaaatatttgatatttaaaacaaacagctaccccttcagattctcatccagccaggaacaaagatacattgaatgtgtcagcacagggccttcacccaagcctccaggagtgtccttggcaccctgcaggagcagaggccatgctgggtgtcttaccttaacaaaccaattctccatcaacacatcagagtcttgacaaggtcagagtggtcatggggctgagggagacacagccctggacactatgctggcttgcttgctgctcctggcgtcgg

SEQ ID NO: 27595 - DNA, 1227 bp, Mus musculus
tgcttcaggatgcaatctgtgaggaaagccatctgtaagcatcacctgctgcatctccttcacctccatgtgctgagtcattagattcacagtgcagtttctggttcagagaaggctctgcctctgattggccctgcatccagactctgcatccaggcatgtaaatgtcccataggggtggagccagtctgtttgctaaggggagggcaggggtgcccgctggcctggaattctgccaggggtcattcttctgcaccatttcctctcaggcgtgcatgaaatggtgtttctcagcctggtgtttgttaacctgtggagcaatatttcctctggctccttctctccttctcccactttgtgaattacctgcctgtgactggcagcttctctcctgggggccagaaccaggaaggctttatacagtgaagacgggttcaagatcaggtggtcatctggcttcactcacaacacagctttggtacttcagtcatgcctaaggtttttatacagtcctggtgcattctcaaagatttgttcctcattgcttagcatgtaggcagcatgagagtgctatctatgtatgtggttggtgggatgtgtttttatttgacatggaatggagctgtctgaggccacaaaataaggattcctcagacagttccatctctacagaaaggatttgtgtgagttttcataaaaagccagagagtgaaaaacttaggccaggtaggatgtggttggtcactcactctgcatttggctcaagatgccacagagaacagacattgcatggctgaaagaagcgggtgtatgtgctaataaaactttcttagtggcagcaactggcactagattccccccttgagctgccgttcctccctctctgtgactgagaacaccaagcctctcatggctgcccactcatgttatcaaactgcttatctccccctctttcctgttttctgcatgtctggaggaagaggactctgggtgtcaatgctgcctgcacacctgctcctgagtcctccatacaagtttgtgagagacggggggagctgaggctggaatgctgccacccaataatgacactgcccatgtaaattcaaaagtggagccgaaggtcgtcgtggctgcctgtgagccacagctcaaccagtgccacccggcttcaggaagcagaggaggcaaggacccagaagcagcagggagggatacccagtgctgccc

SEQ ID NO: 27596 - DNA, 1120 bp, Mus musculus
ttgaatttggggaggtgggtatcttggctgtgcggcataggtaggtgggcttaagaaacccaaggctcactccctcatgaccaacttcctccagccaaactcgactttccaaaggttctacaactttccaaaacagcatcaccagtggaaccaagtgttcaaacacatgagcctgtgtgggtcagttcacattcaaactgtaacaaccagcagggcttcacaaaggcatggggtgctcgccaggactcttgggtcggtcatccccagttggagtcagtgtgcctgaaggaggctgtcagtgcagggaagactgctcagagcactgtgacctccacgtcctcacagcctccacacaaccttactggcctccatctcctcatcctgcccactgcgattacaagtgtaacccaccatgcccagcccagctctgacatttaaactcttatctgaagaggcttcagggcacccagcatgtgtaggccatatttcatgtgtcaagaagacactgtgtgacttcactgtgtggttggcagggctggagacttactggttttctggcatcaggaaaaagagaaccagatctgtgcccctttctcaagagagatgagaatgggaggcttatctgaggccagaggatgtttgagaacctaaaggaccctggccccttggggttttgcgtctgcagttttggggatgggttggcacttaggctagatgcaaaccaggcgttctggcagagctgctgactgccagcagagggtccccgggaagctctggcactaacactattgccacaggcatgctggaggtctgtgaatgcaattgccgatctctctgcagctctgtgactgcacactttgaaggcctggctccagggagtccgtgtgctttactgggaattatggaacactggaacggccccttccctgcctttggacttttaaacacacacacttactctaatgggtttggccttgcattcctgggagtccctactccccctactcacggggcctggctcccaccatctgtgatggcatcagagaggatcttggtgatggcagtccacgctgtgtcctgagtggacttctggtaacagccggatgaggaaaaagaccct

SEQ ID NO: 27597 - DNA, 1240 bp, Mus musculus
aattgtcgtgtgctattaataggaagctgagtaatcgcggtgattggcagaagatggctggctcatctgcttactgcatcctaatggctgctcgcaatgcagagtgtgcagggtggtggggcagcaggctgcgtgcaacaggccttgcagatgcagagaccctgtgctggaggccctaaaatccagcaccactcctgctcccgtctcataggcagaaactatggatgcaagtacacactgaggcctggctgtttgactcagagggagataggcatagtcggtgtgctctttaaaacgggccgtggttagcaaggcccgatgacctacagaatatggtgtaccgggcctgaattgctctgggaactttactttctgggagggcactggtcgagaagttgagaccagggagttctgactatccatcctgccatggtaggcagaaatggactgtgatcctgccaggagggacgactctgctctcccagagcccatgctatgggaaacagctgaagtgatggtgttagagcccagtgatgtagtcaagggattcgagatgagaagtctctgttcccaaactctaggtggtcgctaggacagacagaaatagcatctgtgatggtggatattggtcgacgtggcgggatggagaagcactgggagacagaccttcaggcatatgtgtgtgcggggttggttacctacaatgggttgaggtgggaaggcccaccctgagtgtgggacataccattttctggcctggagccctagactgaataacaagaggaagccaagcactgctttcttctccctctacctcctgactggagcagtgtggccagctgcctcacgttcggccacagtgccttcctgccagggtggacagtgctttaaaaccgagccaggatccagtctgccttgtttgttcctttcttccttcccttcctaccttccttcttttttcctttctttctttcttccttcctttcctcctttcttccttccttccttcctccctccttccctccctccctccttcccttcctttttttccttccttccttccttccttccttccttccttccttccttccttcctccttttcagacttgcatcagagcaacaggaggaaggaaggaaagccactaatacatcttaagtaaagattgtccccttccatttaaacaaaagaatatgaggaattgaagcctcctccatcttttgaaactacccgcctgtggc

SEQ ID NO: 27598 - DNA, 1151 bp, Mus musculus
aataaacagcggttttgggattggtcctcagactttgctggacttcagtacccctgagtgctctcggtgtcctggagaggcacagagatcttggtcaccaagccttcctgaggaacctccaggcacagggcccactcagtccacctaccccacccacccacaagcaggccagacaccagtgttcactcctctgtgaggaacagcagagctaagctgggtctcagcttggcaccaggtagatgtagctgccttcttcccatgtctgttgcccgggccctggagtcttaggataagagcaaaggcctcagacctttaacatcacctggccatcgtagctcagtcagggctcacatcccggccatttcttttatttttcctgtctgctgcttctttctgattttttaaaaatttagctgtgatctcttggtcacttttttcccccagaaaattctgtttctgggctgagcttttaaacactggagagggaaagtcagggttcatattccactgggtccctagtgactggatgtgggtgctgggctagcagctccccaagaactggctgtgggtgctgggctatcagggcttcaaggactagctgtctcaatacagccggcacatccttcctggcctttgtcctgcacttggagttactgagactcccggctgagagcccttgggcagggcaggggggagggtagctctgggtatctgtctaggtaggcaggcatttgctctgctttgcatggaggagtgaacaggggcaagccctttcccttcccattttgaattcttacaggtttatttcagagcctttttcattgttctaaaaacagcaatgatattctttgttctacggagataatgtggccgagattccattacatcgccataatgaatggccccctgggcctctcgggtcctttggacttaatggagaaaaagcagcaattcagactgcaggattcctgtatcgccagctgctgagccacacagacgaggagcctagggcaggtgtggttacactcacaccagagtgaccttggcccaccatggatggcaggctcttctgtcagactcagaacacagggaccattctcctctttggatgagatttgaatggccgttgagaccatggggggggggggggg

SEQ ID NO: 27599 - DNA, 1151 bp, Mus musculus
tccatacctccagagccttgcctctgggtccactcctccctctctttctatcccccctttctcttttctccctttcctcctctgccccttttccattatccctccctgtccctctccttcttccttcctgccccccacacctttcccccccacttcctttttctcctgccctaccttcaactaacactcaagtttcctcttctaccttgagccagttctgagctgagggactcacgcttaagcaccagctgttgcctctaaaaataccaccagtggacatgagtgtggcacgtgctgggcttggccctgattcccagagctttccttgctgataatggtcaactgttgacatgcccaatcctgattctggctaagatgtgtttatatattgatatgtagtcaggctggaaattagctccatttttctaggaaaatgtctgcacatttgtggtgagccagataccaacctccttcctgacagaaacacacgccctcacataggctgagtactattctagacaggacacagtgggtcttcctatagcctaacatcatgaaggggcaggtggttgatgacattttcacaatgaggtttagtgtgaccatgagaacaaggactggtgtctgtcacactgtagagtgatattcacagacacaagtcagagcactgaccctaggcagctgccccagaacaccctgtacacctgtctctgtgagcacacatgcagatggcaggtgtatctgcactgccattcaccaaggcctgagttgtggcacccagagcaggctggcagagactgacctgctggcagtcagggctatgtgactgcagaaattcctccatgtaataaatcagggcctagcacaagccacaaagggttagctgcctccctccttgggaagctgccgggagtcacacttctggttaacaacaaactctctgcaggtaaagacttatggagagaattgctttttatgggggaaaaaaaaagcatccagggaaatcaatgtttaatggaaatttccaattttgtgtgcatgtgttcttttagatctgaccacagaacggtggccttattctttgacacagctaagtgttgtaatctcgtgggtgggcactttgtttgtctaattaaaccatcaatggatca

SEQ ID NO: 27600 - DNA, 1099 bp, Mus musculus
cacatttggccatccctagcttttctggattgcagaattgtctgcatctcagaggtgactctagaagttgactctatccaaggcagaggaaggctcaacccaagtttcctcccaagaattaaggcacacatgtaagccttgtggctgattctccaggctggaccacgtcagaaggagagtgtttttgtgtgtgtcatgcgctgcatgttaagtatttccaaacctggacacacttgtctacagggctcctgctggagagccttcctgcaaatccgcgtggtcctgggctgtgctcttgatttttgctatctgggagtgtgttccaggtaggtgatgattctccttaataatgtccctgccactcatctgtgactgaaatgagctctgtgtgacagattctccgagtctaattaggaggaagaaaaatcaggaagtaagcgtttttccgagccagtgtctttgaaacaagaaattaaaagccatgcaaaagcccgccacatctcttcctgacgtgtactctgagataagaacaggcatgagtgtctgcgctctggattttgggggatttttgccctgtgctgtgctgggcacttggctcgcatcccgccatgtcctgtcctgtgtagcttcccaggcggggctcacaggcatggttctctgcaggtccaggtagagcatgaatttctctttaacattagcagctccaaagccagaggcatctgaggtttttctttttctcctggattttgggaatttaggatgaactttggcaccatgttcatgcaatctgcatctgtgacccacagcaaatccctgactgaaattggtttgcttgttggcttggtccatctgtccagtcacatctcttactccaggacatcacatgtccctctctgtcatcagactgttctgtctagcatccttatcacaatcacatgtttggagcctctcggctatgctgcccttctctgtgtcctgtctagaacgccagctccagaccccaatttcatacccaatcagttatgtgtttctctcctagcagcatgctgccctgaaggcagctcatctctgtgcctacagcaactccaggtcaaaggca

SEQ ID NO: 27601 - DNA, 1166 bp, Mus musculus
ttccgatctcatggtttttctttccgttgcaatcctaccggggccggaatcatagccagaaggagccacaagacacgcttcctgcttcacttcacgatcagagcaggagcgtgagggtctgagtgcagtcccttgtctcaagctcacacttggagcatccttgcgggcaacattgatctagaagggcatgtgctctgagtctgtgtgtggtgcgtgttctttctaagcctagacatgtaataaccatgcatttattaatatcatcacatgaaatttaatttcgagactggctgtgaggtgtcccatggcttccctgttaatagctgaggaaacagacacttggggagctgaagtaactgagccatagacacgctattacacatgcatccatatgtgttactttagtcccgtagaatgtgaacaggacctgtcatggtgtagggaggctcactgggtgtttaccacatatgcagcctctgctagacgctgtgcttcatgctggaatgaaggggtctgtgtgaacatcctcccaggatatgatcacgaactcattgttatggtgtcatgaaaagtacagctggtggtgagctcggcttcacgtagaattgaagagttacccttcctatgaaggttttctgggtgcccacctttaccctgtggagacacaggcttctgtctggtggcacacacttcctcctccacctggaagaacccccaagatgctcttcacaatgccggtctgctgctgctgaatcctagacagctttcttatgtctgataaaaaaaatctgcattttgccatttttgaaagacatttttgctggctcaagaatgccaagttagaggaccttaaaaacatggtgccacagttctctgactggcaccacctctaatgacaaacctcccggcatccttatctttttgtccctctgtatgaaatgcttcccactgctgggtgcccctctgtcactgtcttgaccgtaaagctgccttggtctgtttgtctgctcactggttagcttgcccatctacagagtgttggctcttcaagtgtatagttttcatcaagactggaaaattgttctcattattttgataatttcttcactggtctccctcctccttggtgattctaatttcatgtatcaggttgcctgaaactgcgc

SEQ ID NO: 27602 - DNA, 1193 bp, Mus musculus
gatatcaatattgaaggtgttggcattagggtgctgctactgatgttgtgaagttgatggtgctatcactgttattgatgagaatgctgattgtcagcgcttttcattattgataggttgaattgatggtgctgcttgtcttagttattgttctatcgctgtgataaaaccaccatgagcaaggcaactcaaaagagaagtcatttaatttagggctcagggctccagacagtagtagagtccataagcattgtggcaggaagcatggcagcagacagactagcatggttctggagcagtggctgagagctgacatgtttaaacaaccatgaagcagagagagaactgtgaaagccacaggcttttgaagccgtaggccatcctcagtgacacacctcctccaacaaggtcacacctcctaacagttccaccatctgtggccagaaattcaaatatacaagtccttgggggccatactaattcaaaccacttcatgcttggtggtaaggttggtgttattgcactggcattaatgtttttctgatgtgagtgtttgtagtactgataataataatgatgatgttgatattatcaatgctggtgttggtagcatttgtgttggtgatcttggtggtggttgtggaagtgatgttagtgtatagcatttatgttggtgatcttggtggtggttgtggaagtggtgttagtgtgcctgctctgaccatgttggtattttgtttatgtgggtgttagtcttgtcaatggtggtgtcaatgttattgatgctgatggtggagttctcgtcggtgtttttgacattgctgatgctgcttgtagcagcgtcaatatcagtgttcttggtgttgacattttgatgctgatgttggcatttctcatgatgatattgatgttactgatgcagatgctgatgttgatggtgtttaattttggtggtcaaggcattgcttatttggaagtcaaaatcagatactgtgtctaggattggctttaggtttaagagacagatttcctgctcaggagttgggtagctgctctaagatgctggggagccatcagtgtaggtggcattgatatcaatgctaaggtgctaatatttttgtactgatattgatgttggtgatgttcagtgtggtgttacttgttcatgttgatggtgctggtggtggtggggt

SEQ ID NO: 27603 - DNA, 1151 bp, Mus musculus
gaagaaacccacaaagcaacaaagctgatggcacctcggatctgtagctgcagacaagtggagagatcaaagcagggctgctctgtagcagacactccagcaattaggggcgttctcctgagccagtgtatcaactagcaggggtgagcaagcgggagcacacttcacatgctcccggaagctgaggagaagagtgcagtgccggccaggctcttcccttcctccgcaaggattctccctctacacataacctcttcctggtctttaaagagttctgcccgaaccctccacttataccccaaggctctgtagctggtcccgagtggaaacagattgtgccattctctttagatctgtagttctgtccgagaacgctggcagttcctggagatgcatgtggttgtgacagtggtgtgtgttggggctccagccattcataagtcacaggtgggagtcttcagacactaaatttcatagtcaagaattgcccagctccaaatgccaccagagccactgaggctgtgaaaccctgcttaaatggtgcttccaaatggcatgcttagctgctgtgacttgggacttcactctgtgcctacactgctctgatagcagcatgccaggggtcacttgacagcagtagctatcatgaccgtcccagagaccaagtcacctgcatttgtaccccacatcgcatggttttcctcagccacaccaccactcccgtttcccagaagacattagggaccaggggaacattgtgggatagttatgcagaataagcaatatgaatctgacttcagccctaggcgcacaccttgccgccctgtctggtcgcagaaaagagggtcttgtcactggccccaagatatcagtcacagttagaagccctaagcatggagaaaggacagacctactactggagtcttagaacttgccgggtacaaatgtagttgaagccaccacacatttgctggttgtagaattaaacatccccttgctaagggactgtgagtctgccctccagaggctgtcccaggcagcggcagccgctggatgctgcagggtcagtctgactgtgtctctgggcccttttccgagcccagggcatttcatcaaaaggaacgctccacgtgagtctccagcttctcgga

SEQ ID NO: 27604 - DNA, 1164 bp, Mus musculus
tagcactaagcatggaggtacaagcctctctggagtgtgctaacttagaatttttcagttagatgcccaggagagcacagacagatctatgacagtgctacctttagtatattagatgcccacaaggacacagatgggccctatggcagcgctgcctttgatgtattagagaacccctgtgcttctacacagtgactgcactggtttacactctgagcagcagtgcacaagggctccccttcccgcctcctcattggcttttttgatgataaccattcttatttggggtaaaatatctcaaagcagttttaatttgtatttccctgatggataaagatgttgaacagttattaaatatttatcaaccttttgtgcctctttctttgaggactgtctgttcagctcatctgtccacttgctgactaaacagtttgttttgatgtttaacttttgtggttctttgtaaagtttagttactttgaatctagaatctagttactttgtatctagaatctagttactttgaatctagaatctagttactttgaatctagaatctagttactttgtacgctccagttacattccctatcccatgtaaacttggcaaaggcagtctcactctttggattctctttctgttaattgcttccattgagaaacaggagacttttatttccatataattttaattataagttcctggagttattatctccttcatgcttagggtccctttcggaaattccttgtctattcctatatcttgaaatatttagagaaatgtataaagatccataagaaggaaaattcttctctttgtcaagaagaaaagtgggaaatgtttgactttaaaaacagaatccaggaaatagctctcaaccagatgtttaaaagttcctaagtgtccattgcttctgcaacagaagttattccatagatgtctctgtatccaactctggctgcccagtctaagcccccacccgcctgttgctagtgaatctcctccactgccatgttgaattctgatttctgaaagaggaggctgacagcactggcctacctatggattctggcaggaactgagtgatttggtccaaagagttctgagatactcctagcatgcttcagcaggcctgtaacatgcaccatccagggtgccag

SEQ ID NO: 27605 - DNA, 1100 bp, Mus musculus
cagtgtccctgaggatgccagcatccacagggctccatgaaacttgaaaagtggtacttattcacacagatatcacttaattactttctaattcgacagccgttgcctgagaggctttagcaggtaggaaccagaagaacagatgagtgaggtcagtctgtcccaggaaagggtcactgggatcctacgcagctccatgttggacaactctgtagtcttgacccaccttgtggggttctactcttgccagcttgtcatttactgtgttccatgggtaaacggggtatagaggctgggactcaaagcccaaactgcatcttacgaccctctccactcctgctgacactggctggtcaggcgttttacctgtagcctgtcttttgctgctttgtgggttcttctttcttctacactttaccccttctcttccaccctttctacccccaacactggataagagaggaacagggatagagaggaacggaaagagatgcgtgaataaagtcagggggttggaaagagggtcatgtcgttgttagactactgcctgctggtttaaggttttgagttcctcagggcaagtttgatcttcaccatcaggatatctaatttcttcttgttctttcttctttgggagtgactattaacaaaccttgagcaacaactaccaacaacccttcacacctctcagggccctaacatttgtataccttctttttaaaaaaaatctcagaattccaaatgtcacacaaccgcagaagctatctgcagctggcaaaattatgcccctgctagaacacgaggcaaatcatagtcagctgctgtggacagtctgaagcagccccatgtcccacacccaagagtgtaaaacaaaaacatattcttatattcctgttgtttttttatttatttaagaaacccaaattccgaaattgtcactacatttttctgccttagggaagggtgatgaagagaagtatgtaaatgagctacacaagattaaaaaaagagagagatgcattctgaactctgtgctcttcagtgagcgagtcaacacttcatcctaaatccagctatctaccaacatgccctaggcatga

SEQ ID NO: 27606 - DNA, 1144 bp, Mus musculus
gctctgatgggcctgtccacctgtctattgagccactaaaagaagctggtctttcagctgtggagcacctccacactttccttgtacccggtgcttttcgtgaggttttatgacaagccgtcaccctgtgctagccctgccagtgtcgtccgggatgagagcagacacgtttccgagccacacaggctggtctagaaagcgttagcaacgtgctcactcactatcaccagaggaagatacagctgtccttgtgagaacaaaggagaagggccagtctatagttaactactcaaactgtcttttcccagccatcacacttggcctttttcatggagtggccatgatgccagggagtgtctgccagcctcagccctgcagcaggagggttgtcgtcaggaccctggacagagcttccagcctggcccacaggggtccaggatacgggcagcagaaaaccagactaagtccggagcctgctgctctttatactttgtccattccgctgcattctatactgtggagacattagacatagccagggcacagcctgtgacaatggcctcattcctttccatatctaaagagcctgcaccctgttctgcccaggttcctaggaggtgggcagatcaattgcaggggtctctggaggcttttgccaatgaaagcatcacaagattaaccaactgcaaagcagagcgtggcctcccgggttacagagcaaagcccggcagccaggcccttggaggcagcttcagcattcgttgtctggcacccacagcaagacgtctgtgctgaagccagcctgagtagccttatgtttctgggagcacagggcagccacacacacaaagctttaggccgtgatcttcccatctgtggctgagtaacaggccagatttcctgtctgcacttggagttatgtgagaccctccatgtgtttgggtcataccatcagtgcagtaagacctgactctgtctctgtgtcatctcctccaaggcaaatgctggggaatgttaaaccctaatgctgttgatcgcacatgaccctgtgcctgctggaccagacactgaaagattcgaaacatctgctgtgaggtcttttgctgtggggtcccctctttctgctatgggggtcccctctagg

SEQ ID NO: 27607 - DNA, 1135 bp, Mus musculus
atgtggaccaatgtcacagaattggctcccacagacatgcccttcaagtacactatgatgttcagtgtcttagtagatgttatattgctgtgaaaagagatcgtgactatggcagcttttagaagataaatcatttaattgggatctgggtgacagtttcagaggattagtccttttcgttgtggtggggagcacgttggcagatgtggtagtcatgatgctggagatgtagttaaggcctgcattctgatctgcaggcagagagagtaaaatgtgtctgacacagacgtttgaaatgtcaaagcccacccctgagtggtacactccctctaacaagaccacacctcctaatccttctaatcttacctaacagttccactccccagtgactgagcatttaaatatctgagtttctggggccactcttattcaaactgacacatctgactaacagcactctgcagtccagctccaagaccactcaggaaaaatggtgccacctggtagttctgtcccactctagacccctgcgtggcttatgaactatgcacccagcctcctggtttgaatcagggaggctgtgtttcagactcaactttcctcctcgttcatgcaccttcatgggcggcagtttcagtaataattttatacctacctttgtcttccccactgtcctccatctttcctccccactgcccttctttcctcctccacactgccctgcctccctcttccccattaccctccttcccgcctccccactactctcttgccctcctccccactatcctgccaccctcttcccaactaccctccttccctcctccccactactctccttccctcctcctcactgtcctgccaccttcctccccactgccctccttccctactccattacccccttcctccccactgccctccttccctcctccctactactctccttccctcctccccactgccctgcctccctcctccccactactccccttccctcctccctacttccctgcctccctcttccccactgctctccttccctcctccccattgccctgcctgggctcctttctgatcaacctcatgtgtgccctcttctcttgtgatttctgcctcttctatccttcctccc

SEQ ID NO: 27608 - DNA, 1133 bp, Mus musculus
tgaatgcccttaatctcttttcattcatcaattatttcctttggtaaaaatcttaaaaaaaaaaaaaaaaaacccgtcaggtcccaatgcaccgacatttaccatgcttttaataaacggtgcatacagtccttcaggacaattgattatatatattcgccattcgcatttgagaaaatccattcaaacctttcagctttgaaatttaattttacccagttacagtctcagagataacagtagtgacatccattctccccccaacaagaaaaaaaagatgcattttcattcctcatagtgacaaataactttcgaaaaggatgaaaattttcatgattagttgtgtatttatgtcgtatgagaagctcgctgactttaaaaatgcaggattatttcatctcgtaatttaccacacgcttttgtaatttgttaaatgtgtcgctctctggggttctttgacatccatgtggttaagactcggccggatcctggctggcaggcctgtgggaagtgactggatcaaggggcttggccggatcctggctgacaggcctgtgggaagtgactggatcaaggggctctgatctgtccaaaccttactgttggactcataatctggtggactgttgggagtgggtagagggggtgaaattgggggaagtaaaccatttcaaggtgtggcctgtgatggcctcttcctctgtctctctctgtgtcatgcacatcatcaagtgaccctccaccatgatgcctgcctcactgcagacccccaaaccaaagaaccatgtgatgatagcctgaaaccttggaagccatgtcacacagtaacactagcacttacttcagatattcttggaagaatggggtgacagcaggtggcctggaggtgacattgaagtaagaaaggaggctgtgagattcttcagagaacagcagctcctgaatggaaccacatacagtccgaggttgactcatgaagcaatgggcacctctgtgtgtgcttccacagagagggaggatgcagagagcctgggcaggcttccatgctgggacaagcattgagagggttggtggtcaggacaagggcatgcttggctccccagcagaaggccaggacagaatctctactacca

SEQ ID NO: 27609 - DNA, 1126 bp, Mus musculus
ggtgggggtgccttctacaaggaaaaacgaccctataggactgggggtagtgatccagccaggccccccatagaaggtgcatttgggttaagagggtgttagctaaaagactgggaacgaagtacagaagctcatgggtggaagagcttgtgccagtcatggaaaacaggagactcaattccaggcacccaggagtagggtcaggacagccatgctctgggagccattttcctgccattggctcacggaggtggaaatttccacacgtatgctgcccttggcaccctgagttctccagcagtcacagttaaaagattgcagtaatcagggagcgtccattctaattttgcatcttacttaattcagtgggtttgaaatactgtctcagtgttcagccaacataactgcttgtgagcggttgacacttgggaggtctgcagagccctggtgtatgcaccacactgtgggacctcccagttcagctaagctgtccggtgagactttttctagggagatgagaagaaacatcaacccaccccagacagagcactcgagaccaaaggagcaatcccaccaaatccgacttggtgcagcgaaagacttaccaagtgactgacggtagtgtggaggacccaaaggtagatatgtcattggagagcccactggatctgggctctttgccacctcacaaagttgcaagcctggcgctctctgcacctcatgaaggcagcttaaaggatcagagtctcctccccagcaactgctcactgcctttacagtcttgggagggtcctgcgaattctgtacattttggcttttccaatcttgttagcctgctgctatccctctgagtcctgtgagcctgtattatctccaggagagagagcttccatttggaggtagttattatacaacagtgtgctctccagtttcagtggctctgaagcaccacctagcaagaggtacagtgaagcctcagacccccgttcaggattaaaggcacatggagactgtcagacctgcctcctggccctgctgcctcttatgtagtcaagtttggctggcttacacccttcacttagctattgcctatggcttttgcccttgggttaaactgactgatcgg

SEQ ID NO: 27610 - DNA, 1148 bp, Mus musculus
tgagcttcctccttggcctaaccctgttccaacagtaacccttggtgggacagaactactcacagcccagcgcagtcctcagccttattcttggtggagttgccaatggctttgagcttcctgcccttaggctctatattgttgttgtttagatttatatattttatctttatttatgtgtatgagggctttgcccgcatgtatgtctgtgcaccatctgtgtaccatgcccacagaggtcaggatatggggtcatctcccctagaactggagtcttagatggttgtgagcggcaatgtgagcgctgcaagaataacgagtgctctgaagcaccgaactatctccctatcccctgtgtctgtccttatttggtccttggaaatatcccacagataaacacaggcagtgattattgagtgcctactgtatgcaagatcctgctctccgccccgcttcctgacccacctgcttgcatgggttctgacagaccactggactgacacagcacacacacctaacaccccatctctgtgatctccagggactccgagctgctgacaatgaccccaccgcacccccctacgactccctgctagtcttcgactatgaaggcagcggttctactgcgggctctgtcagctccctaaactcctccagctccggggatcaagattacgactacttaaatgactgggggccccggttcaagaagctggcggacatgtatgggggtggcgaggaggactaaccaacctcaccaccaatgcaagaagggcactggaggcgagcagcagaactgagccgaggtgccagcgccgtctggtgtcgagaggtccctccccgctgccgtcccccatgtggagctctgcagtatggacataggccaccgggcacccatcatcactgcggcatctcggtagccacagccacgtactgcgaagggagagccagaggcacagccctaacttgaatttcttaccacaaaagcactgttaaaacaaaacaaaaaacaaaaaacaaaaacaaaagtgccttttggtacatgacagattccctaactcaggagtgactgaaagaggagagacagcccgaggcccccacctctgtccaccttgccccacagccccagtcccacctggtaccttcta

SEQ ID NO: 27611 - DNA, 1162 bp, Mus musculus
cctatgcaaattgctcgaatcggcaaacaattcgggtggtgctgagcttggcatggccactggtgtgtcgtgggttagggctggggaattgagaatagttttctgggtttgattttagaaaacccaagaaggttcttggaagtgtgcatatgtttggtaggcatggtagccaagaactctcctgaagtcccaaggctttcttaaaaagcctgggatgagaggtaccaaatccatcagttacctggaggcatggctcacctgcctccatctcctcctccccactcccaaggcctctgtcactgccaggcccctgcaggaacatccacggggtttcctaaaagctgaacagcttgtccctttcaccctgcaccccagcagcccctagggctggaggaaaatagggtcttacacatccccagacccatcttggaactctgttcccaggccaacaagttagcattagccaagcatacagtcagtgtcaaatgtttctcttctgtagctcgtagatacaacgcgtctgtggtcagggcccagccaagctaggccagtggccagctctgtgcagtacaaggctgtggtttggctcctttaaggagaaacgtacatggcttggaagaacacctggccatggtcagccttggtcacacctgactcccggccagtggcttctctctctcatgtctttcagcaaatccataatgctgggtctcctgccaccaaagtgtcagagtaatggccaaaagtcaggccctcagagatgcctcagtttccccatagtgagtatgtggtctgttgagatgacacctctgtgctctctaaggtaaacgggaggggaagtctctatttctacccacactgaaaggcaaaaccaaaaactcacagcagaatcacccagcacagagcaccaggtgtggtagtacatagaccacatacctagcaggctctgccacaccagtcggctggtggaaaccacctccgtatacaccggggacgcatcttgcttttccttcctctcctgttctccattctgatttattttctgcatgtttatttttgaaaatggacaaatgtgcagcagcccgcatgaccgtggttgtttcgggaaagataccggagtctgacgtgttcacactgcagctctgagcgccatgcggtgaga

SEQ ID NO: 27612 - DNA, 2170 bp, Mus musculus
agttcaggcctagtgcctctgtcagccaaggagggatgccacggtcccaggtgtggcatcaagtgtggtctttgatcccctcacctgagcctcttgggtagtgttgtgttgtgtgatatggaaagtgggggctgcgcgttcagaaccttctctcccactcagggtcaagcttatggggacattggaggtggtgggcatcctgagcctgttgcagagtggggagtaggggcctctgccctgcatagggacttaaagtagtagaactgtggaaggagcttggcagggtgtttcctcaaaaccagggtctttgggatacttgaatctcctcctccctcctaactgttctatggtcactaatgcacatgtcctcttctttctccccaccagggctcaggcccgggcgcagcagtcccaggcggctccggcgtgggaacccccagacagttcacacggcaaagaatcacgcgggtcaacctcagggacctcatattttgtttagaaaacgagcgtgagacaagccattcactgttgctctacaaagcattccttaagtaacaggatgagccggcgtttctgatgggatgcttgcggacgtttttatatatttgcagattacgcctttttgtaacaagcaaatgggatattgtttaaaaacagccacctctttacaatggagcagttttatactcctgtttataaatcagctcttcagtgcggcagaaaccgtgtctgcagcagagagaacacaaaggcctgtgggtgctctcacaggacagctgacccgagctcatcctcggctgagtggccttcttgccaaacaagccatatttaaagactgatggaagcgcttagcaaataattagcagttgctcatcctgtgtgcgttttggttcagctcaccctgactcccgctaggtgtatgtctacagccgatgacctcatctcttcctttctgttgtagcagtcagttggcgaagcaagctgactttttagactatttatcacctcgcccctgccctgtcctgtcccttccctcccgtctacacgaagctccccaggaacacaagctccaagcagggtcccggtctgcagtagaggccggggtgcaggccgggggcagcacctgtacaaacacaattgatttgctgcagtttggaagctgtgaagtggaaggaagtgagagcctaggaagtgagaaccttttcagcgtaaatatattttacttgcactgtgtttttagctcagagtgaagacttagatgaaataaaatcagagttgagaagaatcaacaacagactgtttctcagtgtggatcaagtgttggaaatggttggtgtattttgtcagtaattgtacataatttttggcacataacataaaatggctatgtaaactataattattttgctaagagactgtatgcaagctgtggccaaccttacaggcgtccagagcaaagccccttctttgtacctatttttttattacaaatatactaattggttctttatattttcagaggttattgtattaaattgtctattgatagtacttttatgactgtaaatacttggctttctccgtgtggattctcatgttagacttcaattcgcacgtgtgaactgaacgctgatcagtattttttacgacacccaagaactgttacacctttcattttatcttttaggaaatccctgtctttccattttttcatgtaaattttgcacagttacttgttaatatgtaaatattttactttcagaaatgaagtttttaattgctattgttttatataggattgaaagaaaattaactcctttattaaaaacaaatttatctgtatttgtcacgcctgcttttccattcctgagtctctctctggtccttatgaatctaggagttaaccaagcacaggcccccttctgggctggagttggggccagtcttctgttctgttcacccagaggacaccagagctgtgcttttcccattccaggccttatcctgtagactgtctgagggcaggcatagaggtgtatgatagacagatacccctgtaagcttgggctgcaggtggtaggtaggcttacctgaagactccccctcattgccatccctgatgtcctcatcaacagctgtagagatcaaggacacaaactgtggacagatg

SEQ ID NO: 27613 - DNA, 1606 bp, Mus musculus
tgaagacgttggttttgagacagtggccacatgtgaacaggttcttatgttgggccattttcataagcagatttctgtctgggcctggctgggagagctctgattgctctgagttttgtgctcgctcttcctccacctcctctgaaagctgtgactgagggaagaaatttttttctttccttgagaagttttcaggtaacatggagtcttcaaatggtgttctgggttttgttttcttgggacgtactgtgggcacagagctctctgtggactcagtttacctgtgaccccacaaagttcgtcctctgaacactaatttttaaacaaggcagcaaagcactgtcagacaaaaggacaaggccagtgtaggaacctcatgtgtgtgtctgtccatctcagtgtccctctgctattccctgtcccctgcaagctgccactgaattagaaccaccttagtgagttatgattccttcatgcaacaagaatgttcctctccttttgcagggatgatgatgacatcaatgatgttgcgtcaatggctggagtgaacctgtctgaagaaagtgcaaggatattggccacaaactctgagttggtggggacgttgacccgatcctgtaaagacgacaccttcctcctccccgcgcctttgcagaggaggatactggagataggtacgtttgaaccagatgatgtcactgggatgctgtgtgtccagatcgctgtctgatgtgctccatgactctggcaagactcagtccaacccttctgcagtagctccactgccttgtcttgggctcaccccatagaggctccactgttggttggcaggtagtagaaggtgggcagtggccatctgcttcctgcttagattgcctttgattgtgcagagcagtaactagtgggtgagagaagccagtgccgtgataaagaaaaactgggtaagtaccataaagtgctttttttctgcatggcctgcaggtaaaaagcacggcatcacggaactgcatccagatgtagtgagttacgtgtctcatgccacacagcaaaggctgcagaatcttgtagaaaaaatatctgaaacggctcagcagaaaaacttctcttataaggtaatgaggctgttttcccggggagaatgttcgtgttctcacctgacctgggctctctggaagccttgttgtcctggttgttcctgtgctcactcttggccacacacactacctgtaggaggtcttgcatctgggctggggatgtgctctgcagttagcctgctttggaagatggggctgtgagcttaagagactatggagggagtcttgtattcttactccttttaaagtgcccagttcctgtagcctggcccattttgagccatgagctgcaactacaggctctttgccatgtggggtgtgtgtgtgtgtgtgtgtgtgtgtgtgtgtgtgtgtgtgtgtgtgtgtgtgtgagagagagagagagagagagagagagagagagggttttcgaccagaatatgtcttgagcaattgcacagatgaaggagtctgtgtctgattctttagagcagctcactgtgaattgtcagctttaaaacacttctaaagtt

SEQ ID NO: 27614 - DNA, 1126 bp, Mus musculus
gcctttcatatctagaaaacagtttcctagcggtcttccacagtctcttggctcttagagtctttacacctcctccttctgggttgatcactaagccttgaggggagaagctgtggtaaaggtgttccatttagggctgagcatactgcagtctcttattctcagcattctgaccaaggtgtgtgtgtgtgtgtgtgtgtgtgtgtgtgtgtgtgtgtgtgtgtgtgtgtacaggtgcccacagagttcagaagatggcattgaatccttggagctgtagttgcaggtgttatgaactgggtgctgggagccgagtgtgggtcctctaaaaagcagtgcaagcacttagtcactgagcagcccagccctgtaacttaaatacgtgtacactgtagagctcagagttttgagagtgtcactgtgatgagtgaagagatggcagtttctccgtgggcttgtaaagccagcagagtcagtcctccaataagagcctctggtgtccactgtgtctttgactttgcagtccctgtggtgaaacccaccgtgttacctggaaccaaagccctgtctactgtatctgcacaagcagctgctgcccagaaaaacaaactcaaggagccggggggaggctccttccggtaaggactgaagccctgtaggctttagggagagtgtgggaggggctcaggtcatccctgctagcttttggtactgatagtgtcaggactgtctgctctacttgggtctgaccacacatctgtcagtgtgggctcccggcgtggatgcagagtgtcatccctctgcagggatggagaacagggcagctgacttggtgccagcaaagtgcaccaaggtgactagatttataacacagatggccttgtcactctgctcactgtgactcttgatgaacagaacagccttcctggacattgctttgtcttgagattcttgtgtgtgcaccagaggccaaactgaccttcactgtgactgagcctatggtggttgtttgaatttcagggagactcttcatcgccaaagctgttaaatgaggctagatagaattgggtgctatattggctctatagggtaaagagcaaccaggcagagcaggacaggttacctg

SEQ ID NO: 27615 - DNA, 1174 bp, Mus musculus
accatttttttttaaagcagagttggagttcaaatcctagaagggtttcagaaccctgcagacactgtgatactgtgtacaccaccagccacacaaaaaggctcctttatataaactagaattcttccagggaagctcttagctcagagatttatggtcgggccatcagggagcttcctgtgggccaaggctgtacgcaggacagcagagctgagcaggccctgcagtgtggaccaaccacccttgggctatgcatggttctgaggtggacaggctgtgtttggacagagaaccaagttcagggtaggacttggagagccatcttcactccagtagaaaaataatctgaccttaaacagaatttagaatagaaataagtcatttgacgtatgtccatcaggtaacagtgtcagtctgctgacaggctgggaaatccatgttccttgtggggcctgagctcggtaaactttgttttgctgctgccctctaggctatgtgtggggtcctgagtttcatgtgctccgtgtacttgctctgctgtattgtggcctggtgtggcaccattctgtctttgtctaaatcttttgaagctgtgtgcagaggcttgttggagacttgttgggccaggcttttttagatgtggaatgaggtgtacatctggacttcctggagcttctggcagggcaaggttggggtagcgccaatgaagcaaatagctggcttcatgggtcagtgcggtggcccctaggatgtgtgtgctcatgcactatgctggctgtgccccaggtgatccagcagcccccgaagcctggagccttgatccggcccccgcaggtgaccttgacgcagacacccatggtcgcattgcggcagcctcacaaccggatcatgctcaccacaccacagcagatccaactgaaccagctgcagccaggtgaggccccggctgctgccacccaggactggcttgtcccggaaatggccagttgtgggactgctacttgatttcatttaatcgttgtgataaaattaatttacgcacattgctcagtgacttcatttatgaggtttgtgcaagccattacccttgtcaacgtgatttttaaattccctgaattgtatacattacatggttagtatctattagatacttctagctagaccttctagctgc

SEQ ID NO: 27616 - DNA, 1660 bp, Mus musculus
agcaggagaagtgaaccttgtgtaccagcctggaaaccctcatactgctacttagtttggacttaacctaacttggacatggtctgagatttagaaccacttggttttggggaagtatttgtaggtgacctctgaaggtttctcgacctacatttccttcttggttgcacacagcctaatagtaaggttttggtattttgcaaaaaggtttctataggcaaaggctcaatcctcactttgtaacttttttttttttaatgaccgctttgactcttaaaatggaaccaaattttatttggcacatgtggtgtccaaatgtgtctctgcaacccatctggcccctggtgctgctggcctggtaccccaactgctaaaagtgggaagtctcaggagccaggcagggccagcacagggtgagccagtcacacggggtgggagggccagggcagggacagggtgggggggtgttccatggatcatgttgtgtaatgaaccagtgatgttcagtgctgggggctaacgggatgagtgaagtagtgggaagggcgtgagtgtcacgtagagcctgcctgccttccacaggcactgaggcatagtgttgaaacccaaggcaagctcgtgtggtgtggtgtgtccaaccttcctgtctgcttcagcctctggctgcacttaagtgttctcattcacttttaaatgagccagtctttttttttttttcttttttttaaggtcactggccttatttccttgattgtaaatagttatgtgtttattttaaaggtggtggagggagggcggggacataaatttgttgcatgagtaaatgtgtcagatcttctctataagcatgcatcctctgactgacagggcactgttgaaaacaagcaccttgataacccaaacccttcagaaagccacagcgcttcagtgctgtgctgatgaagtcacggcgtaaaatagccacagagctttggttctgtactgatgaagccacagcgtgaaagcttggctttatctttgtgtaggacttcagagctgagagtagaacatagcactggggccactgttggggaaatgcaaactaaataaacattggactcttcaagtgctgcctctgtccgtcacctgtgtcttgcctgtcgaaagcacatgcaggttaggattcagaggtacttacggggaaatatatggtgcaccagaaaagtgacctggtggccacagacaagtagacagggcggttcttgctgggatgaacactccagtcctccagagagatgcatggtcctcaggctgaaggagcctgagggcgggaggccatcagccttgggaccattgacaagaatgtatgtgctaggtggaagacacctcctaaagcagaagactgaacggggtttctttctgtgagtcagtgttaaatcagtgttgtgctaggcgctaagtttgacccaagtttgtttttacaaaacttgtaaaccaaggaaggggcagggcaaggggaaaagctgtaagctaaagcaggtggcaggaaaaactggtctagaagccaagaggaagtacattctagccaagggaaaaaaaggtagcctcatagttaacgtagaaaatgtggcaaacaggaaaatggattgagcactgagctgtttggggtggtatgggagat

SEQ ID NO: 27617 - DNA, 1182 bp, Mus musculus
ccgccatcagggtgctgtgtgacttcatcttgccagtctgttgtctcttctggcttggattcatcctgactctgttctctggaggggagtacgagtatttgtcttgctactctggttgagagggtgctgaaaggcacccccaactctgtagtaagacactcaaactttagagacagcttatagctggaacatgtcagcctgtgttgagatgacttccaataatctcagcagttaaggacattagctgctctgaggacccaggttcaattcccagcactcacaaagtagcttacaagcagtctctaactccatttgtgagagatctaatccctcctcctgacacaagacacaacgcacataaataaatctttgggtgtgtctaagaggaaggggtgcactaaaggctgttctccatccatctgaattgcaggtggcttccttttctctcggcactaaccacttgtctggcatgaacttttgtggttgatggtgctcactttttttttcctttcagcgttatacacagagcaatgggcgcaggccatttggtatctcggccctaattgtgggttttgactttgatggcactcccagactctatcagactgacccctcgggcacataccatgcttggaaggtaagtcgtttcaaaacagtggaactttaggctattggaaggtactgagctagcaacagcaaacagataatctctgagcttagttctacacgcactgcctgtttgttccatgtcgtgtgtatgaaatcggaacattctacattcccatttggcattgtatcaatggggaatgggattgtgagaggacctagagtgaaatctccctaagtggctcttgataataaagaactttcaccgggtgcggtggcgcacgcctttaatcccagcactcgggaggcagaggcaggcggatttcttgaggccagcctggtctacaaagtgagctccaggacagccagggctatacagagaaaccctgtctccaaaaaaacaacaaaaaaaaaaactttcattgttggcaaggatcaacaccaggtgataatagccttttcaaaaaaaaaaaaaaagtaggacttgggtctgtgccttcacttctggagagccaactgtagaccatgaaggagggaggcagcctctagccagctacttagactggctctactaag

SEQ ID NO: 27618 - DNA, 1232 bp, Mus musculus
tttatgtatgcatacatgtgcaagtgtgtacgtgtgtgtgtgtgtgtgtgtgtgtatgtatgtgtgtgtatgtgtgtatatatatgtgtgtatgttaaagtgctgtattagtgtgtatgtgtgtgtgtatatgtaaagtgctgtgttagtgtgtgttaatactttttgaaagaaaagaacacttaaaatatgtatcaccccaaaagttcaatttgaaatgtcttacattaagaatttcttgaatgttgtgtatatatttttaaaagcactttgtgaaatagtttgtacatttatttcctaatttatacctgattttggtgttaatatatttaatgattaatattgtttatttaatgttttattgatttttatgtaattttgtgggggaaagtgatgccagtctttttcattgcctgtattatagcttttcttctgtaacatgaatgtttgaaaagtcctaggctgaaatgaacccttcgtgcaggtgtggttgactgtgttttgttttcaatggttcctcctactgaaggccagaaaagatgcaaagggagatttggaaatcgctgctcattcttcctcctgtttcccagcatccgttcaatacttggtgaacttgaccactgaggactggggttttcagatgtgctgaccactacgcgctgcgcttgtcaggggctatgggtggatggacatctctgcagacttagcatatagcacagtgggagatgggagatgtccgcagaggcactgggcagacacaggcctggcccagaaaggaggtgttttcctttcctgttgtacctgttctcagacgtgggcttcagtgactgagtgtccgttcaaacttgtaaaaagaggaagactttccatttccattaaaacacttttttagccattacctcatttctgtttattgagcatgttacgtctgtcttgttatttgtgaacgaagtacagtttttaaacaccctatcattttcacccttgtttggttggttggttagacggaggcgcactgtacaaacctatgtgactctcagacattcccggcctctttttcccgagactggaattaaaagcgtgcgacccggcacctggctttttcctggttttgtgagacaggatcactgtgtgtctcaggctgggcaggaattcacggcgatccttctgctcagcttccttggtgcccagactttggctttggagccacagagaccacgggattcgggggg

SEQ ID NO: 27619 - DNA, 1201 bp, Mus musculus
aacatgagatctgggccagaaagggtctccctgaggggagtctcctgaccgcaattgggaggccgagaacaggaccctgacctgacataactcttacttctttcagtggcagacatcccaggcatcatccgaggtgcacaccagaacaagggcctgggcctcagcttcctcaggcacatcgagcgttgtcgcttcttcctgtttgtggtagatcttaccttgcctgagccgtggactcaggttgatgatttaaaatatgaactagagaagtttgaagaaggcctgtcagagaggtcccacgtgatcattgcaaataagatcgatctcccgcaagccagagcccgcctgcctcagctgcaggcccgcctcggacaggaggccataggcctgtcggcgctgactggggagaacctggagcagctgcttctgcacctgaaggagctgcatgatgcccacatagaggccgagctggagcagggccgccagcctctcaggtggtagtgggcacagggccgtgtgccccagggccagcgtggaacgggggtgggccatcaatcacaggaagcaaaagcaaccttttgtaaactgcgggccctttgaactcccgagactaagtacttgcaaatatatggatgtgtctgtgtctttatttcccaccaatttggggcaccctcctaaagtgccccctgccccctggcccagcgtgatggagtattctgtgccacctagtacctgaattgctccctgtgcttggtgtgcctgtcatccttgctgctgactggtttgctggagttgactcatttgtgctaattaacacctcattagtaggaggacagtgctgctggctgaaggtagcaaacactgctgccaggcggcctgggcaaacgcagctgagcagccgagccatggctgggcttctcatgctcacacctcagggtttgtggccctcgtgtgattgggtctgcccaccgtcccgcagagcagcaaggtcccacaccagcctctgtgtggctctctgctgtgccaccgtgtcagggaagcagggtgcagtggccatactttgttctccagtgccagctgactgagaacagcaagggccagctccttccctgttgttcccagagcgctgagctctgtgggggctgaacaccaaggcagccttgagcttcacgactgaatgcacccaatatccgaccaggca

SEQ ID NO: 27620 - DNA, 1613 bp, Mus musculus
aaagctagccggccagttactgtcagggatggggttcctcgggctgcatctctccagtgctcacactgccagtgggaaggctgactggatggatcctgccgtctgttaaccacctcccttgcattgcaggtggttctctccaggcaataacccctacacaggagctcctgactggctgtacgccggccattactttgagcgtaacttctcagactgcccagacatatactaaggcctgtgagcccaggagcagccttggaatcctcaaatagcatctgagctttatggtggcagacaccacaaatcatggagatagcctcggacgtgacagaggccctcagagagcctcagattgcccagtgcgtcactatgttgcagccccttcatgaagctccagttgggtctttctagtcactgaggcctcagaactccacagtcctttcctagatgacagagtgtaaaaggccagcagagctggcagcacactctgttataaaatgtataatgaaggaagacccagcagggcctgtgtgttccactcaaggctgtggcgtgggttctggaagactttcaaactcagacccaaggaggaggggagcatggatcctggaagtgtcctgtggccagggtccccttctttgtggaatgaagtgacaagcctccagattctgtattttctaccaatcttgaataaggtaaagatgactttagaaaatatttaaattgaaactacttgaattatctgctaaagtgcagcaaacacataatcaccactgtgtaccgtccaaacaaagtgtccccgtgccaagccagagtggcaggaacactgtgacttagatgaggaacccccagggccgctccagcctcgaaggccctgcctcatccacagcgctccatagcttcactgtcactgtggaccacacctgtctctaaggtcatttcttcactcacctcgcctgtgtgccctccctgctcccccaaagtcttgtgttcggttccccagtgtgcatgtttcagtccaggcaagttacattcggttgtgtgcaatagaaggtcagaagcaagatcttacctggtgtcattaaaattgttttaacacaagtaggtgtgtccacctctgcattcctgtcacatgatggactttatgtaaaaatggtgacaccaaggctcacagtggagctctttgcatcaaagataatctactgtgtacacacctgtgcattcatagtgtgagtcacaccaggcatttgtaaatgagaaggtatgatcactatgtccaggcttccaaactgcctctgtcattaaaacactttgaaaatccaacatgggttgaaggtttgatttaatagctgtggaaactaaaaacaggtgtttctgtggcagccaggagacctcccaggactagcgtctctgctctatctactgaggcctctaacaaaccttctgatggctctgagatacgtctgaaggttatggctttgacatctttccaagaggaagttgtgaagtgtctgagacaacagggtaactgtgtttgtctgagggggacatttgctgttccagaccatggcagtgttcacacagctcattaccccaagttgaagactacaagt

SEQ ID NO: 27621 - DNA, 1162 bp, Mus musculus
ctgttgtttgctgcagactcgcacatggtacacctacatactaaaaaaaaaaagaaaaactttttttttaagtcagaaaaaaaagacatgggggaacttaattgtcattgagagacgttcctttacataggccacggtgcactagtacaacatgatattttgggaaaaaatgtgcaagaagggcttggggtgcaggtgagctgtgagctgtggcactgttatgggagtgtttgtcaatatgaatagggaacatgccaggccccgtagtctaagtgtggtgtactgtatacttactacccagtggctttcagggggcttctgaatatttggaggccattctggggtatgtagtgagactgtctcaaacaatatatgtgaacagtgttggtttggtttaactgtctccagggacaactcaaaactttgtgataacattgtgaggcaggactgtcaggtgaggaggccttgagggtgcctccctcatgcataggactaagcccttatgaaggcaggtgtcctaccacatagccctactagacaccgaaactgccctgctttgaccttggtcttctgctggaaactgatttgtgttcatttagaggaacagagtagcacctgcccagtgagccccgtgcatattgtggatgtctaagatcatgaacttgggagaaacattactggttctcatagacccacctggaaggtgcagcctgggaggcaggggcaggggagtgtgagctgtctgtactttctgctcagttctctggtgaacctaaaattattctgaagaattaagtctattaataagacaaatggagagaaagccatacctgccgaagtcagctccccagtggctgacttcccttatggaaactaaagacagaaaccatccacaatgtagtccacacaggtcagggccaaggtaatcactgcagcctacccactgttgggttctactacaggtttggacattccaaggactgtatttgtgaactgcagtaactgtggggaccagcatctttgccttttttgtgccgttatgcagcactcaaatggagtggccacgaacacagccttctcagcacccagctaggatggtgtgcttcccgctacagaatacttaaggaaggcatgggaggtgccataggactgtaagctttcc

SEQ ID NO: 27622 - DNA, 1053 bp, Mus musculus
agtttgcagccgtcagcatcgacaggtagggttgccttgatgggaggttagacttgtatttccaggtgctgtgtctgtgtctcacccctcacctctgctcttaggaccctccagtttggccacatgtctgtcaccgtggagaaacagatggttcatgagatcaagggagacacggtggcccctgggagcgagggactactcaacctgcatcctgacgattttgtcttctacgtgggaggataccccagcaacttcacggtgggcctggctcagccttggggttgtcttcgagtgtctgggcaatcctgcctaccctgacctaggaatagtccttgtctgcttttaagttcattctcctgcagtctgagtgtggttggtctctgggaggtaggaaggtgccctgaccatacactttacccccagccccctgaacccctccgattccctggctacctgggctgcattgagatggaaacactgaatgaggaggtggtcagcctctacaattttgagcagaccttcatgctggacacggcagtagataaaccttgtgctcggtaggtaaggcccagcagcaccctgtaactccacttacccgccctccactgacctgaggcctccaacctgcagctccaaggccaccggtgacccatggctcacagatggctcctacctggatggcagtggctttgcccgcatcagctttgagaagcagttcagcaacacaaaacgctttgaccaggagctgcggcttgtgtcctacaatgggatcatctttttcctcaagcaagaggtacagctgacccccatgtcccaccctgccctgtgcctccccccattctggctttgccctgctgtgacccttcctaaagcccctgagctcacctcgctctgccctgtccctgcagagccagttcttgtgcctggcagtgcaggaaggcaccctggtgctcttctatgacttcggctctggcctgaagaaggccgacccactgcagcccccacaagccttgacggcagccagcaaggcggtaaggcaaggaaggggcctgg

SEQ ID NO: 27623 - DNA, 1164 bp, Mus musculus
ggcactggggtagttactggaggatgtaggagcgtgccccttggtttgggagaagggcattcctggaaaagacctgctgacctgtgagcacagaggtcagagtggggttcatctggctgcctttccaagagagctcagaactgacaacagcatggtctgaccctgtcgtctgggtttctctgtagccaccaaaatgtcccaatgtcccaggcactcatgggcacaaacctagaaaccaggcaagacttgggagttggtaatagcccctgggagggagggttacagggccatgaagagaagcgtgggtaggatcttgaatatattgagctgcaagtatggcgcttatgctatccacaggggtgggttcccgcagcagagggccctaggaacatgaaattggctgctgctgggaatggtctccatctgttacaggcgagaccagtgagaagattgctcacgccaaggctgtggctgccgaagccctcagtacggccacccacgtgcagtctcagcttcagggtatgcagaagaatgtggagaggtggcagagccagctgggaggcctgcaaggccaggacctgagccaggtggaacgggatgcaagcagttcaggtgagcaagtggtccttgccttcctgggggccaaggtgtgggagacaagattctcatgccacccctcctgcagtgtccaccctggagaagacattgccacagctgctggccaaactgagccgtctagagaaccgtggagttcacaatgccagcctggctttgtctgccaacattggtcgtgtgcgcaagctcattgcccaagcccggagtgccgccagcaaggtgggtgctcaccttggatgtaggcggtgacggtggacctgggaagccaggtagtaaaccctctcgtgctacactcacaggtcaaggtgtccatgaagttcaatgggcgttcaggggtacgactgcgtaccccacgagaccttgccgaccttgctgcgtacactgccctcaagttccacatccagagcccagtgccagcgcccgaacctggcaagaacacgggggaccactttgttctgtacatgggcagccgccaggtaccaagcaggccggggggcgggggggggggaatgggctatatcggactgcaagttagaaatgggtggtgtt

SEQ ID NO: 27624 - DNA, 1231 bp, Mus musculus
tgtttttttaaaagatttatttatatatttcatgtatgtgagtacaccatcgtcgctgtcttcagacacaacagaagagggcataggatcccattacagatggttttgcgccaccatgtggttgctgggatttgaactcgggaccttcagaagagcagtcagtgctcttgaccgctgagctatctctccagcccagggctcccaatcttatgacaggatctggcacagccaaaggagtggggaaaagtgaactttctgcttgaggaaggctgaaccagcatgtcaggattaacagaaaggcagagaggggtcttaatcttgggctccaagagcctgtgaagtgctgctgggatatgtgctggcggcctgccgaaatgccttgggcagctctcaggcttggaagtgggtgatggagtctagccccagaccctgacaatcccctctctgtagagctggcatctcgcatgggccaaggatctccaggcgatgccttggtaccgtctggcgagcagctgcgctgggctctggctgaagtggagcggctgctctgggatatgcggacgcgtgacctgggggcccagggggcagtggcagaggccgaactggccgaagcccagaggcgtaagtggggtcaaaccctgttaggcagggctgctcaggatcacggcctgggagccctggagccaaatgtaaggttggcctgcttctgaggtggactagaccggtgctgggcagtgaccaggggaggggtgtcatgacggggtctaggcagcagggtgaccaccttcctactctggtgttggccagtgatggctcgtgtccaggagcagctgaccagcttctgggaggagaaccagtcattggccacacacattcgggaccagctggctcagtatgagtctggcctcatggatcttcgtgaggccctgaaccaggccgttaataccacccgggaggctgaggaactcaacagccgcaaccaggaacggctgaaggaagccctggtgagtatatttgcttcttgccctgtgtccctgtctcccaccctttccactctctggccacctcttccccaggccctggtcttctgtcaactatttccctgttctccctcctctctctacatctcccctcctcttcttggtcctttctgcctgtcccccatgttctctcagacccaggcctcccctccctcctgctctccccctcccccacttagtgctctgtggtg

SEQ ID NO: 27625 - DNA, 1186 bp, Mus musculus
cccctcacaggccaatgccattgcaaggtgagcaggggcttgtatcccaggctccttactacgtatctgcttcagttgagccatggtcctcctcagcagccttcctgggcagatggggctttctggaagctttgggggacaaggacaactggtctattgtctggctctcagcacatagccaactggccttgattgttctctgcccataggagaacgtgcagggctcaagatgtgaccagtgtcgcgtggggaccttctccttggatgctgctaaccccaagggctgtacccgctgcttctgtttcggggccacagagcgctgtgggaactctaacctcgcccgccatgaggtatcctggtctagcctgggactgaggtgggagccactagaggggccccacagtgcagggcaaggccacatttccactctgtgaccctcacatgtgctcacagttcgtggacatggagggctgggtgctgttgagcagtgaccggcaggtggtaccccacgagcatcggcctgagatagagctgctgcacgcagatctgcgctctgtggctgacactttctcagagctgtactggcaggctccgccctcctatctgggagacagggtgagcatttggtttgaggggttgtactctgaggggaggaagcaccctggggcactggggagcatgggtggcaatgtggtccctggatgtgaccttggagctacattgtattgtaaagggagcaggagagaggtgcccaggtaagggtgcttgtgggtaagggtgggtgtgacaaagagggagaccgttcccactgtgctggctccaggtgtcatcctacggtggaaccctccactatgagctgcactcagagacccagcgaggtgatatcttcattccctacgagagccggccggacgtcgtgctgcaggttgtggggcgcagtgggtgtggccaacgggatagtggaccagcccagttgccagccctcacctggtccatgtgtctggttctcagggcaaccaaatgagcatcgccttcctggaactggcgtaccctccgcctggccaggttcaccgaggacagctacagctggtagaggtgagcagagctggcctggagcccaacaagggcccaaaggagccgctgctctcattgtctccacgatggagaatgctgatgttagaaggag

SEQ ID NO: 27626 - DNA, 1114 bp, Mus musculus
gatgtttggcttgctgtcccttcactatctgccagactaggactaccatgctctggccttaaccagtctgaggagtctgccccagccaggcccttctgccagacccttgcaaagatgaccacctggtcttgttccataggactacgtactcattgtccctgaggatgcttacagctccagttacctccaagaggagcctttggacaaatcctatgacttcatcagccactgtgccacccagggctaccacattaggtgggctgggttggggcgggagagggggtccggagcacagggatcaggccaggagccaggctcactgtttacccccaatgtagccccagcagctcatctccattctgccggaatgccgccacctccttgtctctcttctacaacaacggggccctcccttgtggctgccacgaggtgggtgccgtaagccccacgtgcgagcccttcgggggccagtgtccctgccggggccacgttattggccgtgactgttcccgctgtgccaccggctactggggtttccccaactgcaggcgtgagtatccagtgctcaaagaatcagagccagtgtgcatggtgggcaagggaacgttctggagcctcactgactgcatggcacttcctgtctgtgctcactaactgcatggcacttcctgtctgtgctcctcaggcagctagcagcctgggtgatgcgcactgtttcgtgggcttgtctaatagggtctaggaagtgtagccctaacagtgacacataggagcctggcaggggtaaaagtagggtagtgtccccacccctccctaccacatccttatgggctgcacctggggcttgaacggggcagaggggtcaaccggtgctgtccaccccaacagcctgtgactgtggagcccgcctgtgtgacgagctcacgggccagtgtatctgtccaccacgcactgttccccctgactgcttggtctgccagccacagagctttggttgccaccccttggtgggctgtgaggagtgtaactgctcagggcccggcgtccaggagctgacggaccctacctgtgacatggacagcggccagtgcaggtgagttcagccgacggcacc

SEQ ID NO: 27627 - DNA, 1099 bp, Mus musculus
atgtatgtgtcccacatgtgtcccttgtacctgaggaggacggaagagggtgtcagacccatgcgggtactagaaatccaaccctggccttggaaaagtagcagcgctctaaccactgagccagctctccagctccaggttctattcccagagtctctccatgtggctctggttggctcacaatgtagatgaggctagcctggagttctctatacatacaagattagccttggtttcacagattcacctgcctctgcctcccaactgccaagattaaaggcatgccccaccacactgggcttggcttttttttttttttaataatttaataattgcattctttcgattctagaagttctaactagtcatttttcacatccgcctatttttagattcctttgtttatagtcattccaaaacattcttttacagcattttaccagattgcttcattaaatggagttgggcccaagtctgtcatgtgtggcatctgtagacgctcttgtgtcctttgcaaggcctccttgggggctctgtctcccaagggagaagcccccagggcagagttgtaggacttttacccattggccagccttgcactttatactgactccttccttcccttattacttcaaggatgcctcttaaccacgtagatcgctcaaaatgagctgcccatggtagacctgagctctgcctcagctgggttaggctgacaggtagttccttccttccttctacaccgaggctgaggttttcccagaagccttcgagatggatcaggaagcagaattgactcccaaggccctgggacccccaatggggatcagtgggagtcgagcttgatggcgtgaggctctgagttcctggcacacacagataggcttctggcctcttgctcaggaaatgcgtatgctgcccctttgagcgggctggctgtgaccctgccacacgctggtagaacgtgggaggtgttggtttatacaacgcagatgctccagtcttgtgctcatctccagccagctgtccccctgcccactgggacagcggcgggcctccggcctttggaaagaggaagtagttcttggccactagcccc

SEQ ID NO: 27628 - DNA, 1221 bp, Mus musculus
taaaggggtatggtgggccaagagcctggccccggctgctgccctggagacgtgcctgccccaaaatagcaagaattttaaaaataaccgccagcttttgtttgctttttgctttaaaagacatttttttccctctgcaaagagctgtgcagcagcagaaaggtcaggctgccttggcagcagagaggagcaggcgtggcgggggaggggctgaagccaggggtctgtgcccctcccgggtcatacctcgggcactgctgtagtcctgggagcagggaccaggttggagaccgatgagaggtgtgagggcatagccttcctgccctccagtgtctgcggccagcaagcccttgaggacagttgacaggtttaacctgacaggtagacagaggtgggtggctaagtacatcccatcccagcccgggcttagaagtttccatgtgcccttactctgcccatcagcagcttggaattggtgtttgtaaaagtgctctcagctgggaaaaatgcagggccagctgactggggaaggccagagcttccagcaagggtgcagccgggggccgggcccagggaaaggcgggggtgggccccagggactcatgagggccaggctgccagctcccaggggcagccagtgtccctattgctgtccctggcctgtcttcttcacaagggtccctctgtcattatacaatcccagacctgctggacctgcttgaccttcagtttggggccacagggcacaagaggctgtggcatgaggcagggtgcaaagtaagttgtccctgaagaggccagaatccctcctccagctgggtggggcatctccctgccctccccccaccccattagggaagtggacaatgacctcagaactggcagcctgtgaataggcctgtgcccctaccctgggagagagtggctgtgcttggtcccacccctttatctcagcaagggctgctcaaactgtgtctggggtcctggtgcactgcctgcctgcagtcggtcagtccctgtgtgtgtgtctgtctgtttgtctctgtctatgactctgtgtctctgtctctatctttctgtgtctctgtctgtgtctctctgtctgtctgtcaccccacccccacccccttctctgagtagtcctccctgtcctggaactagctctgtagaccttgctggcagtgaactcagatccacctgcctctgcctcctgagtgctgg

SEQ ID NO: 27629 - DNA, 2253 bp, Mus musculus
agcccctccgtcctccgctggagaggttggacttggcttgtcttccagccgccctcgaggctagcttgtcagagggagcccagccgctgctggatccctgactccaccgacctgaggcgccgccagagcctgggaggggaacgagcgtggcggagggaggcgggaacgggaagaccaatcctccgaagaggaaactgaggttggatcaaatgagctggaccgctggctttccgctgcacattcattctcttcaagaaccccctactcaccctgcgtccttgccatcctgcccctcctcgccccaggccctgccctactcctctggctccagccgccacccggtccacacgcctagggaagtgagtctggcctgagagtgcacgcctttaatctcagcattcgggatgccgaggcaggtggattatctatttgaggccactctggactacactgagttcccgtctcgaaaaaggaaagttcccagaccacagtcaccataatgctcagtaagcctctttgtttacgaggtcagagagcagcccggacacaagactgcccacgctgttgacgactctcctgagattacatttctccgtgagtgaatccactgctcactcatctgtagaactttatgcctgatatctctctgggactggagctgcagtctggagctgggacatacacccagttacatggtcttggggagaacctccctgccatgtgcacactgactggtgatcaccttccaagactgtctgtcacggggtctggtgaaaccgaggctacactttcctcctcacacctggaaaccagtagtcatgtatgcattaagagttcccgcgcagggcgtggtggcgcacgcctttaatcccagcactcgggaggcagaggcaggcagatttctgagttccaggccagcctggtctacacagtgagctccaggacagccagggctacacagagaaaccctgttttgaaaaaaataataaattcccgcgcagcaggggttatctttcagattaggcacagacaccttacccaagcacctgttttcacagagagctcctttaaatgggggtggggaagaggagttaaagtggctgttttctacttggtcagaaaaacacaagcaaatgaccttgcaggtgtaacttttaataagagaaaaggggggttccatgctagaccgggctgcacagtggtgtattttgattggataggacttttaatagctggactttggtagtcagcctcacgaggaggaagtgaccatataagggagtagagtttggtggctaactttaagaatggaatctatcgtggttttttttttttttttttttttttttttttaagcaaggcaaaaggaatgggctagaagggcaaggctagctgggcgtggtggcgcacgcctttaatcccagcactcgggaggcagaggcaggcggacagcctgcctgagttcgaggacagcctggtctacacagtgagttccaggacagccagggctatacagagaaaccctgtctcgaaaaaccaaaaaagaaaaagaaaaaagaaaagaagtgaggataccagagcctctgaccttaggaaaatcactgttcatatcatccataaggcatgtggacaggggtggttttagttttgagatctgcagctgctctggctgcatccgtgcatattgaattgaaccctcaaggcctccttagtggccacagatgaagcagccgatgtgccaggaaggagagcatggccaaaaggaagccccagaaatcttagtaaactccactctgcaaattcagcactccttgaaagggctgggactggagtcaagtagaaaagcttaatgcaaatgatgctaggcagaatgttcagaaaggtctagcctgtggtaactgccaaaaacaatgcccagagcccacctaacatggtaaaagtaagattcgcaaggatcaaagaagtagtaactccactgcacctccaaaataaatgaagcaggaaggctgcatgaagcccacaacaaggaaaattcacatggcctggtgtccattcagtgattgtcagattagctggtcactagagagagagagatccagaactcactcagatgttaaattagcagacagggctgtgataagggctttcacagaatgtacaccatctgttccagacctttgggagaggcaggacactgcctgcctgcagcttggcactaggcagatgtgggcagaagatcaagagtttgatctt

SEQ ID NO: 27630 - DNA, 1235 bp, Mus musculus
ccacgctcgttcccctcccaggctctggcggcgcctcaggtcggtggagtcagggatccagcagcggctgggctccctctgacaagctagcctcgagggcggctggaagacaagccaagtccaacctctccagcggaggacggaggggctggactccgcaatggaggcggggcctgaggaagaaggcatgtcttggctggaggcggagacagggaccgatgcctgtgctttgtgcggaaagagccaggctttctttgcaccggaagcggaagttaaaacacacaaacaggcctccggtatggtggatacgagtaccctgacccggaagcacttaccgaggacccgccctcctgcccaatagtgctgcggaggcacgagctacttcctttctgcgctctcgctggacaagtgagcaggtaggcctcggtgcgggctgtgtgcgagcggggccgggctgggccgggctgggcgcagttggggaggtcgcggtcacatggccgagagtgcttgcgggccatgggtctggttgggcccgcagactcggagtgcgggcctgaccagtctcaagacctgcgtggtaactctgcagggacggcctcaggatgcagaacgacgccggcgagtttgtggacctgtacgtgccgcggaaatggtgagcatctgcgggcccgtcattctcgcgcccgctttccccgctcccattcatccactgttcttttgcgacctattaaacgcactgtgcatctctttacccagctccgcaagcaaccgcatcattgctgccaaggaccacgcgtccatccagatgaacgtggccgaggtgagctgggaacctgacggttcctgagggaaggaattacgaggccctcaggcctcagcctggctcttggtgtgtttactaacatcggggtgaggtcgaatcttccaacctctttttttttttttttaacccaggttgataggaccacaggccggtttaatggccagtttaaaacctatggcatctgcggggccattcgcaggatggtgagttctaccacctggtctgccttgtactgttcatgtgacatctgagctctgatggtggtgtccttttcttcctgtgggaatggttttgggcttaatagtgcatgctctgcctgctaagcagggagccagctctgtgtggatactcaggtatttatttttaattttaaagggcgagtcagatgattctattctccgattggctaagg

SEQ ID NO: 27631 - DNA, 1235 bp, Mus musculus; identical to SEQ ID NO: 27630

SEQ ID NO: 27632 - DNA, 1133 bp, Mus musculus
gaaagtttttaattttggggcagagcacgccttgacctcgagacgctccctgttgagggttttcctgaagcaagtgaacagtgtggggcttggtttgttcttcgtgtggcgagaccagcctggcttatgttgtgaatcctgagggccagccttccttctgcctacccatgaaaccattcctgtagagacctaggtgtccagaccttctgaacttgctacaattgtcaggcttctgtcttctggtgcctccacccaggcagttccccatcagcactattttatctttggtcaagatacaggatagggcagacaccttgattctgagtctgctctcactgcaccttgttaaagcatctgccactgtgaaacccgtgtcacatgcacagcagtgctttggccaacccctgctgcctcctgccagcacagcttttccctgtcactggacaaccactgactgtgggctcttgactttcctaagcaatatcgtgatggagaaaagtcattataacttgagatttggtctctatgggaacagacaatggcccattcaggcctgctgctgactttgaaccacacttgatcctcaagcaggaaggcaccgatcctgctacctactgtcaatgactacatgtcatcaggccaagttgccctgtgccactgtcatcactcaagagctatcctccacctccccaggcctgttatccttccctagaaactggtcaccagcctggcagacgccagccaccgcttggttccagtctcatgtcccagagatgctcgtcctcaagcctgacaccgaccacctaggtctatcggatcagtaacagctcagacaggagctcaaaggatagtaaatacgttttagcctgtccatgcttatgctggtgtaagcatgccacgttctcagagcatctttaggtgcaataagtcgttcctgcaaacaggttatcttcagggcagccccatcattttttttttaaatgaacttagatatatatggctgactgatgggataaatgttatttaagcttctagatgtagtaaggtgtattcattttaccaagctggtctgctgttagtccttcctaagcttcgctaagagctgctggtttgtggtattgagcactgttaaa

SEQ ID NO: 27633 - DNA, 1196 bp, Mus musculus
ggctggcttgcagggaccatctagagtccttactctacagatcatggcttccctaagctgagggcagggtacatccttgatgagagaggtacacctctgcctggagatgcccccatgccctcagtggtcagtgctgagatcagcctagggcactgaccagtatggatagaagccatcagatgcagcccaccttgcaggtcttgtctgggtagtgagagggtatcatattggtgactccactctctccagacacatccttatctggcccagatgcccacacctgatagctcccttccattctttgcactttcctatgctgacaccctcaccccatgtacacccaccctatgcctttttcactgggctctgggcttccaggtccactgcacagagagaacccaccctactcctacagctatccctgagcagagatgggcagggatgattctttccattcctcagtgtccgcactaatgcagcagaaatgacaggatcagggggtttttggccctcactaagtgagtttcttcttcaggatacctggtggtgccagcaggcggtggtggtacactcctaggtggcttcctggtaaacaagttcaagctccgtggctctgggatcatcaggttctgtctattctgcaccttgaccagcctactagccttctttgtcttcctcatgcactgccccaatgtgcacatggcaggtgtgaccaccggctacgttgggaggtgagcctagtagagaccctacacgtgggggccctgcgttcctgaggagggctggcaccgttggggagggggtgaaggtcactgtaacatgtgtagggaagtctaccaggaagcctgaacacctgctaacataccgcctgatgccggttctgtagcctcctgcctaaaggacagctggacctaaaggcagcttgcaacgccatctactgttgccagccgaagcactacagccccctgtgtggctcagatggcaccatgtactactctccctgctacgcaggctgccctgctgatgccgagacagacctgggtggccagaaggtgagtgtggccacgcccacatccccctctctggccgggacccggaaacttctgcctttgtgtgatcagcactgttgttgggctccccaggtataccgaggctgtagctgtatccttgagaaggcttcctctggctggggcaat

SEQ ID NO: 27634 - DNA, 1199 bp, Mus musculus
ctctggtgtccttgggcagccaaacacacacagatacacacacacacacacacacacacacacacacacacacacacacacacatacaaagtgagctatacagagggcagccaggaagatctgcagttagacaggtcgacaaagattaggaacctgcacccagacggctggcaggaagaggcacttcccgtaggactgaagagaaaccttcctagcatccctctctggatagtctgcagggaagtgaaatctcaagggggcggacctggggctgagtccaaagtggtgcgtcttcccggaggggatagaggcaggaatcccggtgcacgcgcctccagggttgtccttctgggcggggggcggggggcactgccttctccaggacaccgcttcccgcctagctccgagcgtagcagcccctgctgggggactccgcgcaagggcggaaactgagcggtgggcgggacctggcgccgccccgcccccgcgcttcctcctctttcactttcctttccgcggaaagcgggtccagcctgtcgagtatggacgacccggaatgcgattccacctgggaggacgagagcgaggaggacggcgaggatggccaggcggatgatacgaccgatgaggacacgggcgacgatgacggcgacgcggaggaggcacggccaagcctgttccaggtgcggtgcgggaggaccggagggcgacaggacaacgccaggccgtgatcgccgggcccaggccgctgtcccctagggggacgccgggcccaggccttggcggaccgagcgctggtgacgtcaaggaagcgactgatgggggtcgtccgtgggtgacgtcagagcgcgccccagggcctcatcctgcgtgggtggcctttcctcaggttgccctccctccaccccacactcagcccctaccccacttcagacagcctccactggctcagaagtgaccccggcctaggacgccgggagcaggggtctgtctatctgcccttagctctggtaacttttgttgccacccggagcatgttccgttatacttttgtatcaagccgcatgtaaacctcagtggcgttctgtaagacgcactggcctgcttatagctgtgattccgggtgtgatggagaacctagaaaaacgagagtgaggattatgaccccaaaatccattctccccatcgcttcgatctct

SEQ ID NO: 27635 - DNA, 1317 bp, Mus musculus
ccccctttcctctcggggtcagttatcttgtaggaattcccacattctgcatttcacaaagttatggaaatggttaacttctttttcctgttatcttctagagtagccttcctgagttgtcgtcccccaatgcttgggtcatcagacttcgtagctatctggtgacactggggccaatcctgtgtttagggagttagccttgcctagcctttagatataatgctttttaaaaggcagggagagcttgggtgagcaagcagagtctagcagctggcagggagctgcttttggtctattcagaggaacctcagggactgcacctagcccttggctggccagggaatcctctccagtgtatgtgaagagatagccaccaacctggacacttaacaaatgtaaaaaataaaaataacacatacaacataactgtactggggggattagtgtacatgtctgtgataccttagaagactgtactttgaatagtttacatgcctcttaatttcagtctcttgtacttttgaaactagaagcattgattcctttgaactcagtgcattaacaatcacttcttgactttaggaatttgagagcgtgttttgcggtaaaactggcagaaggctaaagctgactagacccgaatccctggtgacctgccctgcacagggcagcctgcagagcagccctgccatggagatcaagtgactggactgacccaggacctgggagagaaccgccgttcctgcggcatcatgcacatgcctgccatcccggagttcagctctgagtcctctcgagggatgcggctccagttgtgggactccagtaaggacgttgagagcacatttcgtgaaagtatttatctaaacaaaatacttacccactaatgtccgatgaccatttgaggatgaagacatcttgataattagtaatttttcaattacctgtccgacaccatcatgtgttcttaacatgataacttttaaaaaattaacatccttggtaatttcttgagtcttgagactaaagaaaacattgccgtttacttattttgtttacattttaaatgtgcccctttagcaattggaagaaggtaaattgttcttaactagaagaggtttggaaactttatttcatttgttctgtcccccctatttccagtctcatggtactctattggaaaatgcagtgccattttaaaactttgctaagaattttccagagacttcttttaaagctccttttgcccataaacattttcgcagtacattgctttaatgcccacatttccatattgtgaggcagtgctttatgtgt

SEQ ID NO: 27636 - DNA, 1683 bp, Mus musculus
gagaaaggcggcgagaccgagacaggtcccgcagcagagaccgagacagggaccgtgagagagcacgagacagggacagggaccgaggccgggaccggaaggaccgcagcaagagcagagagagccctcgggaccagaagcctgaggccaggacctctgaggggggccctgctgcagcccaggcctagaggccattgcactcggggctggggacacgacctgctggtgtggacaaagacctgtgtcagttattgtgtatataggctcagcctggcaaagacccctttaaaagccaagtgcataaaatgtgttgagcaaagagtttttgaaatagctatgaacttatatacaggatataatattctggacttcaggaattactgtaattttgtgtataatggtttgttacaaattttcccaactttacaattctgattttttaaaaatatttccatttaaaattagagaaatgggaaaatgtctacaaaagcatattgctttttttcagattataaagttttttccaataacttgactggtgtaagttttaaggggatttcagtggaccttagagctagctttccctgtgtagccatctctgcttccgtctatccaggggctttcctcagtgctgtcctagtcggaaagcactattgtcgaggtgagctgggggctgtgcgcaattgcagcggtggaagaactgccttctgaggcccgcccagctcccagcaatgcagcaccttacaagttttttcagaacttaattagaaatagcctgtcctagtagaaattgtaacatttttaaataacaatttatttttaaatgttcaaatttatcagcctaaagaaagaaagattcagttcagagcatttaagagggaagagacaggagtcaagcattgcccattgctgccctctgagtggctctgcagactgacagactccagataggcgatgggtttggaagcttctcagtgggatggggcaatgtttgtaccaaatctggaaacgaagaggatggtggtgaagcagcctgcttcatggaaggataactgctgtgtcgccccggttgcctctaaagatgctgtaagaaggctggctaacgtatctgactgtgcaaatatgtttgatagttccttttatattttcataaacttactttttcagatagagaattagcttcgtttgttcttcggagtcttatttcactgtacatcactacagattttttcactttatagcacagatgtttaagttgaaaagacatgggaaaatagcaatttgggatatttgctattgtaaaccaaatagtaggctaaattacatgaaagtgtcagtttcaacatctaatatgtgaaggttttttgtttttttaaaaaagtgtaaagtaaaattttctaacttaaatgcacaagcataaaaatcaagtgtgtttctttaggtttactttgtagaaatttctgtacattgtattttgtattgcagagtgttatatcactgtccattgaaacacaggactccataggttttgttacttgaagtagaataaatatctacagagttcttgtctctctcttcactcaaccttgacccctagttgtcacaggtacaggcaaaggcatcccactccctactggcaaccctacttgtgtgttggatgctgccggctgtgctacggtatca

SEQ ID NO: 27637 - DNA, 1198 bp, Mus musculus
tagctgtgttccaggcaagctgagacagtggtttctgtgcttgtgtacccttgcctcgggtgtgcttttgattgacattccctttcactacaattgagctgagctcttgaacgtcttctcctcccctcacattcttcaggtcaggttccatcctcggaggatgaaccagctcctaagaagcaaaagctttcagcttcttctaagaaggaagactttaagcccaggcatgacagctctccacctaatgcagttcctaacactgctgatgaagggattgcagacacgctgcctgaaaatgcctctgagccagacccggagagtacatctagtcttaaccaggagagaaagtgtttccctgagtctccaggcgatagccatcctgagccctcgtctctgggtggcctttctccctcttctgcctctggtgggagtggggtggtcaccacagtcaccatgtctggtcgagaccccagaactgccctgagtgggtcgtgcacagtcacagcctccatggcagcccatctggacaactcccaggcttcagaaaccaaactggacatgataaagcctgcattgacttctgcagtggtgcccaagtccatactggctaagccatcctcctctcctgacccgagatacctgtcagtaccaccatcaccaaggtatgtttttaaaaggatggggtctgagcaaacctccaactctgcctttagactgaccagggaagctggtgattagacttaccagaaacctgataaatctttactgtcctaaaaatgcccaatttcttggctgcctagttaatatttaggtgcgattcaggtcttatatacaaaaaatttaacttaatggctatttcagcttgttgcttgttcaacttattttcttgaccaaatgtctaagtcataaatagttgcttgctaagtagaagctatacaccttagggttctcttttgctcccaagtatgaagtcatcataatttgaaatatccattgtacaaaaggaaattaatatgttttttattgtttggttttacagcatttcagaatcacgatccccaccagaaggagatacaaccctctttttgtctcgactcaacacgatttggaaaggatttattaatatgcagagtgtagcaaaatttgtcactaaggcatatcctgtctctgggtgtttggattatctcagtgaggttag

SEQ ID NO: 27638 - DNA, 1227 bp, Mus musculus
gtctgttggcctcactgtctgatcgtgcttttatgctgctggactgccctcatgtcatagtttcctacccattttgcatatgtttattcttgcctggatgattttctgcagaacattcactgactaacttagagtctcttcttagttagctcacatcgtctcccagacagcatagaacacagtggtcagaagaagcatctagctcatgtgtggctctgctcctgtcagaaaccctatcttaccaccctttgtaagggcacccactcagtgctcctggtgtgcattccaagaccacatggtatggtgctgtggtaggttgttagtcacatgtgattgccttttgtcattaggtatggatgataaagggcacctgagcaatgaggaagcacccaaggctatcaaacccaccagtaaggagttcaggaaaacctggggttttcgaagaaccacgattgccaaacgtgagggtgcaggagacacggaggtggaccccagtgagcagcaaccacagcagcataacctctccctgcgccgcagtggacggcaaccaaaacgtactgagagggtagaagagtttcttaccacggttcggcgccgagggaaaaagaatgtgccggtgtccctggaggattccagtgagcccacatcttccacagtcactgatgtggagacagcttccgaggggagcgttgaaagcagttctgagatcagaagtggccctgtatctgactccttagggaaagaacatcctgcctcttctgaaaaggcaaaaggaggtgaagaggaagaagacacctctgacagtgacagtgatggccttacgttgaaggaacttcagaaccgccttcggagaaagcgagagcaagaacctgtggagaggtccctgagaggcagtcagaatcgcctgaggaagaagcgcagagaggaagattctgccgaaactgggagtgtccaaataggcagtgccgagcaggacagacctctctgtaagcaggagcctgaggctagtcagggaccagtgtcccagtcagagacagatgacatagaaaatcagttggaagggaaggcgactcagggaaatacagaggaaaaccccagggaagcgggcaaaccaaagcctgagtgtgaggtttacgaccccaatgccctgtactgcatctgccgccagcctcacaacaacaggtaggtggaggaagggagctggtagagaaccaagggatggagaca

SEQ ID NO: 27639 - DNA, 1186 bp, Mus musculus
aaacaaaaaagagtttgatctccaatcccaacacatggtggcataattacttgtaactccagcttcaagggatctgatgcgctcttctgaactctacaggcatctgaacacatgtgcacaaacacctacacataatttaaaaataataaaaaaaaatatttaaaaagaaccaggacagcagttgatctaccatgggtgtgccctgctagaaacacctcagattcattatgtgtttaattttgatttgttacatgcttagaaactatagctgttgccaaatttttcatgaccttcccccgtttcagttctagaatcccatacaggattgcagctcacagttagaaaaatagtttcggaactggagaggtggctcagtagttaagggcactcctgttcttaaggagaacccaggctcagctcacttggagttactgcctgtaactccagttttgggggattgggctccctcttctggccttcatgagcaccttgcccgtgcatatggtacacatacatacagatccaggcaaaatacccttacacataagcatggtaatgcatatctttttttgttgttgttgtttttcgaggcagggtttctctgtagccctagctgttctgaactcactctgtagaccacgctagtctggagctcagagatccgtctgcctctgcctcccaagtgctgggattaaagacgtgcaccacccctgcctggtggtaatcccagcactcggggcagaggcgatggggtcagcctggtctgtacagtgagttccaggacagccaggttatgtagagagaacggtttcttggtgtctcaaagaaagaaagttctaaagtgctattttgcttgactttcaacaccctaccccatattgccattgccttatatcatggatcccctaaaaccaaggtttactgtgctgtggagatggcttagtaaaatgctcaagcaaagggacctgagcttgatctgtgtacagaagactggtactgtggcttctgtcatcccagagctggcaggcagacacgagacccctgggacttcctggcaagcccatgtctctgaactggtgagctccagattcagtgaggggtcattctcaaaaacaagagattgaggaggaggacacctgcctgagtacacatgtgcagcttcacatacacacgtgaatgaatgaac

SEQ ID NO: 27640 - DNA, 1188 bp, Mus musculus
tgtgactggcagattgtcaccacagtagagaacctttcccctgtacttttctttggccccattgtttaaaaggggaaaatggcctttttaaaccctgtcaagcccatgatggaagacaccacctctgccatgccctgtatcccgagagctgcacacactgcttccagattgctggttccagaagatgtaatttgccactgtgtgctgcacggctagggagtgtcatctcagctgaaggcctcacccaagacaggcagacagacatgaacattactgatgtgcttttccgacctgctatgtgcaggcaggcaggggttatcttcctgggtctcacagactttcatggttttccttaccccttcttttctttttcttcctcattttgttccttcataggaaaaaaatgtataaatttgtaaatcttaattcaaagataacttttgtgtgggtattgagtttggatcggttttttgtcttggtgtgggctgtgtggcttttgggaggggatgtgtgtgagagaggtgaggttgtggtggtttttattttttaaaatatatttttggtgctgtatgtgatgagagactcattcatagtggatcaatgaataatctcttgtaggtaactttatttgaaaataaagatttccttttacttccagaataaccacaatggcttctaaaaagttctcatctcacacagcccttgttttgggtgtcctttaccttgcacaggggcagcaccttaactcacagctgaaagactaattgccatgtgcctagggaatgccctgcgtaataaatagcaaagcagcctggtgttgatgggatgactggctggcattacccagctggatgttcatgctagccagattgaacttaagtcatttcttatctcttccttcagtgtcagcagtgctgtgtgtcctgcttctcatcagccattttttacctgctcagtggaaggcagaaaagacattacctgtagggtatggtatgcacatgtaggtcggtgctctgagtgatgagtgtatacatgtattgtgcctgacaccggtgtgtttgatttttggcagtggtccaggcctgatggtgtcagtgctaaaggctggggtgggggtgcacaaacctgcaaagccctcagacagttatccatggatgtggatggtgaagatgatgtgggtactgtcct

SEQ ID NO: 27641 - DNA, 1445 bp, Mus musculus
tacacacacgtctttttttaaggcagaggaaaaggaagttttaattttcaggtagctaatagattaaatgaaacagaagttgggaaggagtatcgaagattaagtgtttgtttttaaagcaccatataaagccaggcatggtggctcctgcctgcaattacagcatttacaaggctgaggaagggtttttccagtccagccaaggctatattatacataagatcttttcttatatgaaaaagtaccagatagctagcatatttgtatcttttgttaatatatatatatgattacttatatagctaatcactttgacgtgttcttaaaattagagggcatgagatgtatagtaatggaggttctctctgtagggattatcctcaaatacacaggaggcttgttgcatgcataaaatgttcagtggctgtaagacaaggagttgacaatttaccaacatttcagtcagtagcttagctgatgccacagataccagtgactctggagaacgtcaaatagaactgcttgcttatccatggtctgttagtgcctagaaaccccctccaaggatttacatgtagacttttcctgttagagcagaccaagtagctttatttctatttgcaccttttgatggaaagtgccttgaaataaacgagacaagaatattctggtactcttctccaacgtcatacgtagagctgtgcaaggaaaaaccaagtttgaaattttctaaagcgtggtaatctttgcacactaaagatgagaatttgttttgtctcttgaattatgatttgggtttggcatttgagaccccctcctcgcccccatagtgtatgtagttgaagactttgtatagtgactttgaggtggggcctgtagaactgaggtgggcagtatgtcatctttattttcttttgtgctattagttttgaagaggagaaaccaggagaatccttccagagggattcttagatgttccatgataatgacactgatgtgatcaagagaaagaagtgggattcccttccaggttgttgctctccagtctcagaacaatcaaaagaccaaattccaaatgtcaggttaacagaacagtgtgtctacacccctgcatttcaacatgctgaattgtgtgcaggggacaccatgcaggggtatagactgttcaccagcctttgcttactgctgctttgttgacatgtctcgttctgacaccatgcatattttttgtttcacaaacattgcttttttcagattcttagtaagccgccttgccagcaggagatgcagagtctgtataaacctctagctcgctggagcactcatgtgtatatgtaattgtaattcttcattgggggtatttgtatccctgccacatatcatctgagtacaggtcgggtagcttctgggtgcctgctgtgaatttgttagtaaaagttcttatg

SEQ ID NO: 27642 - DNA, 1187 bp, Mus musculus
aagggatgggcacagccacagttgcctgaaagaggatcacatatggttgggaggtgaccatcacaagctgttggcagtagctggggtagacattctctaggcttctagttgatacttgtgagctgccccacacccaactgacaaaaccatccttgcacttcaagatgggaaatttgatatggaaacattacagagtcaacgtctggcaggggggccactttcttgtgctgactgactcacttgcttatagtcatcttgactgctcaaactgaataactagattttactccactgttactgacgagcaactgtgagaagtgagacttgaggagcccagattgtagtgttggatgtctgtagcagttagggccagactgggctacacagtaagaccctgcctgaaaagaagagagatttctgtactgaacatcatttgcatccaccttctaagccaaatgtgtacactgtagagaaaaagttcaagtagccatgtctgagtccacaggaagccatagagtggacctcacgatgaccgaagatgctcctgtatggccagttttattcacaaaacaatccctggggctctggaacagttcattcttttttttggatgctggtaccatcagctgaaccttgtaaacaccccaaatgctgagaaacactgtcaccctcagccagcagtatccctcacttgctataccagagttctgggtgacaggatagcctgttttacttttgagaaccatgctggaggggttgtcaggcatctgacctacaagaaggataattcctgtgtatgcatgcacatgggtgagatgtgtttataggaagggggaagtcagagccatttagagactgacttccaggcactgcaggtcccacctctgaggtctggcagtcatgcatggcagagtagattcaagagatgatcagtcacatgaaggaaaagcaactacactgtagtagccaccttccaaaaatctcccaatccagagtctccaccagactttcagaaaggccaggcaagagaacgtttatcaggacctgtaagaaggtacttccttgaaaagtcacatgtgaggagctgattaagagccctcgttcttgccaggcgttcttgccaggcgtggtggcgcacacctttaatcccagcactagggaggcagaggcaggtggatttctgagtt

SEQ ID NO: 27643 - DNA, 1138 bp, Mus musculus
agctgttgcaggcctgtgtggggtctagctgcccagcaaccttgcccagcccgacccctgaggacctttgagtactcactgtgcttgcttggagagacttctgctcccccggagctgggttcacctgcttagcacatggcaccgcaggttatgagctgtctgctacttctggatgccttcctgtatctccatggtctacaggaaacatgagaatatgctcagtgcttgtgtttgggatcctggtgtaatcctggcagccagaggcatgggcccaggttctaagccctgtgaatggtctgccatgtgtttaacctgccccacatcctgagggcccttgtgccattcttagcccgtgtttatgttctagaagtcatcagattcagtgctttcgaggttttattaacctgccgaaatccccaccgaagaagttatcttaactcccttactgtattcatgattgcgttttcctgcccttgggaaggtatctaagtgattaaggctgtgtgtgggcctccccaggtcctgaccctctctctgtgtctcacaggcctgaatgccaggcctggacaggaatcctgctcctgggcacctgcctgctgtactgcgcccgagtcaccatgcccgtctgtactgttgccatgagccaggactttggctggaacaagaaggaggctggtatcgtgctcagcagcttcttctggggctactgcctgactcaggtggtgggcggccaccttggggatcggtaaccaaccccctctccccactgctcaggcctgagggggatcattaccatcacctgacacagtgtggtcagtcccgcccttgcacacaggagaggaggggtggataggggaggagttcaacaaatatttggggagaggcttagccttcggggagaggaagtcgggtgtggcagtgctgagccacagcagacaggccaaactcagtcctgtataccatacctcagctctgggcccttctatagggcaggtcactgcagtgtctaccacagctctctgtgcattggttcacagtgatgaccctcagacccccctcaaacagccaccccatcctgtccctccctgtgtctcctccagcatcggaggagagaaggtcatcttgctgtcagcctccg

SEQ ID NO: 27644 - DNA, 1271 bp, Mus musculus
gtctgagtctcctgtggcgcatagctcatagttcatattttatccctgggtctgccctgctctgcccctgagctcactgatgtgagggggccagcttccccggaccatcagtcagtccctgcctctcttgtccaggtgtggtaggcgtgtgtctgagtggctacctgatcgagaccactggttcctggacctgtgtgttccacctggtagccatcatcagcaacctggggctgggcaccttcctggtgttcgggaaggcgcagagggtggacctggtccccactcatgaggacctctaactccctgacgatccagtcacccaggacctgatgtcagcagcctgaggataacaaccctgtcagtgaaacggaatctccaccccagacgtatgagcatacagcaagaccacagtttcctggggaggcctgagtacacacaggcctgtgtcaggaggagggtcatggctccaaatccgcttgccagtcccgccctctctcaggttcagtgggactgccactgttaaggaagccacgttgctgatgggaggtctcaccggccacagtgagggttgtttcctgacaagacttttgtgttaaggatgtgttgtgtgctggtagatgttcaggagtggctctgacccccaacctactctgggcaccttcctacccccatctctccagcaacaataacctaagatgtctatagacattagaccatgtctccataagacaggcccactagaaacaccgttcagaaccatagagaagccatggtttctgcttctctccaggagtcaggcttgccactccagctgggccggtgtgcagtgggccagggtcctcacctgccttgcagaccctggttcccgccctgtggatctctcagcactactgatgtgtcctgggttggcaggtgcctggcagtccagacatcacagaccccagaacaaggtgaaaccccccccccccatttctggccttgtttttctacctcccgcacttatttcttgtagagcttgtggtttcatgagctgataatgaattctccaagatgcctattagattttctttatagatgtggtgagtcttgccagagccttatttaagtgaaaactattaaactatttaaagtaagattgttgttttattcaataccttttgttatgtgagcttttcctaaggaagacaaacaaaaatctattcactcctatttagatcatctatgacacaccagaaaatggttccacatagccaggcacagtggcacacatc

SEQ ID NO: 27645 - DNA, 2290 bp, Mus musculus
tagaaaaataattcctttgtactaggcatgctagagtgcctgccctgtgcatgctggtccctccctggggtgcaggtgcttttgttgttctactgttttttcactgggatgattggcacatgagggagagctggctgggttgggggaggggaggcatgggatgagtgggcagaagacacatgattggacatgtctctgtaacttctgtgcagagggtcttgagaaaggataggacagcatatggtggctcctgccctggtctgtgggaccaggctgcttggtagttcagaactagatccgcagggacagaccagacaagcacacatccccttttgctgcagctaacaaaatggcctgaggcctcgactttgtgggccttcatctgcaaatcaaagtgcttcatgaacttataacctcttctcttctttttacaggaaagacagaatcgaaacaaacaataagaacaagccagtttgtttttggttaatggttgactttgaaaacagagttttaaagctgtatgcttggtgctgtctccgagtcagctccagtgtcgtcctcgtgcggggttgattgttgcatctttatctttgtagttcatttttgccagatggatctgcattcatttgtatttttctatgtattataatattgtagaactcactaataaaggagtattttgtttgtcagcttatcagtcagattgacctaatgcaaaatataaatattcttcaaaacaaaacacctaatacatcccaaagatatttttattttggcagaaattatgttcttattcttatatctagccatttaatatccctataggatacttcatatttcttgtcctctcctgctttacagcaaacaaaaagcccattcagcatgtgctgttgatgtctcttcacagtactgaagtggcttgccattttactatctgtggtatccatcatattgctgacctgcccttttgagtttcctactagacaaataacttttagttttaagtgtgctcacagctgtctatgggcaagctgtccatagtttagtgcccacacagagcggtgctccagttctccttgccaccgtctgccactgcatgaggtttgggctctgtggcaaggaactagaaggtgttttaagtctggttcagctttgcgacattcttagttgttcgtagatcatttttagttgtcctctttcttctctagagaatcctgatgctgtcttaagtttttataccagtaacgctaagctttaattgtaggaatctgatagtacaggcagtgtgatggatgctgctgccgactgtaaatttcactgtgtgtctattttttttttctgttgaatgggtgaaaaaagcaaaaaaacaaaaaatcctttagaaaacaaatttgctatcatgttttgtggaatgaggagcctcggaggagctcaccgccatctggagttggagtttagcatgaaagtggtgctcatgcccgacgccctcgcatactgaatctgcacgcgcccactgtagaggatctttactgtcttagagagcagataccttccgaaactatttactccaaaagaccctctgagttaacatttaagctgtattatttagacttgtatttagaacgtgtcacttcctcgagctgttactgcctgtacggagtcgtggacaacatcggatacctgtcctctaggagaatacaagccttaataaacacctgttgagcaagcttgtgtgttcttgttttccctgctatatgtgccttgtctctctcttatagctgaaaatctatggggtctgctctaagcagtggaagccaagggctgcagttttgcttactcctgggtactaaagggacagagaaactttcatagctccatgtaggacttggaattcagtccccaactatgtaagaatgtgaagctgacagaggtggacgagctgttcagcagccatatatgacttcgtttgcacacttgcctccaggctggtactccttgatctctcccttatgtcttctgaaaattcactgttgtagacatccaatgtactctctctagtaactaaatctcacatgttaaacatttctcccccccccccccttttaactaggtattttatttatatttcaaatgctatcccgaaagttccctgtatcctccccctgccctgctcccctacctacccactcccacttcttggctctggcgttcccctgtactggggcatataacgtttgcaagaccaaggggcctttcttcccaatgatggccgtctaggccgtcttctgct

SEQ ID NO: 27646 - DNA, 1284 bp, Mus musculus
ccacagcctgtgtggcctgtgctgtgaaactcaccttgtgaccctccgcctttcctgcatcagcctgtccagccctcagttaaatgggacaaactctccacagatggccacacaaagcagactgggctctggtcctccttggacacctgatttgaacttggccagccctggacagctcagaaatgaggaaaggagagtaaaggggccgggagcatttcctacgtatctgccgctcccacctggtacaggggagcctgagcatggagggggtgctcaggggccaactgccactgccagggtcaagcatcttaatggggaccctccatccgggcagagcacctgttagtatttgccatgcattgtgtctgtgacagcccaggccttctcccagcctgttcaggctgctcagagcacacttggttgtgtctccctcagcatgcagctgtccttccccacttatcgccatgtggattttgtggaacactgcagttgagacccatgtgttatcagtggttggtgtgacagccgccccctcctaggattccgtgactgctgtgtgctgtggctggagagaccagctggggtctctgtctccttaaacccactcctgtctgaccctcagtttgaccagcagtgcatgacctgaagttctgtggtttgtgtgtctgtcatgtttgctcctactttctaatgttgagctgtctgggccctaattttccagtgcttgcttcaccccccgcctcccccatggggattcatggttctctgctgaactggtagggcttaagtttggggaatcctctgggattgctttgtcctcaagtggacatgacactactcagtagtcatgtaacaggacatctccgagctagggaagcaagggagaagatacccaggacttgtgcctgatagagtaaccactgatagatgacatcataggtcagagacttggggttgttgagtacacagaaagtcaggagtcaaggaagtctgaacatggaagaagaacctcactgaaactggaatatccccagaatgaaggagtccttgatttggtggacataaggtgataaaaggggaatgaaatctattggttctggtccaggaagctgcctgcctcaggtcatttgggagtggcaaatagccctagctacaaacaggtttctggtgctatgttgagtacaggagctgcatgttttgaggcttgtttttaacataatccagagccctctataccacgtttctaatcccttaaaggacaggataagtaaagcccagggcaag

SEQ ID NO: 27647 - DNA, 1194 bp, Mus musculus
gatacagactcggcatcatggggccatgggggcttctgaggattgatgagctatagggtaaggggctcctggcagggactgaacagtgcccgactttgaaaaagaaacacatcagccttaaacacccttgagacatcagttcctctctgatgtggtcagcatacaatgattacctaacaacctggtaatgttgttctcctagagccaaaaggactgggcccaaggcagggagggaacattcggtgagctccgactccaggcctcggaataagccacttgtttcttccacccagtcctccagtgtccttcagcccatccatcaggccaaacccttcatgaaaacgtctctgttatcagcctggcttcctagaaggctctgctctagggctggctctgaggacagttctaataaggaattgtgctttgccaaggcttatggcttgggcttttggttccacagctgagtactaggagttgattgtcctacttacagatgaggagacatagaagagggaggaggagaagaagaagaggaagaggaagaggaggaggaggaagaggaagaggaagaagaagaggaggaggaggaggaggaggaagaggaagaggaagaggaagaggaagaggaagaagaagaagaagaagaagaagaagaagaagaagaagaagaagaagaagaagaagaaagacctgctcaagcaccaaaacgtagtgattgttggagctgggtcctggctgctgcccatcagctgcccacatgtcaagttgagactattgcctcctgagggatttccaaagagaacagaaagaagccattgtgtgtggggagccagctgtggttatgcattttggcagtagcaagggactggaggtaccacagatcaaaattgaccctttagacatacttaactgggcctcaaggtgactctcctacaccagagggacaacacaagaacccagatttgccccggactcttctagcacacagtgagcgccacagagaacagtggggagcccagggtatggtttctgctccttgggctgtaccgggaggcatggagatggggctactgtctcagagccccaactacttggcatagacctggtctccagctgcagaccaaggctgaaacccagtctgaagctgatactcagactgcaaagcctgtcagagccacttcacttagaagattg

SEQ ID NO: 27648 - DNA, 1162 bp, Mus musculus
aaggccaatggctgccccatggcaaaattttcctcagaaaacatttgtcctaacacattccatcacatgcccaccaacacatgcccatacactagacacaaatgtatattctcataagtgcacaccaaaatttaccacattttcatatgcacacacaagaatacatacaacaggtgtactttcaaacatgtatttcttattatacgtgcaagctcacacacagtttgtcagaccacacataacaggtatacatacacacatgaacacaatacaaacatataggcttataggctacatcctattccacatttacacatacagcaggtacccacttttatacctgaatatttacatatatgaacacatatgtatgagtaacctgtatgtataatgcacacacacatgtaggctgtctctctctctctctctctctctctctctctctctgtgtgtgtgtgtgtgtgtgtgtgtgtgtgtgtgtctacacacacaccactttttctcttgtgtcttcctgatggaagctgcctaggcagggtgcacaagaattaatggtgaatgttctaaaatggtgaacactgactggggtcagagtcctggttatctaggacttctgagcaacagtggtagagagtccacctagagaccattgagttcccacactgccctctccctggactaagtggtggctggctgcaggtactgagggtgtggctaggtcagggtgagggtagttctagttcgtactgaggtccagaccagtctttgccttgggttaatcttggtattggccatttcccagtgtccgcctgtacacatgcccgccttgttgtgccaggctgtgattggcatttcctggcttgagttcctgtcccttttgattgtggcctctggaaagtgcactcttgtctaacagggccaaaatacctgggctgagagcccatctgctgtcttacctgtggtcttggcagatcaagtggccatttgaggtcataaattagctcctggttatgctctcacgtttagggccctcactggaaagccccatgtagaagctggggagtcactagacactacatgggcctcctcggaggagacactctgaactgtagtcatcctcagatcctagacacaggagatatacatccaggaccaccgtcca

SEQ ID NO: 27649 - DNA, 1222 bp, Mus musculus
caacccaggcataagggtagatgcagcaggagatgcagagctgtgtgggatgccccttgatcccctgtgaaatcctgtgatcttccactcttcctcttctcatagacagtatctggagattggaaattcctaagaggggtaactgttggtcatgatatgcactggagagtccttcagcaggggcagccactgaagaacttgccagaagttgtacatggcctatttcttcacccccttttcctttcccaatatccaccccccactctcctggaaatggatccttaggagccaccacaggagacccttctgtgagctggcctgagctcaggcacatgctgaccagtaagctcagtgtttgagctgttggagtctggggtagagaaagggtggctctggggtcccttcctctgccccctttcacctgggtacaccctgggtcttttcctcaaaagcccagcccagcccagcagctgccattcttacaggtcttgtccatggaaaagaagctcgacttcttggtgagcatctatacacagagaatgggcatcccaccagcagagacagaggcctattttggggccaaggagcctgagccggcaccaccctaccacagcccagaggacagccgtgaccatgcagacaagcatggctgtatcattaagatcgtccgctccaccagctctacgggccagaggaactacgcagcacccccagccatcccccctgcccagtgtcctccctccacctcgtggcagcagagccaccagcgccatggcacctcccctgtgggagaccatggctcactggtacgcatcccaccaccccctgcacacgagcggtcgctgtctgcctacggtgggggcaacagagccagtaccgagttcttgaggctggagggcaccccagcctgcaggccctctgaggctgccctgcgggatagcgacacgtccatctccatcccttcggtggaccatgaggagctggagcgctccttcagcggcttcagtatctcccagtccaaggagaacctggatgccctgggcagctgttatgcagctgtggcaccatgcgccaaggtcaggccctacattgcagagggagagtctgacacagactcagacctctgcacaccatgtgggcctcccccacgctctgccactggtgagggcccctttggagatgtggcttgggcagggcccaggaaatgagtctgggctgggct

SEQ ID NO: 27650 - DNA, 1168 bp, Mus musculus
ccctgcattgctgagcccacgcactgactagggcaaaggccatctaatggctggtttccttttgaatttcactctggagattgcgacagaaagcaagaggctggggtttgcttgcttcctggattctacctgagctgacctctggctggtgtcatgcccctcacaaactgggtagttctgttcatgggctctcttgctggggctttagggggagctctggagaccttcctacccgatgcttgctttgatcttggcttggtggcttgggaggtgagagagagtcccttaagctctattcaggccctagagatgtggaagactatagggactctgtcctggcaatggcaaaccactttgtccctttctctgtcagagcttccttcagaggaagggacagtgtggagagttgcagacagaagaaccaagactaagggtgggggtttctttcctggaagctacaaatctgctgtgggctgcagtcctctgtagggctagattccaggccgggtttgcatggttgataacttcttctggcgactgtggaagaaattaccactaggatggagaaagtggctggctttgggtgacctgcttggagagacatgctcagtctttcttgttgcaaccctttgcagagggcaggggtcaggaggcagtaagaacctgacttaccatccatcaccagccattgctcctcactctgcatgacagccagagttaaatgtaaactgatcgtaagttgttacaacagtgaatgagtcctgggaccccatcaggaagtcagctctgtgacttggtcagcaccagactgcttagtgacatctcatttcccttcctgagtgctattgggaaatgtgtgcttcctcatcctagcttctaccttgcctacacccagtgaactgtgaaagacccattatcttgagtcttcaatagttcctgtgatcgagtggcccataggaggagaaaagaacatttagaagccacaaatccccgaatatccagttttcttcagattcaactagaactttctacttagaaaggggtcagaaagtcatgtggattctgggtgtccctggctaccacctgtctgttgtgtgaccttgggtgttttagtggcacactgaagtctagactctgggctattttccaaagctagcagatgccactg

SEQ ID NO: 27651 - DNA, 1221 bp, Mus musculus
aaaagtcagcccttctcatagtaaggcattctaggaaccaggccagttcttcccacaaggccttactacgatgatgtcacccttagttactgtagtagttactcagtctacctggagctgaggagaaagctcaggtggcaaaggcttgccttgccaatgagaagacctgagtttgaattttggaatccccataaaagctagatgcattgttttctacctcagtgctgggggtacgggctcgttaggctaacgatgagagaccctttctttaaaaaatggcgcacacctttaatcctagcactcgggaggcagaggcaggtggatttctgagttcgaggccagcctggtctacaaagtgagttccagaacagccagggctacacagagaaaccctgtctcaaaacaacaacaacaaaatggcaccctaggaacaacccctgttgttgtcatcagactgacatgcaaatgcagagtacctggtaacactgtaggttcttaaaaaagaaaatcagggggataaaagatacatatttcacctttcacagagtaagctggagacagcgaaaagatttcctttaaaaagcaaacacttcagaaccagcaaaacttaaagtcattttttaaaatttagctctcgggctggtgagatggctcagcaggtaagagcaccggactgctcttccgaaggtccggagttcaaatcccagcaaccacatggtggctcacaaccatccgtaaggagatctgactccctcttctggagtgtctgaagacagctacagtgtacttacatataatcaataaataaatctttaaaaaaaaatttagctctcgagccctttatctttctctcccctcaccctctccatgtagagtgtcctggcctcaatccttggggcccataaacttgccttcaatacaatctttaaaaaaaaaaaattaaaacatcagtccactgataatgaattcttatctagaaatggcagtgagcccaccagcttcatgtatagaaacactgagacaggtgattctaagataatgtgggcacctgtcggatgtaaacatctggaagaagtttgagacagctggtagacactttccatctacaggagtcaaagtaaacatttgtgaaagaaaattaagcctcagctaaggagctaacaattttctgtggcatggcttcaagtatgacaggaatataaccaatgacattcctagata

SEQ ID NO: 27652 - DNA, 1411 bp, Mus musculus
ctggcacttgtactcccctatggttgccaccccccgccccgccccccaatctctccctctcctggaggtggagctaggcctctctggccaatactcagtgtctctatcctgagagctccggggtatgtaaggctgtttagagtggtgggttggtcagctggaagacaggatccaaaatgttccatggaaggctgtctttaggctgttgggcctgtgctaggggctacctaggcaagagtttttggagccaaacaattcagggaacaaagttttggcctcttggtaaaggatgtcctgggatagtcctaagttgtctcttgaatctcctgttctgtcaattgaaggctttcctttcaagggccccacagcaggaagggccactgtcccatttcactgctttgaaggctaccttgtccttccatccatgcatcccctcgagtgcccagattgcttttacaccattgctgtgactgggcccttccctgcccctgctctcaccccatgtcatgctactgaggttcttgttttccctctgttccatcactgttcactgtggccacgaatcagctgggtttagcagatgtttacctgtttatgtatatactcctttttaaaaacttgttttattttttcattgagtttcaagtcctgttatatgcagctgtgtgactttaggggcattgggaggaccagcagggtgggtacttccttgaagtccctgctctacaagctcagactagattaatgtcacaaataaaaccttcctgccctaggaaccaagagtctttccttggcacaagccccagatgtcatttgctttgggggatgtgggccagttccctttcttcataagagcaaggttgaaacatttttggcccttgccccttagagcatggaggtactggaaggtgaaatttatttcagagccatacgaaaataattctcaaatcagcttcagaattagttcatagcactccttcccagtatcctcagaggctgtctacagcctaccctccaaggcagcttctagcaggacagagaaggaccaatagtcccgtctgcatggaaccctcagttctgggagaggaagtgttatcactgccccaccacctgttagtacctgcctctctggttcctactgacttctattgctgtgttccctgcttgttgggccatttaggacccaggaaggaaggtcttccccctccacatgcaaacacgggtgcttgtggctgctttcagtttggttttctgaaaagataggacaggatttggttttgcagagggtgcaagctcctttccatgcctgcccaggaggcacgcagaagggcaagtttgagttctttgagttctactttgtatgtgtttagcaagtatctgcttggtactttgatttaaaataaaaacactt

SEQ ID NO: 27653 - DNA, 1173 bp, Mus musculus
agtactgcccataggctaagtatagctagagcctctggccttctgtttatgggtcataataggcttgctgaaactggtcaagtttaatccaagacctcaaagagacaagaggaagtatttagaaggcaagaccctggtgggtgaaaataagtgactgtggctttagatattatcttcatttaagctttgagcaactccctttcagtccttctaaaaggtaaggctgtgtccctggaaatgattcctacctctcttcttcagtaccaagctagtcaccacctttgttagctgtgggcctgctccctaggtccaagctcacagtatagatacttgctagctagtgttttcatctccctcatgtggatagaatgctgtgtgggtagcctggggtggtggtgccatctgttctgctttgtgcacagtgaaagttgcagcccatcttctacctcagtggaaccagttggcaagtttggcccctgcagttagacagtagatgagatatttttagttaggtctcacctgaactgctctggcctctctacaggaagatcatggactctggagagctagacttctaccagcatgacaaggtctgctctaatacttgccgcagcacgaagattgacctttcaggggcacgtgtatccctgagcagtcctacatccacagaatacatcccactcacaccagctgcagctgatggtaggtgcacgaggctgtcagtcttgcaggtcaattgcagctatcctgaccagtcctttctggctgccatataccttgtctgttctcttccacatggggcactacagtgttaggtcagccttctttgtagccttcctggaagcacatgtgggaatttgttggttttgctaatggagaatcttttgcctgtttgttttttggtttggtttgtttttttttttttctcaagacagggtttctctgtgtagccctggctatactggaactcactctgtaggccagtttggccttgaacttagagagatctgcctgcttctgcctcctaactgctgggattaaaggcatgtaccactgccacctgtctgctcttagggagtcttaaaacatttctgttattttctttttgttgttgttgttttgttttgttttgttttctgagacagggtttctctgtatagccctggctgtcct

SEQ ID NO: 27654 - DNA, 1234 bp, Mus musculus
agcaacaaatgcatgtgtgcctctcagcttccctcctctccttacacagtggagaatagccctgtctataattgagatgggtcttctcatagcaattaaggtaatcaggataatcctacattaggcatgggcagaggcccatttcacatgggattcattctagattttaaccaccatagcaatctgcccaggatgtcagtactcaaagccactgtttttgtcatgtatggttaggatcctgtgaagctgtgtatagtatgtttttcctgtctgtaccatgtccctctctgactccagggactctttttttgtcttctggctagaaacccatgctgtgcataccccaacatttcatgacttggtctaggcctggcatagaacatggtgtgtctctaagctctagagacatagtcctctattgaagaagacatccattctgaatttggttcatatgatggtagtctactaccaccatcataaaaaaatattttttcagttctggaaatgtaaccattaaatccctcagccctgaactattctgttgtaccagtgtggaaatgaccctgtgacctgtgtcctgctttgtttgctttaggacttcagactctggagaagtgacactgctgacttctgagccatggcaaccccagatgtgagcgtccacatggaggaggtggtggttgtgacaactccagacactgcagttgatggcagtggtgtagaggaagtgaagacagtgcttgtaacaacgaacctagctcctcatgggtaagaactcagcctcggtcctgctaagtcacagtggcagagcttggtgtgcaggggtagggggagactcaagatgtctttacacacaaggtcctaagattgaacccagcgtgttttaggcacaaaggtgaagtacaaagtacatcaagcaataggatcaatggagattctaggatgatagctcatcactgcaatatggctctaaatctcttggtgatatctcttttgataagtggaacagtggaaactaaatattttctttatcacctcttgttctagatgtcattattgagagctagatctcaataaaagtcacatctaatcaaactgtttgtgggcaggggttgggggaggtgtgcttcagggtttctgtgtacagagacttattctatagaccaggctgaccttgaacttagagatccaccttcctctttctccctagtgctgggataaagagcatgtgcca

SEQ ID NO: 27655 - DNA, 1623 bp, Mus musculus
cttgctacagagtatgtaatccttgggtgtagggcataggttctgggaagggtggtgaaggctgtctgtgagaagtatgtgcagagcttgagcagaagtttccccacaggatttggcatgtttgtgcgtcggcatcataagcctcagttcctacagacctgtgcagacctaatgggcctgcctaccacaggcaaggacttggagctcgaaggtcccagagatgagagcccaactgtgcctcctgagcttacccatgaggacctgaaaccaggtgagggcccactggaagactcctacccttgccctgtttgttaccctgagtccactgcaccgggggctaacaggaagcccataagtttctcgcactcgttgctatctttagggccctcgatgtccaagaaacctgagaagacccagagtaagatctcatccttctttagacagaggccagatgagagtgtgaggtctgatgataccaccccaaagcccatgcaacttcctcctagactaccccatgagcttatgaagcctcatcggagtaagcaataggggctacagtgaatgttggttatggtagggcactgaacagtgtgctcacttagacctcctgcaacagaatttgtatgcccggcctgtgcaactgaggatacagtgcttttccagtgcccctcctgtgacttctaccgctgttgggcctgttggaaacttcaactccaggttggggtctaaccctctccagcccatcaggcatctctccaggtggtgggggctaagggagcaatgccaagcttcagtgcctagcaggtatctccacaggcctctagactgtgtccggcttgtggtgctgttaacaggaagcagagcattacacaggtcatctggccgaagccccagtgaagacagatggagccctttgcttgccctgatgtggttaaacccactgcaggtctcatgcttggctgtccaatgagatctgaatctacttgtgaagttctgaaacctcaaatagcctatattggcattgcacatgtaccactgaaggtgtaggctgtccaataaaactaagttatcaggatggtgtctgtattgtggtcttaaactgtgtgtcatggcagtgccaagtgtggcacactatcaatccctgcaaaaacaggatctcctgtagttccagggcagccaaagctacagaaagacaccttttttaaaaaatatgtgggaggataaaggtctgttaagatcttttccagacttgcagcattctccataccagttagctttaagccaataaggagcttccctccatccatcccctgtattgcccctttcatcagctagacaccattgtgtccccacaccaactatgcacaattctgtagcttaaccctctagaacacagctcctactgcagtgtcagctcatccacagggagcatgagcataccacaccacccacaatcgcttgttgctgctgcctaggctacttaacacacgtaggcttctgcctagaatgtatgctttgctcaccttgtgcttgcatgtggtgagactacgggagcttgggattgtagggggatctcaagtattccctgacactgcctcttccacccactttatcaagccccta

SEQ ID NO: 27656 - DNA, 2421 bp, Mus musculus
ccctagaaaggaaacatagcaactgcttcattcttacactaacaacctggctttggcagaagcagatttactattttttaaatgtgatagtcttttcaaaaattaaataggaaaaaaaagtgaggcaagacagctttagcctcattgttgaatattatttctttgaattcaagctgaaactcaagccttacattgccttatgctttgtttatagtctttttatatatctaaataaatgaaggttctttaatgggttatgatacaatgtagaattttattctggcccatctcatactcctgccagtaccagttattacattttatttctttaatactttctcctggtgtgcaaaacttggttctcttaaggagtggcattttccaatagctttccactctgacccacagggctcttgtgctgtaggttaggagagctgagagaagaaaaaaaagcctttatctttagcacctgaatgggatgtgccctgcacagtgttgctttactgacagtgggcagggctctggtccatagtctctgcctgtctgtttattacatggagaataaatgaaccagccttacagatcaggtaggggatgtggttttggttcagccagaactctgctgtcatcttttctcaggagcttcaaagatttctttctaagttctttcctcctgcttccaattgccacattctgcagcctctcaataccagggccctgtgtgttgagatcatgatttggagagagggccagcactgtgccttaatggctcttagcagggcaaagactttatctgtttgtacacatctctacactcctagggtgaggtgggatttgtccattttagtttctggtttgacacagtgtgaggtgtcttggttatcaagtattcctggtttctttggacacccttagaatactctaccacacaaagcaaggaacaacgaataactggggagctgaagaagagcacaccattggtgtcttcttttccagggttaaaaacaatagctgtgtgagggaacacattacaggagtgtaggtcactgatatatcttcctacaaatattagcaggcagcttgtcaataaagcattcctttggaggaaaatccacatccatttgtttggtctgtcttttaggataatgacaagagatcagagtaaatgcatatgattccttgctttgaacggggacaagcaggagacaacatgtataaattacgagtctttggtgtgcatataaaaaaggagggaattgtgtagaaggtgtatctctggataagaccaagaatatataccaggcatgcaatgtagaggtttacagtccattatcaagattggctacactaaaggggcctttttgtcccagtaaacatcttgttttgctgacttttgctatgaagctatgccaggagctcacctggcagaagagggcattaaggaagaccagcatcttaagtcccactgagagaagactgttaccccatggtacaacaatccttaggaggtatgctcttattctgcagatgaggggccatgtgaaataatgagtaattgaagacccttaagtgcttatcgaacagggtaagttggagttgtgggccagattaaaagggctaagtggtatgggtgggatggggagtgaccctcgcactgggcaagcctcgaccacagggcaacaactacatctgggctagaaagtcaatatttgcactagatgatattggaagacaattcactatgctccagtcattaagcaaatactataacatgctctgtggatgagaggttgcctactgggctttgtgggtacatgactgtgttcatggacccaggcctcgactgtactccttaaaagatgtgttcctcctcacaactctggttctcatcacatgaggtgatgaaggcctcagagagtactgtagactggagcaagctgagaatgggtagaaccagggcatgttggagggtttgtactagggaagactccgactgaggatggtggaatctgcctaattgatataaagggacaaaataaagcttagcatcaaaggcaaaacctgaaaaccccctcaaatatgtaactgctgccagaattcctgtcatacagtctcttaaaggttgacatactagattggcatagtggcatatacaccttcagcacttaggaggcagaggcaggtaggtgtctgtgagtgtgaggccagcctggtctatgaagagagttcaaagatagcaagggctacacaaaaaaaccctgtctataaatcaaggttacagttaggttataaataaacaaataaacaagcttgctaatttgtgaacatttgtaaggtttttttttttaaacatgcttttggagtttactgtgaagaactgtcacaagcattgtgtgtgtgtgttgtagccattctttgcct

SEQ ID NO: 27657 - DNA, 1359 bp, Mus musculus
cgatgaggttgtctgcttacttttcagaggctacagacacaccgatcgtcatacagccagcatctgccacagagaccacccagctgacagctgactcccaccccagctatcacaccgacgggttcaactaaattcaggagaggctgtgattagaggatgaatcagcatctggccactgcaaccttagaatcatgaactgtagtcactgagatgggaaggcagccgtcaacctgacctgctctggctggtcagggccactcccacctcctctaagtccacccatctgtcaatccttgatacatgaagtgcgtagcatgcagtatttaaagcagtgtagctacggtcttcttctgttttatcctttttttaatagcatgtatgggttatgttcaatgtctgtgttgtggacgtgctgcagctgggctgaattaactggatggtagtgcttattttgggttttcagccaagcgggtccagtgaaggttcagctgtctccttgtgcttacaggagtcaggtaagcacctggagctacatctccttgttggcctctgtgtcctgtgatatggtctagtccatggctctgatctcatcctcaaggctgcagacagggctctgatatcacctgcaaaggagggaactgggccccgtcttccaggcaccaccagcatcagtcgtttgcacggtgttcgtgttgggaagctttcatagggtctctgcatcatctcactcggcctcgtgacagttttcctgttagatctgctatggagagtgcaggtatgccccttctgaaagtgggagcacactctgtgtaatgtcactatcttgggtctcctggccttgtggactgaaatcctatcattggaggcatgtctcttgctggtgtgtgggaaatcatttgtctctgttctgcacctttccaggtcaaaagctggattgacggggccacagcctccttccctcattcctgggtcatcttccacattccttcaagccaaccttttaatcttttttggacttttaagaaccacaaatggcagcacctgccacttagtcatagtcagaaagtctcttgagtccagttgtgggtggcatgcaactgcttatgcagagtctgagtgcccaggctccagaacctcctccctgtgcttgccagtgccccaccccctgcttgccttcgcttccacctgtcactatcaatgcctctggcagctggagtgttgggttcctggagcaggtggctggaccctggtgctcctggctcagaagggttggcttctagggaagctatggtagtagtcactcaacctgggaggccagctcccggccacaggattcctttgtgaacctctctccagtca

SEQ ID NO: 27658 - DNA, 2446 bp, Mus musculus
gaacagatgaagaaggagaaggctcatgtggtggctctgtggcccagacaaaccatcatgtgtttctgaagcccaccccgcccacctcctggccccagctcaccagggccttcaggaccagatcaggttgtcaggaagttacaagaagaggcagcactgtgaggacaaacatggcagtgatcaagggaacccatccaggtcctgggagacactgatgccaagttcccagttgaccctacaacagaactacatgagccaagatcctcccatggatttgttagtttcgttctttaaaggattttagggatatccactaacatagtcagttaaaagtaatttgtaaacatcagacctgtgtctagatgtagtgggatacgcctataatcccagcactagggaggctgaggtaggaggaccttgagttgtagaccagtctgggcttacacagtaagaccctaactcaaataaaacaacctaaaagaagaatgagaaatctattaattggcccatatttgggacaaaggaaaaagaagtcactggtcaacctggggtgctgggcctcttttcctacagtgaccaggaaccaggtccagacttgtagatgatcagttgcagtctggtagcacacccctcctgcatgtagctctgtggccctttccctcacatcctaacgagctagatcctgaactgggacttgtggtgctgtcaggatgagaacatggaagttttgaacctagtgtcttttggaattcgtaaagctaaataaatgatgttgaacttgaaaccctccatatgtagatcagtttcaaagtgataatagtgattgccacggccagtaagtaccctgacctgtccctgtgcagactcccttgcagggttttactatgttgatctaaggtctccttgatttcatttgtcctaagctaagaactggtgagtctcaggatcagtctgactgttcttgtccaaatataaatattaaatagagaaacacacacactcccctaactcctatactggcaggcagtgtagatggtgctgtgctgtgttgcccagagagtgctggaatctgtgcatgcaagctcatcctgtgcagtggagaccacttctgacctacagaaagtagtcgggagagaccctgggggacccgtctaccaaggctgctggagtgtaggtttctgtttgtgcccagtgatgtctttccttgtcttccttttgactgtattttaagattactttagatgattctgtgcaatgtttatgacctttcctacccttctaatgttcagttaacacagccagtacccaatggggaaaaaccaggctgggtgatggtggcagatgccttatgtcccagcacttgggaagcagaggcaggcggctcacggagcctgttctacagaactagttccaggacagccaggactacacacaaagaaatcctgtcttaagaagaaaaaaaaaacaaagcaaaacaaaacaaaacaaaagaaaaaagccagtgcttactgtggttaggcaactttttcccaagttacttgctggatttgttcctgaatcataaagccagtctcttcagatgtcaagatttaatatcagtcagtacccgttgtcctgctgatccatggtgtctgttacaggtgagccttgttaaaggaggtgccagtgctgcagctggtagactccagagagagtgacataatcattcaagctgcccctgagggtgtgggtgctgtagtacagagaacctgtgggccgtgagcatcctactttggctttcagtgcaccttttattgaggaacagttgtgaacagtgtaaaccgtgactgatcttattctttttccagtattttgagctgtgaacccatgtgtcccagcactggcttgttcctttttagtttgattgaattatcctcctatggaagtggcaaaatctatgtctttactgtccttacaagcacagtgtgtgttaccacatactgtgagtgtgggttgtggtgtgtgtcagtgtgtgtacatatgtgtatatgtatatatcacacagcaggcctgtcatgcctctgtttggtggcaaagcaacaagtacaataaaagtcagctccaaaacagctgtggtttcttgaagtgttgggcaggggtagggtctccttgcagaacacaaaaggaaaccctaagtttattgtgtacatagatacatgaacctgaatgcataagccctggccagggttggcttcagctctatgtggataaaaggatgatcataccaaatatatccctgggaaccatgtgaaggtcgcctgaccctcaaggatatgagggtctaggacatgactagaaactcctctcttgaaaactaagactagttttataagtaccaggtaaaagtcagtaatctgggtgcatgtaaaggacaggctagttagggtctctgctgccaaggaagggc

SEQ ID NO: 27659 - DNA, 2560 bp, Mus musculus
cacatgcagtcatgaatgccaagaaaacattaataaaaggattttttgtttgtttgtttggtttttgtttagttggttggttttaataaagaaaatgagttagatctgtagctttagaccaaatttctcagtctttattgcaagttttcttgccctagaattggttccggacctcagctgacccgtcttccaaacacaagagccaggactccttgatgcctaggaaagagaagaagaaaagtctgtcaggaggaaagaagcggggccgcaaacccaaggaacgatcctccgaggagccagcatctaagctcccccctaacagggatgactggcccccaggaggcagagacagggggtcccggagctccactgggaagaaggctggagctgggaaggcacctgaaaagtgagcctagtgggcagggcctacccatcatgccctgcattgtccagattaggggagccagttctagactggtcctccacctccaacacacacccccatctgtccagagggttggcaaactactctgctctccctgaaagtggtccttcccctgtttaggctgcctcaacaaggctagatggggctccccgggagtgccagggcagcagcaaaagtgcaataggctggaggacccagccgttcctacaaggacattcatggcaggagccttggcatcatggggcatgaagtgtgcttaaacagtcaaatggtcccagtttccaccttcctctggcccagtaggatccccaatctgactctttcaaggctcagacattcctggtgacccatagttgtggactgatgaggcacctgagcagtctggctgccataacttgggcctcgcctccacccaacactggaactccagtactcccagctacctcccaggacagaccctgtctactgccatgctgccctgacagccacccactcatctgtccttttgcatccacctctgacccccttgcttctgttctctacctctctgggcctgcttcctcctctgtcatccctgtgtgcttcaggcctctcctaacttgactggcgtgatcatggtggagtatgtaaccttccaggcaaggaaagagctctgtgtgttctaccttcagggaggcccagactaggatgtttcacatccagcctttagcttctaattttgtggttatcgccctttggggtgcctccctggggccacagccatgtgaagcagaggctggccagaaggagcctagctcaggagtagtacttaggagagactgcaaatgtctgctatgctaggtgggcctataagccaagttctgtggaaggcctctttttcccttttattttatctgcccttgggatctagtggcagtcagtcatttgatatagaaatggaaggatagtgaaagatggggtctcagccagtgtagcaactctaggctgggcctcacccctttctttaaggggccctgaggctaacagggtctgcaggttggacaaggccaggaagagacatctggcctccttcctggttctaccttctaaccctatccccatctcccaaccctgctgtgagccacaccaggagaaggctggagggggttggaacgagctttttatagtgttggtaggggtggactgaggtctctgcttctgatcctggatgatgtgaattttgatatttgcctctgtgtgtctcctggatgttgttgatgccagtcttgttgctgtgacaagtagcaaccttttttttttcttttttttttttttaattctgggttttttttatacaaaactcaacaatcttaatgtcatggtgctaagggtttcctggtgccgaaggtattgctgtggtactgactagcacctgcccccagcctcagcagggagcgtttccaagaaggccagctccagggagatttggggtgaggtccttgtacacatgtatttagaaaggctctgactctgggcaaggtaaccatggcctggtgtgttgtaggtgttgaatggactctccaattcctacacactttgatgtggtcagaggtggctacagaggtgggtatgatccagtgtcaaagggtaggctggggctttggagtggttgtgtgcaactgtggaagggaagggggccaaagtgcacttttcacaacacctctgtggggtgtgaccatccaccctagcctctcaggtacttggcacttgtagggagaagtaggacctgggtttgctgggggctgagttttccaggacgaaccagaaagcccatatacagccttgctatgggactgttctgggtaacttgatgttagcactttaactcagtctttgaggtcagttttggggcagctgtcaaaagctgcagttggataggtaccagcctgtggtgactggtaagtagtggcaaactagactgtaaagctcttccatggtggcagggctcatcggtctgcccacctccctactatggcccaaaggtaaccaccagcctacacagatcctcagtaagagggaccatcatggcagagctacagaaggtgggtgggcatagacttagagggccaaaccaac

SEQ ID NO: 27660 - DNA, 1197 bp, Mus musculus
acggtgattgaccttagacctcctggataacgcagcccctacacatcccctctgatttgagttgatcaaaaactgttaggagaggactcacctgcttgaaccttgctctttggtaccgcccccttctgtggctttgggtgcctctgcgaggcctcaccattctatgcttagagccttcctcggttttcagggtatgtgatgctgcaagcagaacagtccccagaggcccaaccccagggcagcagcatgcatactctatagcctctgcttgccagtattgactataacttgtttagctgaagtggcttcctaggcagggaacctagaagctattgaaaataagaagaaatggtggctgcctaggctgtggtggctgagggtctgatgtggtgtattcatctgggtggaggggccctgtctgcacagaaggctgagaaggcaggcaggtaggatagctcagcatgggactaaagtgtatttctagtggatcttcactttaccaaccagagggatgagtgcatgtggtggggacatgggccttcaggacccatattggcttctttgcctagagagaggtcttcaagggctcttatctgagtaggttagtattgtgtatctagatggcaggggccaggactctgaggagaagctatccctgaggtgtggtgatgtggctgcctgtgagccagcaaccattactagtgttaattgtcccctatgaggaatattatcagtcttcttcaattgcgtggaccctctgaagacaggctgatcctcagcagcctttggtctttgtgtgtctagatgagggtgtaggtgagggtgtcaaatgtagtaagagtcttggctctttctacacttctcatgtcttctgggttatttagaaagaccttgtctgggcaaacccccttctctaagttagaagcttccattacttgctttttgatgtgatcaatataggaggtcagggctagagagacatattgagggcctctaggatagccccagtgaaagtcctgggttgagcctgttcgtctcataggtctgtgtacttactctgcagagatgactgaatccttttgtgttggaggaggccgtcggcttcaaggatccagcaaaagtggacctggaaagggaggcagccggaaggaggcccaacttcccttgttgcaggacccaccaaagctaggtgaggag

SEQ ID NO: 27661 - DNA, 1105 bp, Mus musculus
aggtttggtagttttcaattagcaataattgtgcctctgataaaccttgttggctatggtgctgttactttgcaaatctgtggctggagtagagattcctgagagtttaggtagaggcttttaaggtaggaacaggaagagcctgcctactctggaggtgcagcctgcctgtagatgctggggaaaagccagggcagaggaaggcagccagggttgtctgttacagtacccaggagtagtgctgccctgatgggtaggcgctttgaggagaggctgctctcccaccacagcacagatggaccaaggttaaagaacccgtgctatacccgtgaatgtccttccgtgttgagcaggagttggggcatttattttctctagtagtttgttcagtgtcctcctgtggttagttaccatgatgtctggagatcaccgtagatgcaggatgagaaaccccctgatctttgaggagagcactgttgagctgtttgcctctattcctgccctatggcaggagcagtaaaaagcccctgttgtgatgtaggaacaggtatggagtgctctgggaatctcagggtagaggagtggcttctttctgacatgtaagttgccccctggtgatgacaaagaggtaggattgtccactatgccccctgacaagtgttttctgtgtaatcctggccattctggaactcctggcctcactctgtaggccaggctggcctttaactcaagattcaccagcctctgcatcctgaatcctggggttaaagacatgcaccaccactacccagcatccactaaggtttaaagtcctttatgaacatcccgtttcctttcaggagggagctatggatttgctgcgggagctgaagaatatgcctattacattgcacttgctccaggtaagtgcttcctgtcttagcagggctccctatattaactcccacatggcttaattggcacaaacaactttgttctaaggagaggatttctgattctctctggtcataagagaggtgggaggtaggtccctgggtcccaaatagccattgggagagatgttttctgtccctgccattccccagctgtccactgtgggagccaa

SEQ ID NO: 27662 - DNA, 1333 bp, Mus musculus
ttttcattttatgcagttctggggattaaactctaagcctcatgcatgctagataagcattctaccaactgagctatatctctagccctttttttctttctagagaaattatgaaaaatacttataaagatactgaaaaatcactttaaaagtctggaattactcgattcatcttgtatgattaataactaaacaaaactattctgtgagttggactttctggatgattttgataggaattttaaaaagtaaccaaaaccattttctattacctgatttggagaaaggtctacagtagagcttgtgccccatttgaaccccatccaaaaatctattttaacctcaataaatttagaaaagttacatattaaggctatgtgaagaatgagcttatatatggaccaacttcagatgagagtgtctgagagtatctcagagagctcacaagcacgaattcctctaacaaacaagagtaacagaaaagttgcatatttgttgaaaccactaatggtattgctctgtaaggtggacatatttgtatgtgggaagtcctggtctgttctgtgtaactggacagttctacacatgataagaaatgtagctagtaaggaaatctaaaataacagattcctcccatgagtatctgatgttttcaaaatccttaaatagtgatatagatgaataattcataaaccaaagctgactttgaaatttttgatctctggttgctttcaagcctttggaactttgttgcttatctcctttaaataactccgttacaaagtagagccacgaagtcttctttgaatgaggtgtattgagtattaaagcacttgtatatgccaagctctggcctcagttcttgtactggatggcagaggtgtgtggaagaatgaggatgtttactgttggtgagggttaggacattctcaccttgctggtgggagtagaagatggtacagtataggaagggaagataaagccccatgcttctgcctgcgtcaatctcagttcgttcagtaaacttttctcagcaaagctggtattttgattatgtagcaggattttccctgtccaattaatttaattattaatacaataagaagcctgtgattggacagagttgtagagatagggagccacagaggagaagaggaggaagaaaatggaggacaaacaggacaattcagattctgcgtggctttaaatagccacaggtagctgtagtatagggatagaataattgggataacttgtctaatctaggtgggcagcttgtatcatcgattgactctgaaattattgtgtgggtatcttgtgaattgagaattta

SEQ ID NO: 27663 - DNA, 1099 bp, Mus musculus
acccttgatagaactgatccaagcattactgaggactgttggctatgcctgtcctcgggtttgccttattatgaaggaaatgccttcaatggagatttcaacagaaccagcagccatacttcctgctcttggggaacaggacaaaaactgaccctgactgaagtatccttgaagagtccaggtctctgtataggtaccccaccttccacccacaaatacctatgcggacaaattcagtccgtgtccaggatggaagctaattactatcttgtaccttccccattggctggtgggcttgcaatacaggacttactccctgtttatcaattaaggttttaattcatctcatgatttttgtgttatgatccagctgttaccccacgtatattatcaccctgcatccagtttagaagaaagctatgctggccgatggtcaaaaggagaaccaattactttaaccctggctgcattcatgggaataggtatggcagtagtagtggggacgggagtgtcagctttgatagaaggaagacagggaattcagtcattgagggatgctgtcaatgaagacctagaggcaatagagaagtccattgatgctttagaaaaatctttgacctccctgtctgaggtagttttgcagaacaggagaggtcttgatttgttgttcctaaaggaaggaggactgtgtgctgcccttaaagaagagtgctgcttgtatgcagatcatacaggagtagttagagactctatgcagaaactgagagaaagattagagtgaaggaaacgggaacgagatgctcaacgggggtggtttgaatcatggtttgagtcacgaccatcttggataacttctttgatttccgctgtagccggaccaatccttgtggtatgcttagctttattttcggcccttgtataataaatagaggaatgtctttcatccagagtagaattgatacagtaaaactcatggttcttcaaaggccatatcaacctatagttcaggtagatgaagagttaggggacagcaatctctaaaattctatgattagacttagtctaaacagaagacgaggggaatgaaaagaaatgaaac

SEQ ID NO: 27664 - DNA, 1219 bp, Mus musculus
ggaaactttatatgccccagtacaggggaacgccagggccaaaaagggggagtgggtgggtaggggagtgggggtgggtgggtatgggagacttttggtatagtattggaaatgtaaatgagctaaatacctaataaaaaatggaaaaaaaaagaatcaattgaaaggtcttttcctcctctacagctccagcactatagccatcatgaataacacagtaaccatccggaccacaaagttcatgataaagtgtctgcttcagaggaaacagatggtcatggatgtcctccatccttggaaggcaaaagtcccaaagacagaaatttgggaaaagctggccaaaatgtacaaaaccacaccagatgtcatctttgtatttggattcagatcccacttcggtggtggcgagaccactggctttgacatgatctatgattctttagattatgcaaagaagaatgagcctaaacacagacatggaagccatggcctttatgagaagaaaaagacctcccgaaaacagcgaaaggaacgcaagaacagaatgaagaaggtcaggggcacgaaggccaatgttggtgctggcaaaaagccaaaggagtagatctgcggtgacttgatgttttcctgtgatgtgcagatttctgagaggacaaataagctaaaaagtgtctacaaaaggaaaaaaaaaaaaagaatcaaatggaagaagacgtttatcaccgttttctggcagaaagattcttgttagaaaatgtaagccgggcagtggtggggcacgcctttaatcccagcacttgggaggcagaggcagctggatttctgagttccaggccagcctggtctgcagagtgagctccaggacagccagggctacacacagagaaaccctgtctcagaaaagccaaaaaagaaaaaaaaaaaaaaaaaaaaaaaagaaagaaaagaaaagaaaagaaaagaaaagaaagaaagaaaaagaaaaaccaaaacatacagaagaattgtttgcagacatggtgcacatggttaaagtgagtaagtcatggttcttttctgagtttcctctccagtgagtagaccggtctgtctcccccatagtcctgccatcttgcccagatttgacactcccacctttttttattcttttttttaattggatatttcctttattcctttatttacatttcaaatgttacccttttcccatttccccgcc

SEQ ID NO: 27665 - DNA, 1275 bp, Mus musculus
ccctacccacccactccccctttttggccctggcgttcccttgtactggggcatataaagtttgcaagtccaatgggcctctctttgcagtgatggccgactaggccatcttttgatacatatgcagctagagtcaagagctccggggtactggttagttcatattgttgttccacctatagggttgcagttccctttagttccttgggtgctttctctagttcctccattgggggccctgtggtccattcaatagctgactgtgagcatccacttctgtgtttgctaggccctggcatagtctcacaagagacagctatatctgggtcctttcagcaaaatcttgctagtgtatgcaatggtgtcagcgtttggaagctgatcatgggatggatctctggatatggcaagcacttgatggtccatccttttgtcacacttccaaattttgtctctgtaactccttccatgggtgttttgtttcctattctaagaaggggcaaagtgtccacactttggtcttcgttctcttgagcttaatgtgtttagcaaattgtatcttatatctacggccataccaccctgaacgcgcctgatctcatctgttctcagaagctaagcagggtcgggcctggttagtacttggatgggagaccgcctgggaataccgggtgctgtaggctagctgcacttctaacacaacattggtgccaaaacccaggaatccttacccaggagagcttcagagtccaggtggctgttgccactgcccactggtgtgactgtggatgatcaagtgtaattatgcagtgtggactgcggtcactaccactgacaacaccacctggatccactgccacctgctgctacagccacaccacatggatttccactgctgctgcagaatactgccacctgctgctgggagactcacagacttctaccatgtgagctgtgctgccacagtccaccatgtggagttatcctctgccacataggttacacagtcaggcagacccacaccaaccatgaagttccacatttcctgctacagacagaaaaacaaaaaacaaaaaacaaaaaagacaaaagacaaaaaacaaaacaaaacaaaacaaaaccagaaaaacaaaaaactccaaaccaccaaagactccagccaaacccaacagcatcagtcccttctctaagggaagttgttggggaggatggtcttgtcagagtacatgctccactctcactgagtgacctttctcaaatagaaagcatactgag

SEQ ID NO: 27666 - DNA, 1250 bp, Mus musculus
ctgaagttctccttaatacatacacacttactcactcatacttatacagtcatacacatgggcacaaatacacacacacatgcgtgtatgcatacacacatacatataccacacacatatacacacacattcatacacacatgtatacacacacatgcatacatattgtcacagacacataaaaactcatacacattaccagatcagcagaggcagcaaccagaacagctgtagcctgtgccctctcccacctgctcactctctgctgccctaaccttgcccctgcggtgtcttcccgcttcccccacccccctctgctcattagcaggggcagccctcatcttctagcctgcccccattgttctgccccaggcctcccttgcaccccattccccttttccccttagtataatgtgcctccagtttttggctttcactttcaccagtaaccaaagacttgaccactcaaagtccagctccttgtaactgctagacatggacaccagtgtgattaaaagtggattaaatgtcactctcaccatcaggctacttatgcatggaaaagaagttggcagtatcatcagaaagaaaggagaatctgttcagaagatgcatgaggagtgtggtgcacatatgaacatctcagaagggaattgtcctgagagaattatcaccttgactgtacagactaatgccatcttcaaagcctttgctatgatcattgacaaactggaagaggacataagcagcttccagtagaccctcggttaccttatggctggtggttgtctactggaaaaggttgttgcaagatcaaggaattaaaagagagtatagggacacaagtacaggtgacagaggatatgctccccaactcaactgagcaggcaattactattgctggcattcagcaatccatcattgagtgtgtcaaacagatctgtgtttgagactctctcctagtcaccccccatgaagggcatgaccatcccgtattggcccaagctgtccagttctccagtcatctttgaaggtggtcaaacctatactggtaattcaaagacagtatgtcattccacggccagatttgatcaagctgcaccagttggtaatgcaacaaatagtctcattttccaatgacccatggcaacactgaattcagtggcattgaatccagttctccagaagtgaaaggattgggcaggtttgaatgcacctgctcaaactacttctcatgaactcacaattcc

SEQ ID NO: 27667 - DNA, 1170 bp, Mus musculus
aatgagtccttttgctcaccttatgcttcctttcttgttgcatgttttccccttatgtattctatttggtcatattgataaatgcattgaaaactggtcagcttctataagcagtagcaggccgagaagactaatctaagaagacactttagattttcaagttagtaactctttttttttctttaattggttacagacatctgaacttttaattcaccaatatgttttttatctaggaatgagcagtttccttctgttgtatttctaattccatggagtcctttattctacttaaggagtagctggatacattggttttaagtaaataggcacatgtttgttgtcattggcttcaacagtagcaagtaagtgttacagcatgctgccaagagacaagccaatcatccatgaaagatgttacaataatgtttaccatgcctctgtggtccatactttactctcatgctgctgtgctgggcaatagtttttaagcagacttcttgtgcaccattcatttttatttatttgcacaattagtttcgagtgttgtagaatgaaaaatgattgtatggttaagttaaaatggaagatagttatagatcactctgaaagttactcatgggaaaatatgaccattgtgactgcggttgtctctcactcaactggttttttaaaattatagatgacatatccattgacccaataaagtcacaaaacataaactgctgcttgttatgtttattgatacttatagaataaggacaaaaaagaatataaataaaacactaagaataactttttcttttttttcttggatattttcattattaacatttcaaatgtaaatcccctttcctggttcccctcacccctcccccactcccagaaaccctgtatcctatcctccctcctcctgtctctatgagggtgccctctgacccacatacccactcccatcttctagccctggcattctcttactctggagcattgaacaccctcagtcccaagggcctctcctcccactgatgtccaacaaggccatcctctgctacatatgcagcctgagccatgtctccctatatgtgtactctttggttggtggtctagtccccaggaattctgggggttctggtcagttgacactgttgctccctccatgaggctgca

SEQ ID NO: 27668 - DNA, 1118 bp, Mus musculus
ctgtccgtatcactcagtcaatgtaacctcaccctaaaaatccttgacagaagatgctcttttattcaacactgttgccaacatatcagttgaaaagaaaaattactgtttttttgtttttgttttttgtttgtttgtttgttttttgtttttgtttgtttgtttgtttgtttttcaaactgttcctgaggtggagaacagtggctgctcggagcaacttctcgacttcaggattggcaggctggttggccgagtggcgccaacgaggccagggaggctgtggggtcccaagcaaagccagcgcagcctatggccccagtgtagagccagatcctctgctgtccccgctgactgctcccctcgcatgcagttccggctgcggaggtgaaacttttgggttgtagctgctgccaccatcaccaccatggatgaacaagaagcattagattcaaacacgaaggacctggtggctctccagatgagcggacctccccgggtgtctggatatgagaccacaaagaacaaggacacaggtcacccaaacaggcagagtgatgtcagaatcaagtgtcaacacaatggggagagacaaattataacagtctggcctataaaatatgaagatgtggtgcacagggtgataagagtctttgggcagcctcttgatttgcattatatggataaagagctctccatcctgttgaaaagccaagatgatctcgacaaagcaattgacattttggatagaaactcaattatgaaaagacttacgatactactgttatcccaagacagaaaccacactagttcctctccctacctagagtgcccaggcaggagtctgcagggaatataaataccatctactaagcccctgagcccagaagcaggcacctgtccgcacccagaatcctggtcgaagctctcctccccctggttatgtacctgagcgaaaacaaacagcacattgccggcagggatcatatatgagcatcaacagtaaaggtgaattcatcccagagaccagcaaacagtgtatgctagatcccctgagcggtgccaaaaattccttctcagaaagctgccaatacttggacaggtcagtagacagcccattc

SEQ ID NO: 27669 - DNA, 1760 bp, Mus musculus
aggtggctctgtgagttcttgggaccacatgcactgacccctctgcccttgctctttctaggagaggcatgctgcagaggttcgcaggaacaaggaactgcaggttgaactgtctggctgaagcaatggcgggtatggcaagcccctcccatagtaaatccccctgcctatattataatggatcatgcgatatcagtatgggaagtgtatgacatggtttaaaaagaactcattatgaaaaacaaaacaaaaaacagaatcaaaaataaaataaaaatcaatgcggtctctttgcagaatgttttgcttgatgtttaaaaaagtaccttggatcttattttgtaaatatttacatttttgttaaaaaatacaagtattgcattatgcaagttatttcatgatcttacatgtcctgtaacaggcttttgacgttgtgtctttccactcagatggatttgctaggtctgttcttttggaagccccactcagtccctgcccttttcattccaaccgaaaaatgaggtcagtagacagtctatggtgctagaaacccaccattgcctaatgacctagatgactccgtaatctctgagcgtgaccaagaccacacctagatcgtgggtactgtgtgtccatgtgaacctccacatttgctcgtaatctgcttcctgcctagaagcggcaaagccaggctaagggaatctaccagtcatagcacttatgtctgctcctcatggattacgcgctacacatgtgtttgggttttagaaacaggtgcatgtgaagacaaatctgagctcagtcagggtagaagcgaaaggctgaaccttccaacgtgctgatcacaaacgcaaagccagagggttcaagcagccatgggattgttcttcatgaagtgggcttatttctctcattttagttattatgatgggatgaattaattgacatgtcgggtggcttatctgtgggtgccatgggtgatgatgttcattttaagcttttgcctgtagtacaagcacataatgctactgaacgtttttccacttggagactgtgagctggttgctgcattaaaaacacaaacaaaatcacaagcactgtggacttttactcaagctggtctttcttccccagtgtagggcaatcctgcctataaacaagaccaaaccactccatctgtgatgctgacgcagtgaaggggccaggcagggcatttgtgccaagtataagaatcagcagacacccagcatacgtacctattgcagttttgaagttgtttctccctaactcccaactcccaactcccaaactgcctgcatatttactcttcgtcagtgctatcttcttgtatgtcattgtgagcaagctgtgatgaataaagaattggagttctgtgaactaataacggtttggtctggtctctcggccctgtatgctcagagcctgatgctgagattgtagtaggagggctgttggattggacagtcttgggagcaaagaggcagtactgagtttggaggaagccaagggcctgctggttgacttcccttgtaaagcagcaggacagctcttttcccgcttccttggacaggctgacacagtggggaaggccttcaacctgttccccttagcaacaggcacagtgaaggagaaactgaaggtccaggctagtggtcctgagcaatggagcctcattctggacatcgtggggttcctggaaccacctcaagttctcatgctgcccacaggacacccccagc

SEQ ID NO: 27670 - DNA, 1203 bp, Mus musculus
atggcctgaggcttcaccagggccttgatggcctctgcgcgcgcgcactcgctgcctttgccttgctggcctgcatcttcttcaggcctttcttgttgtgcttcttggcaaagcgcatgttcctcgggaacttggggtcaacccccttaagagattcgtatctttgcgaccaggtttcttgatgccatttctgtgccatttgcgggactggctgtgtgtggtgaggttcttggacttggccgtgtctgcacggtaacccgcggctcccgcagcgcccgagaccggaagagaaagcgctttttttcttaaaaatactttaaaaggaaaatttgtttgtactttttatttacagtttatatttttgtacatattgttaggggtcagccatttttaatgataacgggtgaccaaaccagccttcagagcgttttctgtcctacttcagactttacttgtggtgtgaccatgtgcattataatctcaaaggagagaaaaaaaaaaaaaaaaaaaaaacaacaacaacaaaacaatcttattccgagcagtccagtaacttttgtgtatgtacctagctgtactataagtagttggtttgtatgagatggttaaaaaggccaaagataaaaagattttttttccttttctttctgtctatgaagttgctgtttatttattttttggcctgtttgatgtatgtgtgaaacaatgtccaacaataaaccggaattttattttgctgagttgttctaaaaaaaaaattagtttttgctatcttggttttttttttttgttgttattccaaatgaatttgcaaattgctctctataactctatgaagaattgagttggaattttgatggggatttcgttgaatctgtagattgatcttgggaagatgacaatttttactgtattaattctgccaatcaatgaacatgggagatcttctttgatttctttcttcagaaacttgaagttcttatatatgatctttcacttgcttggttagagtcacctcaagatatgtaatattattgtggctattgtaaagggtgtcatttccctaatttctttctcagcctgtttaacctttgcgtagaagagggccactgatttgttaattttatatccagccacttggctgaaggtttttgtttttgttttttttttatatcagctttaggagttctctggtggaatgtt

SEQ ID NO: 27671 - DNA, 2793 bp, Mus musculus
acagagagcccctgagctgccgacctgtgtcctgctgcccactgccaggtgctgccggcgagagccaagtacatcttgacaacgctcatggctgcggatttccaccagatgtgcttttatttagctttacttatttctttgaccaaatagttgatgaatgaaacaaagtgaaatcacttgacctccactccagggaaacactgttagcatgcatggaaggccctttgtataggaaacagcatcatagagcctctggtagatccctgcaggcaactactgtgtttctccttaaaatcactgtacatctggattctagtttgatctttctttactatctacatgaatcattgtttttgggtctctgtacacttaatcaatttctaacaaactgtccttttctaaattctggttattaaaagtcttggaattatttcattcctttcaaaggagaaactaccagctacattttttttctcggataaacagttctgtgaggaccatatcttgggtttctaaagacaccagactaaagtagacaggtgtgtatgcagttctatagttctgtaaattaaaaacatgcagacactcaaacttccagtggggagagtgtgggtcctgctcttgccttggtaactgtcatttgtagctacatctatttgagctcaaatatgcttatcagttatttattataccattctcacacatttttttacaagattaaaatttaatttcaggtaaattgagagaataacattgtgagttaagtatatgatattacagtaagttggaatgttcccacattcatcactgataattccaaaagtctaaacgtctttaggtctatacagttataaaaatgctaaaaaaaattcaccataggggaaattactgcctccattaaatccatttaacacctttaggaaggacagaaagttctatgagaaatacaacttgaatattttttatactaagggattgttgataactccgaaagctgcgaggcgttactatgactgagctgatcaggcagtttctgttctcagtgtgttagtgcctgagctgttctgtatgtagaaatcgttcccactctaagaactgtcggggctgtgagtcaaagcttcccagtggctctgctaagcccctctgttaactgtggtcactcctgactcactcctgcttcctttgctgtgtatgtttatggcctatgaggttgtatctgttacttctttctctattgtggttttaccagtgtccatgccaaatgttaactgccaagcttggagtgacctaaagcctttttcagagcatggctagatttaattgaggataaggtttctgcaaaccagaattgaaaagccacagtgtcggttgtcacaaaatgacatgctgccattcctggttgctgctcggatgcaatggaaactatgcttgattacatgtgaaaatcttaataaagtctgtgtctcagtagtataggtttcaatatttattaagaggacagtggtctggacaaaacttgttatattctaaaatcaactggtattctggaagcattttcctagaggactggaactgtagaaatttgtctctagagaaatattgtgattatccaatataatgatttttctaccaattagtctttttatttttcttcttcttcttcttgctaacatcttgttaacagattgtttcctgggtgcctactctgtatttgtaaccaagcaaaaacagaataagatggtagtttttttgttttttttaaataagaaatcttcaagttttgtatagagatttcatatgaggaaaatgattaagtggagagaaggagaaggaatgtacatagatcagaccagggatgagtgtggaagaaactcttcccacacttcatctagaaagttaatctactggaaggcaccctgcctcatcaaagatgttacaaaacgatgaaggactaacacagaaaattaaatgggagttttagaatattcacatatatccagaatatctgttggagattcattgtgagttagttcacagatactgaggaaattacagacagctattaacagaaatgtagcagaaaggttggggctgcttactgggatttgtgtttatgctggcaaaacagcaaaaggggaagcgtgggtttcctgggaaatctcagctgtgtgaggacgcaaacggtgatggaagagctccgaggcctttctaaaagcagtgctccctaactcgaggttctgggggacactagcaagaattcttaatagttagaacctgagaagtgaataaaagaacttatcaccagcactcggatttcagccactacacacaattcttggaatacagaaaagtttaatttgaactccttctggatcttttaattaagttacacactgttttctgtgaagtgtttgaaagcaataaaaactataatttgggtaggggttcttttttatgtatttcccctttcaggaaagggtgagtcatttttgcaacttctctcagactcttcagatgctgacatgtaaaacagcaaagtaaagctacaaactcagccacccacccatccatccatccatccatccagccgaccggcagttgcaaaggtagaagcgagagtgtgcgaggggacacagcaaccgtgcaaacgtcaggatcctgcattctttagattgtttccttttaaattaaggtttatttgattatgtgtttgtatgcaagtgtgttatgtgcttatgagtataggcgcctgtggagagcagagacgtcagggtgtcccagagctgggcgtac

SEQ ID NO: 27672 - DNA, 1220 bp, Mus musculus
ttcctttatgcagatgtctgcacggggagcaatgagtacacagtcttctgtatgggccagtgtgcagggttgaaagtccttcgtctactctctgctgatttttctgtgcagtgttttagaggtttgtgttgttgagacatgatctcctgtcacccaggctgggcttgagcttattcttagccaaagatggccttggctagtgaccgtcctgtgcctgtctgagtgctggaattaaggcatgtgttgaatgtagtataaagggggtcatggtgatccccactcttctgctctgctgtaattagcctgaggctgaagtatgagtggaagcagagggaagggaattgttttagttcatttgttagcgtgctatgttggtggcttttattggttatccctggtttttcttttatctttccctgatttctcttgagcacacctacagaaagaaagaggacggctacaacctcaatggctgttctcgttgggacagtggggcagctacagaggaatttagtttcgcattcacacttgacatgattctctttttttctccttgaccctaaggtctgctgaagacagagccggtggccgaggaaggagaggatgctgttaccatgctcagtgctccagaggcgctgacggaagaggagcaagaggagctgaggcgggagcttactaaggtgagggacgtagtttgtgggccctgtgctttactaaggtgagggacgtagtttgtgggccctgtgctttactaaggtgagggtcgtagtttgtgggccctgtgctttactaaggtgagggacgtagtttgtgggccctgtgctttgccttgtgagtttgcagagcacctcatggtaaaaggctcaaggtgaaagaaagcttacacagcccagagtctcaaaggacagaggagacaaagtgatcttagatggctttcatatgacagcatgggtgagttgggtgagcacgggagtcggacgggtaggagagagtggggagagctgcgttgtccgcctctggcccctggcgcgtgggttcagcagcctcgtgctcacctttgcttgcgttatggatctcggctagcctcctcccccttttcctttcttctttgcttcaggcttcagcccaacttctggacacatttcagctcccttctttcctagcttccttctgtaacatcatagaatggtctgtctcacagtgcacagtcagtatcctgc

SEQ ID NO: 27673 - DNA, 1195 bp, Mus musculus
atggagaccttgaggcctctgcttgttgagctcaccatgtcaccttggcttcccttctcctcaggaggcatgggccttttgtgtctccactgaagagctcagatagacttgggttggtgaactttccctgtcaagcctagctttggtgcatggatggatgaagggtggcggcacctctacttataggcgattaaaatggtgtactcgacaagactttctgaaaggacggcctggtctgactagaaagctgttctgtagaaagctgtggtgtcccagatccactcggtgaagcttttggaggagatacaatgcagacacacagtgcagggcggcatgggaaggcaacagttggggtagttgcttcaggttccaccaattcaagttgtcaaccacaggagcctgtaggggacacttcccattcacactcaatactaccggtacggatcctgcaaaaataattgtacaatcttaaaactcctgtcccccacttacttatattccagtctcctgatccctggcagccaggtggtcaagactgattttttttttccttcctcgagacagggtttctctatgtagccctggctgtcctggaactcactctgtagaccaagctggccttgaactcagaaatccgcctgcctctgcctcctaagcgctgggattaaaggcgtgcgccaccacagcctgtcttggtcgccatagttttgcttgttgcggaatgttgagctgttgtggcacgactgacttctgtcacttagtaatgcctgtttacagttccttcatacatctgtccatgatttgttgggtggccctgttctctctaatgttccgttgtctgctcattattattatattattctgtcatctgctggaagacagctctgtgcagttgagggtgaccatagctttagtaagctatgatgattgcagggtggaaacaggtgttgtaccctttctgttcacagtgtctgtttgggtgacaactgccttccttccctgcgacatcctgaccagctctgcctcaccccagacttgatgacctgtactgttctgtctgatgatgggaatgactttctccagtcatatccttcctctccttctctcccactcttcctccctccctcctctccctcctcctccctttgtccttccccccatcccttccttcctccatagagagggtcttccaaca

SEQ ID NO: 27674 - DNA, 1143 bp, Mus musculus
gtaaccctgttccttgcagcctgtcaggctttgtattagcctggttttgttttgtaccagttttttgaaacagggtcttactcttccttgtctgactttgtttcaacctcccagtttggggtttttattgttttaaaaaaagaatctgtgggaggtgtggtggtacaggttggtggtgaggcaggggtcccaagttaaaggtcattctctgctaccatggcaagttcaaggccagcctgggctgcataaggccatgtctcaaattggaaaaaaaatgaaatggctgtggctgaatgcaaactgggaaattatttggtggccactaaaaaagaagccgtacactagaattgatggttgattggatcaagtggcaaaaactaaagataaatgtatatatctatagatgtctgtgtatatatctatatatccttatacaggaaaaatctttgacccaataaattatatataaattttaaataggattaaattaagaaagaggtaattcctgactgtgttctggttttagttactgtagactaggcctttgttgctgttttctgtggcttttcttttttccattaagctcagactgttggaggttcaggtgtttatatcctttgagtgtgggaattgaatccaggagctcgggtttttgttcgggttttggggggaagacagatgggaaggagttgggtagttttgagattgggcttccttgtgacacatagctgactctgaattcagtcttccaagtatgagccagcacatgcagcttgatttagtttatgttaagataacttatcattgttcttataattgtattttattttctctggctctaattaagagtttttcccaaccattacttcaaaatcacttttcaattgtactaggagcatcacatgatttcaagtatggtttgatgcctggcacttcaagtgatttcaagtatgggttgctaccaagtacttcaaatgacttcaaattcggattgctaccgggtgcttcaaatgatttcaagtatggattattgccagaatcttggcccacacaagaaacgtgggaaaatggcaagtattggtcaactaaacaactacaaaattctaaaattccatgattaagtgcttctgagctgtgttaata

SEQ ID NO: 27675 - DNA, 1111 bp, Mus musculus
acagttaactatttgggttgtatgaaaatatagtccttgtcctttacagagcttgcttacattcatgtgccatttaacatgaatgaggaaatccatttatggaagtacaatgacagtgacccaatcgctctgccaatcaaaccactcaggctagtttgtactagtagagttttgtttctatttttattttattaattttattttttttaatacagattttcagtgaggggctttttcaaccccattggttctattttcttgtattttttttttcattttatttgcttcataacttaaaccaagtctcctctagtcttagatattatttcttaatttcgtgctgataggcatgcttataagaactggagaggtaatttattggaatgaactgactggctccccgccctcccttccctttttgacatgaattttactacttcacagatgaagaatgatgttacaaagttaccatggtgacgctgacaaataccactaaactgattatgacttagaagtaactttctcctgctgctctgatctgatagatggttgctctatgatgtgttctgacatggggtctggtttttggggatctgttactttggcactattcttgtttgcctcttagtgtactatacctcagccttatttgaaatacagaagtctaattgaagaatagtcctaggaaaatacataaaatgatttgttttataattcatcccccatgtccagtttggttagcttgttatgcaatataagtgaagtatcaggttttttttctcctgtgcccatttttatcattaaaatgaacacaaaatgtgcattctctttttgtttcatacttaccgggatgttgagtgtttttaaattgtagctgataatatatttttccattccttaaagtcaccacaccttgatgaaatctttatagtctccatgattcagcaatctacaaaaaatactacaagtaaaatgttgagcctttattgttccattatctaaattcctcaggagtcagagttcttcacacagttgagacttagtttatgtagccaggtgacggacgactgagcggacagcagcacgctcagcagcttgtgacaggctaacg

SEQ ID NO: 27676 - DNA, 1161 bp, Mus musculus
ccatctgttcaaagttgaaaagttgattttctttttgaaagagacaaacttcatcattgcctctgatttcagtagaataatggtttgatattggacagtgacttcctgcatggataaatcagagatgaagtagtcatgttacatgttgagacccacctattgccctctgactcgtatggcagtctctgcatcccttggggatggcagaagagtttcattctggtttctgtttgaaatgaagagaaccccttattctctgtgtttgaaacaaatgagtgaagtgtaattctagaaaagtccaaagtagactaagttgggcagagatattatgatgaaaaagtattttaaacgtaagatgttgtgctttgtgaatatgtaagtataacataaagatttcttccatcccacctatccccttcctttaaaataaaccatagtttacaattggtagatctgtctatatataaatatatattaaagagcaaatatatatatttaaaaaaagatcacctaaatctgctttattagacagtagttcactgttgcgtagaaactggacgtggctttacattcttaatgtgctttattttcctcaagataggaccttatcttgaaacagaatttcctttattacttaaatcatttatgtatatctggtaaattatgaccaaatttttgttagattgcacacagtaaattgaaatacacatttggtacactacggaattgttgtgcttttgtttggtttcagttggaaacaggttcgatggagatgactttattactgttaatttaaatagtctataattgtccgttgccttttatgtcgtgttgtgacagatttggctatatttttagtcatctgaaatatactttaaaaagtttgtttttaggtaatccaaaggaaaaatgtttatactcttgaatatatatttgcctcagcctatattaaagtttctttgaagtaaacactttaccagaaacagaattgacagatttttctacttgctgactgcctaagttattttgtttcatggtcttgagaattgccttttctctagacctttttttaaaagtagttttagtactaaggtatactactggacgctcctatttttttaagtatattccttttctgacagtacaacttcaggaagttga

SEQ ID NO: 27677 - DNA, 1073 bp, Mus musculus
ggatagtttcacttaattttaaaaggatggttttacaatatgaagaagtagatagaagccccagcttgtgtgccgttcacacccggatccttaagcttaactatggtacccaatctacacagttagaactaacaggtgttttcttagtttaggatttaaagtaggattatttattttgtttcttccctatctgctgtatcccagtcttcaagtgaagttgaactaggtagtttaaaacatgttagggataagcacactttgaaagatgttttcttgccctgaatttgagggcactgggcagtaaatttggaatacactagctattgagaacaaaatttgggggttaagaaagggatgattgaggccattatgatctgggagaagcagcatcctaaacactgtaaacaactcttctgcctgctgtttgtaaaagctctctggcaagatcttttacaaagaccaattttcttttttaaatgtaatttacctacctaatatttaaatgtcctgagacatgtatgtaaacttccaaaacctgtttgtctgtgtatttagaaaatacacaagaatctttatcaaacataaaatataaacttgtgagcactaaactgcttctggctttgtgaattttattgacccttaattgtgatttatttgcaggggtgctagtttagactcactgggtaagggaaccaccgttggaaggttagacactgagatagatgcctttgtacttggagtttacgagtttggattacagagtctgaggagggttgctaatggttccttggtatggaagtaagaaataaagctacctctttgcaagaattcttattcattatacttttagaatttttacaggatttaagaaacactgaaaagttccctctaatcacttctaatcgtttctcttggaaatgggatcgagactcaaaggtgaagcactacctcatatatactgtttattagacagaacatcaacttgtaaacaagtaaatatataagattacaaatttcaagcctttgaaaatttacttagagagttgcctctttgctgggcagacctcacctca

SEQ ID NO: 27678 - DNA, 3661 bp, Mus musculus
ccttcttgatcctcatctcctaacccagaagccaaatgtgtttgttgccagatccagagacagccattattgttacttggttactgaatgcttgctctgaagtcaacaccccagtacatggatgcttccctctagacactcattctgctcagtgagtggctaccctccctgcaagagaaagccgttctctgtctgagcagatgtagtctctgggctatgaggacagggtctgcattggcaccaccctgccacactcagcccacggcaaagcagcagctactcccgtccatgtgccttaagacactcagtgtggtcacctagccagagctagagtcagcaagacaggatgctgtgttagggtggaagagaatccaagagggctcagactaaatccttccaggctcaaggattcaaggggatgggattggccttctccacgtggcgatggagtttagttgctcctgttatatatctctggaaagcaaacactgcttccatttgcttacctgtcaaacattcattccttggcccaggacaggctcatccctcatttcaggcacagacagcaagacagagtggacagagggctccctgagggcttgtgattgtttgtgggtttgagctgcccctcagggatctgtccctgcatgggggaaggatgcctaatgtggcagattgcactcagagagagggataacttttaggcccttactctatatccttactggaagtatgtggctgtgacatggcataacagcaggagctgatcacagggagaaagcttcaggtgaaacctagatgtttgagaaaacacgtcacactcctaaagcatgctatttccatggcttccaaaactaaaagcacctgtggctcagctagcgcatgaacatgccagtagtcacggtttcctatcgtgcaccctgaaatccctatttttgtaatttatgattagactgtggtcagtcacttaaataaacactcttatgaattaactagtataccctagtatagtttccaaaatatatcatactgtatagccctatgtgcatgaagatctcagggggaggaagtacacgctaggtcccaaagggtccagactatcatcaaaagcgcatgccaagtggcctgaggccactgctcatacacgagggggcgggggaggggatatgggctgcagcccctcagctgcccttagtggtgggaatcagcatggtcgctgttaaaggaaagccatcttttgaatttttcaacaccaaatcttaaagtatcaaaaaaagttaccgaatgttaaaagtggggtcgttagtggaaatgttgtctgtaggaagtttttctcatagtgtttgataaaaacaacaaaagccaaactgaagcccaagaagtgtcctctgggggacactggcattagggtggtcgatgactgaaggatacagcagtgctgtcctgtacacagagctcttttgaggtacaatctttccatcgtttcaggggtaagtacttccttacaaagtctttaataatgaatgaatgtataaatttataaactatgcattttcagagagaaacatgtattttgtatcaaatccgagtacttttttttttcatagagatttatcacaactacagattattcaaaataaatgagaatgccaatcctcataagggtgtggggtgcctttgtttttcactctgatggtttcaagaccatgcatccagactttgatctgaaaagctagccagtacagtaggcgaaggatgattcgccttctcctggaggggaccactcgcacaccacccagttcttagggatggataatttagtaacactgggttagcggatagaagggccagggtgtggcttacagatagagccctggcctcacgtgtgtgaaggcctgggttcagtctccagtacccaagtagtaacaataagcaggcaggcaacgctgttaccatagtaacattacattaccattgttaccattgcatcggctaaagatgacccagcttaggtagttgtggctaattgtcgatccaactgtgggtgaggaagagtttaggttatagttttcaaagaacaaaatataaagttattgtctgacaaggcaaataattgtttttttttttttcaaaattacttggaggtgatctcttatagaaaatgtagactatacccagatttctccagccttgtgctgataggccttttcacggagcctttcccactggtaattgttctttcctccttggtcagtactcacctcatcactccagcagcctccccgctatctgacaaggaggaagtgaaccccatttctttgctgttccggttctctttctgtatctgtcgaggaggtttctaggctgtctataaaatatggggaaacacatttctaaccctggtacttatggtcatacaagatatgtttgctccctaagtaggagctagaggggagggcaatgtgtctttttacatgatttttagccaaatccagctgttctgatactatgtttctgaatccttttctgactgtaaatactgcctgcagaggtcccggttgacagccttttctgagactggtcctcagccatgctccttgccagctgttggcacattgtacatagatgcgtcgagtgtttcaatgatgttggttttctaaatgctattctctaacacattttttgaaaaaaaaaatgtctttgttgttctggactttgtgtgttcgttttacaaaaacatttcctaagatttaacaccaggaaaaaatattttaaaatacactggtgctaattggaaaagaagaaaatttttaacttcaagatttacaaaagaaaatgatcacagcagttaactgcactttcccacggggatggctgctgtccacttacaatgggcatcaagaggaccagcaaaagtttacagtagtgatgacccattgatgtgtcatagagcaaggagtccttgtcccccagagaggaggatttgctgggtagtcctcaaagcatgtagtagagaagggatatagagttaactctttagaaatagtcttctggtccttggactttcatgttctgtaatgcttagctgtaacaatgaatatggtgttgccaatctagtctgacttcattgtcaacctgtactgactctgtgtatggctctgtccttggcttgcactggcacaaaccaagccagaacacaagtctttcagaaagaccattctgatttctatgatgttcacacacatgaatttagatgcacttgtaactggttaattaccatgaagtaagtctaacttccacttaataaaagtttttttgtgtatctgcttctatctgggagccattcatttatgtaaagcttaacattcatatcaagggttgttgtattggtgatttgtttagttttccagaagaatgtctaaaacagcctgagggggggggggttatttggctcatagttcatacaaatgcacactccctgtgctcagcctgctgtcccactgaaccactgcctgtgaccctgtgctaggaaaacaatatctagtgtgcattctggttctaagccagctggtcttcctctgcagagacctgctatccactagaactcactatgtccaccttcaaaatcacagatgctcttccacttctgttcagctgttag

SEQ ID NO: 27679 - DNA, 1193 bp, Mus musculus
attgttctgagaaagtacattattttaaactcttgtcttctattgaagtctattgaagttctgatgtcacagggagagttctgtatggtaaagtatgtgtcattcagacattacttcctttgatcttcatatgaatctagtatagaaaacaagtcctaaggccactaatagctatgccaagacactggctcaaacctatgagtcagcaccgtcattacctgcagagagagacctggcccagctggcctccgctgtgactcagccgtggattccctgggcccaccatgttctcagcccagaagtaaagagcaccctcattcatgtcactaagtgcaagtttaatcatccccaagttccgtccagtgaaatggtaaagtgtaggaggagtttgttagctaaagcaatattctgataaaaatgttgactccttaggaaaaaatagcttgcttctggcctctggcctttcagactctaactttaagctgatgctggatggtggttaacaaccagctcagaattaccatgtgtagagacgactcaaaacgacctgcaagcatgctgcagtgcctaggtcagttaagttgtatgtgtctgaatgcagtttctgctggcaagctttgacattgctcccactgtggatgatgataaggctgtccagtatatgaatacactccatccaaggcttccagggtgtcaggtgagcatcctgagttcagaggaaagctctcacaagaaatcctgtcataagaccagaaggaacccccagacagctagactggccagttccctagctgatgagcagggaggcagttagtttgcccctttctcctctgacaaaaggcagtgggctgtatggtttggctgcctgtgcttggctggcagtgcacagaaagggcctagtgttagcaagggaaaaaacaaagcgcataccagatactgaaggattgggttagagtcaaatagtagttggttctttttaaaaatgttccttttcagtggggattgctgcactgtgaccctccgaggagaacaccctttgatgtgacaaggccacctgagcgatccctaagactgattaactacttcactttctattacaatcagtcttcccaaaatgttcattcagaaaatagccaaagcagagcatggcagcccctagaaaggacaagaaagggattactaaagaacggaat

SEQ ID NO: 27680 - DNA, 2004 bp, Mus musculus
aacatacagttaactgattatatgagttactttttgtgtgagttacatttcttaagtagttattttgttatttggggacccaaacaaagtgccaaatgaagcctgacttttcatttcatgccatgtccatgaaactaagttctttttgtgtcttcattttgtggagaaacagaaagcatgagagttggtgagctggctgctagcctgaggctctgtgcaccccagggcttccagccctgtctgtcaaaggagcagtgatgtaatgaattcttgtccatggaaatgtctagttcttcttcttccatgatgaaaaaggtttctcatttctcccggaaaaagcatgtcacagtgactagcaggacattctccagccagctaggaagcaatgtgtgcaacaggcaatagtttccagccttagccttcctggaatatggacacttattttgtgaaaatctgtgagataacgtggagaaacccccaggtagcatatgtgtcaagggggcagtgcgggagacctgcacacccctatcttctgctcatgttcttgggctgctcagctaggactcctccatgtctgctgtagatgtctgacacaagacaggagctgcttcggccaggaactatccatcaggctcacctgccaccttatgtctgggaagttaggttctctggattagcaaaagctagcgccaggaagaagacagtgggtttccaaaccagagtggacctctcgtgcacgttgatagtaccatgtccaggaggctcccttatgaacctcccatgaccaagctataaaggacgatcatctctagagaaaagcattactgttgagctctccaaaaattccttcagacttcatgtatgttggaaaaattatttgaagccaaattgttccccattgcaattgaagatgacaagatttggagtctgccatctctggtatccaagaacaagtacgtcacactttgccagaagccctgggcttaaagtgagtagtgagcccctataaaagagtctgtttcatctctcacttcagctgccctgcaagacaaaggtggcattcaccggagaaggttctgagaaaagaggtgagaactgtacatacaagaatctgttgagcatagcagcagaatactgtaaatactactcatttcctcagggagacaaggatgctgtgggaagagatctggagaaccccgagaccaggaggatttttatctcctcaagtcttttcttgtcagaacaagtttttctttatgtaactctccgtgtcatttcaaaacaaatccgtgttcagctggacaggcagacgacttccatgaggtgtggcagagggactgtctgttcgtagctgccctaaagctgattgaggtttgagccacaggtgaagagcctgctgggcatccatagacatggtgaggcttcctctgaatgtaattgggaacaaaaagccttgctgttccttgttgtagttcctcagtctggatgctgtttattatacacagcatcctctaagggagggaaagctggccacgacgtgtggtttgctttagtggcatgttcaggagcacactgccatggactctggtggacaaggtgctgtctttgctcttgtccgtaggatttccaccacccacatcagctgtggcattgacctgtgtgaatatgtgcggatgagtggagccagcatggcccgtcagtatgacagcgttgggagcgtgggtcattttgaagggcatgttaggcatatgagtcaactgacaattctatttctgtaagaaagaaacctaccagcagcacacaggtgccaccaatcctcccacgtggagggatttctccatgttacgatttcatcctgtattttctgcattgtaagtagccacaggggaagttagtaaataagatgaggttagcacttttaggtaccagttgtcctgagtaactgtactccaacagagcaaggacatatgaaatgtactcaagacttgcttctggtgacagact

SEQ ID NO: 27681 - DNA, 1243 bp, Mus musculus
tcctgtattgatagatcagtgctgaatggctcacggtgactgtgaacccctcagtcacccagtgcacttttggggttaatgtgagaaaactcgctgcaatgttgtgagtttgggtagctctggcagaaattgggaatacacaggaaacctgactcaggagtctgtctactggaccagcaacagtaccccagaggcgcttataaacctggttttcatcactttcccttggttcgtaggtgtggtgaccatggacagttttactgggggttggttggaggggagcttgaatcaaaacaggaagctgtaagctaacacaggagtttcggtagctgtgtggtcttcaaccacgagttaagcatttgctgcactctgcattttttatctttgggcttatacttatcccccaaaacacacagatctacaaaactcataagtatgatgtgttgttttaaacaaaatcccaattgttcaattttaccaatgaaaacttgggagccagatgctgcagatgctggagttaaagcctgctagctcagacaggcagagaaagcaccaactgaccttcctccttagtggacctcccaaaaccgaatgtccctcccttctacttcctgtgcatctgcctatcaggtcctcctgactccctcttactatgtctttttgttaataatcacatattcgctccctgtcaaatgcctcttgacctatggttgattttacttaaatcttgtttacagtattcaagcaaaaagttcctggattaaaagtgtgtgttagggctgagctacaccacaactggaaataagtttttccaataaataacacaatctcggggtccacagtgtggttacatatcctgcaacagtggtgcccacctgcatcgtgaactctacagcgttcattccgaatctgcttctcaggagcaggaaggtctcccaagggagtgctgtgcagaagcggtcccaatgaggatagtgcgtgagcacaccaaccccaaaggtacactgggtgatggagaggctcaccaccctgagccactcggcactgacggatcaatacgtatcaggatggaggcaagtgttctcttgtttccatacctagggttccctagccccccacctgcccagcatccaaggcacagcacagcacagcaagcattagcagcattcatggctcttccatcttttcatccgtgtgtgtttctctggaatgacacatcatcaggaagagcagcaagcagtta

SEQ ID NO: 27682 - DNA, 1240 bp, Mus musculus
acagtgtcccgtctgtaaggtatgggcagttatggaaaggcccgtgctacagtgtcccgtctgtaaggtatggacaggtatggaaaggcccgttctccttctttgcctaagcaaaggattaagttagataatagatgtttagcatttcgcacagctcccagcttaaagcaaatgctacatgagcgccatggacgacttccgtccccagaacactagaaactgggaacactaaagaggtggaggcaggaggatttcaaggtcatctgctgccacatagaaagtttgaagccggcattgggttcacagagacccctgtccccacacagaggagatgtacgtaaataatgatcagtactggttcttgatactatggtgtggtaatgttttatactcttggcataaaagtctttgaagaacactgtacttggactttttagcctgtaagtacagcatttgtgagttgcttactgataggctgggagctgatagtaaggcaggcgatgtattatgcatcccacagcacactgaaataaaatgccatttccttaggaacagctagaaatactggtgctaatttttcctgtgctcaggaaaagcaagcacgctgtgcgcagctgcagtaggctagagagccctccagaaacatgatgtcatcctaatctgtgccgccaagggatgagctcatccaggcggggcctctcggggctgcagctgtgccagctcctgacttgtgatgctcctcttacaggcttgctcaccctccctcccctaccctcccctacaccacccctgcctgctgtgccaaagagacactgaaggatgaattatttaagacccaaggtgaactcctgccaaagataaccaggcttcagaaagcactcaaaaaggaaaatagaactgcatgggcttttttttttaattagatattttctttatttacatttcaaatgttatcccctttcctagtttcccctctgaaaatcccgttcccccctcccccttctccccaacccacccactcggttcctggtcctggcattcccctatattggggtatagagccttcgcaggacaaagggccactcactcctctcattgatggtcttataaaggaaagaactaagcagtttgtagaactgtcgtcagtgagaggacaatggtgttggttctctctgcctctgcttgctctaggagcagtctgtccctcttctacttaaataatggctgaatctgtgaccga

SEQ ID NO: 27683 - DNA, 1132 bp, Mus musculus
ataaagtttaagattacatttaaaaaaatagagctaactccatacaagtcccaaaatgtaaaactaatttagttcctaacttgtaaaatttggaatatcaagcttttatgtcatgtatattggattttgctatacatattacagctatatgtatatatatgtatacacacacacacacacacacacacacatatacacaaatacgtcaaagtaagagtagaaaaggaatgtgacagaaatgaaaaagagtgccctcttaacactgaagtttatcagcacatgcaactgtttattttcatttatttgtttgtttattcagtttgtttgaaatagggtttctctgtaaaagaaccctggctatcttggcacttgctctataggcctgggcagccttaaactcatagatccaccagcctctgcctctctgcctctgcctcgattcatactgggaataaaaggcatgggctttttacttatttttttataatttagatttttttttaaagtagaaatttgctattgctatgtaataaatggaaatttagaagctaccagctcagaagactgtaaggaactaaggaaacatctgtgtgtctcccagtttaaacaaaacatctaattagctacttgagtattcagtactggttagttagtttctgggtgtctcctcgttgctgttgaacttgcccctggccagtgggataatccattagttaagcacactgggagttaagattgctcttttccccagcgctgtgaataagtaagggcatttgtgccagctgactgcattcttgaattgtgagagaaacaccaagcattacactgcacccagattagatcatgacagatttggcagggatgagaagattccttgaatggtgtttgcagtttacccaaagtccttgggccctttgctttcataaaggattacaatcgacatccagggagaccgtccttaatgatgcgattagcagtttgcaacatgttttcctttgtgttctcatgtgattgaatactcccagtagcaccttggggaaatacgttagctctcacagagcccggagacggaattcagtgaagtaattgtcttccacttcagcactctacaaaagtaaagtctcaaaaatat

SEQ ID NO: 27684 - DNA, 1330 bp, Mus musculus
aaggaccccatgacctgagtgggccacatgttggggtggagtggagcgcagatgggtacagttatgcttggacactcatggatactccctgtgtgcagagctcatgtgctgcttctgtgcacaagattggaggtcagtgggaggtgccagaaagctttactctgcctgcagttgttacagtgattcaaatatttgccataattttagcacctagggtgtacattattcacctcacctccagtcaacactttcactaaaaccaagcgtcttctgttcctggctatgttttattcttgtattttattacttgtggtggctttctgaagacgtgctctttttctacgataataatcaggagtcttactcatttcttggtaacaaatcctgccccatagggctgtgtgcatatttacaaagtgacaactgttacaggccaggaccatggcttagacattactggaataagagagtccagtgtgctaatttgtatcacaacccaggctgggcaggtagcagtcccatctctgtgtgtacttgctgattagatagagcttattgtgagtgttacagaccaccccattctttttttctaataaagttctgatttttagttatttttctttaacttcaaatcatcttgctggttcaacttactcaggtgttcaagtgcaactgtcatatagttcctgaatgtcctcttcagcctgcgcatccctgggaagctgaagaaatgaggaacagtgtgtgagtgtgtgcagcaggtcgtgggctgcaggaagacatcaaaggttgctcagggggagctgtgtgcacattgacccgcaggagtttgcattcaaaagggatttcaatgcagatcactgacctccagtgcatgtgcaacatggagtgtcccatggtgctttgctcgtcactctttaatcttcaaaacatggttttcactcatttctgggtacttgttccaggcagtgcttagagctccaggtcctgtagataatcttggtagaactcatgttccttttttttcttttttctttcttttcttttttttttttttttgttttgttttgtttttccgagacagggtttctctgtatagccctggctgtcctggaactcactttgtagaccaggctggcctcaaactcagaaatccgcctgcccctgcctcccaagtgctgggattaaaggcgtgcgccaccacgtccggctagaactcatgttcccagtggagcatagtgcacaggtgactcaggaaacagacaggaggatctcaagttcacatgctgcctgggccacctagtgagatgccatctcaaaactaaaacga

SEQ ID NO: 27685 - DNA, 1756 bp, Mus musculus
ctgcttatctctcaagtttacatggttttccttttggttcactcctgacaaacagtgcagttgtattttccacatgcctgcagatgttccaacctgaaagagtcatatttggaattcatcctactatgtttccattgctctgataaatagagtgaccaaaagcagccgagaggaggggattcctttggcttgcacatctgtcattgaggaaagccaggtaggagctcaagcagggtaggaactgatgcagaagccatagagactgctgcctaatcactggcttgccactgcttgtcctgccggctgtcttgtataaccccgaactgtctgtccaaggatggcaccacccagagtgggctggaccctccacttcagtcattgatcaagacgttgcttcactgagctgtgcagaccagtctgatggaggctttctctccaccgagatgactccagcttgggtcaagttaacaggaagctgatacagagctgaagggagcgagcgctgctgtccatcaggaagagctgcacttgcagttcagcaccagtgggttggacctcagagctgcctcctgtccagttaatggctgtgccttcctctgcatacagtgtaaacaaagtacagcccacagtggagacgtctacttgcagttgcagagggacgccattgcaaagcggaagagcatgtgaagtgtgtctacccctgagaaaaggtagcataggaaacagaacccatggtcaggagaggctcagtgcctggctctgctgctctctggcctcggagtctgcctttgtgtcagctcacacctgtatgagcaagcaaggcccttctcatgtcctacagtgtgaaaacaatgtcagctacgcctatctgtgctctaggtcactaccaagccttctttcccacagttctgtgacactaaagccagtggtttccctctcagaatcaggctcgagcttaaaaaaagattaaaaggcaaaagggaggtgaggggccacacacgggagatgactcagtgactaaggacacactccacaagtgtgagccaccaagagtttgaatcttagcacttggataaaggctggatacatatacagatacgcccctctgaccttagctggtgagagagggaggtaggaagatcactgtagagtgctgtctgccagcctagcttcaggttcagtgagagacccctttgtaagggagcagagtatagagaactgatggatacctaacagcttcctctgccctccacatgtgtatgcaggtgtgtgcacactgtgcaatacaccacaccctcacatgcagacaggcagacaggcaggcaggcaggcagacagacagacacaaaagcaaaagccttttttgtttttaaaaacattcacctgttttcttggtgtttgctccttaaattacaaagttagtatatatggttagtacctctacgtaggagacataagaagaggttgtctctcatcagtaattaggagtgttgtacttcagctactctgagaatgaaaatacacaaatcaggactgaccgcttatagctaaactagctcatgtattttctgctctaaatgttggtgtatcagcaggccaggtctttttattgcatgattaattggagatatagaagtaacagttgtactgggctgcccatggcctctatatttaaaatctgtgtttccttctcattgttttgtttgtttgtttgtttgtttttaataaagtaaaacctggcatccctcactggaga

SEQ ID NO: 27686 - DNA, 1147 bp, Mus musculus
atgtagtccattttctttggtcctcagcagttgatgaatacttgaggctggagagtcaggaactaggtcatattgggttatagtagttgtgctacattttaaacatatatttttaagtgttcaaaaagattttatagtgggcattgttaggcactctttagcaaagggcactttagttgtgtaggataggttaggggggacaagaacagacaggaggcctggtcaggacagtgttgcttaggacagtaggcagctgggaattagaactgaaatggaaagagagttgacatgatgcaggaggaaggcctctgggctgcgagctggagaacatggctctggcccagtctactagaatgggccttattttatttttcttttaaaaactaccagttcattttcagagtcacagaggggactggagattagacagtagacaatagacagctaagtcagcggagcagcatccacaaagcaggctccggggcttctaaagtgagaaatgcatgtaagacgtatgtctgtctgtaagatgatgtctgtctgtctgtaagatgatgtctgtctgtctgtaagatgtctgtctgtctgtaagatgatgtctgtctgtctgtctgtaagatgatgtctgtctgtatgtatgtctgtggacacaggcgcaaacccagccacttgcttaagagtgaaatgaccgatgctgtgcttagtcaccgtgattgccacttcataaatgagtggaaagacacaggatgtcagacaacatgtaggaggagcatgttggaaaatacatggaaggttctggccaatggagatgttgttctttatcattgtcaccagtgtttatgggagaatattaataatttattgtccttgtcaactgtgatgccataaaacacataatagcagtagctccgtcacctgcaaccccaatgtctgtcaggcagacactgtttgatcgtttagaccagtggttctcaaccttcctaacactgcggccatgtaatagttcttcatgttgtggtaactcatccataaaattattccataactaattttctactgttagaataataatgtgaatatctgctgtgcaggaagtctgacattcagcccctgtgaaatggtccttcaacccccaaaggggtcatga

SEQ ID NO: 27687 - DNA, 1288 bp, Mus musculus
agttgctggtttcaggaagggtcattgtattacccaagatgtgctaagcttgaccatctcagaagcaagagccaagacagaattaagcatacaagcaatttattggggaaattccttgtgcaaaggtaggagcccagtgcagtacaaggaagaggagtgaaccagggaaggaaggaaaatgagagggtggatgaagtgtgccagcagtctcatagcccatgaggaggaccacctcatgtccatgaggaggactgccttatgtccatgaggaggactgccttatgtccatgaggaggatcaccttatacccatgaggaggactgccttatgtccatgaggaggaccgccttatgtccatgaggaggactgccttggactgcctatgtccatgaggaggaccgccttatgttcatgaggaggaccgccttatgtccatgaggaggaccgccttatgtccatgaggaggaccgccttatgtccatgaggaggaccgccttatgcccatgaggaggactgccttatgtccatgaggaggactgccttacgcctctgttgtgtgctgatcttggctgggagaagcttgtgagacttgggatctaggcaagtatggtagatgctcttgagtcctagctctggttctggtcagcacttttcttatggacgcctctcctgcctggaacacagctctgagtgttttctgccgtgaggctggagcaggggctggactctgttagcaggccccttatgttagagaaccaagcttcctatggctgttgcttcaagcatcccaagaaccatgcttttgagtcattagatgaaaggccttttgagccccctgcatgggaaaaggtgatgttggtttaggagagttcccttactgtggaaccttaccagtgtggctgattggtctcgggaggaagctgtgtttctttgggaggacttggagggttagaccctcggagtatttgttagtatttttcagtcctgagaccgtgagggtaggtggagcacatgcttagtatgatggcttgcatcaagagcgtcatgtaatgtggtaaggcagcttgtgcagaggtcaggcagcctctgagggactaatgtctgtaacgctcccgtcagtgcgtgcgttctcattacaaacacaagaccaggcctcttctagagcagtgacatgacaacagcgattagctaagtgtgcactcttagatggcttaaggtgtctcgaagggaaaggacaagcttcattgatctttatggagagttgaagaaaacaaggggcgggagagat

SEQ ID NO: 27688 - DNA, 1172 bp, Mus musculus
ttccagtgtctccagagttggggataatgggatttacttcgctgagctttggcttcatatctgtcttataccttattcattaaatctaagatcagcattaatagtcaaaaatagtgtgcctttgtatgttagctctcttctattaaacgtgctcatggctttaaaatataaaactacagagacctaatgctttcaagtgttgaaaaaaaatttcttgagttggtgatatttttactgttttgagacagggtctttctatgtaaccgttgctgtcctggaacattccatgtagaccaggctggccttgaactagctttgcaatgctactgtttatttctgggttacatctctcccagttaaacaataagaacatgaacaggaggagtgagtagtctctcttcaccacagccctgcagaaagaaacgtaagatttttgtgttgtactttgcaggtggggagttttaagcgggagatgaccttcacgtttcaatcagaggacttcagacgtgactccagtaagaagccgtctcatcacctgttcccactggccatggaggaagacgtgagaacagcagacaccaaaaaaaccagtcgggtccttgaccaagaaaaagaaactcggtctgtttgtcttcttgagcagaagcggaaagtagtttcttccaatatcgatgtccctcctgcaaggtaagggggtatcgcatttgtaggagacaggtagagagcaggcccgctctatcctgtctgtttcacagggtctagacttagcaagagctgtctgtcaagttttctccgttccttctgtgaagtagaaccaattttggagctgctgtggttaaaactgttgtagctgtagaaaaaaaatgcctggatctttgacagaagaaaatgtgaaaatacgaacagagcagaccattctgtttaaggttgatggtgcttgaaggtagctatgctcatatcctaggttggcaaattacaactcgaggctgatttagcctcggcctcttacgtgtggactatgagatgaatttaccaattcaaatgatatagaaagaaagtgattgtgacacagcccattggtgacctgtaaagccttcagtgtgtaaaagtgtttggtgatgtctagttgatgtcattcataaggtgatgtcatttttaaggcttatctggac

SEQ ID NO: 27689 - DNA, 1110 bp, Mus musculus
gtttatgcctgtttttttgtgcacgtagcccgagggtgaacagcttctacctgtaacaccatgccagtgctgaacgactttgagaagtggaactttttgggttggattctaggctgcagacactgtctgttcttctctgctcccacctcctccctgtgcagcagcctggagccttcttttgtgcaggagaaactgtccttaaattctgcatgacagtttcccacaagtctctgctctggctggccgtttccccacacttcctgtctcgccacagggtctcagcttggcagctttacctgaaggtctctcccttcatcctcagatgctgagttaatactgtggttgcaggtcagcgatggcttgccagggaagttcttgcccatctcgcacggtttctgctgcaagcagtgtatctgtctgagtagctagtcagattgcccgtgttgccagtcggagcacatgacaccttcctttgcctttcaacttttcatatgctaaagggaagaaagaaataatgctgacagcttagtttttcctggatgagtatttaaggctactcgggtgattgttaatgcatttcctgtagttatccattcagagatggtggtggtgcggaaccaggaggcttggggaatcttaggctcagcaagatagacaggcacatgcctttgaggggctacagctggatcctgctaattagcaccctttcgggaagcagctgccctttctacccattgtggtcactactggatatgtaagagactcttctagcccaccattcttcgtcacatgcatgtggactcacatacaagcatgcacacgtgcgcgtacacacccccacacccacacacaccattgatgctcttctggtttctctgcactcacattcttagttactattgtttctagctgttgtctgccaaatatttgcctgtttagagccatagcatacagtaatctctcagacggtgccattgagagaatactggcttgtatttatgagttacttaactgaccataaatacatcagcttcgaagaatggaacagcctagaccttgcaggtctccaggaacactaggctgagaaaacacaatggggaaatgtgcctt

SEQ ID NO: 27690 - DNA, 1157 bp, Mus musculus
tgcaggttaggttaggcaagctggccttgagtccttggatcctcctgtcttcccagcattgggattgatgaatgccaccttgactcactgtttacgtgggtgctagggatagatcaaactcaggttcttaaactcaatagtcagacctgcaccaactgagccatgtcctcagccctcagctgtcatgaggatatagtcctggcctcttaatccgaggttgcagctctgaagtgtgtcactcactgcgcagaaaccagtacccatctgcagtcacacgcagggttccctgtagccaccatctagtgattccttttgttttcagtgccactaagtctttatttgttcattgtgatttcttccggagaaagatggagcgaggaggagagttagggtgttagaaagctttagggaccaaggggaaagaagcctgggtaacaaagcaaaccgttcagtaagtgtgctcaagagttacgttcaccgtgactcaagggggtgagtgttgaggacctgagagaagggtccccatttttcttctcaactcaactcttccttgtaaattccagaccaagttttggtgttgagtggtaactgtagaggtgacttacatcaaagctgcattgctttctgatattactgtctagctttaggctggcctcaaaccctcactgcctgccttagtcaccagagtgctgggatggcttgtaagcaccatgatgcctgcctggcttgttggataatcttgtggccatggggatatgaatttcttctgtgtggatcaggtttccatgtggacgaccgatccattcactcttcattttccatcctggaggatttggggtaatgagatctaacggactaatgccatggagacagtcaagaattgactttccccagagggcaatggattgggaacaagagaagagaattctaacttcctgtcgggttttacagaagaactttgggctgtagatatatatgcaggagttacatatatatgcgtaccttgttgctgttttggctaaaggagaggcaggagctttgtgaggggtggggacagtccttccctggtgaagagtgcaccagccttatttcaggtgctttgccatacataggatttcctgacaaaattggtttttttttgttttgttttttttttt

SEQ ID NO: 27691 - DNA, 1191 bp, Mus musculus
ttcaaagatgaagaatttgtaaagaaagcattagaaactatgaacaaatatgaccttagtggaaggcctttgaatattaaagaggatccggatggagaaaatgctcgccgggcactgcagcgaacaggaacatcatttcaaggatcacatgcctccgatgtgggatctgggttggtgaatttaccaccttccattctcaataatccaaacattcctcctgaggttatcagcaatttgcaggctggtagacttggttccacaatttttgttgctaatcttgacttcaaagttggttggaagaaattaaaggaagtgttcagcatagctggaactgtgaagcgagctgatattaaagaagacaaggatggcaagagcagaggcatgggcactgtcacttttgagcaggcaattgaagcagtccaagcaatttccatgttcaatgggcagtttttatttgatagacctatgcatgtgaaaatggatgacaaatctgtccctcatgaagactaccgttcacatgatagtaagacatcacagttaccacgtggtcttggaggcattggaatgggacttggtccaggtggacagcctattagtgccagccagctgaacataactggtgtaatgggaaatttgggtccaagtggtatgggaatggatggtccgggttttggaggagtgaatagaattggaggaggagttgggtttggtggtctggaagcaatgaatagcatggcaggctttggtggagttggccgaatgggaggcggcagcatgagcggcatgagcactgtgactggaggcatgggcatgggactggaccgcatgagctccagcttcgacaggatggggccaggcattggagccatactggaaaggagcatcgatgtagaccgagggtttttatcaggtcccatgggaagcggaatgagagacagattaggctccaaaggcaaccagatatttgttagaaatcttccttttgacttgacttggcagaaattaaaagagaaattcagccaatgtggccaggtaagcaacagcagccggggaaggtgtgaacatggagaccaaggaaaaggaagaatggctgtcttcagtgactaggacaggagagaaaagcagccaccagcagttttgaaggagtcagctgagactgcaatagctgttgaagtgaaggttttgagaaac

SEQ ID NO: 27692 - DNA, 1723 bp, Mus musculus
tttgatttcaggtggaccgttcgatctgatgtctcggagaataattgccgcaaatagtataacattagccaaaagaatagccaaagaaattgagataatacctttgcaaagagacgacgaaagctagtcacagagaacagtgtccagctccagtgtcatccttgctgtccctggggtgtttcagatggatggtgtcactgatttagactgaactttgaggtcctgattttaaaatggaaactttttttttacagatgacatattcaaaattagatggaatatttgattattgaaagaaaatttgcatgtagtaatattcttggggaaaatatacaaaaagtatacttaatgaactagccattgaaattgtccctagtccttatgatccccttcaacttaatgtactgtttatatgcataattctcaattacaaagtttctttttgtaagtggctttctctatgttccagaagccatatttgattaagtctaaaggctgtaacaagctggctctccctgtgcagagggcctttgtgttttattaatcactgtaagatagtgcctggcccagtgcctgtcagacagtaggcagtctgaagtccacacctgacaatgcgtgctcgaagctgcagctgctgcctctaatgcgtcacagtaagataaccaccctcctgttgcgaggtagaagttacttcactgtcctttttatatttcttattgctatgccatttcacaggatcgtgctgccagagacgactgcttctagtggacatttctgcagttagtacactgctgtatgttgtaggttctgcttaaagctgccgtgctaaagagattttcacagacatcttccaggtacctggtctagttagtggcagggatatgttttacaaaaggcagctttctcattcagatccgtaccctggtgctgacctgtgtactgtggtgtaatggtgaactttttgatttctttccagacttgctgaatttcatcactgctaactctagatgctctctctataaggtcttgggcctctcaaactcaagaaaatttaatggctcctattcctttgttaaagggttaattcattgtctagccttggcccttggcatatgaacagatgttttgctcttagtatgtttgaaccttgcatttgatacaatgaagtgtttttgtaagtttcaaggcagttatcttgattttggggggatttaatatattaaagctatataatactcagatttgggcactgtaatgactatatctgtgctgttaattacatgtatttaaaacgtcacgtaccatgtaaattctattacaagacaggttgctttgcaattaaatttattttagttaagacttaggaataccattttctttcattgtattcatttgcgtatcccaggctgccctcagaattgttgcatacccgaggatgaacttgaacttgtgacggctctgcttttctctcttaagttctgggatgcagagaagatggccacaggccaccacacacagtttctgtggtgctggagactgcacagggccacacgtgtacttagcgtaagcactctgctgcccaagctgcgctccagcccatgaacacacgtggaattaaaggagtaattaatgatatcttatcaaagttaatagcctcagccctttttaggggttttgagtttagttacagatatttgaagctaatattggttatgaatattca

SEQ ID NO: 27693 - DNA, 2334 bp, Mus musculus
gtttgtcttggcattctttctgccctgcagggcatacatactctagtttctggctaacattttccagcctaattagatctcaactgcatgcttgtttctttttgttttgtttgtttgttggtttgttttgcatcctgcttgctctgtggcttgtttgtgtgtttgtttttcatgctctctttcctgtgtaaggttagctgtgtgaaagagagcatggtaaggtcaggggtgagaccacatgtctttaatagtctatttccagggctcttcaaaatctcgtatgtccagcaggcagtcagtctgtcaatacgtcctcaatgcacatcgactgactgactgatgaggtttaccttctgcccttaaacaatgagaagactggaccctgcctgtgaagcagtgatacaggagtaaagcaacaggatttagacatcactggacagtgatgcccgagagaagggagagccatgtggtgaacatgcctagtgtcctggctttacaaggggaactggacagagtcaggtggtcttggtgagtttatttttgtggggaagtgtcctagactgttatggagacagagacaggtgtgtgtgaacacaaaggagtgatctgtagtgtgaatgtttgagtgtcccccagctcacatttgcaatactacctcaatgatgatgggggttttagttagggtttactgttgtgaacagtcaccatgaccaccccaactcttataaggactacatttaattgaggctgtcttatagattcagaggttcagtccattatcatcaaggcgggaacatggcagtgtccaggcaggcatagctcgggaggagctgagagttcatctgaaggcctctaggagaagattgacttcaggcagctaggaggaggatcccccacactgtcacacttcctccaacaaggacagactaactccaacaaggccacacctcctaatagtgtccctccctggtccaagcttattcaaaccaccaaaatgggtttaggcagttggtcctttaaggatgtgcttgggtcacaagagcaggacctctggggtgggaatagtgatggaatttgaacttgaaggagtttgttcataagctttctccatgcaagaagatggccagacggtagtctctgacccagtgtgagtcctcctcaggcttgctgactgaggaatacgttcttgacatttgtagggtttaggacaatgacatggaagctcagtctaccagaataaagcacatgggtagagaggtcccttcaaggctggatctgcaaacacgcctgagggaaggactggctaaaggaaccaactgctggggacatgtggacagaccatctccacaggtcacagtgcctgttcctcatctccagttcccaggatggagagatttcttaaccatggcagaatctggttgaatccttagggcaggaggccaaattccacctatattgaaaactattctagttctatcctaagaagctcaaaagcaaacctcagagcatccaatggtcctaacacatttaaacagccaccagagggttaaacactagtaactgaaagaacaccatgatacccaatagcatgaaattctcaatcattcagcattcagatatgtgaaaaattaggaaacaaaattaaattaaaaaataaagaaaaagtaggaacagactaagaatcggcgtgggtaatagaaggcaagagttttgaagtagctcttacacgtacatttcatatgatttacacaacatatatctgcatgttagagaaagaagaacaatgtatatctgggctaaggagacgatgtccttaaaaattacccaagctgaaatgctagacattaaaccgacagcaactgggggtggggagcaggaggaagactacctcaaacagccactaatttcaacaattgagacaattaaaggtttagtattgaattggcttgatattttgatgattatttatagctgttggaaataaaaattaattattaaataaaaatgtgtttatttctaacaacaacaacaacaaagattgccactggtggtattaacaacagctaagtcattgcagaagaaacgaggtgtctaagtggagcacagcaagagatctgactgcaaacagacaaagaacaagaagagactggggaaatcagaaagaaccgagaaagagcgcatagcaggatcatatcaagtctcctagcaatgggagtcctagcctgctgtggatgggccagataagtgagttaggggaaccagacaaaacatttctggaagaaataatggtcgaatttaaaatttgacaaaaggataaagttatagcttaacaag

SEQ ID NO: 27694 - DNA, 1162 bp, Mus musculus
aaggagcttgtttagcttttattatgtttaattttaattaaaaactttatccatacatttattagaaacactgtagtatttaaataactagattctgctttatatatatattctctatgtctgtctgtctttctgcttacctagtttcctctgcctgaggttttgagtcagagcttcactgtgcagcacatgagtttgttttatacctctggctgaccttcattcatcttgctttggcctctgaagccctagaattacagggctgcattgctaggccaaacatttgtggcagaaatttacagctgatctgagatgcactctaaatgtaaactaccccctggatttcaaagacttggtgtagggaactgtaaaatatttcattaataattgtgaagtggaaacttctggtttctttggaaagtcagttgggtcagatggtgttttgctgcggcagagacgtgcaggagtgttttcctgaagtgggcaaaggtgaaaggatgctctctgctaatgccacatgtgttagttcaccttacattgcgttgctgagctctgcttgttgtgacttcgtggaacgaaatgcaccaaaaacctggtgtttctctggcagcttcttgctccttccagggacttggaccgattggcagaatgatgtcagccgatacaggctcttgtggagtttttctaggcaagactcacccactgaggcaacacatgtgctgaggcaaaacctgtggaggacttgtgatgtttggagggatataaataggactcagtgaactgtgaacagaggcttgcttgcttgcatagatagcttggcaacgcttccttggtctcaattcttcgctgatcttcacgtggttgagagagacacagcaaagaacttctcctggtgtctctgttggtgtctcatgctgatttggtggaggcctggctgtgtggcgtttgctattctgacagtactgaactggactgctggtctagtcgtgaagtgtttgagtggatcgagccgccgccgccgccgatttctatgagctgaactgctgacttcctaacaacacagactggagttgctccaaagaacagtttctaaacagtccacttcctccgtatcctaataatgtttgttttccacgacttatgatgggtggtgggctagaag

SEQ ID NO: 27695 - DNA, 1339 bp, Mus musculus
tgttttttcacgagatgaagatgaagcgcggtggctgccagagagattaattcgtcagatgaacacagattctgactcttctggtaagtatcattctaaagactaaaattccttttgtgcttaaaattcagctgagagcaacagctctcaaagctgttctccagctactctctgagccagctcccgacaggaggccggagactagcctcagctttacaatttgcatttgaataaagtacctagacttccctgaaaaaagttctgctttcctactttctcactgtctttcaagattttgtctttcaagcaggtaaatcaacactctcaaagcggaccagcagatgtgcatccccgcccccctagagcacacaggtggcagctgttatccccagactcaagacatttccagcatgtggctttcagtctgagttaaaaatttaggtttacctagagggctaaaagagtagatttttctatattaataaagattggtttttattttgatagacaggcttagccccttagctgacctctggcttttcacccttgctgttactgcaaggtgtccttagctcaataggctgtggaaaaaacagggatgaggaggaacgacttccagctcctattttacccgcaaatcgtggtggtggtgttattaacgacataattcttgcttaggctttgctaattctgaggttgataattctcctttaagagctgcacagcactcagaactgtgcatactggtttgtgattgtacaaattcagtatggacaccgcttggtgcagaagtactgcaagggaaggtccggcttgaccgtttctgagtttcctgtgagataaacccggtttaaaagaggttggtatcatattttggttaaaaataaaaaatattttccggctctaccttgcctccccaaaaggtaccgagagccacatgtgtgggttttacccacgggaggaatctggtccatgtccacccaagccaaggttaaaagcccactcatctacagatgagaaaatcatttgatcacctcagttaagcgttgccttatttaacttaattaataggggggagagagattggagacgtactattaaaagggcaagcccttcactgcctcccacccaaataaaaaagccaattggccttgtactacaagagccggtcactccttctccctgtttcccacctatcatccaaaaatgtggagatcaactagaaagttacctaccaagtactaattagcatcttaaagtcagagcctgcagccccgggcctttcagttagttgtttactagaaaggacagtcttaagccagatacagtttaccataaa

SEQ ID NO: 27696 - DNA, 1207 bp, Mus musculus
aattaccatagattagtaaatcaaatttctgtttggtctgtttactaatatttctaaaatatcagtgcctgttgccagcccattttagaaaacaaagtcatatggtatacacatttgctgtaggtaataatataataagcagaactaacaggttcagtatcacacaactcctctggaacagaactcaggaaagtcttgttcccactattgtgggaatctatataaaagaaaaatgggattctccctgtaccttggctgcctcgtggtcaggaagtcctggagggagactagtgcctagtatttgcagaacctgaaaatttccttgttggcctcctaggatattcagcagctggtcctgtcaccttccagaccttgatgtgaaatttcaagaagaattcaaactttgttcttcactggaccctgggagaaggacaacaacaagaatgagtgtgtgtctggtaaatacaccacagggtctgttaactttcaaggacgtggccttggacttctcactggaggaatgggaatgtctcagttttgctcagaggtcattgtacatggatgtgatgttggagaattacaacaatctgttgtttgtggaaaatcattgcatacgtggaaagaatgggaaggtattggatcaagacagccagtacattgtccatgaacacatgaatattcaagagaagtcttctaaatgggacaagcttagcaatgtcattcttgaatccctccagtgtacaccttacaaaactaatcacagctctgatgctcttcaattctcgaaccaaaaaagacttaagcccaggaacactaaagaagtttgcaaatacaatgactctgtaaacagtttaagtttgttttctaccattagtctcaatcaaggaattaacatgcagaagaaaaaacacaaccgaaatgcagaattagacaagatttttgtttctaaacataaagtcatggtgaaaaaagacaatattgcagggaacccttacaaatgtagtgaatttcacaaatatcttacccagagagaaaacctacaaagtcagcagagaatttatcatggaaagaaaccttacaaaagtagtaaaagtgacaaatgctttacccatcagatccatcttagtattcatcaggaaattcatacagaaaagaaaatttacaaatgtagtgaatgtgacaaatgttttaaaaacaaattcaatct

SEQ ID NO: 27697 - DNA, 1158 bp, Mus musculus
aagcttctaccctgggagatatcccaggagttctgagggagctccagagacacctggagattccccatctgggtgctgagttggaattcctcctggagaggagagattttgtgctcactcggccatctgattctgtttctgggtgttagaagtcccccaggaggtgggttctgatctcggttatcataatctttttttgtgtgtgtgtcttgtttgtcttcctgtatgtgacttagacgatggggaagaccattagcactctccccttcgactgactcttaaccattgaactgaagttagaactggagatagtttacatgtgagaaaatgagtttgagaaaagcagtactctctgactatctggagacaatttggtaaaagagaaaaattaaaaataaatagacagtatcaattggtctttggagccttgcacctatagttaggagtctagtgtggctagagaagccctgctaggagctgattgtaaacactgctcttaaagggaccagcagcttctcaagttctatggtaaggtaactgatggctgtttttcctaaaaaaaaaaatctccgtgcttgtgattattggattcatcaggtgacaaggtgctcctcttttgaaattacatctagaaaaattaagaattttgtttcgttttaataagcaaatgcatgcagccatctcatttttgtttctgaatagttttaaaggtataaatatgttttacatgtcttggctatagattgttggctcataagttgttggttatgattaaaaatttgtaacattggtaacaaaaagttggcttaaaaatggtaactctgggttgaaataatttagaactacaacatgcagcatgagacaacccaagaagacaagtctctaaagatacgcctgaattgagtaatattctatgtaattcttatcctagaaaccagacatataaaagataggacttagggcagtgtatctttcaagtattgggggctgcaccttcttgcgtttgtgtgcaggaaaaggcagccaaactttgccacaagtagtgtttttggtgttgatttttaaagagaatggattgtttacactgttaaaattgggttttgcttcccaaaattgtggttgtactctcatgttacaagaggaattgaaggcttcttc

SEQ ID NO: 27698 - DNA, 1172 bp, Mus musculus
caggcagatttttgagttagaggccagcctggtctacaaagtgagttccaggacagccagggctatacagagaaaccctgtctcgaaaagccaaaaaaaaaaaaaaaaaaaaaaaaaatccagaatgaaaagacccctactaagaggcaccagaaagaggtatagatgcagagactaactcaaaccaactctcgggaatcccatgtacgcataccccacccccccaccccacacacacaccaaacaaaacaagcaaaaaacaaacaacaaaaacaacaggaagccagaatatacaatgtatagttttgttttattttgttatgattttaaaggagaaaaatactagtttactttaaaaaaaaacaaaaaacaaaaaaagccttacaggacataatgagacaagaaacttctaaaacgacaaaaagttcatttactgttggacatccactggtgagcagagagcatgtagtaggcattaagcatagtccaaacacatatgggcacaggggaaattttattgaacagatcaccagtggcttatgctctaagatcaagaattgacaaatggtgtggggtggtgagctgtggatagggagcctggtccctggtggagctcaggcttagaaccccagagagctggcaggtgattctccactgcaaggtgttctaccacactccttgggcttctggctcctgtcatatccacagcctcccacagtcccccacaaagatgtgtgtggccaacagtcacttaggagctgcaccaagccctcccacatgcaaataaagttttccccaagctctcagaccaagccaatgagaagtatctgctatcagaccctgacccaccccaaaactgtatataagaatcctatccagaaggattaaaggtgtccaagaactactctatcatccaacagcttctgtcataagagctgtgacatttgggaaggacactgctctcctgaaatgccacctgaagctgcacagcactcctcactggctaatcagcctctcctcggctcagccctacactattcagtgcagggcagtgtggagtaactaagatagccaggctgaacagaggtagagtcaagtgcagccgcagaagcattggaaatcccagaagacgctctaacatataacaaggacacatgctccactatgttcaa

SEQ ID NO: 27699 - DNA, 1125 bp, Mus musculus
ttctcagacctcaagggagggagccatgcctctaagttaacttagaatggagaaagaagaaattggagttttattcttttaccttagtcccttcatttctttaagggatttgtttcctctttaagggcttctacctatttagctgtatcttcctgcatttctttaaatgagttatttatcttccttaaaggactctattatcttcatgagataggattttagatcagcttcctgattttcaggtgtgttggtgtattcagggcttgctgtggtgggagaactggcttctgatgatgtccacatatattggcttcccttgcttatggtcttgtacttgcctctcaccatctgattatccctggtgtttgctcttctgggtgactctgtctggagtctgcctcttttgtccctaggttgcttcaggtctcctggtaggcctgcggccctggctctagcagatctcctgtgaggccttcaaactgttgggtcttgagaggagctgtggagctattctccagtggggcctatgggctgtgggctgtttccctgtgtgcagcagatctcccgagtgcttcagtctgtggagtctacaggggagcagactagctaacagtctgtcccaggagaaaggatcagccagaaggggacagaggttttggggggtgatgggtcctgagtccactgggctccctagtagctctgggacttaggtatggtccttacctaagtctgagtgcagcagatctcctgagatgcctcatagactagtatttttaacatactatcattttaagttgtatgtattaacatatttgtgttgcaatgaggcgagaaggatacatatttttagtgtaccaacagacagaatgcagtattgtggcttaggacagagctctgtgaatattattgttattgtaaagttccttaaataattatgttcagttctgaggccataagaactgagtagttttcagttttgaaaaattaatttgagtttaaaggaatgttgcctaatgttatcccaagaacagttattgtgatgtggtcattgtgttctttacacatcaccatctttccttagagaccttggagatttcttttatgtgcttgtttacctgtactttt

SEQ ID NO: 27700 - DNA, 1200 bp, Mus musculus
tggtagtttacttcggagattggagttgatgcctgtggagcagttataggacattactgagcaccaccaggtaacatcacagacagtgaagtggatggcagtggacccaggttataattatcccagcaagtgagagactgaggtttgaagccaacctggacaacgtagtagtaaaaggctatcaaggaatgatggaggggcgggggcaggagagaaatagaagggaaggggaaaggatgggacaggttaattgtgtagaattctacaactacttctttgataattaccatttgagcaaaatttaccatttaggcacaagttaggattcctgttttactaaagtcagtttttgagtttttcatgtgttgtaaccaagtgactttgttccgtgaatttaggtgttagatcctaatgactttcctagtctttgcttgaatctttcaagttagctaggtgtttttaatattgacttgtttatacccaataacttcacagggacagaatggacaaaagaaataccagataaatctgaagagtcactcagggcctatccatgtgctacttataaataaagagtccagttcatctaagccagtggtttttcctgttcccccacctgatgacctcacacagccttcctcccagtcctcaacttcagtgactccacagaaatccaccatggctgctcaaaacctgcctgagcagcatgtttccgaaagaagccagactttccagcagacaccagctgcagaagtatcttcaggttggtacagaggctttggtgtaaaaacgtcatatgaaaacatgaatactctatgaaacagcccagagatctatcctgaatttgtcatagctgaggcaaaataaccttattctatagtctatatgcctgtcactagaatagatattaggaagattttatggcatatcctttctatattgctagacatatacatgtgtgtatatatgtacataatgtacatgcatgtatgtatacttatagattacagaaatattcagttacaatgtttagaacttttgtgtctgagcaaatacaaacgtcactgcaaatgttaaaagcttattttatatatataactttgagatttcacaatgaataatgaagctagaaagattttactttactgatctttgacacagatcagtttttaaactttgtgttgcctatgttatgtatat

SEQ ID NO: 27701 - DNA, 1922 bp, Mus musculus
tgacctataactttgaatttttacattgcattcgttttagctgctggaagagtaaagactataactctttcatcttttccacgaagttcattaagattggtgtgactttctgtggtaaattaattctcctctaattgtccacagctggccagattccgaagcctcttgtgcacagctgagggagagagtgcggcttttttgttaagcaatcaccgtccaccacagcccttgaagggccgcagagtgagagcatctttctattagcagtcaccagtgggtcaacccaatcggaacacggaggtagcaaatacaacggaactcagacattccaataatggcttttcgagaatttcacgtttgtggattctacttgtccagcacctctggcacggcagagaaaaccagaagtctgaaataacttagcccatcactcctagatttgccccaatgtatgtccaattgctaaatatgggatgtaattaaaatcacaaagtatacctgcttcagccttcctgacaataatgtcagccttaccaacctcagactgtactaaactttatggtgggcttagactgagcctatcccattctagatagtgtttgataaaaactttaaattcactttgaactgatattattcccaaacaagcagttcttacagtcttgataattttctgattaatcaagagtatatatttcctttaatacattttctcagattctcattttatgtactgtaatatagcacataagacaaaacacacacagactaggatagaacaatgtggctactcctgtgattaaagtaacctacagttttagtgaagcattcctcaggctaagaacagctttttaagacactattccacgtaatatattcacccaagaatgttaatgactaccagggtgatgacatagtgtgaggctcatgatattaacgtgattcagaccagcaatgtatacgataccactgcagcagaactgccccgagctggtgaacagcttcctacaaacagagtgggacgctatcctatatctgctgttttttctgtcacccattaaaaagatgaaccacgtcttgcataaatgcctaagccattcattgcattttctaggaagagcttatttcccatttgtacatgttaactaagctgtttcatgattttataagatgccatttgttactaactttagactattctatctggagaggttttcttttgtattcattgaaggaagacaggcaccacattccttttgctttgccattgtaaggtgattctatactcaataaccacacttaagacttgaatatttgttatacttttggtattttgtgagactgtgtccctgggtttcttaagtttaataatttgtttcagatctctctcatcttctaaatgtaaagttaattactgaaaactttcttcatattcttcttaatagaataactttattttgagtaaattgtacttgataatgtctactgtcacataagatgagagcccaaagattagaatgaacaccttagccagtgttctcccctgccgagtccactctaaggcttagaggaagacctacatatcataaatattttatgagctggatagttaaaagatttatttaattatcttgataactgccatctatctgagataaaatgcagccaagttaataaaataattaaaataggagagctatcttttggaagatttttaaaggtaatatttattaatccatatttttataaccagaggttcttaaaaatagtttttaatagctgaatagtattccattgtgtaaatgaacaacattttctgtattcattcttccactgagggacatctgggttgtttccagcttctggggttataaataaggctgctatgagcatggtggagcacatgtccttgtggtatggtg

SEQ ID NO: 27702 - DNA, 1143 bp, Mus musculus
ttataaagaaaacagtggtgtgaaatctcacatttccaccccagttactgctttaaaagtgccgtgtccagagctgaacactgtgttttaattctaatggatctctgaaatatcattgcaaaattatcaccttaccatcaaagaacctacatttctattattgcaacctaattatatttaccattttagtggtaacaatatagctttaaatgccagatgtaatcagttaagggcactgaaaaaacctaaggaattgttttgatgacaagatgaaacatagtaattttgaacgctctcacttgccaatctatgtttccaagcaaaatgtccagtgctagtcctcttcattttgtttgtcaataaccctgaaacctctgcacaaaagccttgcaataagagctgactagacctgtggatgacaatctttcctgctagagtcttgtgctgactgttttctgtgtatttgccctgcaggggaagcgtgcggcctttgctaacttcgatccttgctcccttcttcctggaaacttggactactggacataccctggctctctgaccactccgcctctgctggaatgtgtgacctggatcgtgctcagggagcccattactgtcagcagcgagcaggttggttttctagggagagttctctatcagtggaggcagaaaagctgctcttcccagtcaggcctgggatttaatcctcctgtggtctcaccctgtggctgctgtcacagagtgtttggcagtaaagatttgctggtattagccagcaccttcggcagtacttagataggttgtttaatctgggaaagtgttgtttattgtgaggattataggagaatgatatctgcttattagcttattcttttttaacagctaggaggaaagagagtctttgaaaaacaagatttcatactgaaagttatacagatgtcagtgatagttcccagcctcttgctcatgaagagtttagcataatcttttgattgtgaggcgcacttctgaatcctgacagtcctcctggcttccttagcataaagctgaaatgtgggaaatggacatttctcaggaattccaaaaggcagatccctataatataaaagaaagcctcagccagttttgaaatgacaattattt

SEQ ID NO: 27703 - DNA, 1212 bp, Mus musculus
actgctcacttcactggcatggttctgtggcatccagtttgataattcaatttacttgtaagctgcagtagctttattctggctcccgggagctaaatgtaacatgtctaggacttggctagttattaaatacagccattattctaaattagctgacataaacccgaaattcagtgacttctactgaacaaaagcaaagaaatacttcaggctcaagagttctcaactattttacacctaactttgggtctctgcttattttatatttgctgtggcttcctggggcaactatgtgacatcatggttttgtgcatctttcccattgtctgctagtttgaagttgaccatggtggagtatttacactacagacagaaaggggccagagctgcatattagaacttttgttgctttcttgactgttgctccttccaatatagtgaaagagtagtaaactcagtgctcccaggtatgctaatcataaaacagatagcgacattcctccacccacctgcttcctgtgttcaaagagtcttaattcaaagaaagtcaccctgaccattaccggaacctgcaatacaaatgtgctattgttaggggctcttagaaactgtcttgagagttaacaattaccaggtattccttgtgacacctgtgactttgtacttccttgtgactcttaactggtatttttggtattttccaacaacgcccttcccacctccttgagttgtgtttttttcctttaaatacccccttactcagctactcggtgcgccacggtcctctacccctgcgtggtgtatgaccatgggcccgagagcgctcttgaataaaaatcctcttgcaatttgcagcaagaccgtttcttgtgggtgattttggggtgtcgcctctcctgagtcagaatgtgggggagtcctcacgttgtgggtctttcaatagcagccattaggtacctacatgatccagagagagatgtgttataagcatgaaatgcacatcatatttagaaacatttagtacaagataagaaatatactagtagcttatataaaatagtattttgtctgtatttaattatatgtttggttattgtgagagatacaataaaacaatgttcattcaattctttgctactagaaattagaaattaagtatacagcccctgttatgttggcatttaacattgctctaaattttgcacagattaa

SEQ ID NO: 27704 - DNA, 1787 bp, Mus musculus
ttttttccctgtgttcaagagaatttctttttaacagcgttgcagatctattcagatgtttaaaataatgcttaaattcaaagagttttgcttctagtgaactgtaatcactagaaaattctgcctctaggtatggctaatatagctttacattatgtaagaaaaatttttattgtttctgcttctatacaagaagccaggagttttaatctttcagtgtatattgtttcctaagtgaaaagtattttattaactaatgcttcttaaagtttaccttaaatccttgctctcacccaaaagattcagagacaatatccttttattacttagggttttagtttactacaaaagtttctacaaaaaataaagaaagcttttataattgttattaattggtaattaaaacttggttgtgcccaaaacaattctttggccagagaaaacattattgtaaagtcatttttctcatcctcccagccaatcgttggcccacttgggcccaactagcttctgtggggtgaagtcttaagacacacagtttcctctgtttcagcacagatgatctagttgtgtgctgtagacggtgttttaaaatgctgaacaatcaaaccttaatttgtatattaatagtcaatgccatatctctgagctcgcaattgcttaaattgttcatccctcagatactattaattctcaaatttacaattgcttatgcatattcctagttaataaataaataaattatgcacatgtgactcttaataacgttataagccttctagttacaaccgctccttaagaaaattgattgaaagtgcaattagtcactgcccctttacagccaagtatttaaaatatttggtcaactagttattaattcaaaagtttaggtattgtgaaattttaaaactttaacttcttaaaagacaaaaaaagagaaaaattgtatccccgtgcatactatttagtgcattcccatgcacactatttaagtcttagctttattttcaaaatttaatattttaatgtcagagtttaataaatgctttatagtatcttaaaggaatctacttattggcttatagattgatcctaaaacagctaccttattagaaaagggaaaaacaggttttctccacagaacgctgcagaagcatattagtaaattcgtgtgacgagctggtaggtaagttggctcatgtcctgattgaattgactaaaaaactaaattaaattcatgttttagatccatccttacttgccatttttccagtttagactagcttctagccttttaactttatggcaatagttcatcagagactatatattcagacttagtaaaattagtcatttaatagagtcataatgatttttctcctttcttcagtgtgaccagccagtctaactcaatcttagattggtctaatattcagtccaatgttagagattcctatattctaaattacctagcaaagttaattcagagcacatcccccactccccctagatccctaacctcagaaggattgctggccttacagctactagaaaaagctattaaagagcaattggtcacttaatacattggtaaaataaaaggaccccctgactaacaaattgaagggtccagatccagttctaatttggggtaggggctcagtttgtgttttttcacgagatgaagatagagcgcagtggctgccagataaattaattcgtcagatgaacacagattctaaattttctaaagtatcaccttgaggactaaaattcctcttttgctt

SEQ ID NO: 27705 - DNA, 2022 bp, Mus musculus
caaccacatggtggctcacaaccatctgtaacaagatctgacaccctcttctggagtgtctgaagacagctacagtgtacttacatatagtaaatagatcttaaaaaataaataaataaaataaataaataaattctgactaactagataggtttttgcctacctttcatgcttttacagctgtgttctgggtttcagaaatcaaacatagaacaaagaatgagacatctgtcatcagagttatttattttttcatcagtagagactggtttttaattttagacaatcagaattattttaaagaaattgcctttttattagtttccctctctttaaaaaaaattctgtttttttgtcaaagtaaagcataacaagataaaaagaaaatcatcattgaagttggacaaggcagaccaataaaaggaaaagagctccaagagaagtctgaagagtcagagacccactcatttatacattcagaagtcccataaaaatattaaacttagttataatatgtacaccaggatgtggtgcagacatgtgtggggccctgtgcttgctgtttcagtccttttgaattcctaggagcctggttcatttgatttggaaggctttagtctcctgctgtgtttcatctctcccccgcccccctctggctctcactcctgcctcctttcatacagttccttgcctgaggtctgagggcagagagttgattgagacagtcaagagctatattttccaaggcctctgctcctccctccctccctccctccctccctccacccacccccctctcccttcctccctccctccctccctccctccctccctccacccaaccccctctcccttcctctctccctccctccctctctctttttctctctctcctccccccccccccccccccagtgtctggctgtgggtccctgtatttattcccatctgcttcaggaggaagcttccctgatgatgatggttgagtgaggcactgatctatgagtttagtagactattaatagttattttcttgttactttattgttgtttagaccagtagtacttggttttatcctaggtctctaagctatctagtttttggttcgtggtcacacaagcagtgctggatatgggttccatcttagggagtaatcagatactggttggttactcctataagctttgtgtcattattgccctagcatgtttttcaggcaggatcgagtgtagattaaaagttttgtggctgagttggtgtttgtgggttttttgtttgtttgtttttgttttttggtttttttttgctttgttttgtttttggtaactagtagaaaattgtcatgtaccaagacactagaacattccggagattctatgtaggcactagctcaactttgagttgtgttggtgttgtcttcatcaatggggcctttgtggaaaacagcctattgtcttggcaacagcctgggttgtttgtggattttagtgggacccctttggccagcaactcaattggatataacatggtcctagaattggaagctttgtgtgacagaaatggccagctgggactctctcccatgttatttagaaacttcattaagatcaacttcatatattttaggaggtttccactgtactaattttccctattactcagttctagctcacattctccactcacattcttccccttaaccctataatcccctccccctacccaaatgatcttctcattccacctgctccctcctcccgccgccacatccatgtggggctttgggtgtgggggaagaggtgggcaaggagagagcctgtgtctggccagagttcctgtgctctgggcaggtggacgtggggaggactgctaggtgctttccactcggccctgggtgggcatctggctgtatgaagccactgacctcactcggtggaggttgggggggtagggggtggacaaggggtagcccctgtatcaggttctcagtctccggcatcccacactggatatggcagagg

SEQ ID NO: 27706 - DNA, 1089 bp, Mus musculus
ttattacctcaggacttggggtgtgggaggcaggaaataatagtatcaagaccagtctgagaacatgacgagttagaagtcagtttggcaagatcttgtctcaccaaaagaacaacaaaagttgtaactgtgtaatataaaatgtagtaagtagtggatagcataaaaggattcccttagtatccttaaggcaagatacagaattttctttcacaatttctctctttcactcttgcgtgcgcatacacgcgtgtgtgctcatgcacacacacacaacatacacatacatgtactcacatgtgtgcacatatacacatagtactttggtaaaatttccttctgttatattcttattcccttaccctctaacccagtctccttctcccctttcgtcgttttgtgtatgtgaagcctactacagttagagttgattgcgtgagcttgggtagaacactactctatcccagctgtcattatttccctgtaactctattgagaataatggattatgagtagtctcttcttatccatagtatgctttgaacccaatcttgtgtgcattttgtttacatagccactgttcctgagagttcttagatataatagctgtacaatgtccagaagatagatgttttcacatgatcacgatatcctatgtagtgctaagcacccaagtcacttcttaacacttggatcatggaccagctatgatttcctgtatattaattaccccctgctacaagcaagcttctctgaccagtgctgaaagcattgttagtttatgaatataattattttgactccctatccatttagaaaaggaacagtagtaggttactttttagggcctatgacctcccgttcccaagcatgatcttttgaccaggcttacagtattacatttgtattccacacatctaaaatctgtctgtatttattggttacctctcagaacaattatgccagcattgcacgcttgagtacatcttgcctgacatattggtattgtttgcaagctgggtccacacttgatgctttttttcccataagatccactgtcttttgacactgtgaaagctagccagcaga

SEQ ID NO: 27707 - DNA, 1155 bp, Mus musculus
ccagcagcctcagccattaattcaaccaccaccattggtgcaaagccaactgcctcaacagcagcctcagccaccacaaccacagcagcaacaaggacctcagccacaggcccagcctcaccaagtgcagtctcaacagccacagttgcagaatcgttgggtagctcctcggaataggggaaccggcttcaaccagaacaatggaacaggcagtgaaaactttggtttaggtgttgtgcctgttagtgcttcaccttctagtgtagaggtgcatccagtgctggaaaaactaaaggccataaacaattataatcccaaagactttgattggaacctgaagaatggacgtgtgtttataattaagagctattctgaggatgatatacatcgttccatcaagtactctatctggtgtagtactgagcatggtaataagcgtttggatgcagcttatcgttccctgaatgggaaaggcccactctatttactcttcagtgtgaatggcagtggacatttttgtggagtggctgaaatgaagtctgttgtagactataatgcttatgctggtgtctggtctcaggataagtggaagggcaaatttgaagttaaatggatctttgtcaaagatgttcccaataaccaattacgacatattcgcttagaaaataatgacaacaaaccagtaaccaattcaagggacactcaagaagtacccctagaaaaagcaaagcaagtgcttaaaataatcgctactttcaagcataccacctcaatctttgatgactttgcacattatgaaaagcgtcaagaggaggaggaagccatgcgaagggtaagaaagaatccagtaatttttgtgtgagaatccttccttataggtggagtgtgtggaatggtattcctttaaacgttttgcagtctatgaattttattctgaaaggaatcaacagtttaagaaacaactccaatcccctccctttagcttttcgatcttaactgttagcttcatgaaaaaaaaaagtttgaagcactattttcaaatgtttgctattgctttgttctgttagaaaggtggtctgagtgtgtgtgtgtgttttacaaaactatagtatataatttataggaccatagcaggtgtaacaaaatagagctaga

SEQ ID NO: 27708 - DNA, 1099 bp, Mus musculus
tatcttgaaataggccttcagttttggagttgtttaagaggtttgtagtgatcatctcactgtgatatatggagagagataattagtatttgaagagctaaatctagaaacgatttatatgtacctatagttaaaatcacttcatagtgattatattttgttataacatttatatttttctttcaggagagaaatagaaacaagcaataaccaccgtgtggagatgtcctattaaaatgacaacactaatgatgtagactctggaaatgcctaataagtcaaagaagatgttattaaagctttttgttttctgcttaaggtgacatctttgaaccctttaacatgaaattgattcttcttgtaatggttttcatcagcgcatctgcccttattctctcaccaaacacacttgagaactgtaacttcatgaagcactttgtgtcctgaagcttttaccagtacctgctgtcttttgtaattatgcatcctagctaaggcacagaagactgaatgaattgcaaggattcattaactcttggaatttgttaagtactaacagttatccattagaagtggttcaatgatgtaagagtctcactgcttcaatcttttcattgtcgtagtttttaaattgtcaatttttagctatttgacagattaaaagcaaaataatcatgccatatttagtctggagttcaagtctgaatgtttatgtgaaaaattattgtagcaaacttttaatatggcaaagcaaccttatgctctattttagccaaacagtacataatctaaaattatatattagaacatttcccttgtcttcaaactatttgatgtaacaaatatgcagcctggtgggcttcaccaattaatgcacatcccctcctctccagttacatgtacactgagaatatgcgttggtttgagggattattttgtttctaccacttaatgaatctcaacattttgagtaaatgtacctcagtctaatcagactttttatgacctttataactacatttaaaacccttaaattctatttctgggtgtttgcgagcctgattgctatcatgaagtaaaaatttattactctaggtat

SEQ ID NO: 27709 - DNA, 1675 bp, Mus musculus
gatttgatggtataaggttatgaaaataatgtcctgccccttatattactgttttgaaaggagaaagctatgtagaatgatatgttaagggtgaaaatagcaatacagtagatttgaatgtctttttgatctgcattagttcatttatgtttacatcgtagttagagatcttttcatttgctcttgtctttgctcacttcaatttgaaagcctcatgacacatatttctttgaaactttgatttatataatttttataaaatattttaggatgtacaaatattgtatttttttattaaaatacagtatttgtaaatgaccatagctacttcacagttacttgttagtcccagtgtagttatatcagtgtttactgaagggaacacaaaaatattaatggtatattacagaatgaaaactttcttaaaggaaaattgcacctattttacatttttgagactaagccatgaaatcttgtaatatgtctcttaactatttataatgaaagttggcatttgggtatagtcagcacagcaatgttctgtatccttaggattgtataagtaggacattttaaagatgactcatgtcattctggagctcctactagagaaaactgtaaaaagggtgaccttgtaggaaggagctgaggcctccctctgagggtctctttttcttggtgctttattagcaactctggatatttttataaaactagatacattagaaactaattcagtcttgtttaatttacattaggttttatgtaagaaatgtcatcaaaatacccaatgagcaggctgattgcagtagactcagacagggccagtgaatctcagctgagagtctattcgtggtgaagagaacatcccagtgcctttaacctgaatttctaatcttatgtgaaatgggtgcagcattcctttggacaaaagcttccacttggtaatttttgtgtttttctcactttaagtattccccaaagcaccaacttctcttccttcttggtcagtcagtatattgtaagattattttccattaaatgacatcattaccggttgtctctaaagtacaaccaacagaatgtttcttaactgcggggaccaaaagggagagactctgagctctacaagagtatatatataataaaatgtttgaataatattaaattaagacattattggtcctgtgatttcttgctcagtgtttttccaatttgtcatttgaatgattcttactaaagttattttatgtgggtattttatttttaatggtattatagtttgtatatttaacagtaagggggaaagtaaccaaaattagtattctttcactatacatattggtacttgaaacttcctttaaaaaaaatcaacaaaaaactcaaacttttagtgcttaattcctcattttaacctgtgatctttctaattgaaaagctgtgttatttttgactaccatgcatgtggggttaagctgatgttgaaacagtttgcagttaaaaaaaaatcttaatcagcttaagtcattcaatcatttcaagtgagttctgcatcctttaaaagtaagtttgtgagattttaagagaattgtgttttcattaaattttgtgtattttttgttatgccatgtaaattccctttttcctatgattaaaggaagggtatgatgaaatg

SEQ ID NO: 27710 - DNA, 1215 bp, Mus musculus
cagtacacttgctttgtgtctgaatgagtggtgagtcatgtgggacgttccaatagctgctgagggaggtttatgttgttgtgtttggattaaatgttctgtgaatctctgttctgtccatttggtttgtgacatcactcagctccaacaattttctgtttagtttttgtatgtatgcactgtttatggcaagagtactgtgtgagggtcaatatgtgatttcagctgtatctattgtttcttttataaacttgaatacccttgtgttgggaacatacatgttaaaaattgtgatattctttcagtggatttttcctttgatgagtatttggtttccttttctatctattctgttagttttggtttgaagtctattttgtaagatattaaaatatttacgagttgcttcagtgtcctggtgcggagcgtcacgtctcgtgcgtgttcattcagccacgatgcctgaggaaacccagacccaagaccaaccaatggaggaggaggaggtcgagacctttgcctttcaggcagaaatgttaatgtccttgatcatcaataccttctactcgaacaaagagatctttctgagggagctcatctccaattcatcggacgctctggataaaatccgttacgagagcctgacagaccccagtaaactggactcggtgaaggagctgcacatcaatctcattcccagcaaacaggaccgaaccctgaccattgtggataccgggattggaatgaccaaggccgacttgatcaataaccttggcaccattgccaagtcgggcaccaaagccttcatggaggctttgcaggctggtgcagatatctctatgattggccagtttggtgttggtttttactctgcctatttggttgctgagaaagtgactgtcatcacgaagcataacgacgatgagcagtatgcctgggagtcctcagctgggggatctttcacagtgaggactgacacaggtgaaccaatgggtcgtggaacaaaggttatcttccatctgaaagaagaccaaactatttggaggaaaggagaataaaggagatcgtgaagaagcattctcacttcattggctatcccattactctctttgtggagaaggaacgagataaggaagtcagtgatgatgaggctgaagaaaaggaagagaaagaggaagagaaagaaaaagaagaaaaggagtctgatgataaacc

SEQ ID NO: 27711 - DNA, 1297 bp, Mus musculus
tacaccctgctgccctccccatgctcctggatccctccattatcctctatctagacaaggtcatagcacataacataggctggtctgaaacttgcattcctccatcctctttaaatttggaaaatactaatacatcccatttgttttcagcagtattttttagacatgataggaaacaataatttaagaatgtaagagtcatgtcagtacctggcttcaaggtacactagaaactcaagtgtttccactttcttctaaaatatgtgacaacctgactttgtccaatatttctaatagaatgttttctcataagcataagaatgtattggtaccaaatactttttttaaatttgtttctgtattgctggggttcacacccaggactttgtacataccaaacaagaattctgctactgagccccagccctaggcctggactctttgagcaggttctcttctgtgtttcaggacacacattgttcttgcccccacttctcaggtgctgggaagatagacaggaaccacagtgccaactgctggctcgttaattctgcagggagtcaagaactcagaacttctttaaggatttgacaaatgcaagatgggattctccttttatgtaagcatatatttttacaggaaaaacacagccatattctacttaaagccttttctgaggagcaggattgtcatttgtgacttagagtcctatataaccattgctcagttggactcttgggtagttaggaaccataaataattcacagaaacaatagctagtttaatatgaactgatccgattattcaaaagcaacatggagaaagaagatcactgtgatatttgtgattggggggggtactttcaataagcacttgcataagacattcaaagtatagctttcttctgatttttaaaataagttagttcaatggatatgttataggggttggagaggtggcttaggctcctcttccagactacctgtgttcagttcccagcacccacataacagctcacaactgttactaacttcagtttcagggatctggcaccctcctctgtcctctaaaggctccaggcacacaatcagtgcatttaacatatgtgcaggcaaagagtcatactcacaaaataagaatagatctttttgcaatcaaggatgcttggtacttggtaacaatgtttttgaaaggcaaaagattacagctactattttttaaaactaacattaagaaataatggacatatcttgaatttaatggcaaatgcctcagagtttattctttcaagtaaaca

SEQ ID NO: 27712 - DNA, 1286 bp, Mus musculus
cattgttaattgcagttagcattgttgatttggtgactgaatagatagccttctttaaaaattcagattcaattccacatagttttctaaaaaagaaaagcttatctgaagaatatttagaatttcgaatgtcgctctcaagaatatctctgcagtgcctctctgtcttatggaaccacaatgaagcattcaatccaagggcagagatatgctgggctgggacaaaagccacattgaggaacctcagcttctgttggaccttgtataaggctgagtaaagtgtcagaactccagcatggcagagctaaagcattgtatgtctggggtctagttgcaatttatcttttactatgtttagctcttttaataatcacttctttgtgtctacctaatgtccttctgactaaaaggtgaactgttttggaatatattaatttaagagaccactactgtccatcaaacaaaaagctaagactgtattcatgtagtttctaaagtctataaaagaggtatactctttttttatatacttacctggcaggggagataccatgatcacgaaggtggttttcccagggtgaggcttatccattgcactccggatgtgctgacccctgtgatttccccaaatgcgggaaactcaactgcataatttgtggtagtgggggactacgttcgcgctctcccctgtttaaaaaaaaaaagaggtatacccacgttgttgtaaccaatgtacctgatacctccactaacattatgccttgatttgtgactatcattgttcagtcattgttaaagcttcataaaactgttaccacattagaacatgtaattggaagaatctgaatctctagtgtgactggccatggagattcatattggttcctgagtaagctatttcttatccagaaacagcttgagatgagagctttatcttgcagtgacatgtctcagtgtagatatctatgcctgaaggagtctttttcaacaagctttgatctccttctctaagatagggtctcatttcagaaagatgacaaaaccaacgctgaccagatagctcttccttggcctcttgttttctctatagtgccatggtggaccactgtgatgactagttccagacatagggactagcagctatgaacaatgtcagatggtttgtgctataagatccttttccacagagtgagttgtgtggactgagaggcctggtttgcagtggttgttatcccaaatgttctagagatctctgtgctgagctgattggagagatggtggctggt

SEQ ID NO: 27713 - DNA, 2257 bp, Mus musculus
actatgtatgctgcattttacatcttattggacattttccgcacaagacagaggctacaggtcaagtttgtttatgaaggtattttggtattgttttcctttgcttaattgcctcacattttgttctgaaaaacatgggtccactgttaaaaccgaatgtatgtgtagctttattctgtttcacaggcgcatgtgattggaaaactcattttctcctccagcctcaggagacttctaaaaagttttgcgtagctcaagttgtgcatgaattaccgaatatattatttttcagcttttcttcatgaacgatatttgacatgtgctttggtacccttctctgaaagttgaaaacctacctacttagtcccttctgtgccttttttattttgccaaccatgttttatggaaaagacattagcaattacattttgcaaatggaattatgttcatttgaacatagaagtacctaaaaagaaaaaaaaaaaacctctacaaaaagctgtacagtcatacttgctgtaattttaataagattactgtaggccagttaaaacacagggatatttgctgtaaagtgcttttggaaggatttgaatgtggccaagcctggctctgttgactcctgctcaccagttagagtggcttttaagaattaagtccactgtgatgtttgagcagcagatggtctcttggccttactctgtggtgacactgtatcctgctagagaaaattaatagtttaaacaactgacaaacttgaaaaggaaattggatgcctagaatgccgcagtgccaccttggttggtctgatgtcagacatcaacacatacccatcccagagatgctgggcttattgcctttttgtggttattaagaaagggctgcagtcagtttgactaaaacgggatccacgttattgcttagaaaggaagcaagccagcagtgatcacttattcttattcttcatatctatccagaaaactgacttcagtgaaggtaagatatatacagacatacacttgtgtttttctttaagactgaagtacacgtatgcgatgctttcttaagattctaacatatttgacaactaatatttctttttagaagtcagctaaatctatttaaaggcaacatcattaaaactaacaggaagaaactgaaatgcatctttaccaggtagagctgctgttttgctacttggagaaagtgaagggaagttggaccctggagggtttccttacatctttgctgtctctctcttagagatcattgaagccatccagtgttgctgaggagaaataaccgtacaatcctatggcccatgagaccattaagtttattaacatttggctttctggaaggagggtgttgaaggcttttagagcattttccccacgtctggtctctgattcaagtgctatgtacaagcagaaagcagacattttcagggcacatctctaagctgtgtaactgcttgctgccagaaccagacgtgttgaagacaaaacaacaaatcacctcctttctagatccattaaagcaaagtttactttctgtttcaacaggtttttattttattttgcattgtcacacatttatttaaaaactgtagcccttttggtagtgatggtccaggtcggttggtatttcagactgaagtttgtgtgtgtctaggtgttcaaggactctcagagatctcaaggcaactataatggcagtttttgaaatatattgtaagataataaaagataacaatgaaaatcaagcagttattgtatttttaaatttttatttatcaacttcccgcccatccatccatccatccatccatcctccatgtctctgtgtgtacatgcctgggggagtcaggagactattaggtcacgggagctggagttacaggcagttgtgagctgtctgatatggttctgggagttgagctcagtgctctgcaagaataattcatgttcttaaccactgagctatttctctagccttgggatattgtagtataaagattgatacgtacgtacgtgtgtgtgtgtgtgtgtgtgagatgctgggtatccatccagtgactcaggattctttttaagcttgtttgaaattatctatttatacatttagagacaaggtcttactatctagtccaagctggcctgaaccttttatgtggcccaccttaaccttgaactctagattctcttgcttacatcctgaatggcaggtatcatcatgccaagctctttggcagttt

SEQ ID NO: 27714 - DNA, 2510 bp, Mus musculus
aaacttagtttgtttggaaatccaaaacttacagagaaacctaagtgaaaaaaagcagagtttaaccctgggtttcactttccaatgttaaattttccctgcagggttttatttttgtctttaggtataatgaagtgaaactcaatctaataataattttcattatgataaagtatagtgtttgtattcagattttaaaagatttactcaaaattagacaggatcattttctcctaggggtgcctggtgagttttcccagtgagatctgacataggcttgtgaggtatatgctgcaccacacagagactgagtagaccacacgaataggaactccttcctgcctgttgtttgcatgaagatacttgctgacttattccatgctttggatttttttttttttcttttccagtttggcccacatatattgaagtctacagggaaaatgaaggctttaattgaaaatgttcccgactcctaatggacaatgaattcagaaagactcctggttcaccagttggcttgcagagctgagtttgtctaggagaaatcaccagtatttagtaaattccttgctgtagtgttcattggtctccttccttctgagcccaactagaggagtaagaagcagtgaaagcagcaggaggtctggcttctgagaggtcagctctggagctctccctaacacacatgtactatgtgcatgttctgttcttaacactaaaatctgtgcacacatttcaccatgaatggcatcagagaggacactgttatcttcctcttcactgagagttcactagtcagtgatggagagctggtatactgttattatagcacactattggagctgggaatgcctcggacaggacttgagtatgttctcactttctgttttctggagctgagtttacataaacagcagaagatgtttactgctgagtctctgtgttgctttctgttagagggaagtgaggaccaggaaggccatttacacctcattaccacccactactgggaagcaaatgaacttctcaagtagtaacaaatcaaactattgaattaaatcatttcttaaataaaagccagaatgtatcatctttctcatcagtttaataagtggccctataaagatggatgatttgttgctaagttaaaaattgtcttagttaaggttaccatcactgtgatgaaacaccatggccagaagcaccttgggggaggaaatggtttatgtcactcacagtgccatatagcagttcttcatcacaagcattgagggcagggactaagcagggcagggccctggagccaggagctgatgcagaggccatggaggctgctgcttactggcttgcttcctatggcctgctcagcctgctttcttatagaacccaggaccaccaacccagggttggcactaccttccccatcaatcactaattaagagaaggccttgcagccagatcttatggaggcattttctcaattgaggttcacttccttttagatgactctagctgtgtcaagctgacaaactagccaccacaatacttctagaaatgtcagcgtaattgaatttataattttaatatactggtcaaaatatcctttataatgaaacattactgaatagatgaataagttccctttaagctatttattattggtcagccaatgaattacattatgcagataaaccttcggtgttattagaaagtagaaaactacctttgttatctagggcttggaaggacttatctaaagtacttagtagtttaccatgatttttgtgtttctgataagactctttaatgtcagaatctcttaccatgagtaaatatttggattatttaaatctagactattggttcttcccagagtttagagatgggaagtgtagataatattgtaagttattgaagataggtgttctaaatcatacaaagactgggctattttttcatagcatatttagtttaaattgtggtatgtttttgctgtatattgtttctaaatattttttatggtttgaaaactgtcttttatgaaattcagaaaatttgtgtgaccacatattttgacctaagagtttatatttatatcagtattgaatttggctagcagtctactatataaaagttaatattttaaaataaagtaagctgttgaattttcttttgacaatactattatctatttgtatatttatctccctctgtctttcctttgtagctaaattctttgtgctgatatgttgctgtaggatagcttgtagtgcacttttttaatgagtttttttttttaatttatttattatatgtaagtacactgtagctgatttcagactcaccagaagagggcgtcagatctcattacggatggttgtaagccaccatgtggttgttgggatttgaactcgggacccttggaagagcagtcagtgctcttaaccactgagccatttcgccagcccgtagtgctctttttaaaaatttattttatgtatatgagt

SEQ ID NO: 27715 - DNA, 1140 bp, Mus musculus
gataccgttcacgttttagatcagacgtatctgctcctacttcctagaagaaagtacaagtgttagtgaacccactcaaatgtttgcccagttttctagaaaagctgaaactttagtaattctaatatatccaaaatattttcttttagtataattaaagtgggttgctaagtctctgaaatccagtgtgtgttttaaacttacagtacatctcaatttatactagcctcatttcaagtggtcacccatgcccacattcggctctcctattagcatgggtacaggataatagtcattacccaaagacagccactggcccctcctaaagtgacagcatatttgaccgtccggggtctgaggaagtctcctgcaagctaacattaccttaaacaagttcacacagtatctgataactgcaaagaaaagtcttggtattttaatttgcaatgaaaaacataactaccaatctttctccctttaggtaaatcttcagaagccaaattaggatcagctggtttcctcagcaagaattctgagcaagggacacaaagtttcctaaagcatccatctccctgtggagatagctgctactatcatatctgtgaactgggttcctcctcccctggatgctagaggttctctgccgctagcggcttctatacattggcttgattggcagctccattgtgttcaagtttaatagcaggaaggtttagctttcctgactcagcttctcaaagggtcaccttagtggtgcttgcaaacccatcacatttgttttctgcagctgtgggaattacctgcctcaacctattttccttgatcagctgggttttctacaagaatttaaggaaccatttaggtcactttttaaaaagcaaattcattaaaaaaaaaaaaaaaagcaaattcagagtagcacaaaattcatggtatttcatgatatattggacacttcaaagaatttttgagtatgtagcagccatttgggaatctgggcccactgctgaaggggcgctggggtaggttagggagtctctgctctagaggtgagaaaaaattttaacaagtcttgtcctaacatggtcatcaacactgtactctaaacatattagtttgtaatgaatctccgtattaaaa

SEQ ID NO: 27716 - DNA, 4931 bp, Mus musculus
cttggttctggatcccatgcacactgaacacaacatgtcaggggctcctctctctcttcagtgctcttccccattgctggagtcgatttaaacttggtacaatgagatcttttcttccttaacacccttttaatattttgtttgctagatggccttgaaatgtgctgatatttgtaacccatgtcggaactgggaattaagcaagcagtggagtgaaaaagtaacggaggaattcttccaccaaggcaggttatagacacatgtggataaactcagacccggccatgtataagagcctcacagtacatgcattatattttaacaactattcatacttcatgtatgtataaccagtaacagacgaaatgtgatttgaaactgagtgaccttgggtattcatgatggcacagaaagtaggctggaaacttctctgcagaaagattgctctgaaactaccccatcacttcaccatgtagagagcaggatcataggagcatgtgaagcatgtctgaaagaactgacagcattagtcttgggaggaacacccagcaaaaactgttgtttggtccaatttagcaagctttccatgtgtcactaagttaacatttaatcctttcatgaggattccgtaatgctcctccagtaaattcatagatagcagtgaaggtattcattatagatttaaccagcagatgtgttgcatcttaacagttctctttcttaaatttacaggagatatagaaaaaaagtaccatttgggtgtgagtccactttgtgatcgtcagactgagtctattgccaacatccagattggtaactatgcacatttagttgcatctggtttaaaaaaaaaaaatcactcgttttgattttcttaagactagactagaaaattattcaaaacaaaagtatcaaattatgttcactgtaatttgtaggacatcttaaccattgtcacagtatgtaccctttgctctgccagcccctcctgtctgcttcaggggcttttcttgatggctcaaatgtcccttccaaaagccaccttcccctgcctgaaggcagtcagtccccactgccaggtttccagagcactacattcacacaagctttacttgcttttggccacgctgtgcctagaggtgggaagcacattggaactgttgagggagctcaccatgtactgggaagcacggggacatgtcctgtgactatacagaagctcgcagagaacccgggaaggactgcctaaggctgagtgtatcattgggctttgaaagcagagaaagatgtcagctctagagtttgggctgaatatattatggggacctgggattgggaagggccttacaatttatgctgaacatcgtgaaggttgttgataaacatcatgatggtcaagtttctaaaagctcaggactagcatagtcataatgcagttgggaggggacacagcagcaacactgacacctttgctgtgcttacaatgaacagcagggactgacgtgactgtgtcagacagagatgtaggaaatgggcacagcttgcatggtactgcgcctgtgggaatcagtgctgactccgtggcaaagccggatagttgtttttctgttgggtggagttaacaaggcaatagaaaggctgttttgattctcaaggagagctactcaagttcaaagactaagtgaactgtaggcaagggagagaaagctacatgagtgggtacatgcagctcccgtaaatgccttgtagcccgaggaaattactctagcctaaagaaagaactttcaagtgatttttgaaaactttgtagtttgtgctggagagatggctcagtggttaagtacttgctgctcttttgaggtttgttagcagcacccacttcagtttgctcctacataactccagcccttagggctatgacctcctcttgtagcctctgcctgaaagcactcaaatatatataaaatacacaaaataaaaatatgtggttttttttaagttatgattttagtcgcgcataacaataaatgcctaaaatctcaccagttttggaggagggaagacctgaagttcaaggtcatccttagggacatgtgagactctctcaaagaagaaaatgggggctgctgagatggcacactgggtaaatgtaccctgccatcaagcctgaccccggggacccacatggtggagagagaaccagtgcccacaagctgtcctctgacccccacgtcttctagacagtctcactttagtagtgaaaatattaaactattttttttattattttaatactatctcttagaaattttgacattgtacattctgagttaaataagtcatgccaggtgtaatattccatccctgaggaagtggccagcagttgtctccctggattgtgttctagtgcccgtagagttgatatggccatcacgtgtgttagcttaagatgtgcttgttcagctgagagaaatagattagaccagagctccactgaatacttcagaaatcccaatttgtaaatcacatgtacacacagaccttttaaaagctaatattttggctgacactggagtggaactgaagaacattaaaactctagatgttttaaagattaattcaagacatattttaacagctttttcctctgtctctcaaggttttatgacttacctagtggagcctttatttacagagtgggccaggttttcagacacacggctgtcacagacgatgcttggacatgtggggctgaataaagccagctggaagggactgcagagacaacagcccagcagcgaggatgccaatgctgcatttgagttgaactcacagttactaactcaggaaaatcggttatcataaccctgaaccagtgggacaactccctcctgcaacattgtggaaatgtgaaatggtcttgagtggaagaactggttctgactgctgaggtttccaaggggatgatgccagcattatctatcaagatgtcttctgttagatcatacgagcgcacgttttaatggtaagacatgaatatacagcaatatgcatcttgcttttgtatgaaaccttaagtctgtaaagctcagcaggagaaccacaaagggttcttaacgaaggaagatgatgttttaggtgtgccatgtgctttcagagtgtgtgtccttcaagccctgaaacttgaactcaacctcagcagcaatcttgatgcaaccagtccagtccaacagcgcatccgtcccttccactacattctctctgagaaaacagaaatgtgaagtgcccagcctctgctgcctctggcaagaatcaatcaaatgtttacaaatcaaatctgaactattggttctaaattgcctcggagcatcgttgtgaaggaaccactgaccgttctcagctgagctggagactgcagctcttcgcagcatttgccttttcttcttcggatgtcaatgtcatcatcgcctcccacctgctgctctgctctgtgcctggagactgagcatttatttaccacagacgccacacgaagcttttcactccagcgtggttggcaatgcagattccttttttaactgttagtttttaacatggggtgggagggaaggaacaccactgtcctagctgtgttctgactctgcagtgaagacactgcatgttgttttcactactgtacacttgacctacacatgcaagcaaaaggtggaatgtttaacataccataatcagctcaggggatttgccaatctgaaataaagtgggctagggaagtgtgtccttcaaatcaagggtactaaagtccctttcgctgcagtgtgtgagaggtatgttgtgtatggctgtatggatgtgtgtttgcgtgcatgtttgtgcatgtatggctgtgcatgttctgtccatccatgtgggaaaggattagaagtgtaagttcttatttattgttctagaatgtgacatagtgagcagccacacttgggggaggggaaggtaggtgaagctgtaagattgctccagatgccttaaactatgcacaaagctaagtgaccaaacttctcattttgatttgaaaagtgcattgttttcttgtcccccctcccccactttgatgaaacattaccctttggcggaccttttgatgtgagtagatgttttctaggataaaatttaaggactaattttagacttaaaacattccacttttgtaagttgttttcagtggtcttatgtagagcaagcacaactgtaacctagtttaagagaaacggtgctttcttttagttaccttctatttcccttgttactgtttaagactgttcattatgtttacagtttgttgcaacagccatcttgggagagaacttgagtgtaaagccatgtgtgaaggcttgggcacactcgtttaaacacgtgcctgttgcttcaccttctgattgacaaataaaaccggtctttgctcattggttaatctttgcactctaccttaccactcagtcctttggaagtgacatgctggattcttaggtgatcagttagctgctgcctctcccgttcagtcctgggtattttgaagtctaagttgtatgcagactttgtcttcctggagtgtatgagcctcactctgcaccgtacaagtgtggcaaggtctggttccgtttggtcattcttgtatagcatttgttggaaattgcctaagaaatcacacccttgaaagggataaaaatagcagttgtgtttgtattcctggccttttacagcagtaagtaataaccacttaattctttctttcagatagcctggtaacaatgtagacagactggcctcaactcagatacctccctgcttctgggtcctactattaaaggtgtatgccaccatccacagtgccaatagagtggccttactgccctcccaggcctaactcatgagaa

SEQ ID NO: 27717 - DNA, 1178 bp, Mus musculus
gtgctctcctccattgtatttctggagagcatgcctttgctgtataccataatgtattagttcattagtggatgggtagccgagttgtcacaagtcttgattgtgatgaacaaaacagttatgaatatttgtgttcaagccatctcttgccaacacaagatattgtggatctttttatttttattttaaccatttgtggatatattactagtagtaatcgcacctggtggtttcaggcagcatttttctgactgttaagtatactgaccctatctcaccttcttttttttgcatttttggttttgttttgttttgttatttaattgaatattttatttatttacatttcacatgttatcccctttcccagtccccccccccaagaatcctactatctcacccccttgctcctgcttctatgagggtgtcccccttcccacccactcctgccttcctgccctcgaattcccctacactggagcatcaagccttcaaaggaccaagggcttttcctcccattgatgaccaacaaagccatcctctgttacatatatggctggagccttgggtcccggcatgtgaactccttggttggtggtttagaccctgggagctctggttggttgatactgttcttgctatggggttgcaaacaccttcatcttcttcatcctttctctactccattggggaccctgtgctcagtccagtggttgactgcaagcatcagcctctgtatatgtcaggcactggcagagcctctctgcagaagctatatcaggctcctttcagtaggcacttcttggcatccacagtagtgtctgcatttggtgactatatgggatggatccccaggtggagcagttgctgatggcctttcatttagtctctgccccacactttgtctctgtatttgcttccgtgagtattttgttcccctttgtatgaaggaccgaagcacccacacttaggtcttccttcttcctgagcttcctgtggtctgtgaattgtatcttgggtattccgagcttctaggctaatattcacttaccagtgagtgcataccatgggtgttcttttttgattgggttacctcactcaggatgatagtttccagttctatccatctgcctaagaatttcatgaagttattgtttttaatagctgggcagtactcc

SEQ ID NO: 27718 - DNA, 1236 bp, Mus musculus
catagatgttgaaaactatcatggccatgggcaaatgataggcacagagaactatagtgacacaaaattgccagtctgttcttggtcccttatgagagacagccctaatctggtttaagggcaatgaatacaaactgttttggatatttccactctcaaatcgtagttcctggactctgggttatttgatggtttgtcccattctctatttcactcacagtgtgctggccacttggcacaaaacactgcttttgctaaacttggctgcaagagctcctcatatgtcttgtgcccaactttcctgttctaggctctcaagccaaacccagaaaagaactgaaaagacactcaggatgtctagagaagaaaggagcagtcatcaaatactacaaaaaagggtcaagtacaagacagataaaaataagcctgtgggatttcatccagagcatcatagaaggaagaggaagtttgtgagagagctgaaaatagaagtcaggttatagtgagttgaaaaggaaatggacatacttacctggcagggaagataccatgatcacgaaggtggttttcccagggcgaggcttatccattgcactccagatgtgctgacccctgcgatttccccaaatgtgggaaactcaactgcatagtttgtggtagtgggggactgctttagagctctcctctgaaagaaagagaagggaatgggcattgaagagtaacctttttgcatgagagaagaatgaagttaaaatgcaaaggaagaaaagaacatttataaacaaggggaaagatgaggaagctgggcctgacggcatgggtctataattacagctatctggaaagctgaggtaggaagaccatgagttcaaggccagcctgggataaatagtgagttcaagactaacttgaataacttactgagaccatacctcaagaagataaaagggcaattcttgggccacagtttggcagtacgccatgcctagagcttaaaacacaagctaggggatccctgaggagatgggagtagcaaatcactacagaaaacgttcgagttgggagtgggggctggtgatgctttagggtctgcaggcgaatagatagaaggaacacaagtgggaagaggacggagacagtggtcttattactcagaagtgtacaggcagaagattgttctttccaagtcagaagtgggggtgtctgttgagggaattggaaagagcaatcaagggg

SEQ ID NO: 27719 - DNA, 1189 bp, Mus musculus
tgaggtcgcaaaaggttgacgagtacggaagaatacaggcccttttgggagagaaagtcctcgaaccgccaagatggttagcgagtacagtagctgagagtggggccccgggcaagaccggtaagtctaaacacataagcatggagaaaacattactgtctccttcgagccggagtcgaaccagcgacctaaggatgtcttctaacggggagttagctacagtcctccgctctaccagctgagctatcgaagggacacaagaaatgttctgccccttgacactgaacacatctcaatcaggagttcggttgacagagggagctgcgcatgcgcactagtcaggactcagacgttaggggcgcgggtcgttctacgcatgcgcacagccatcgttttgcctcccgcattcctgagcggcctagaaaggaccctagcacaaagtcctcgggaggcccaggctctggttctcattcttcgcctcgcctgcctgtgccacctttgcccttctcactataagactgtagagaacgatctcatgctgtcatctcgaaagcccctagagtagcccacgccgacgggccagtggcgcaatggataacgcgtctgactacggatcagaagattgtaggttcgactcctacctggctcgagcttttggcccaaccgtgttgggctagctcagtacttatagcagcctgcattaataaccagcctgtccctgctcctggccccatcacccctcttaaggcacgtggcgcagggccattcattaaaatacatttttgacatggttctgaagcgttcagaaaaatattttatctaagtgggccattacttggcattttaagacagtaaaatgataagtgtttgtctccatattctgataatgtgcccacacagttgtagggctttttggtttttttttgttttttgtttttaatccacccattggcttgggtcttttcaccaagtcaggtgtttgagcaaaaggagctaggtggctgttatcatgccgactagatagcagctggtatctttaaagttgtttagtgtttctcagggttaaaaaagaaaaaaagaaaaaagaacctttatggaagttgagggagcgttgctttcctccacgtaagttcatagacaaaccaaagagccgctatcgtgttcttagttcattttcttattttgcaag

SEQ ID NO: 27720 - DNA, 1160 bp, Mus musculus
gcgcatgcgcagctccctctgtcaaccgaactcctgattgagatgtgttcagtgtcaaggggcagaacatttcttgtgtcccttcgatagctcagctggtagagcggaggactgtagctaactccccgttagaagacatccttaggtcgctggttcgactccggctcgaaggagacagtaatgttttctccatgcttatgtgtttagacttaccggtcttgcccggggccccactctcagctactgtactcgctaaccatcttggcggttcgaggactttctctcccaaaagggcctgtattcttccgtactcgtcaaccttttgcgacctcatagtgagagcgctctccgaccagtcccagagtacgggtgtactaccactaagtcggttcctcacgtatgcggttgcgcgagcccgcgttccacgcacgggggcgacctttttcccggccgcgcggagcagtgacgtggcgttatggagcccttccgtcaaccggcttgccgctcccttcgatagctcagctggtagagcggaggactgtaggcttgtggctgtggacatccttaggtcgctggttcgattccggctcgaaggaaagagcttgctattttcttttaccttttaatcctatctatgaggcatgttcggaacaaatttccatgcctcgcagtgcgctcctcctcctctaggggagcacataaaggccagatgccggtggagggggattagctcaaatggtagagcgctcgcttagcatgcgagaggtagcgggatcgatgcccgcatcctccagttcccctttttttgtctttgcatttctgtagtttttcttttcattgttatatacctcaattgaagccgaaagacagtaggcaaaactcagcgagatgattttcaacctttcaaccttgtattttgtgtggtgtccaaaacttccaggcatgcattaaccggtatgcaacagccgctccccagcaaaacccggaaatagacccagctttaaaccctggctaagctgagggtccggggctgtgtggctccacgggggacgaggcctaagggtgtatatcatggcgctggagtgattttcttcagaagcgtacgggactctagtcttctccaggaagaaattgtggggcatcgcgtagactagggactt

SEQ ID NO: 27721 - DNA, 1160 bp, Mus musculus
aactgctgctgagttctccaacaattagcaatcaagacatgctacagactaaactaataagggcagtcagtgcactgacatgcttacgtgtttaaagtgacagtgctagtgaggacagtctctctctccctctctctcttcctctctctccctctctctcttcctctctctctctctctctctctctctctctctctctctctttctctctctccatgcaaaccccccatggtctttcagtgttgtaaatcagacattatggggcataaatctctgacatgttcatatccttaggttagagttccaattaatgatgattgctttgtagtaaacaaacaaacaaacaaacaaaaaggtagaatttataaagtagaatttaaagtagaattgaatttaagattatctagtacttcagttcaagtattccagggccatattcatgttttctaaaattgtattctctttccttttttggcaaagtgggattttattattttgaaagagaatatgctgtatgttgtgttttcatttgggatgcttcattccataacctttcatctttctcttcatagtctctcatctgtagcccttcattggacgtagcctccattattccgtttttggagccactctcagaagacactgttgccggcctcagtactcatgctctctgccatacacgcttacaagagtatgaacagtgcatagacacgttgctagagagatgcccagaggccgtcattgcgtatgctaatcaggaactgaaggaagatcactgggtatgtgtttcagattgtgcttctagccttgatcagtggagaggaggtttggtactttgcttggcttatctgcagaatgagggctgtttatgttagtctagctttacagggctgtgcgtcgaaggaacgtgtatgtttaatggtagacatttctttttcttaagattcatttattatatataagtatactgtagctgtcttcagacactccagaagagggcgccagatctcattagggatggtggtgagccaccatgtggttgctggaattggaactcaggagcagtcagtgctcttactcactgagccatctctccagctccagtggtagacatttcgagtacttgtagatgctattaaaatacatgaggatgatttatc

SEQ ID NO: 27722 - DNA, 1098 bp, Mus musculus
atccaatacgaaattctaagtgaatacatttctaatcaatattgatattgattgagagaaccacaacaaataacaacagctaggtgtctgtgtgctctcaaagtgtccttatgtctctttaccctgggcttgtagagggagatagaaagagtcaggagcctggatccagttggttctactctttagagaggctcagggaacatgaacgtttccagtgttcaaagcaagatggtggacaaggcatttccgaagagtcctgtttctcatgttcattttaccactgttttgtctgtgtattctgagttggtcacaccacataatcgaggctgaatttcattctgagatgataggggaagcaacagtcaggtcctaatctgagctctgaaagtcacaggttcatactttgagttcctgttaagggcattgggctgctttgtaaaatgtggatgttgactccaacctggccagccttactctttggtcacggtcagtgtttgagattgtgtgggaaggaggtagcctacacacatgcctcagggattcagcaacattgtcccagtctaactcactatcacgtgtcagatactaactagtattgtctttttctctcttctatttctgtttgctgatgaagacctctccaccaccatggtcatgggtgcattgtttcctggctctctctcactttgctcagtgcatatctcttcttccttagccaaagcctgcagtgtttcacggtgcgatgcagtgcagcggtggcacatgaggaagacctatacatggatactacgctaaaggttagcactgccttctcttgacagtagaacagtcagctcaatggagcacatgaatgcttagacacttgtttttaggcctgaattttgcaaagacgaaaggcccaaaaaggccgtattcgttgtgctgggtgattttatgtcaacttgacacaggccaattttatgtcaacttgagtggagggaactccaatggagaaaaatgcctccataagatcaggcaagcagtggagcatcttcttaattagtgattgataggggaatgctggctattggctggtggccctggcttctgtgagaaagc

SEQ ID NO: 27723 - DNA, 1183 bp, Mus musculus
ttaatgacatttaataacactagttatttaataacactagttattaaatgttgccccctccccattttttaaattgacagtgagctagagggtttttttttgttttgtttgtttgtttgtttgtttttgagaggaataaaccgtaattgaaataatgccctctgtgatacggatctctaggcaaaccaatgtggcattttcttaactattgatgtgagaaggcctagcccattgaggatggtggcgctccagagcagggagtcctgggttgtataagaaagcaggctgactgaaaccactgggaagaaggcagtaagcagccctcctctatggcctctgaatcaactccatccctgagttcctgccctaacttccccagtgatggagtgtgatctgagaattgtaaactgaagtaaattgtgatcctccctaagttgcctttggtcaatgttctgtcatagcaatatagacacagctaggacatatatgtctaatgttcagtctggaagatggtagcgctttagtgggtaaattcttaaattttattttttaaggtgtcagtaatgaaacttcacaacttgagtcagaagattttgttatctgtctaaaacccatggaactcattggtgaaaaatgtgaacagtctgggatatctgttaaactggagtccacaggattagaagatgaaaaagtaaaatatttacgtgttcggcatctattgtataggtatgagagttccttttcattcacgagcttttagctttttcatgccagcttaaaaatctctggaaattagatctcttccctgtctcttcttcaacccacagacgttttgctccagatatttcgtcctatgtcttgtctgataacatcaagttacattcccttcagctgctacccattcaccaaagtggtaagtatagctgagcggcagggtagagaggtttgcaaggcctgggctggaagaaagacctgtgtggagacagtaggttgggttttgtttttgttttttctgctgaatcttcctgaggaaaggaaagtcatattggctaggagaagtgaaaccattaggaggatgtgaccagaaaacctcatttcttttttcttttgaaattgtctatagacccagagaaggaaatctgtgagcactattggagtagaggtctgtctagttccagctgag

SEQ ID NO: 27724 - DNA, 2287 bp, Mus musculus
ggtatgtatattactgtttcactgtgtctccatgttttcattctgactttagtgtgcagtattgttagttcacccttagtgcagtttaggaaaaggctaattttcttagtaaaggtttcttaagagcattaaaaaacttcattttgttagctgaacagttcttaactattactttaacttgacttttatttttttctgtttgcagttcattgtgaaggactctgtggaagaaaatatgttgaaaatacagaacacgaagcgagaccttgcagctggagcctttggcactaagaaaacagacgccaatgacatgaaacaagctaaaatcaacgaaatcagaactttaattgacttgtaacttgtggggtgtttctaaggtcagtttgaacagacacttaagtcttacagatgaaaaatacatatttaaggatggcatctagagaatactttatggggggcatattttatgttaatacagtagtgttactgacacatcttctatacctgaatctctttttatgatacttcacacagcagtgagttccattgtaaaccggcctgagacacatgtgcatagagggccctttgctctccaggttggcattcccttgctgagggtattttcctacatttcccatgtttcccacatcttcactgaagtgtggttgaagcttctacttgtaaccacttactcaccaaagccttttggtaatgattcagtgaatctacagtccttgtaaattatgaacaagtatatacagactataagaaagattttactggatgttcaaaaattatacttgcattcataactaaaccttgactaaaacaccaaagttcagagggcaagttaatttttctttgttgagatataacaaatatgtgactttccatatgtgtttagagaaaatttagagaaaaaaaaaagcattgtgtgttcattttagtgaagtggtgcattcattatttaaatgtgatgatagaggcacaaggtgtaaatggtatgtaggggtgaaggaaccagttctacctggtttgtcttgaatgcttatattatgtaatttaaatagatatttttgtaagtgctctctatttatgtaggtgttttggaaatccaactttataaatgtaatacagagactactgctgaacctgagaagtgtgataatcaggatggaaattgggttggataaccttcaaagttcaactcttaaagacattttaatcccgaatctaaaaatgcctttgtgagtttagaatccgaatttaactttggaattttattaattgatctcttcatttttttaaacccttttttgggaagttaatgactatgactcatagttaaaacaaagacgcagtcagggtatataacaatagctttcttttctgttgttgtttttgaatccagagacaagatgactaagaagaagctttatggcttatgatataaactgaagaacaactgagactgtatttatgctctgagagtcttacctgactaagagagatgatagatacccttctaaatcctcacagaatcctccccagcctgttagtcctccgaggggacaggactagccggcaagcatcttctcagctcccttgctcgggcagccaggcgaggcagagtagcattcaggtcaggttttctgtagcggtgaaagtggaataactgggagtggcctgcttgggtgagtagcccataggatttgtaggactagtatcacatacaaatcaagtctcattatgtatggcattggagttctttagttcctatacacagtgaaattaagtgtaaactagttatggcccaaataaacaagaaagaaactcagtttactcattttaattacaaataaactgaggttccaaagtgaaggccatgtgcgtcttgtccagaaaactacagagctatctatgctttaaaacatgagaacaatcaaatttggtgttaataaaaaaagtgaattctaagatatatgaacccctgggatgagggatgctgcgctctgctgttttactacttagaaatgtactgaaaatattatatttcaaattgtgtttccaactggattcttctttaaattaaaaaaatcaataaaaatctaaaaatttaccttctttggtgtcacttagtgactgttttcctttgaactatttaacctttcctttaacagaaaaaaaagcatctcacttctgtaaatgttcgttacacaatttttcattgaatcacgtaaaaagtactgttattataatttactcattcacatttaattttggtaca

SEQ ID NO: 27725 - DNA, 1215 bp, Mus musculus
taagtacagctgcttgttcttaaacaaacaaacaacaacccatataaataaaacccacccctctctgggaaacaaccataattcaaacatggctatttagtaatcagaaggtattgtctcagacaggatttcattttcgggaggcagggcgtgaggggggaggggagcgggactgagagacagttccagagcctccagggaaggcttctactgctaactgctgtattctgtatatactgtgccaccctgtgtggagtctgtgagtgtgctcttgagtagcgtgggctagccaatctgccattcatggtgttataaactcggaattccatatgtaataggatgcaagtctaagcgtttcatgtggacataaatgtatctaaataaaacttcccctagcactgtggctgacctcacccttacttttatactttagtatgaaactgatgagaactttggtagtgagtattttttttatatatatacatatatatgtatatatatatatatatatatatatatatatatatatatatatatctcaagcatctttcaggtctttgtgtgtggctttcttaaagccctgttgtaaaaaaaaaaaaaattactatgtggatggcagtctctcacatcacagatgtggaaagtataattttatatttgtattttcaaataaataagtttgtgaaaggtttccatcctcaaaaaaaaaaaatggaaatttcccttcccttgggatttcttaccttccccaattggtagacaattttaatttctgttcctagtctatatttgtctcagcagattttcacccgactgacagactccacctgtggagctgatcacccgtggaactgcagaactctgtacttgttgaaagctgatgttaaccagcctaatcaatggaattgctttctgtcttttatctgtatcagctaattagatgcttttgacaaatgtcgcattgcccagcctttgactagtatttcagccttcctgggccccattttcgacgtcctaatgtcagcaggaagcagatacagaagagagatacaacatccattctcccacttgacaggctgaaatactaagtcaaaaaggaattccccctgggtacattctgaaaacaattccatatcttttgtcaggttttgtaaaggcttgtgtatccttgcctcatgtgttgaagattgggcaaataatattgctatgtctgga

SEQ ID NO: 27726 - DNA, 1155 bp, Mus musculus
cgggtggtggctgctgagcgggacgcagataaccgctgcccgccccgcggacgtctccccgggcccccgctttctgcacgtccccggcgtcggagctgttcagcatgtctgtggtgccgcccaatcgctcgcagacgggctggccccggggggtcaaccagttcggcaacaagtacatccagcagaccaagcccctcaccctggagcgcaccattaatctgtacccgcttaccaattatacttttggtacaaaggagcccctctatgagaaggacagctctgttgcagccagatttcagcgcatgagggaggaatttgataagattgggatgagaaggactgtagaaggggttctgattgttcatgaacaccgcctgccccacgtgctcctgctgcagctggggacaactttcttcaaattacctggtggggaacttaacccaggagaagatgaagttgaaggactaaaacgcttaatgacagagatacttggtcgtcaagatggagtcctgcaagactgggtcattgatgactgcattgggaactggtggagaccaaattttgaacctcctcagtatccgtatattcctgcacatataacaaaacccaaggaacataagaagttgtttctggttcagcttcaagagaaagccttgtttgcagtccctaaaaattacaagctggtagctgcaccattgtttgagctgtatgacaatgcaccggggtatggacccatcatttctagtcttcctcagctgctgagcaggttcaattttatatacaactgaattcctgtatgcagaagtaaaagaagccgtctctatgagcacagcttacatgtgtagaagagtaactgtagaacaagttttggttttctcttgttccctaaattgccaccaccttcctgtttgaagagtaaaatgaatatgaccgagatagtggtggaaacatgtggcagtgttcattagcttttggttctactcatacttttttttgtacattaaagaaagtgaatttcttatttgtatttttttttaagtttctcattaaactctgaaaagtcttagagctgaggatccttttttccctgctttagactggggaatgttagaacatgatcatggatgagataaggtgagattgtgggccctttgc

SEQ ID NO: 27727 - DNA, 1126 bp, Mus musculus
aaacttaaaaagcttttactggtttagtgtttgggttgctggctgctggagaggattttcagttttctatgaaagaagcttagcttttgtagtttaagattagattttccaacacattccacttgttttctatctcttgcttgggttaaactggactcacttgagtttgcctctgtttaaatacaagctgtaattcatctggagccattaaattcactttactattaactcatataacacacatggctatgaggggggaaaaaaaacccaaccaaatatatcaagattaagccagttaagtgcactttgtattctagtgagggattaaggctagagctaagttggaagaaatgcaggaattatactgttccattgagagaagagcagcgtgttgagaaagcaaagctttggctagggatgctgctgttcagtgggaaagcgtttgcctaggaaggtttgggttcagtccatgtgtcctccaaacagagaagttggtaattatgttcatatatagtatacaagcaccatttatagttgtgactttgagaatttgaacctggtttgtttataggaatgtataaagaaactggagttttgggttatgttttttatatttgtaaagcaaaagtttgatcaaaatgatcattgttctttttaaaagttttatttcactgttatttcaataaaaatatttaaaactgaaaaaaaaaaaaagaaacatacctcaataacaaagacaggcactattttggagaaaaaggatggaaaaaggtcttccaagcaaatggtcccaagaaaccagaaggagttgccatcctaatagtcaataaaatagacttttaaacaaaagttatcaagcataatgaaaaaggacacttcatatacatcaaggggaaaatccaccaagagaaagtatcaattctgaacatctatgccccaaatgcaagagcacccaaattcataaaagaaactttattaaaactcaaaccacacattgaaccccacacaatagtagtgggagattgcaacacccactctcaccaatggacaggtcattgaaacagaaactaaatagagacacattgaaattaagagaggttatgaaccaaatggatttaacagttat

SEQ ID NO: 27728 - DNA, 1213 bp, Mus musculus
ccaacaacgcccttcccacctccttgagttgtggtttcttcctttaaatacccccttactcagctactcggggtgccacagtcctctacccctgcatggcgtatgaccgtgggcccgagagcactcttgaataaaaatcctcttgcaatttgcagcaagtccgtttctcgttggtggttttggggtgtcgcctctcctgagtcagaacgtgggggagtcctcatgttgtgggtctttcatttggtgcattggccaggaaacacgaccacccctcacacccgagaaccgacttggaggtatggggatcccctcttgtgtatgtgccggccggtttctctgttttgagtgtctgttttctgaaacgaacattggaacatgtgcttgttgtgttgggttgtttgtgtcttgtcctatgtttctgaagcatggtgaagtctgagtttggatccatctgagtttattgaatatgtgtcttggtttcagggttacgagatagtgggttcgagtcccacctcgtgccttggttttacacctggcagagtgaggaacaagtgtgcttctctggttttggtcgtctaggtagaagtggacaacggtgtttgtagacgatggggtgatggggttttctgaaatgcgctcgcagtcggtatttgcagctgtccttttgggccacaaggagcggaggactgtggtcggcagacgtgctaggaggaccacaggctgtggccctgggggacgccctgggaggtaaggagagccagggatgcctggccgtctccggatcggtcagagggacagagttctgttgaagtggaagcttccccctccaaaatcgtcaaattcttttgcctgcttgtggaggacaagaaagggtcgaatgtgtctggatctgttggtttctgttttatgtgtttttgtgtatgtgtttagagctatgtgaaaatctagagaaacaaaggtaattctcataggtgctttataccctgactagagatagtttacacctgagatgtgagagaatgggttttgagaaaagcagtactctccgactatctggggataatttggtaaaataaaataaaataaacagtatcaattggtctttggagccctgtacctgtagttaggaatctagtgtggctggagaagccctgctaggagctgattatagggaccagaagcttctcaagttctacaaaaatctctgtgcttg

SEQ ID NO: 27729 - DNA, 1228 bp, Mus musculus
gagattaaaaaggccctactgatggccagcctatgcctgacctaaccaagcctttcactctttatgtggaagagagagcaggggtcaccagaggagtcctttctcagactttgggactttgaaaaaggccagtggcttacctatctaagaagttacaccctgctgccagctggtggttttcttgcctgatggatgatgaccaacgctcctgtgacacatcagaactttttgttgactgaacgagtgaccttcgcttcattccacctgctgtcccactgcgtgagactgcacctactcatcactgcgctgacattctggcagaagaaatgatctgaaggatcagatcagccttggcctgagggcagtagcctcgcggttgaaggtaaacagaaggcgaggacagcagtacggtggtgaacagaaagcaagtgatctagaacagcagcctccctgaagggatgtcggcccagaaagctgaacttgtgactttgacggggcaatatacaaagagggctgttcacatctgcagaaaaagacctaagatgctgtggctaaaaaaatcaggtggcagatctaaccgccaaacaggtggcccaaggagcaatgatcttggcagtcaaggagcctaaagattattatgacatcagagagaccagctttagatacaccgctgagcactatcaagttatggacattatttgacccacctgggggccaagaaattcaaaggtgtggttaggtcctttgactactatgttacaggactctctgacttggcagaagaaatagtcaaaagctgcaaggcctgtgctatgatgaggtagaatttctaaaagaaatcttcccaaggtaatggacctgcctttgttgcccaggtaaatcagggactggccaagatattagagatcagttagaagttacattgtgcatgcaggccccaaagctcaggacaggtagagagaataaatagaaccattaagagacccttaccaaattgacagcggagactggtgctaataattggatagctctcctaccctttgtgctcttcagggatagaaacacccctggacagtttagactgacccccctataaattactctacagggggccccctccactggtaaaaatagcctctgtacatagtgctgacatgctgctttcccagcctttgttctctaggctcaaggtgctccagtgagtgagacagcgagcaaaaaagcagct

SEQ ID NO: 27730 - DNA, 1159 bp, Mus musculus
ccactgaaaacagttttcaagtttttaactaaaaaggaattcttgaagctgagttcagcagcacttgcggtgtgtattacaggtagatgtttttctgccctctagcctagttgtgagtctgcacgccgcgtctaaagcggccaagacagctttcctcaggaatacttgttcaggtcttactactcagcagcactagtgctgtgtgtccgaactgtacgggtgctttgacaagtccttgtaacagtgtgagcagctgcttccctacatttaactgaggaccagaggctcaggtggtgagtggcaagagcagtggctctgaggccagtgtcttctgccattgagtccacaggaagtccatggatgtgggagagtgttgggtttggtcgtggcattactgttcctgtttttctgaacagatttgttctcttatctacagtaactgccgacagtgtcaattgttaactgattttcatcagttaggtctcccctggaaaacctaaaatggtagcctcttgccaactggaccgaggacatgggcttaagcctggctttgagggctcttttcgacctgtttactttcccatgctcctctctggcagctgaactcctgcctgcctctcagatcctggagctctgtccctgttaccactttgattttgccatgccctcctttctcttgggttttttgcctagttttagctccacgtcttgagaagtgtctttgcagtcatgacatgctctctgattccattgcctttaatgcatgtagctgccccttccctctcttgcttctttatggctataggtcatgttgtgcctttgtgtgctgctgtgccttggagaatttgttgaagttcttgattattgtatcacaagctcaaatattttcatgtaaaaatgggttgtttctctaaggcctgtgtttgaatgagcattgacatccctgcctgtgttagaatgagcattgacatccctgccagtgttagaatgagcattgacatccctgccagtgttagaatgagcattgacatctctgcctgtggcattgatgcactataatccttagtcccacttagacttccctggtttaggagtattatagacataggactgttctgtcatctcagtttttatgctgctgggagtgggcaagggagaa

SEQ ID NO: 27731 - DNA, 1107 bp, Mus musculus
atttagttttttttttttttttaatggatcacagagactaagttaacctattgttataggagatagtaatttttttttaaaaaacctgtttgaccaaaaaaaaaaaaaaaaaaaaatcacagctgctgtaagcaaacattttggttacaaatagcactctgtcttgcttttgaattgtgcagcatccatttacaaatgctgagtttgagatgatcatagaggttctggtgctttgtcagattggttacttttacggagcttcataaaaggcaggaggttgctcatagggctggcactattttcaaatcatttagggactttatatctttaaatttagcttttcctatttttttcttgctgttttgtttttaaggcatgttgtctccaagtaatacagaccagcttcagctgccaacgactagggatcacaagtatgtgtcaccgtgccaggcttaatttatcattttctgttgcatgctactcttgtacatatatgagagagaaacaggaatgattgaagtctttactttgaatctctggtgtgtttgttcactttgctgcgtgcagtggagtgagctagttaagagtgcttctgaaatgaatcaggagagagaaatcccaccggggccaggctcttaagctgacttcgcagttgaagaactagcctgtttttgttttcttttttgttgttgtttttccccattctaggtttaggaatcttggcagatgtttctgattctgtaatccctgagtctcccttaaatctctgggtgtctagttttgttttttgaacatgggaccactggtcacccaacattgattataagataaataccttcagatagtatgctacaattaatgaatgttcatgtgtgagagtgagccaacaagcagcattcattccttcgtggtttctgctttggttcccttgcctgacgacagcttaaggatgtaatgtgacctagaagtatagtctcaacatacactttacttgcctaagctgcttttcgtcagtgttatcacagcaggaaactaggtttaggctggtcccagagttggtatgctttcaggattattagtggctgtccagtgttctgtattgtattc

SEQ ID NO: 27732 - DNA, 1092 bp, Mus musculus
acctgctgtgcccctaagtagcgtttagaagtttggatatgaaaaccagaagagaaggaatatgcgttataagagcaaaccacacatgtcccagttttgaatattaatgacagccttgtttccccctttgaatcagcagacacatggattatattctttttcccctcagtagtgcgcagtttgtatgtacagagaacatggacttaacaaaagcttgcggcagtagttggttcttgcttccaagtttgttttggtttagattatggatgcatgaagtaagggagtgaatcattatcttgcttttttttctcaccttttaaacaacaaaaaaattcttaaaaatattttactgcattctttggaagaggtagatgtttggtacatctgatggctcccagagcatataactcaataggtgcatattatggagggaattggaataataggaaactacatgacttccgtcatgtcactctctaagacacatcagcaaagggtgttatgttatctttgttttgggtttctgggttttttgttttagttctttgtgtgtgtgtgtgtgtgtgtgagagagagagagaggggtggggaggagagagagcgcttaaaatagtttctttttggggacatatttctgccaattaaagactagaagggcacaacttttttttttttttaataccataaagaagagtttggtttttttttttctaaataataatcttctgatgttttgtagccataactaaattatggttaaaaatgtgcactattgtgagaaggagcaacatagtttggggcttttattttattatttttattttttattttaccatttgtctgttttactttgtttcttaagagattaaaatatttctggataaggattagcttctcaaagtgtccatcattctgtatagaagcttaaatatgtaatgtaaccagattccagtattaaaaaatctctcatgttagttttctttttacaaagcaaggttacagcagcatataacactgccattacatggctaaatgtttgctaccttagttttgaaaacagtttttaaaggcttgctttgagctatgtttggg

SEQ ID NO: 27733 - DNA, 3416 bp, Mus musculus
cacttaagcattgtagatctaagctgctgttttgtttccactataatcactactatatcatgttttttactcttgtttatatcaagtattttttttttaaagatataggtatccaatcagattctttttttttggtttttttttgagacagggtttctctgtatagttctggctatcctggaactcactttgtagaccaggctgtcctcgaactcagaaatccgcctgcctctgcctcccgagggctgggattaaaggtgtgcgccaccacggccggcttcaatcagactctttatgttcagctaaaagtaaaatatacctacaaaggttcaccagaggctgtgtttgtgaaggtggttgacaggatagtcgatattaatggaagaacccaggagtgtaggttctgaagagaaagaacagttgtcaaatttatatctttaaatttttaattaagaaattgcttagcaaatttataacactatgtgtgtcagtagttattttgaggcctttggctcctgaatcccaccctgtgttctacgaaactgctctaacccagccccgcagctttgctgctctgtttttgctgccttgttctttacaaagcagcgttgattgacgccagtcttggcttcattaaggtagggtggcatttgcttttggtaaagaggatggatacacttacattttaccatacatcgttatatctaccccattttgttagtggggtctatgatactgtaatattaagagttgcatccagagaggcagtcgtctatggtttgtgccaggtgttttcagggttctatcacattgagacatttagaacccattgctctgtggctctgtaggaattctaaaatgctgagtgtctgccacttgagattttgcttttactgcaagagggtcacatctgttggcctctgttgttgtttaaaaaaataataataaaaataaaaaaactgtgcaataatttttaaacgtgctcccaagaatagacacaaactttttgagtatgcctaagctgcatttccttcagcgatgcatttgtcaattgcactgaatctgaacctgaaagtcagaggtgattgttgatagtgcttttgtattttgatatggacattttattcatttgcatacagtcattgacgttcttcccagctgattcaaagacagtcacaaattcctgaaacacagctgccaaaatgacagctgaattttctgataatgtcttgctttctgttgggtgtgtgtttattggtttgttttgttttgttttatttttttttttcctatttctttggctattttacttcagcacactagctgtgatagattgtctgatagaagagaagtgcagagctttgctgtcccaaagcctcgggtctttccctcgcagatgtggctgaagacatctacctttaggctggttctctgtgagcgtaggactgtgtgctttgctgctgctctcactgtccctgtagcctgctgacgtgccatgatgctgctccacagacaccacaccatgtcttcatccaagcagtcagatgatcaccagagaccacacttgagtgtgtcaagtgctgtcatggggctctctactttccttcttgtctttttctgagaattggctctgaaaatccagagtccagtagtctttctatggtgttcatttagatcattgttgtatatgttactgtaaggcagagaataggaggcttaaatgaatatcattgattaaagtagactggagggagcagctgccacccttgaaaggcatgaaggaacctgtgtactccaggcaggagacccttggggacttagatttatccctattttccatgatcaggtaacatcattgagttttcaaatgatttaggcgtggttactggagtaggtcttagagtgtaacagattgttttcctgagttatcctctaggtgagtatgttttaggactaaacaccttttgcagatactgaaagtgcctccttttgtggtatacaaaacaaattatggtgcaaaacgtaatcaatagattgaatcacatgaagggttttttgctttttgacataaaaatgtcaagagacaggccaaagatttgtacttttcacttataaagcactcctttttttccttaagattctttctgtcgatcagatttaatgaaagagtactatttttaaggagctatctgtttatgtagaatgatttcgttaaaagagtaatgtaaactatgaatgaggagcagaggccggctgaggactgggccttttgctatttaaagaaatcacggatgaccaggcttctgcaagcacacctgacaagttttactaaatgcataggaaaaccatctcagacagtgctgtcttgctcttttaaagaccatttacgtttttgtaagtgctttgcacatttccacagaagctggattctcaggagcttagagcggtacttgcacagttgctgcagaaatcctgcctccgtggaccaacatcatggcacagcagcagaagccagcatatgggggctagcagccagcctacagagacccagggggcggttttctgtttgtttttcattccctccttttgtctgaaaccatcagggagggatctgtaatagctctgaagtgtcacaaatttaatatcagtcttttaatacacaatcctagttaaatgtaggagaggaaaataaggggggggggcggtgctcacggtgtttaaatgcattcgtctagaatcctgcgtctttataaagcaggtctgaggtgtccatagtagtctttatttctgcccttctgtgacagtgttgaagcaggatgaataagtatgtaggcttcttcttcttttaaaacctagcaaggtgtttggtgttttcctttggaatttctggatgagtttgaggaaacattctgcatgttttatctggtgtgctttttcatctcattacaaacaggcagacatcattgtgcatctctgccatccttaaatacagaagtgattttctttcctgactttgacattgttgctatatataatgtttttatttgagttttgcaaatcctttgggtctaattctgtgagcctaccttagctttgggtgatgatgtctgcagcctttctttagttccacagttaaccttaaagctgttggagaagtgtaaaccagcccatgacagttttttgtacccgcttaagaactttattgttcagttttcatgatgattgtgtaaggaagactgatgcagatgttcatctctcctggaccatgtcaatgacacttatgatgtattttggttctacatcacagtgatttgtccccaatgaccctttgaccctttccaggcacattgtgtgtgtgtgtgtgtgtgtgtgtgtgtgtgtgtattgttgttgcagttttccctttgcattgtatt

SEQ ID NO: 27734 - DNA, 1188 bp, Mus musculus
gcccacttaggacttctcttgtcccaggtaaggggcatctgccagtccagccaccaggctctgatagaggaagaaagatgtgtatagaggtctagaaaaaagtaagcttaaactataaggaaaagcaaagcttcagcagactcaggagagatagatgacagtgacaaatagattaacagtagagaaaagtgaaaatagagatgaaagagattagagaggtctgagatgagaaagatactataattgggaaatatttagagtaagaaccattaagtaagaggcagagaaggcatattatgaaagagagagagagagagagagagagagagagagagagagagagagagagagagagagatttgactagaatcttggctgcagtggtagaaaaaaaaagacaagatctagacaggaaatctgggcaacagaagaccaatgtgcttaacagaattaagtgagttagagtaccaagcctcagctaaaaaggctcagctgtgtcagactgaagttacttatttgggatacatccttcaagatggaaagcagtggctaaaagaagccagaaaaagactgtaactcagatccccatcccaactacaccaaggcaagtaagagaattcttgggcactgctggcttctgcagattctggataccttggttggtgaccttaactgccccgttgtaccccctaaccaaggaaggagaggtgtttttgtggacaccagatcaccagaaaccctttaaagaaattaaaaaggctctactaatggccagccttggccttgcctggcctaaacaagcctttcactctttacgtagaagagagagcaagggtcgacagaggaatccttactcagactttgggacattgaaaaaggccagtggcttacctagccaagaagtaagaccctgttgccagagggtgattttcttgcctgaaagctattgctgccatatctctacttgtcaaagatgctgataagctcactctgggacagcaaataactgtagtggcacgccatgctcttaaaagcattatccaacagtccccctgaccaatggacacattatcagagcttttgttgactgagtgagtgaccttcccccccccctctgtcttcaatccccgctaccctactgcctgagacttcacctattcatcactgcgctgaccttctggcagaaga

SEQ ID NO: 27735 - DNA, 1540 bp, Mus musculus
tcagactgaagtgacttatttgggatacacccttcaaggtggaaagcagtggctaaaagaagccagaaaaagactgtaacactcagatccccaccccaactacaccaaggcaagtaagagaattcttgggtactgctggcttctacagactctagatacctgggttggcgaccttagctgcccagttgtaccccataaccaaggaaggggaggtgtttgtgtggaccccagatcaccagaaagcctttaaagagattaaaaaggccctactgatggccagcctatgcttgacctaacgaagcctttcactctttatgtgaaagagagagcaggggtcaccagaggagtccttactcagactttgggactttgaaaaaggccagtgacttacctatccaagaagttacaccctgttgccagcgggtggttttcttgcctgaaagctattgctgccataaaactgcttgtcaaggatgctgataagctcactctggaacagcaaataactgtagtggcatcccacactcttgaaagcattaccaatgctcctgtgacacatcagagctttttgctgtctaaatgagtgaccttcgcttcgttccacctgctgtcccactgtgtgagactgcacctactcatcactgcgctgacattctggcagaagaaatgatctgaaggatcagatcagccttggcctgagggtacgagctggtacactgatgacagtagcctcgaggttaaaggtaagcagaaggcggggacagcagtatggtagtgaacagaaagcaagtgatctaggtcagcagcctcccttaagggacgtcgcccaaaaagctgaacttgtgactttaagacaagctctataaataaaaaaaagaaaagtctacactgacaacaggtatgcttttgccactgtgcggggcaatatacaaagagggctgttgacatctgcagaaaaaggcctaagatgctgtgctaaaaaaaaaaatcaggtggcagatctaaccgccaaacaggtggcccaaggaacaatgatctggcagtcaaagagcctaaagattattatgacatcagagagaccagctttagatacaccgctgagcactatcaagctatagacagtatttgacttggcctgggggccaagaaattcaaaggtgtggttaggtcctttgactactatgttacaggactctctgacttggcagaagaaatagtcaaaagcttcaaggcctgtgctatgatgaagtaaaatttctaaaaagaaatcttcccaaggtaatggtaagggtttatttggcttacacatccatactgctgtttatcaccaaggaagttaggactcgaactcaagcaggtcaggaagcaggagctgatgcagaggccatgtacagatgttccttactggcttccttcccctggcttgctcagcctgctctcttctagaacccaagactaccagcccagagatggtcccattcacaaggggcctttcccccttgatcactaattgagaaaatgccttacagctggatctcat

SEQ ID NO: 27736 - DNA, 1107 bp, Mus musculus
ctacatatcaccaaaaattaaaatacttacaaaggattattctaaacaatcaaacagtaggcaaaatactgcaacctgaaactgtgagacaaagatcgtgagcaaatttagggaagaagaaaatacacacattgaagccactggtagaatccactatagccatcacctttcccattgctacctactatacggagcttcatatggagtaaaagaggcattctttctactggtattatgcttgaaaaagaaaatttccccttttccctttctgccaccgccatgccatccagactgaggaagacccggaaactccggggccacgtgagccacggccacggccgcatcggtaagcaccgcaagcacccaggcggccgcgggaatgctggaggcatgcaccaccacaggatcaactttgacaaatatcacccaggttactttgggaaagttggtatgcggcattaccacttgaagaggaaccagagcttctgcccaacagtcaacctggataaactgtggacattggtcagcgagcagacacgggtcaatgcggcaaaaaacaagactggagttgctcccatcattgatgttgttcgatcaggctactacaaagttctgggcaagggaaagctccctaagcaacctgtcatcgtgaaggccaaattcttcagcagaagagctgaggagaagattaagggtgttggaggtgcctgtgttctggtggcttaaaagccacaccggaggttaattaaatgctaacattttccaaaaaaaaaaaaaaaaaaaaaaaaaaaaaaaaaaatttcatttagtacctatttaaatggcatggagaaacatagtaggtaatgtagttcatctttagatctaaaaagtccaacattatatacaatggtaccctcaactgttattcattatttcacctggtgtgaatacaggcagcactttctaccatcattaaaaatttactctaagctgaatggtggctggctcataccaacaattcaaatgtttaagaggcagaaggatggtaattatcccaatatgaggctagaaagaaagttcaacaaagaaatttcaagaacagcctgtctaaaggaattctagaaa

SEQ ID NO: 27737 - DNA, 1212 bp, Mus musculus
cttccccgcccttttatgagggcatagcctcatttgaaaattttaccctgctttcagacgctaggcagcttccccttgagtcagttcagcttaccttgacagaactctctggggtaagaagttgtgtgttgggcccaggcatgcttcaaggcccttgctagagatttgcaataacacgtttagagtaaataaaagtgggttttaaagagacttcgtaaaggtcaaaaaattcatagattaggttttattggaagttaagaaatcatttcctaaaactatataattcattttgtcaatggtgtttttgttggttgcagaaaatagagaacgtttttacagatggctataaaatatttaactaagtgtggactaaaaatggcttcaaaaaagatttaacatggtaaacttttaggctatttgagacatttagtgtatagagattgtgtgttttctcaaaaatttgccctcagattaaataaattagaagttttagatgcctgccaaaaacttagaaaattttggattttaatcttggtttgacaagctacctcttacaagcagaaaaggaaagaaaaaaatagagaaatggattttagaactctcccagggacagagagaaattgggggacgccctgttttattctctctggcccctacaggagaagctctctaccctctttctattgtctggttggtgcaccaatcacgtgtcaattcatgtatgttttctgtttcgttgtctgaatgattgtttcattgtctgaatgactggctgttttatgtttcatgttaaaaagaaaagaaaaaaaaatggttaaaactttacctgctgaatcactctcagtttgcacaacggaggctgagagaggcccctccctttagccaaaatcaagcacagcaggagaggtcctgctgaaaaacttcgaatctacaacctcttagttctaaggcaaataagctgttagttgttctttcctaaaaaattctctgcaattttgtgattattgtatttagcaaatgacaaagtgtgtttttatcttataagtataggtataaaaagtaaaagtctttaattgatctaaatttataagattcgtgaagccacttcatttggtgtttgattgatcttaaaggtataaatatgatctgcatatcttggccatagagaattggcttataagttatttgggtatgattaaaaaggtataacac

SEQ ID NO: 27738 - DNA, 1547 bp, Mus musculus
agagctgtcagctgcctaagaaatcatggcataagcacagcccataaggcaagacagattacaaaagaagactttgccacattcgattatatactatgtatggatgaaagcaatctgagagatctcaatagaaaaagtaatcaagttaaaaactgcaaagctacttgggagctatgatccacagaggaaactcattattgaagatccctattatggcaatgactctgacttcgaggtggtgtgccagcaagctgctgcaaggtcttcctggagaagacttactagctggccctaacccccaccattgagcagctcactcatcagtgctgtgcccaagggtggtagcagtccttagccccataccccacctctcttttcagctgacttactgtatatctttaaaataattgtaggtgggaattaggcatatgttcagaaggataaaagcatttgagtcagacagtttgaggtgtggctaagcattcttagactaactaaacctctgaccttgcggtgattacaaaacagtggaacaagcaaatatggaacaaaaaaacaaaaacaaaaacaaaaacccagtaaagtaagagtgacctagaaggtccagatcagcctctgagctcggcaagcctgggtcgtctggtctaagtggagtgtgtgcatgacccacacccagtgtgctgtttgcttgccgtgtactctctactctaggctctcgttgtgacaatagctccattcacggcagccttccagttaacactggcagtttaagctcagacacactgagggtgttgagggatttgagagaggacacgctggatgtgctgatgggcctgggactccagcaggccgtcctgggctggacagtgacaccctgtctaaaaggggaacaaaaataacaacggatgggagcagcagatggataaagttaccatcttcagtcttacttggtttttgtctactttcctgagctttgttcttgtttgagccactttgctttaaaaaaaaagtaagtgtgcttaaatactggtatgtgtttgtaagtgttctctcatcggcaatttacaaagttataggcaagcatgagtaatttttgtgtattttcagaaaagagacctcaaatttatatgaatgtatgtcagaaaggaacatgaattcaactgggaagttatcaaatacaactgagatacaaatccaaaaaaaaaaaaaaaaaaaaaaaaaaaaaccaaagaccacagactgagagctccaaaacttattgacttgaatttgtgagaataggccacacaacacagttcagtgtatctgaaagactgttgtctgtgagaagctatggtacctggcctcttatcagccacatccattctctatttcctcacatcaccttacagctgaatctttggtttgacatctaaactttgccctttttaggacggcaccaatgatacgatattggattggggatccactcgaatcatacaaaatcacaggttaggccaattagttcccactaatgtggcctcatttccaaaaaagttgcatttgaa

SEQ ID NO: 27739 - DNA, 1161 bp, Mus musculus
ttacatttttttacttcatatgaaaactaactttcagaaagacatgttgtttcttttcaaaagaaatgtgtttcatttgacagttttgccacgaaatatggttccatgatatctcttatgctcaaagactctgcttttaagaatatagtttggatttttgttgtatagaaactaatccttaatatttactaaattagttggctgtgcacagctcatcatggcacccttttcagaaggaacacatttagaaggatcacagactaggctcaaattttgtactaaattacatgaaattagaaaaaaattttctcagtaacacttccctctaattcacccatattcttattttggaaattaatttattaaataagtctttcttttccataatgtcaccatcttttttcatagcaaccactagtcatagttttcggcaagtccaagcaacaagaggaaggtagtgtgaataatgacactgggcaagagagaaaaggctctgaaaacgtttccaaagttgattagtttcactttgcattctaccagcaagtctttctcttctttaatgcttagacattcattcattatttatttatttatttctctctctctctctctctctctctctctctctctctctctctgtgtatgtgtgtgtgtgtgtgtgtgtgtgtatgtgtgtgtgtgtgtgtgtgtgtgtttatgtctctgtgtgaacatatgacatccagagggcagacgattgtcaggaattgctactttacctgatcccaggcataaggctaaggtcttgaggtttaccttgccacagactggactcagtttgtccctcaacctgtgggagaatcagggtcctggtactcaggtgggcaaggagttggcagagtgacaaacagacactaacaccagagagagtgctgaatctgagtgtaatttctcaaaccaagcatcacacttataatacagaagaaaaacaagaaagttatgtgatatatcagccaaggtatatgttaaagatgcataatggctctttacacaaaacagagaaaatgcatacataaaatctgacaggaaccaggcaatgtttacaactgagataagatcagccctatgtaaagtcagctattcacaggagccaggtgaaagggctaatatgcccagttgcaa

SEQ ID NO: 27740 - DNA, 1102 bp, Mus musculus
gggcattcatgctaagtcaccctcatcggtaagatactgcaaagaactaacaacaaccacaggttggtgttggctcctgaacagtaaaccgctgactgaacttcaatctcccacttctgtacgagcctcatgcaattagttgccccttcttgatattgtatttcataattttattatgtatttatttggaatatttattaaatttctttttctgacttatagagaaaaaaaaaagagttgccttagaaggacaacagtgacaaagctactgtgacatgtgggcagagtcaagcagtgctgtgtgaagtaaactacctcaaggtgtgaagttacctcagccatggttttccttttgttccctaaatcccagtttttaatttcctttttctttctttcctcctttcatcctttctttctttctttcttcctttcttcctttctttctccctttcttttttcagcttgctgatattttatataaaaagaaaagaaaagcaagagagaagctgatagtcttgaatattttattttttaatgaaaagaaaaaatgagagaaaaaaaagagttgccttggtcatgacgtctgttcacagcagtaaaaccctaactaagacagtcaccagtccataaacactactgtcctcagacaatagattaattccacatttattccataaacatgcattgacaatatactaaccacaaaagcaacaactaacatggttgccagaattctttttgaagcattatcttctttaattccacaagctgagcattccaggctgactggggcctacgctgattattagtaaatgtctgtgtcaagacagaagttttcaatggagtctagcagggagttgaagcccggggactgtgtagttgcactgctaaaattgattgagcacagggccctgtgagtcacatgcatggctacctgcaatgcagtcagctcatgtgattgtgaaacagagtaacctctcatgaaatcccctgctactctagctatgaagacccattggaagtcataaaaatgaaaatataatctctgatatcttaatgtaagaacatccagaaatgttccaaaatggaaaactacagtcac

SEQ ID NO: 27741 - DNA, 1193 bp, Mus musculus
cccactagcataaagttgagttccttttagtgtactgtttatttttctttaatttcttattgtattgatgttttgcctacatgtatatctgtacaacaacacagtcgtctggtgtacacagaggccaaaagagggcatcagatcccctggaacagatgggtgtgagccaccatgtgggtgctgggaattgaacctggatcctctccaagaccagcaaccactaggtctgtcaaccactgagccgtcttcatttccctctcttatttgggttttgtttcatttgtgctcaatttttttccatttaagaatgtgttgtaccttcagcagttttctctctatacattcttaactctcctttttcttatttattttaaactgacaaaaacagtttttttatattatggtgtacaacgtggtattttggaatatatgttgtagcatatatattacctctgtacctaataacataagcttttgtatataattcatgtatcccctcactggccaattccctatcaatttctgctgcttgtttgtttttgaggcaagtctcatatatcgcagcctagcctcagatttcagatcctccacctctgcctcccatgtgctgggactgcagacatgtgatcacgtgtatttgtctcttgttggtgacattaaaatgtagttggcttagttacaagctgatcatgaagtgtgtgtgtgtgtgtgtgtgtgtgtgtgtgagagagagagagacagagagagagagagagagagagagagacagaccagactggtctgtatagctaggccttttctataactaaagaaaacaattccctcaacctccacacattccctttgtctggagatgagaagtgcccttcaatctgactgcaggtcagtggggcaggcttcttctaggagagagcccattcctagtctctcaccttagagctctgctggctgtttcttggcctgtcactctcactgttgcttatacagaggtcatgttgcctttcctcctagaagaacaggagtgattaagtcagggcattcccacctgggtattcctggaacaccgaatctcaagcgcagtcagtttacaaagtacctttaccacctaacgcacagaatcccgggctttgaggacatgctgtcacatgtgtgatagcagcttaatgattttcacccataaaaacattgtaggg

SEQ ID NO: 27742 - DNA, 2458 bp, Mus musculus
ctactgactctcacagacttaacaccaagccatcagtacctcatagaaaagccagcgacttctcgggaagttaattaacatctgctgaggcctagtcagccatcactgggaggagaggcccttggtattgcgaagatcatatgccccagcactggggaatgccagggcaaggaagccagagtgggtggttggggagcagggcagcgggagggcatagggggctttgaggatagcatttgaaatgtaaatgaaggaaatatctaataaatctgctgaatcagtcagttgtctagcttttgtttgagaatgctaaactagttttagttgtgttttattccgactccattcctctgatcataagttatacatttaaagagtctggaactgttagtgtcttgattgtcatgttaatagtagaaggggagaatggcaggcatggctgtgaactctgctacaagttttgagaagaaaactgtaaattctatttgctttgtcttttatagggtattccatctccctcccttgtcagcctcccttctttctttgaacggagaagtcatacattaagtcgatctacaactcacttgatatgaaacttaagtcctgtgggacctatgcttcaacaagacgctgacttaagtggtactttgaattagcacttggtaaagttgtagagaagattagtaacactaaccaacgccgttttattttcttgaaatacaattttcaagatggtctatgtaaaaaaaatatggattttgatgtaatttatctttatttgaatctcacatctgaagaccagtgacttaagttattcctgataatcagtagctttgtaaccctgatacagtaaacagttggtgggtgcaaaatactattgtgtatttgtatagtatcttgaatttttggaagtacatatttgtgtatctcaatttgtgcaaagactgaacagcaatgcaacacttgctgaataaaaccctctgattaaattctagaggcttgttcagttcgattgtttgatgtacttaactgcgcttttgcagtttattttcttttaaaataagagatctaacacatgaattttaaaggatacaccattattaaccatacaattacgatcgtttggaattttcttttgcaaattgagataagaagagaaagattacaaaacattgtatatgttgcgaagataagatattagtatgtactttataattgtttcagagacttttatttttattttattttcttattctagacactagcaaatcttgatttagttttgactactgtattgaatttatttcaaaggataagaccacgtgaaaactgtgttaagaattgcttctgttctttgtacagttctgaagttgtcttcagttttgctaatcgcctgtgaaaagcatagatataatgtgtggtgaactttttattgtggtcatatcattaaaataagattggaaatttattgtcaaaaattttgtgaatctgccattatcttctactgcaatatttcttttagtcagtaatacagaatgactgggctactatggccaagaatattttatttcttacacgttcagaggagtgttacaggtctccttgttacataattttcaataatctgctttaatagtttaactgactggatttttttctataccatgtatgtaccaattcacacgttagtaaatgaccttgttttgctatattttaaaagcagttatattagcaagaactttgtaaataaatagctttaaaatacaagtatcttttatgtgtcctgtcataatttctttagagaattttttcatagacaaatgtgagtgtttccttagtctctggattgttttgtatttattcatgtatatcagtaatggttttgagtatttgtgtagtattgggatttaagctcacctttatagaagggagtgtaaattgtgtatttcatttaaattttgtgtttatgtctacgtatacactttttcccccaggagaaaacacatagcctttcttgttttattggagatggaggtattgtcctgccaccaaagactgagtgttccaggggaagaaatgacagaaggcttgaacttggaaaacgattgggtgtagcatttgaagcaagtatctgggttttatcactaactgtctgcagtagggcattggtgtgttcccattatcagataaaggcagattgcttaatgtataaatacattaggagagtgtattggcagatttttttcattttaaaagtaattttattggcatatatttattgtacatgtgctggattttgtacttcctattgggaacattcgttcctttatatttgccctgctatttccttttttttttttttccacttttttattagtatttacttcatttacatttctttttctttccagtgtcagacttttatttatttatttttatttatttttcattagatatt

SEQ ID NO: 27743 - DNA, 1219 bp, Mus musculus
agtttccagggtgttacatataccctgatatctagctgctttttccgtagggactcaggatgtcgggccagaacttctaatttagatttcttccagacacaaactgaggaagaaagtcaggtgtgcgtctcttaagggaagtgtgtggttttttttggctttgagggataaatttaaaagaacattcactgttttaaataatgttcagttttagggtaggtagtaagattttgtatggatgtattccctgtttgaattatgtggtctatagtaaactgttcgtttacataattatttttcattatctccaagttactgtttttcagggtagaaattaagtacactgttgtcgatagtggggtagggtggcacgatggtcagatccaggacatatgtgctttaccactgagccacatcctagcccatgtcacacgtctgaggtagcttcatctataaatgttaccatgtgtgggaatgggcatgagtgcttaatggtttgattttagaaacagttggtttttgaactttatttttcaacaggagaatcttatgtatgtggctgatccagaatcctttgaagtaaatacaaaagatatggatagtacattgagtcgagcatctagagcaataaagaagacttcaaaaaaggtgagttctagtgaaattctgaggatatctctaaatgtgcttttcacattaaattaaaggaacgttgccttcaacaccaataacagaatggtctagagctgttgtgaggacctgagtgagttctctctttagaacctacggagctgcggcagagtcgggagcactcctggagtttggtgtcagctagtgtagccgacttggtgaagtccatgctaggagagatcccatctttagcaagaaaaaagtagaaagcacctgcctgatacacatcagggggccctgtactgtacccgcataagtacactcgtgcatgcacgtgtaaacacacaaacacacacataccccagtttacaacaaagctgacctacagtacttggaaatgactcacagattacattttataatggtcagtgacttctttgtcacagtgcttacaaatagcttgctgttgcattctttttttggtttggtttggtttggtttggttctttttgttttttttttttttttgagacaaggtttctctgtgtagccctggctgtcctggaactcactttgtagaactcagaaa

SEQ ID NO: 27744 - DNA, 1138 bp, Mus musculus
ggatgttttgaaggaatatttatctgattcatgtttcacaattaaggcacccgcatgaaagttgggctttgtgacatgagatttatttgtatactgatttcaatgtctatattaaaagaaattttatgaaacaaccattaattttccagacatatcaatgaggataagagaaaaacagaagcacagaagcaaatttttgatgttgtttatgaagtagatggatgcccagtaagtagcttttgtcgatggccattgaattttctgttttagtgaggtttctgtggtttgaatgtaaacagtctcaggctgcagagatgcctctggctatgtgcacttgctgtccactgactcactacctatgactccagctacagaggactggatgccctctgctgggttctagagtgcagtaagctacacagagaaaacatatacacgaagagacaacatgcatataaacagattaacagtcagagtgccacttttgaatggcagcttgtaaaagctgcttgataacatttgactacttctttactgttcacaggctaatctcttatcttctcatcggagcctggtgcaacgagtggaaacggtttcccttggtgagcacccttgcgaccgaggagaacaagtcactctcttcctcttcaatgactgcctcgaggtaaatttgtactcattgaagtttaacactgctgtattttgtgatctccctaattatttaaaataaagctttaatcgaagtacaatatagaaatttgaggtatattcagttatttttcaaaaaaaaaattgctgatttcataatgcggaatacttttggggagaaagtctaatactaactttgatacaaatttccagaatgcaaaccaagtcagaattccttacaagtaaattagatgatgagttctggggaaccttgtttttatgtatatttattcaagatacacaaggtggggttttgttttgttttgtttttaatgaaaatggaagtaggctttagcagctaagatgaaggcaattgaggaactaatttgctaacttagtactgtgactccttgatttctctttcctatgttggtagtgtctcactcactctatagccccaaactggccttgattcctgggcagcccttcc

SEQ ID NO: 27745 - DNA, 1187 bp, Mus musculus
ataaatagctgctttagagatggatctttggagaacagttgtttggctgatctatctgtgtccctgttctctttaggaggtagctatttaccagttggggatgaaaggtgcactcaccttattgttgaagagaatacagtaaaggaccttccattcgaaccttcaaagaaactttttgttgtcaagcaagaggcaagtaactccagaatgaagttacttagctttagtaataaatactatagcttctctgctaaggtcaatttaaaatcttaattaatattgttctctcttttagtggttctggggaagcattcagatggacgctcgtgcaggagagactatgtatttgtatgaaaaggtgtgtttctactcttggttctgtgaaattgcaaaatcgatactgttgtgtccagagcatttatatatgtataacaagaaccatcatagtaaaaattaaacacttttgtgcttttgatttcaggctaatactcctgagctcaagaaatcggtgtctctgctttctctaagtactccaaacagcaaccgcaagagacggagattgaaagagaccctggctcagctctccagggagactgacctctctcctttccctccccggaagcggccctcagctgagcactctctttctattggctcactcctggatatctccaacacacccgagtccagcatccactatggaggtagtaattcacgtttcatggaattagtctttaagatggagtatactgggataactagtagaataaatccctgctacagtgaatgaactgggaaggcttttctcttaatagtcttggtctagttgagtaaacaagacagttcaaaacaaaagctgagcgtagctgggtagtctacccttataattcctagattgggcaagtggagcccagaaggtgggttagagacactctggccattatgagactgggcctcaaaacaaaagcaaaaacaaaacaacagaaaccctgaagagagaaatcttgtaaaaaatatcagttgcacagtaatgcttttgttgggtgattgtttactctatgcttttgtgtgattgtctgtgtgtctgtcttgcaggccactgaacttcagaacaggagttaggaattgtccagggctatagctgaagagtgactgataattgttctgtttttctttttgagacaagg

SEQ ID NO: 27746 - DNA, 1119 bp, Mus musculus
ccaggataatgcccatggccacagcctcgaacccctgatccttgtacctctgcctctcagctcctgagatcagaagcaagggccgagcaccgggatcacatgcgtttttcagtgtgtgttgctattattatcttagtctaaaaacaatctatagtctgcagtgtgtgcaagtggacagcctgaatggccacctttgtcgtaattcattcttctctcttagagatcagctactatgaccagctgtgcacaacaatggctgaggagctgaacgccgtcatcgtttctattgagtgagtagctaccactagtcacaactctcattaagacttttattttttcatatgtgtccatgtctgggtatgtgcatatgagtactggtgcacacagaaaccagaagagtgtgttagatccctggaactggaattgcaggtatttgtaagctgcccaatatgggtggttggtacaaaactctggtcctttgaaagactatcaagccctcttaattgctgcgccatctctccagcctctgatagtcataatgttgttaagaagaaattctaactaacagtctagtaacttagtaataaaaataaaatataccatcaaatgttggaattacagatgtgtctatctacatcattgttttgttttgttttttattttatttattatttatttttgtttttttcgagacagggtttctctgtgtagccctggctatcctggaactcactttgtaggccagactggcctcaaactcagaaatctgcctgtctctgcccccaagtgctgagattaaaagtgtgtgccaccacgcccggcttacatcattgtttttgaactgggcttaatcatacattgatttactttactttaagtattctgcatttgttgtttgcctgcagtgctagggactcaacccagcacctcatatatgctaagcaagtgcctgctactaagctgtattcccaggctttttaaaatgtagtcttgtaagtttgacagaaacactgcactatatgcagcaaacattagacatgtaactattagtaagccttgtggtagactggtctctgctggctctcttagacactgttttcttgagcaactatgaagtaa

SEQ ID NO: 27747 - DNA, 1363 bp, Mus musculus
agggattccagattagatatgagttgagcaccctgcctttcttcctatcaccccgcttctgctgatagtccgtgctacattaagggactgagcagagaacactcagtcaagtcctgatccatttcgtcatgaagagagcaggacctttccattctatgaagggtgcgtgtttctggtttccagcagcaggataacaagtgggaatttactcactgacttctcatttatcataaaagctgcagcacctttatgtacagaacaatgtcacagtgtgtgtgtgtgtgtgtgtgtgagcgagcatgtgctgtctgcatatggaaataactacagcacaggctaccttgctgatgtgtccatgtcactggtctcccttttagctaaaatctgagagtagaataacctgatctttgaggcctcttccaatgttagtcttttctaaggtaatttttagtaggtcataattcagtatatactagcctactcatctctgaagactgactttgctcgtaatttttttttaattggccacatagcattaatgcctccacagggttcctgtgtttcacatttacgatataaattgatacccatcttcagctgaggttgttatggggggctggaatcacgtgttttttaaacctgatattttcattcctaattgagtgacagccatcttttaaggtgttgggcatggaaccccaggccttacctgcttggcaagtgctttacccccgaactacacctgaagctccattccttgtcccttctgcaccatttaaaggtgggaactatattttgactttatctacctctgagaaagaggaaaatgtaattattcacagagtttctcaaaatggcatctttcctcccaaactgggagccaaattctgcagaaatcatggacagtaaatggtgacagatgtctgaaggggtctcaaagatgcaagggaacatggggtcaaaggggccacccaccacatctgatgatatgttagttttgttgttctttggggttttattcttccaggtatgttatgcactacagcctgatcttttcagtctaagacagcatggcttcactttcctgtgttatgagaaggtcacactttggaatactgaaggacaatcctgaagtgctgcagcgcatagtgaatgcctcttggtgttttcacgttcgtctgtgaggactcatagacttacagaatgatgccgaatggaatgttttgtgcatgaccttttaacctttggctattgccaattccccactgcaaaggggaaggcagattttatgaagagttttaggaataaatacattttatagaatggaaacccagtatggtactggggaagtttattcatgctt

SEQ ID NO: 27748 - DNA, 1136 bp, Mus musculus
cgattcccctcttcctgtttttttgtatatttttgctccttggtttttcttgatcatagctactttgtgcttggtctatgttgtctatgatgcagtaagtaccctgtactagcttatactattcccataccaaagtcatggggaaaccaacattattttgttttgggtttatttatactctattctgcatacagtactttaaatgccaatgacagtgcaatctttatttattgtaatgttaaatgtacttattactaatgtgccctcctagcatgttatattttgtgtgttttatactttttgtaattttaggtcagtttagttccttggcaacatctgtagtattagccttctgacatctttcttgtgtttttaaagataagagcatctaactcattaaatgccaaaaaaaaaaaaaatccattaccagtgattgaaaggtttacatgtacccagaaaccatattcatctcctggaagagtgctaagatcaatgcattgtcgcgtgcctatattgatagagttatgcactagagagttctgtattttgttatcgactatggtgattagtgtaattagacgtgtacactgatggtatcaaggtaaatctatttttgccaaagctctggccttcggaagctcatccttccatcgaagtgtgtcttttggcccactgtgacgtcacttctgcattccctgcggcagtcacaggcgggtgaaggcagatgcagtggaatggtttttaaggctattcattcacagggagagtctttttttaaaaaaaaaacaaaacacttcagcactgctgctgtaaagaattccctgaattgttgaattgttacaaaggaaattatacttcaggccaaaaacccctttgatcttgcagagattccgatactcggtaactctcagaatgctgaagcgtgtgacacacgagccgacagcactttattctctcgctcgccattatttgctattcattatagtctcttcagtcaggaagttattcctctacatggcactattctctatcacatatctgtatatgtgctatggatatataactatatatattgccatttcaaaggaacaataaaaccaagtgttctgttgaccttgtctgtgccctttgccata

SEQ ID NO: 27749 - DNA, 1154 bp, Mus musculus
tacacagacatcatattatttctgaggcaaaacatctatacacataaaataaaaataaaatattaaattatcaaaaacatttgtaaataatggcgagatgtgtgctcattaggcacacgcaactcttgcaggtgttagtgaactcaatgtttacggtaggtatttttatttccacttacaactgttgagaagtgaggctcagagaggctaaatgaggtcgttgttcaagggcacactgaggttcgagaccagggggagaacacgctcccagctcctgttctgttaagccaagtgcattgatttttggatttcaaagctagtacaattcttcttaagtgaatcaattcaaataaagatataaaggaaatgtctgtatgttttggtggctgtactaaagatgctgaaggtgatgtggaacatgaacttggaaaccaacactttattggttggcatatagtttcaattctacttaaaaataaattggcgccatgtaaccatccattgctttggtaagaggaacatggtaaaaatcaaactcaggatcttaaaaatgcaaagccctgttgtgctccaccactgagcgttgatgcatgtcacactctgtttgcttttgcttacaggcacatgagacgcctgggtttgtgagtgtagagatgctcaaagagttcagtgacgagatatgttatccttcaacttgcaatgagctctcatctggaaccttcctttatatactgcacccttcctgccctctgctctttccctgctcatgccagtcctttccaccctactgtatcctctcctgtcatggtcacaacaccttggtgtgaaagctgcattgtgcttacctgtaaatgcagtgactaggagacagaatctgggttttgttcccgcagggcagtgttcactgctggcagcacaattcccaacaggagaaagcaaacaaaccacacagtgtctggggcctggaagctgacctcagtgaaagccatccctttgggttgacatttgggggtgggttgctaactccacatgagagctagccagggaaagtaagttcttcttacttcacttgtagggaaattgttggactgtagaatccttggaagaatgtcaacctctttttggtgtatgacaattagtttgtgatgaaatat

SEQ ID NO: 27750 - DNA, 1190 bp, Mus musculus
gaggctgaggtccaagagtttccatttctgcggcttcccctaccctgtcctctcttgcacttcctatgagtcaccatggagatgtcatctcttcccaaccagcacctcactgtggcttcttagtgtcttccttcttacccagagtggattaagtaacccagcttctgtgacttgagcttccaaactaaggatgatccgacttactgtaccaccgcagggagaggaactgtgaaaccctggtcttgcggcttagggtgtttgggtgtgacccttaccactccatgcagagagcccttccaggtcatcgggaacattctcccggcctgcatgtggagctggtgtcagctgtaacggacacaaactcagcaataagaggaacgcaggcctgaaatgttgttcccatgtctcaagaaagcatcagctttgaagttgttctatgttcctggtttataacgtcagaaatttctccttttgaaaataatcagtattggaattctattttacattttcctagacagggtcttattctatgttcagagtatccctgcctcagagccctctggtactgggattatagacgtgaactccactcctggctagaacacacttgaaaagaaaacatacatatatatatatatatatatatatatatatatatatatatatatatatatatataatactttaagaaatggaaatgtgttacattaaaaatgtggcctctttatttgtatccagcactgataatatgcagacagtaaagtaattgctttgtttacatatacattgactatttgtgtttgccactgtttgagtgggacagtcataggttacagaagtgattgaatatatgactcgatagtgtggctcagctctctcatgtgtgtcagaatacaaacaacagtgatccttagtaaaaatataagaccttgttatttttataactcatagattaacactgatgagttttggcctgaagataaatccagatatgcttgaccaaaccctctatatgtattaccattaagtagacctcaccgggcgtggggggactcacctttaattccaggactttcgaggcaatggcaggcagatctcagtgagttccagactagcctggtctatatagtgaattctaggacagcccggactacatagagagaccctatctcaaaatccaaaccaatcca

SEQ ID NO: 27751 - DNA, 1144 bp, Mus musculus
tgtccagaacaattttattctcttttcacaatgacattattttgctaacttgtgttaagtggctcaagaccttgaagtgacagcagcctgtggagggaaacagaagtgaccatagaaccacacagatactgaagctcagagtcccttacagcgagcaactatccttctcccttgttttttcttcctcagccctccctcgctctgtcattctcctccagcagagtgtgggaatggtgtcattggcggacactgtgcgccatgactctgaatgacaccattgagcaggattcacgttggatttcctcatttgtcccctcccccaggccgtggctcagcctgcagaacctactgtttcttccaaagcatttgtcctttcagagtatttgttaggtgaagcactggctgccatctcttttcaacaactccatggcaggtttcagggaactaagattgccccttgcagtgaacggcatcgtaactggggttcacaggctgagggagggagactataatttcaacttcctcaatgtaaactggacattaacaagaaattgttctctgacaaacttaaaacctggcagagagacccctcttcccccttagtgtttcagaagcaaactctgcctgggcccaagtgaagccaaatttggacagggttaaaaccattaggtggtgcactggctggttctgtgtcaacttgacacagctggagttatcacagagaaaggagcttcatttgaggaaatgcctccatgagatccaactgtaaggcattttctcaattagtgatcaagggagaaaggtcccttgtgggtgggaccatctctgggctggtagtcttggttctgtaagagagcaggctgagcaagccaggggaagcaagccagtaaagaacatccctccatggcttctgcatcagctcctgcttcctgacctgcttgagttttagtcctgacttccttggtgatgaacagcagtatggaagtgtaagctgaataaaccctttcctccccaactgcttcttggtcatgatgtttgtgcaggaagagaaaccctgactaagacaggtggtttgacagtgaagttactggagtctgaattgactttgtagtttttacttatctcattgtgttgagtatggaat

SEQ ID NO: 27752 - DNA, 1177 bp, Mus musculus
catttttcaagaaatcatggccagcaaatatatgcttttttttttttttcccatgaaggaaaatatagaatgatggtctggaaagttaaactgtaggacatgttagatcgaaaggaaagcagctttttacggaaaccatttctttggcattcttgagccctggtgcataaataatagatgattatcacatagttttcatacttgggggccatgggaaattactcgcttagcttggaattcatgctttggtaagaagagaaaccctaacttcaatgatttgtagtcgccggctgagccagagtgcccggagggtttgggcttgaggtcccgtttttgtttttttttttttttttgtccagtctgggtctagtctgtcaggaggactgcttagggctgtcacctgctcagaagatgatggctgtcatcctactattttgtcacttttcctcagggccctcagagattgctgaggagcctgtcacagtgggatggtagttacttaaacagtttagtggtttgaagtgtctacatctgccttcctctggactgtgactcctcctgtgtccttgatcatgtgacttcgcttagccctcactccggagcagtttgtgttagcgaggtagtggggctcagagtgaggcggagcaggggggaagcactgtgtgccggaatgggatgggcagggagggtggctctgaagggcaagcattgctctggtggctttattccttctaccatcttgctttctcactgcctcggtaaagagagctcgtttctttttcaagtatatataggtgacccatctgcttcttcatcttctctgtctaagatcaaaggaagtttaaggcggaagccctctcttccaccctttctctctttctgtggatgtctttctttgtaacattagatccagccttgacctgagtcagtgagaccatggggaccccagagctggcctttcatgcccgagttagcacctcagacccctcttccccctccctttctctccttctctccctccctctttcccctccatcagaacaccttgacaaggaacagtgaggacccagaggtaactttggatgtcctttctaataagtgacctaaagggctttcaagatggctcagcagcttagaagtattctaggcacagtcctggcaacctaagtttatcccc

SEQ ID NO: 27753 - DNA, 1196 bp, Mus musculus
caccggcccgcctttactccagccccacaaataattaatgggggagggaggacgctgctgccttttcccgctgcctctccccaccacccttttcaccattagagtatctgaacgcagtcaagaaaccccaagatacgatcgaagagccattttggtgcactgcacaaattggacacattaaaaatatatattcagcattcaggctcctgcacagagaggctcaaaaacggctgtttagattcagcactattaaccctcaaaagctggggcggaaagggtgcgtacccctcccccaccctggctagtggcggagggacccggtcaggaagcgcggcctctccccagtcggagaccacgcctctccccccccccccactcctcccaggaagcggtgatagacagttctgtgtggttctccacccccacctcccagctgagtggaggagttgatatgtctcattataacagccaatgcagccgccatccacgcacaagcaaagaagcatgtcccatttaaatacacccacgcagccccagcgcccttagccgatcagggcgcgcagcccacacgcaccgcggctccgggcttggagatccgcgcaggtcgggctccgggatcccgcggatcgacgctctcggaagatcgggatcggactcttgctggggcccgggtgggcgggggaggctgggccccgggcctctctggcggacagccgcatgaggacgcgagcgaaatagaccggggtggaattgccaaggaagacgcttcggggtggttttggtccatttctcccgcgaagagtcgacatggcgagcgactccccagctcgcagcctggatgaaatcgatctctccgccctgagggtgagcagaacgtgttttttcctttttttccaatggtctagggctgaaagagggaacgttccctgcctttctgttctaattccggggcagccgaggggttctaggctgagcccctacccctacagcaggggctgggctccccttgtgctcctaggctgttcccgaggttccgcaaggaagctggtagagcttgtcagtttcatcttcgatcggtgtaagagcattacatgaaaggctggtgtgtgtgtgtgtgtgtgtgtgtgtgtgtgtgtgtgtgtgtgtgtgtgtacccgggcaaccgtctcgtgccaaggcgcgagacccgactgctc

SEQ ID NO: 27754 - DNA, 1181 bp, Mus musculus
ttctatcatggactcatttttattctgagcgggcagaacctttggtgctgactgatagggacaggaagctgtgacaggcaagataagacctccccctgctgtcttgcttattccaatgaaggacttctctttgtagttcctcaaggccaaatctttgggagctatttttggctccgtttattttgttctctgatcgttggatccatcacaaaatcctgttggtgccatactcctttgaaagcacaactcgggatccaaggcttctagtgttatcaaccagccactggacttttctgtccagaatgatgggcagcagacccttctcctccttccttgatgcccactgtattcccaaccgtgtctgcagtgatcctaagaagcttaagttagatcatgcaattgatacagtcgcacagaatctaccagggattccttttcactcagtaaatgtactattgcccactgagccatctcacaggaccccggtgctgacttccttatcaatgatcactaaagccttgccaggtcagatccaacccattcccctcacttggcagcccactctgcccctattccttggacctccaggatgcttctgccccagtctttcccagaatgcaactttggtttctcacttctgtagagtctttattatctgttatagaaggcctcccagggacactttttgtaaattgtagctccactggacatggcgccttcaacactgtgtattgagctttgagtgttctatcagtaaaatactggttggtataaactctgggaggataagaatgttctgcttgttttgttcattagtttacttttagtggctaggacatgccttagaatttaattggtgggagggaacatagatatggtagccaaggagactggtcttagggtgtcctgagaccctgcttgttaggcaagttctataaggcatatgcttttacacaatggtaacaataataccacaccttaaattgaaattttaacttaaattatgattagacgtttttatactcccagttttattatttttaaaaatcatgtttatttgtctgtctgtaggaatatgtgcacagaaaggcagttgcctgtgggggataagttgttggatactcctgaaactcaagtttcaggcagtcgtgagcctgttagcactgtgaatctcatgctgg

SEQ ID NO: 27755 - DNA, 1138 bp, Mus musculus
tgaactactttagcttacttttgactgactccggaaatttcaagttaaaaaaaaaaatctgctcccaaaggagaaaaacatcaaagtatatatatatatacatatatatatatgtatatatatatgtgtgtgtgtgtgtgtgtgtgtgtaatttcaagctagcttaaactaaatgtatatatgtgaacaagtttgaccaagaaaaagccaaaaaagcactagaaagggtcaaacagggtggcatgtgcctatgcctccccacacctcggaggcagaggcaggagaatcgcaagtttgaggccaaccttgacttcattgtagtccagatcacagaagactacagaaattctttcttaagtaaacagagatggggcagagtaagaggtatggagaaggaaagaaggaagagacagaaaggaggaaggtgttctgtgagggttttcacgtttcagcagtactgtttttgaaaaggtgtttttcactgggtgggtttggtggcacatgtcagccctggcccttggaagatcagtgtaggagttcaagagcccagcctaggatgcatgacaccctgacttgaacccctactccaaatgacaaaattaagcatttttcttcaatatacatctgtcgtcggtctgtctgtccatctgcccatccatatatccatccatccatccatgcatgaataattgatcttctgctctactttgtaaggaaaacagcttggagacattttggttgcctgataagcagcagacctgtgtgtccttaactgtaatttgggacagtagtgtcatttgcctgcacagatcagtgccagcaagagattccataggacctgtgcatactaaagataaagagaaccaggtgagagtggtggctgtgacgtgtcaggagcccacttggtgtttccagagagattaaagaggaggcttgggcctgacaggtaaacttctttggaaatatcagaattaaaaaaaaatatttaacaaatagaaaaactctttattccagatttccctgtgattgacccagtttattagatttttaggcaatatgcaaaatggctgactcctaatggtttaagtgtgtgccatgggcaattaaaaaaaacaagtataagtacaacacaaagact

SEQ ID NO: 27756 - DNA, 1367 bp, Mus musculus
tctcttggtggtcagatgtcccatattatcttcatcatgtttatctgtgctgtgttgatgacgacagacctacagagtagtttcagttgacggagggaagggaactgctgcgtacgtctgagctagtccaccaggcagtggagattcacaggggcagaggcaaagtgctggttaacgctgtagagttgactcaagacctttcaaccagcacacaaagtgacagagctctggttgtatttttgcttttggctatgtccccagcctctgcctcattacaggagtgacctttccagagacgctcactacttccagccataatgcctaagtgatcatgatgttgccctccctgcaattttttttaagtaatttgtttttgacgttagactaaaaataggaattttaaagttgctttggaattctcgactttaaattgatttgttaagtatatgtacacttttctaaagtgtaataggtgtaaccatggaagaaaggttatcttatttgaaaattattttaagtgtgtatatacttttattgttttgtgacttaattcttttactgatgtaaaatacaactaggattctgtggcctggattattttactgcattgtaggtaatgcccctccatttttgtttagacttctggattgtgtgtaaattgtgtctaaaattgtagacatggttgtgggcttgagaggaacaaatggaatcacaatcatggccttggcgtgcagcttagaacagaatccctctcagtcccaccttgactctctgatgccggctctcgggttcctcttctcatgtctggaccctttgttcccagctaggaaaaatgtgtaacaatgtaactcacctaatcagcaacttgaaatagctttacaaatggaagaccccaagattttagttccttaatttgtatgcagttttaaatcttgtcttgttatcaaaaggtatcatctctttttgataacaagataaaccaatccagagatgaagcaagataccctaggagacgtgccgggaagggatgtctaaagcacaagatattgacgttgtagccagttgactttagtgtgacccgttagcttctgcccgtgcaaagcacaattaggaattaggctcaatttttcccaggtatctgctctatgctgctttcgattcctgctgctgggggttccttgcaggactgattgacatgttagccccaggaattccaggaagtgatttctttctgctttgctgtcttctggtcattgtcttgccaataagtagccacactggtgttttgatttcatatttctttaggagttgcatgctcttatccttcctaatttatcaaatttcacatgcatctctacttttcattg

SEQ ID NO: 27757 - DNA, 1689 bp, Mus musculus
caagatttctctactaaaataagcttacacttggaaggtacttaactggaaatgatgacgtttcatgggaattgaaacattggtttaaaccaagctaatgagtaacctttacatagagcacaggctccttcaggtgttggtcaagtctgtgtataacccattataccagatgtatgctgagttggtaatttttttcttgggaattcagtgtctaagctgaataaactgctttaatggcatcataattatgtctagcagaaagacaagaagcctaagaagtccacctggaggtttcatttggaccttactcatccagtagaagatggaatttttgactctggaaattttgtaagtgtcttactgtgattgcatagttgttggcatttaaatgtagtacttgatattaacctaagctgtgctcctagggtaccttccctagtgaccatctagggtttccttccctagttttgcattctttctgtttgaaaataggaacagtttctacgggagaaggttaaagtcaatggaaaaactggaaatcttggcaatgttgttcacattgaacgcctgaagaataaaatcacagttgtttctgagaaacagttctccaaaaggtctgttcttctgtttttacgttgtggtgggatgtctcgtaggcattagtctgcgaaaatggctgttagtctgtttaaaggtgtttgcatatgagtcaggatgactcttgctgtctatttcatttcataaatggggaatattagtatattttgagtcaacagacagcagatttcatggtgtgttgtactagggggttgagaggctgctcttgtcctggttgcttcttaaaaccaaagtcctagtgagtaggagttacaaatgtggcagtgcgtgttttcatgataggattgatcacacatctaataaactcatggttttgtctcaaaggtatttgaaatatcttaccaagaaataccttaagaagaataatctccgtgattggctacgtgtggtcgcatctgacaaggagacttacgaacttcgttatttccagattagtcaagatgaagatggttcagagtctgaggactaattggcctctgcttgtaatacaatgaaagtattctaaagaaatataaaattggactttatgagaaaataaaagtcatttcactctataaaaacatgtatggttcatcagtgtgttggatgcctagagaaaaatttgggttgtggagtgattcaggcctcttccttaatgaacagaaaggctccttgtgggtgaattattcatgcttactgcctgttagagccaacagttgggtaccactaaaaaagggaactcctgagttcttgccttgatgggccattgttccccaataagtgggatttgaagcaaaatccagattgtggagatgagacagaagtcttctaataacctcagtattgtttctacaaagtccttgacatgtttccaacttggtttgtagatttcagtggttggctttgagtgcttttctagtttgcctaaacaaccttagttgacaagacctgtgaattttcttagctttgtgcccaaatccagctttctgcaaagttagatacctgcttatgtatgtattcctttgttgctgggctagttggtgtaagacgataaatgaaaaacatcctgtttgcttaccccaagaactggca

SEQ ID NO: 27758 - DNA, 1164 bp, Mus musculus
aataaatttaaaaaataaaaaaaaattaagaggcctggagagattactcaacattaagagtacttgctgctcttgcagaagacctacattctacccagcaaccaaattaggcagagtaactccaggtcctgtgctatcttctagcctctgtggtcacctgcattcatacacacatatatccacacacagccacacatctgtgcagaagattaaaaacaaaaataaatctttgaaaagtgtaggtgtgtcttaaaactgataacatatcaattaacactgtatagccatatttgtaattttctaacatagtctattgtctaggaagacataagaaaagtgcttggaactgtattacaaatggattctgtctcttaggcacagagagagctagaacgggaaagaaacaatcagaataaatatgtgtatttaatcaatttcaaacagtttgaagtagctccgttttaaatgcctgattgattatcatcattatttccaagctggaataaataactgctgttggctgtggagacagtagtgaagctcggcctgagatcgggggatcggccgcttctctctgttgcagtaaagatgacagggccaaaaatctagacaaaaaatcttctgctattttaagatgctgtggatctaactaactgggtttctgtgccatcattaatcagctgtctgaacagggagaagagaaagaaggaggcggcaggccagttagtgcacctgacttcagcacagaaacaaggagatccggctttgtgaaaagagccacataattaatatgtcctggaagctccccttgcaactttcccacactagaagcaatgacttcatgacatctttgaaactgcttatgtatttccacaaggatagtgtttgctagcatctaaagtgtattttctcatatgaatttacttttaatttctatgttctaacatatctttaagagactataagtgataatattagcatgtcagcacatccacagagagaatacatagaaatttgcattttacagaaaatgtctgtaatgtaaataatgataaaacattggtttaaactgtttaatttatatatctgtggggatgttagggaaaaaatttagcgctttgcatattactaaatgttttcatatctagtgtcttggttaaagtt

SEQ ID NO: 27759 - DNA, 1177 bp, Mus musculus
attgggagtgtgaaatttcattttcctggggacattttcacagagtgcttcaatggccagttcattgctcggtttgtgcatctggtattacctgggctcctccctttcctcacatgttcagtggagggctctgctgctggtggagaagagctggcccctgaggtcctttgctttctcatcagcacgcctctgtcaccactcaggaattgtcctgaggagggacggagagcatgtcctgttttaatttggaaaggaaactgcagtcttccccctcccttccccgaccactggtaagcgtgcatggactcacagactcatggctctatgctcacatactccctggaggtccctggtggggcctgaggtttggctaagcctccctctcctgatgctgggcacacatcgtctgcgttcagccacgtgtaatccttcctgtctgcctgggagttgggcacaaagtactggtgcttgggcccaccctcttctttagtggcaattaacctttactacagagcttcctttgaagtttgctcgtgtttttattacaaaactgcaacaagaaacataatggggggaaatgtctaaatttctgagttacctaatctgttcaattccctagtcgggctcctcttggcagctgttttacacagctatgatctcaaccagtctgcctgagatcccaaatcatgtttctgtctcagcctatttttaagattagggagctgctaagtaccacacacacacacacacacacacacacacacacacacaccacttattgctagcaaatgcacatggatgtgcatattgtgcgcaagtttgtacagccaagttaacatggtttcatggttttagctaaagtcgagctttgtgctttaaacgttagcattaatactgccttagtctctgaacactttctatcaatggactgactcggggagcagagaggaaaacatttccgataccgacaggaaggacaacatggagtgataagcattttgatggccattgaatgctattaatgggtgaagctcaggagcttgaatggcatctgcccagaagattttcagttaaactaagcagaggagccaaaagaaacaactggtgagttatataaatcccacaaaaagagaaagcaactcaggccagccttgcaaataagggccaaagaattatg

SEQ ID NO: 27760 - DNA, 1251 bp, Mus musculus
accaacagtgcagttcacatgaactagcagtgctagctcgatccacttgcaaacaccactcacaaatcagcaactgcagttctattcgaaaaagccacgagacccaagtccacagaagtagcaagaagtcactggaatatcatgagaagttttttgatgcatttttctctatgaagtcataacaaacgatgatcagcaaagaaggcaaggtaaccaataccacagtgtcatcagtgaagaccagtatcaacaaaaccaaacaaagctcagcaaagaatggcaaggcgaaccaataccacagagtcattcacggtctgttttacttataccctttccaaacattacctgtcttctcaagcatccactctagcaaaatatcacatggtcattttccaggctgcttccagaaaaacatctgttctcagcaaaacatccccccatgtgtctgtttcagcaaaaatatcctctcacatttctacttcagcaaagcatcttctctaagacagtttccagtgccgggcagtggtggcacatgcctttaatcccagcactcgggaggtagaggcaggcatatttctgagttcgaggccagcctggtctacagagtgagttccaggacagctaggactacacagagaaaccccgtcttcagacaagaaaaaaaaaaagacagtttccagagaaatatcacatgacacaaccaagtctccaaaaaccccagaaatttccacttcacctatattatatgtgtgcacatacagatgtctatgtgtataattcctagaaaggcactaactttttcatctgtgtgtatgtgtgtgcgctcgcaggaggtccaaatgataccaggtgtcttctattgctctatattttatttactgaggctgtgtctctcactgagcccagagcttgatgattccagcttgtctagttagccttgcctcaggattccttgtctttgctttcaagtgctactacacctgcatgatttatgtaggttctggggatcccaactctggctctcatgcttacatagtaagtgctttatgcagtgagccatcttcccagcactcaggctatggtaactatttttggtggtttacatatacttggcccagggagtggcactattaggaggtgtggccttgttggaggaagtgtgtcattgcgggggtgggcactgagaccctcctcctaaccacgtggaagccagtcttctgctagtggcctttagatgaagatgtataactc

SEQ ID NO: 27761 - DNA, 1100 bp, Mus musculus
ctttcacaggggtcacatatcacacatcctgcatgtcagatatctacattataatccacaacagtagcagaattataggtatgaagtagcaataaaataatttatggttgagggggtcatcaaaacatgaagaacctgtgttaaagggtctcactaggaaatttgagccaggtgtggtggcgcacgcctttaatcccagcacttgggaggcagaggcaggtggatttctgagttcgaggccagcctggtctacaaagtgagttccaggacagccagggctatacagagaaaccctgtctcaacaaaaacaaaacaacaacaacaaaacaaagaaaaaacaacaaaaaaaggaaatttgaaaaccactagcacataataaccaaataggagctggaaagatagctcagtttagaaagtgcttgccatataagcatgagaacctgaatctgatttaagtagcacatataaaaagcaaggagtgatggtgtgcttttaatcacagtgctgtagaggcaggcacaggcagatccctgaggctccccagtaggcggctctgtcagtagctgagttctgggcctagtgagagaccacgcctcaaaaaccagctggacagtgctctagaggaacaataccagaagttgctatctgctttagacacacacacacacacacacacacacacacatctactcatgcatacatatacatatacaagcccacctgtataagcacaaacattggaagtatacacctgtacatgcacatacatacacacacacaaaataatgtgaatatatctttaatttctatcttacaagacaaagatgacattttagagtagaattttcatttgttttagatgaataatcaatctactaccatttaggaagcccaccagaaatgttcaaattgtgataatgcttctgattcatttattgtgagatttttctgccttgttttccctatatgtaggcttagatttttcaaaacctaccttaataagggttcttaaattctttaacctctcttgtagcctacaacccaacagaggtagtggaaaggaaaggttaatagagcaaagggggatgtggacctgttta

SEQ ID NO: 27762 - DNA, 1212 bp, Mus musculus
acaaaacaaaacaaactcatacacataagataattaaaaaaaataaatctttaaaaaaaataactagagacagcaacaaaatgtagcatggagaaatattttaagccacaggagttgcacccacaaatacgtataacacacggaggacactggaggaaactgttctggattcaaatgctgcctctgtttcttgctgctaaatgttagtgctctaggtctccaaggctcagaaaccatttaactgatttctggggttaggtttcgataaggtggtggtctttactccttgttccctgccccactcaaaattgaaattgtctgggggattacatgcaatcatgaggcatactaaaaacaattccttgttaatctaaaatctgagttggctgggtatgtgtttttcctagtctcttgactctaccagctccctccaaaataccttggctccaatgagccatgataaaacaacattccatagggaaaatgtgaaatgatgtgtggtgctgccccctgctgttaggctacggcaacaccatctactttaacagtgtgtcacctgatgctggtctgttgtttgtgtttttttgttgttttgtgttattttgtttaacagaacctccgaacatagacacatagctaagtggagtttggttaccttagctcctataatataaacttatgactacattagttctcactaacaccaaatacattcctccttaactaggtggctttacaacttttgtgtttaaagacacagttctgctatgcagtcctggctgccacagaactcactagagaccaaagctgtctcaaactcttggtaatcctccaggctcatccttccaagtgatggaattacagacatgtcaccatacctggctgctcttaagcctttttatgagggggagtaaaaacatctgtacatttatgacttaaaatttgcactggatttcagtatgctatacttcagtatgctagtctttaaagttgtaaatttcacttaacaaaggccaccattatgttcttttgttatgacagaagcatgggttggtttggggagttacctgcattgcgctggacagagggacaaatgtttttcaaacagcacatctttgaaatgccagacttagctactcagtgtacaatcagtactgaagctgaggagcccagggttggccaggagaggagacccactgactgcctcaggct

SEQ ID NO: 27763 - DNA, 1201 bp, Mus musculus
ccatattaatgtacagaaatgtcatcttagtatatgtaattatttgtcactcacttgatactcagtcatagtagtagattgaatgtagagggataacctccacaacacagctgaggagacatgatgagtaggacaaacaggcagaaacacagttttctctgttgacattccttaaataaactattttcctctttaatgtttttactcttgaaatagaggcctaacattaaatgaagatgagtattagttatgatcagtgtatctagagaggaattatgtgaataagtctcaaaccagtgacctctattagttaaaagttaaaacacgttttggcaacttttttataatctagctattgacctgttctttgtggaattccttgtttggtatgtttattatacttcagtgtgttttttcatagacttacagattataatttcttctataagttgacagttcacatcttcctttgctctctttattcgggttttgatatttttgctttttaaagaagtctgtgtctttgtaattgagaactgtcacttttctccaaggcttttaaagaaacagtttttccatcgggccctaaaagtaatgaaaatgaaatatgataaagacgtaaaaaaagaaaaagataaagggaaatcagaaagtgggaaagaagatgataaaaagagcaagaaagaaagtgttaaagaagaaaaaacaaaaaaggaaaaagaaaaaaagaaagatggtgaaaaggaagattccaaaaaggtaagttttcctaaagttaaattaaaatttaaagtcattataggcacttgagagatggcacagaggctgttgtaccagagacccacattcagtttcttcacccacgtggaaactcatcacctgttaactctggctcccaggacgtcttccagccttcttaaaacactgcgtacacatgctgcagatgtaatgcaggcagagcatccatacacataaatgaaaataaaatgattgtgtacatgtgctctttattgtcctgtgctcataagctttaagagccatgtgagatacctgccatgattatttgtaaacaccgattttacgggctttgttggtgttggaaatggtgagacttctcatgaatatcacagcttttgctgtcttgagtgtttgattctttccacctgtctgtttgtaggaggaaactccaggaactccaaaa

SEQ ID NO: 27764 - DNA, 2225 bp, Mus musculus
gcagctcctaaaatattgtcaggtgctaagctgatctaatcttaagtatttgtctttatggtgcataaaacatgcaaatagagctaaatattgtctaggttcttacaaacaaatattacctgtagctgcttcaaggcttaatttcatttattcaagagaaaccttgctccccacagctcgctgcatcctgtttctcatcatctggctgataactggaggaaggcaccacttttggttcctgccaaacctgactgctgacgtgggcttcattgactccttcaggcccctgtacacacatgagtacaaaggaccaaaagcagacttaaagaaggatgagaaatctgaaaccaaaaagcagcagaagtccgacagtgaggaaaagtcagacagtgagaaaaaggaggatgaggaagggaaaggagctccggcagaccatggaccagaaggctcgggcggagagcggcactcagacacggacagtgacaggcgggaagacgaccgctcgcaacacagtagcgggaacgggaatgattttgaaatgatcacgaaggaggagctggagcagcagacagatggggattgtgatgaggaggatgacgacaaagatggagaggtgcctaaatctgcacatgagaaatcataatctgactagctgggggactaaataagtacagcaggttgggttttctgtgttggccgatcatcatgatgtacagatggcatttgtagcattctttaaatccattttctgaaatgtatttgacattcagttacagtcagccttttgttttgtagaacgttggtactgttattggtacagtttaaagccattaataagttttatccatctgataattttacagtaagtaggcctcattttgatagtcatcagaggtacattgtccacaatgacacttagaataagggcatttttgatagttgtatggctttttactgttagactaatggaaattgctaaagaaactgcagcatttcagattatgcataagtatatagccacttggcagtttctttaggatcaaatgcttaaactcattgttcttgctagttatgctctttttgggtttttaggtttgtttggttttttgttttgttttcataaacttataccagaaaaattccttttttaaggtttttgagttagcagggatcaagagcattttgtggaaacaagccagctagtaacagtgcagcaacccttttaattcagctacagattctccttttccagcttaggaaatcccaactgacctgtgcgttcaatccagagaaaggcggtcatctccagcagaagtgaggagcgctgactggacggcgaggctcttccttcctccccatctccttgtcataacataagatgtattctgtacataatttacaaataaaacattttattttaattgttacttattatttagacatttctcaacactgaaatttgtaaaacaaaaaccatgtaaggtatgtttttagaaagtttcagtaacccacagaacatctgatctttctacagcagcttcagttgtgtgccaacattccatgtattttaatatgagtaaaagttatccttattaagtaagaacagacttaaagtagtagctgtttgtacgccttaatgttcattgatttattttaaatctttacatttagaaatgggggctatgtcatcagacgaggaggcactgctgtgaaagacaatttgctgttctaaaataccaattaaaaataaaggatataaaagaaaacacagcaagccattggactctaattgcttcaaactagtttggccatttactttttacacaccttcgctacaaaccttctttaaaacgcctgcatatacacaagcaatccttggagccacgttttacaccccagtgagcagtgagtgattttcctttagtcacacggtggttttgctttgtagttagtaggtgatggatatataggtcttcatcctcctttaggctgtttctcttcttgtgtttgtccattgtctgtatattgacagcttatgaaatacagcttgacttgtttctttagtcttcctgtgtggatggaacggtaggtgcggtcctcagagcgctgtgcattgattacagtgcctcggtgttcttccttcacatttatttgcagagccctgctgcctcgtgtccacagtaaggaagaggataattacagcttatgagcttgttagtcacagg

SEQ ID NO: 27765 - DNA, 1172 bp, Mus musculus
tggctcacacctttaatcccagccttgggacacagaagcaggcagatctctgtgagtccaaggccagcctggtctacagagcaagttccaggacagtcaggctacacagagaaaccctgcctcgaaagccaccaccaccaccaccaccaccagaaagcagatcctgcttgtgctagcaagtatttaaggagtgagtgaagatggggtcaaagtcacttttaatggtgtgaattccggtgtcactctggggctctgtgaatcaggttgtaattcttgttttaaatgctaactaacatcagttgctactcacattctctataaagatataaaaatatattttaaaaactttatgtatcatagctataggtttttaaagcggggaaatgcccaaataaagtgttaaattacaatatataatagatgctttcaaattaaggtttttgtaagttataataatctaaatagcccactaatctgatctttgtaatttgtctcatgattctggttacttttaaggtgttttttaagtttttgaaatatacctaagttgtaaaatatcctgtgttgtttagatctctgttgcataaatgctgttcttgtgtctgtattcttagaccttaagagttcagctgagaatacagggtgtaatttttgtgtatgattcccacattgatggaattgactgccaataacctcattcagagatgggtcttggtttgtacagtaggggattaaaaatcaaaattcagaaattgttggaaagtgcagggattatgctagaaatgagggttgtacattacagacagccatgcacagggaggcaggggagggaggctgctgacttcaagcctcttgaatttggtgagaatgctttgcgaatggcacttaaaatttgtttcacaaaggcaggttgttgggattatctgttttttaatattttaagcacatttttagaaatcttgcttttggttctgaccattgttctaaagtcaaagttttataatttaaaaaaaaaaaaaaactcaaaacatgattcatcaaggaaaaaagcatcaccaagggggaaagaaaacatgttctaatcttagagaaagcaaatgttagggttataatagctgtgtcttacattggatgttgtattagagacctcctcacaggaaatgatatagttc

SEQ ID NO: 27766 - DNA, 1112 bp, Mus musculus
ttctcagctagagaggctgactaagtgttgtagtttgaagacttggggaatgccagcaacacttgctgctgactggtactttcagcatgtgatggcctcacctcctttcctgcactgagtcccatctacctccaaccccacctccaaccccacctccaataaagtacacagactttcttagttttttacatggggttgggttgcatcctggcttggagagcttcaggctgttgtactagggcgggcctttataacttcaccagttgtatttcaatcaaagtcttatccatctatgcaatcatttcctagtttcttgtgtaccatatgtctgtgtgacttattccttgaaggttatttgagaaggggagtggaaaggggagtaagcgacagataggaagatgatattgcgacctgaatgaagacgtttagcatgatgatggtccttagtagctagatatccttggtgatggatagcgggacaaggtgtgttgttagttgttttgtttgttggtgctagggactgagtcagggcctcacacgccacctgagattgcatactgtattttttttcttgtttgcctagactaacctggaattgtggtcctctgaccttctctcaagtgctagaacttaatatctgtgccaccatgccaaacctagcccctatggttttaacttgtcaagatttggttaaaatcaaattaggtatttctctttatcacctgtccctgctctgaggagtgttgatattaatagtaccactggtacccaagttgagtaatcctggatttttgaagatgataatcagagggagagaatctgtcaaaatgtaggagtttgttatgatcgagtggccagactacagaggcatatccagtcagatatgacagttggctcagttttgcagccagtcataaagggaaggaaggcactgcaggacagttgctgactggtggactccagtaagcccaagcccacttattttcttggcgtaaagcagaatgacccgtgacatgaactgttccaactccaggcttcagtactgatatgtcactccattcagagcgttttgtttcatatcaaagctgggttttgagtttagctgagtacaa

SEQ ID NO: 27767 - DNA, 1141 bp, Mus musculus
cccatgtgctacacaagcgttctaacatggagttacacatccctgtaacttggcatcgtctgatttctctgagttgaaatgtgtcctgactctgacctttcataacagcccttgtttatatacttcctggcctcaaacatccttcctagactccgtagtgacctgagcatctctgcctgtgagagcgtggatctttagcgctctacttgactatgtcttgtcttctttcagattcaccttttcatcttgatagcactaagttgtgctttacattcatttgcctgtaaagggtagacagctatgtattcgatgagtccatccctcagttttccacacttagactttggaaattatcacaccatgtttctctttagcattatttagctatcacagtgcttagattgttatgaatgaatcttacatatgcactataaactttgctaacaaatcctttcatgctgtagttagaaatggtttgtttctttctttctttctttctttctttctttctttctttctttctttctttctttctttctttttttttaatatctatgtcctggtctgtgttgtctctagggccagaactgggtttttgcagagcattgtctggagtcttctcagcctcaaagtaccatcctgccaggattgtgagagccagtggggaacagcgctggcccctaagcctgaagtgactgggtgcttcaggggagagtttctagggagacctgccatcttatttttccttagctagaaccatgccaacagtcattttaaaaagagaaaaggaccaaaccctctatttgtagtctaatgtagttgccaatagttactacagtggacatggttactgttttcttgtatgtatttttagggtgtaaaaataacttgattttctttactatttgtcctcaagagtggatgccttcacttgttggtaattctttctatttatttatttatttatttatttatttatttatttatttatttaaaataacttgattttctttactatttgtccttaagagtagaagccttcacttgttggtaattctatttatttatttatttatttatttatttatttatttatagctcaagctggtgttgaactcatgatagctctcctgtctcagcc

SEQ ID NO: 27768 - DNA, 3256 bp, Mus musculus
atcagataactgctttctcttaagactttcctgcatgaggggccatgctgtctgtagctctgtgctttgcatttctgccttttaaaaaccctcagtctgattctggaccctctcggttataaggttggttgcttgtagggctcttagtcttcttgtgaggctattgtttttcctgattcttctagaacccactttgtgattaagaactcatttttccacagtaatgtcatttagccttatgttttcagttgtatttcagtttgaaagatgaagatatcttgattatgataaatatttgtgtttttctttcaacagtgacattgtgaggaagattgatcagtctgaatttgaaggttttgagtatatcaaccccctcttgatgtctgcagaagagtgtgtctgattctgcttgccgccattcagtgcatggatatccacccgtcagcctgctcacagttagcattttatgttgcccctgcagaagtcgctctcggtatcctgttggagactaggaatcatacagataaatagaactaagaaacagaagctagcttcctgacaatcatgtcgaccctgcttatgcttgctctccagacactcctaatgaggaaggacggtctttgtgtaaaggaaacaacacagcttgtcaaagaaagcctctgctgcgttgtgacactcgacgggatgacatcatcagtctcccacagttgttgtcactttgtgttaagtcattgaaggcttaattgcgcagtggagggccatgcagagtagtgcatctgctagtgttactggttgccgaggtccctcagtttaagatttcctcctataaataaatcttctcattactttgggtaattaataattatgaattgggttctaaattattagctgtgtttcaaaaactggcacagtgatttatttatttgtttttaattttttaaaattatttttacactaaggggttagcttctgagcttgccttttcagtgaaaactagcatgctgatgtgtgttcagaggcaggattcgagagtggcagctgctcacatacaggaaaaagtagacgtctaaagtagctacagaaagaacgattgtagcattttctttcttactgtagagtaaatcctacagttggtgtttaagatttgatgtaaataatgaggaggctctcacttcttagccagcttagaaaagcattccgtttattcaggggaagcggagtgaatatatttttattattatttagtatatgggaaaataaattatcttctgagtagaatgtcttaactacttttggttccttctccagagtacattatctgtactttgacctttcgtggagtctgcggtgaaattcaagaccaatgatgatgaccacggataactatgtaacacacacacacacacacagttccagctcttcctgagctcctatgtcatagctaacatgtgatacagagtgaaatccatttcagggcagggttcctcagttctctacactatttttattaacagtaagtagtatttagcaatctcttatttaaagaagtaccgttttaagcaccattctgctgtttattttaaatatttttatataaaggactttaaaatgatcgtctaaataagctacagttgtcaaatcagtaaatttaactttaggaacgccgcgcagtgctgagcttgtgatgatttaaaacctgtaggcatttgaaaatcacttggagaatgctacgtttcattagaagtgtgagttgtgtcaagtttgtgtcatgcattttcaagtaatgtaagacagagagcagtgagaacccccattgataaagccaacaaggggccatcgaggccacttgccaaaacctgaagacctgatgatgcctgcagcccacgggctggtggccatggcgcgcgcagccctcccctgcaggacataaatgcgagggagcagaccaataagtgcagtgcgtgcgctgacacatttcatgttgaagtgtgtgtttcccctaagacctggaacagctgtcttaatctaaaggcagcattcacgccctaagctgctaggagctcgggggtgtgtatgctgtgacctaagtggtgctctcccttggggcattttagactgagagctgttgaagtgcacagtgtccagcctgcctgggactctttggggctttgtattccattttgagaaactttttcttcaggttattctttttcttgtggccatatttcttattggagtgtgagtctgtgtttttttgtgaaaaacattttaagaaaggataaccagtgaattatcatgcatttgtcaacaaacttagatgagtaaattcaagttgtatgtcttccctaccctcacccacaacaaaacctgtacattttctgccaataacatttaaatgatgaacagttttctgtgataaggttttaaccataattaatggtggtctttgtttttaaatcttttttttttcttattgttgttaactaataagacttactatgtgtgttttatacagaattattacagatgattttaattcagttctagttttcagtccttaagtgccatgcaaactctctgtatgtggtggaagcctccttctctcagagtctccggggagacaggcagagggatgggcgcttggtgtcttagacaccacttatgttgcataagcttgtgatcagatcggtttatcacatgcagctggatgggtgtctagttatctgtgtccctgttgccagtacttatttagaaaattgttttaatttttatcatgtagaacactgccttgttcactataatgtaatctgtatttgtataattttttttacattaaaatctttaaataaaatgtttaatacctatgaggagtggaccattttcaacttaaaaacaaatgttccgggctagagagatggctcagtggttaagagcactgattgctcttccaaaggtcctgagttcaaatcccagcaaccacatggtggctcacaaccatctgtaatgagatatgatgccctcttctggtgtgtctgaagacagctacagtgtacttgaataaataaaccttaaaaaaaaaaaaaaagccgttcgtggtggcgcacgcctttaatcccagcactcgggaggcagaggcaggtggatctctgagttcgaggccagcctgggctacaaagtgagttccaggacagccagggctaaaaagttccagaccaggactgtgagcatttgttccagtcagtaattatttctgtaa

SEQ ID NO: 27769 - DNA, 1190 bp, Mus musculus
gattctgggacgggtcagctgggaggggatggcggtgcacttgacccgagccgccgggacccaggagacctggaccctggtcatcgccgccatcccccggccgtctgcgctcggcggggatgccccgggctggccccagctctaagcgtccggcgacgcgggcttccgggcttggcgcctaacctgcccgcgcccctgtgggtgccacggctcagggtgggtcaagtggggggaggcgcagccctggggcgcctaggtaaccctagagaacttcccgcgggccgggggcgtggggtatttccaccggcggcccccgcagtggggcgatgtggggagggcacttagggtgatcccagtcacagaggtgggggttgggaggactcctacttcctctgccccctctcacctcaccagacgccgggagtcccctgcttccctgtcctttgggttgatgatgagtgggtgtctctgcgtgtgcgcagggctgtgggggcgcccctggtctaggtcatgccttctgcccttttccttggctcgccttggctgaggtgtccctgtagtggcgaaagtcacagtacggtggctaggtggctttcgtccataattctctgggtttgtgttaacataaattgctgggagtttagaagcaaagctttttatttgtcggcttttactgggttttctccagggagggaagtggatgaatactctttttcgccactctgcctccatttgcattctttgtgaggtctgtctgccttgtgctttttgtcccggattagtcttgctcatggatggagatttccaggcgtggagtcttacagcttttggcttccattaggcaaattcgctaaccttttaaagggaaagtttttttttcttcttcattccaaaaagatagtatgtatgaatgtacttgaagtttagttgcatatggtaggtatattaacatgtatcttggggggtggggagaccagaaactacaggttttttttttttttttttctaacgagaaaggattgttttttaaaatttaaatggcatgcatagttgagaaagcctctggtactgaggtttggttattcgtattctaaatttgtgtactcgtccttgtttggagaggcattatttaatgcttctgttacccaccgtctggactgcttcctatttagatgaagtttcttttagat

SEQ ID NO: 27770 - DNA, 1156 bp, Mus musculus
tgtagcattttcaattatatcttaaagtacagctaaaccaaaacagagttgtacaatctattgagtaagaaaattcatctttggaaagtaaacatttctaagtgagtcataagtatttgtatacattccccttttctcttcagattaggaactgagaacaacatgccagttgcagacttaatcgtttaaagcaccagtgtggccatggaaaacctccagtctaagttctccttagttcagggttcaaataaaaagctgaacggcatggaggatgatggcagtcctcctgtgaaaaaaatgatgaccgacattcatgccaatgggaaaaccctgaccaaggtgaagaaggagcacttagatgactatggagatgcatccgtggagccggatggcgagcacgccaagcgaaaccgtgtttctctacctgaaactttaaatttaaaccccagtctgaaacacacgctggcacaattccacttaagcagtcagagctctttgggtggaccagcagcattttctgctcgatattcccaggagagcatgtcaccgactgtattcctgcctcttccctctcctcaggttcttcccggccctcttctcattccttctgatagctccacagagctcactcagactcttttggaaggggagtctatttcttgttttcaagttggaggagaaaagagactctgtttgccccaagtcttaaactctgtcctccgagaattttcactccagcagataaacacagtatgtgatgagctgtacatctattgttcaaggtgtacttcagaccagcttcatatcttaaaggtcttagggatactcccatttaatgctccatcctgtgggctgatcacgttgaccgatgcacaaagactctgtaatgctttactgcggccacgaacttttcctcaaaatggtagcatacttcctgctaaaagctctctggcccagttgaaggaaactggcagtgcctttgaagtggaacatgaatgcttgggcaaatgtcagggtctctttgcgcctcagttttatgttcagcccgacgctccctgtatccagtgcctggagtgctgtggaatgtttgctccccagacgttcgtcatgcattcgcacagatcccctgacaagagaacttgccattggggctttg

SEQ ID NO: 27771 - DNA, 4792 bp, Mus musculus
acaagtactaggtattccaagatatgcaggaaaatggtttgttttgtaaaaagcaaatggcagtttgtttcctaaccatggtaggatgattaaatgggaaaaactcagtgatggaaagctaacatagtcttctaaatcacacagctggcagaactgaggcaaagactagaccatgctgaggccgacaggcaggaactccaagatgaactcagacaggagcgggaggcgagacagaagctggagatgatgataaaggagctgaagctgcagattggcaagtcgtccaagccctccaaggactaagagctgaagaagacacacctgtgtgtggttgacagggctttgtgtttgtcgcttgctttgaaaattgaattctaacatcttatttgcatgaaggtagctaggcattctgttcatttgtatggcagcaaaagtgaagattatatattaatacaaaattttccatttccaaatgaatgaaaatgtatgcttctttgtacttttccagtgggcttggtaataataacctgtgtaatttgagcctgtggtcagtctacctgtatttctaacagttgcatactttccaaagctgcagtctgtggtggagagtacctgtgtccatggtatgcaatatttcaggctcagcttagatacagaggtaatgtttatgatacaaagctattttgtatccttctcattacagactcttgggaagccggttgttaatttgttcaggttgtagagtgggtttcttctgtttcctcctagaggaatttgattgatggaatgatagtaccacctccctaacaaacagtgtgtgtgtgtggaggggaggggcagcctttgctgtgccctgatgctgcacacaagaagcagttgtaatttgtctttctgtttaagagtgactatctctagattgtgtgtgtgagacttcagaaaattaaaatgatttctgaacttttcctgttaacagtggtgtggaagtactcattcatgctcacgaggaaaatggattccactgatgtacgttggttcctatgtaactcataatcttcttgtacagttttatatgtagtcttacaaaggtcttatgaaatttatataatggatttttttcttttaaattataaaatactaaatatcttgaagattattttggacttttgtatgtttaaatgttatcttaaaacttgcacgaatggaccattatgactctttaatcttaaaatcaggaatttacagtcagctaagaatatgtggtaggttaacagtccacaattgaagtatctgctactagcaggaattttagatgacaaatgaattccgtgatttggggaagggcagcctttgcacttttctttgtttttgttttttgcacataaagtctgatgtttttatcaccgaatttcacattagcagatgcttggcttgaaatttgctagggaaaattttcggggaactttgtaattttttggttttgttctgtttggccaccactttgcagggatcctcttgcctctgcccacagtactgggtcgacaggcctgagctctgccaccaccggccctgtgcaggttttagggatgtttctgaaagcagccctggcattatcttctgttgcgtgtgccccgggctgtctcatagcgctacatgcacttgagatctgtgcttaggaacaacttggagtttggctgtcactgtcctccatgcggtaagacatcggagccctgggttatcatacctgcttatggtcatactttgtttcataatacttgtttaaaagatacttttctactttccaaacgggagtttgttttctaaatatattgtgaccttactgtggatttattctactctgctctataatttagtgtggtgacttctgtaaccttgggagaagcacgataggtggcacagggaccatgtatgtcattgtatttagatctggagggaggaagccacgggcacctgtaaagccgccttagcttagtagtcagtccattgtaccccagcttggctgcgtgggaggcacactcaaggactcgcaccatttatttttctgacagactcagaagtgttctgcttgggtgctgcttataagtgtgattcttctagtcttgaaacttgcctcgtgacattgttgagcggtagtcttcactttccagaagatgaaatgatgtgccatcgttttctgtctaaacttccttacaatttttaatcaactgtaaatagcatatctactgctgttgaaagtaactttaatttacattgcatcatatagcttgaaaaccacctttgacattctgtaataccccacaagtgacctctgctaaaatatccagatgaagcttacttcgtgcatgctcattctgtgtgctggttgctctcgtaaggttggctttggtgtgaggtctcgtgtgctatgccaagttcactaggcaagcagattttccttcagagtccatactctgtttagggaggaatgagaccatttattctgagaaactatgtttaggagtggaagaaacacagcgttagctttcatactgagcaaagactgacgttgctatgggtggtctctctctgtggtccagactgagggctttgcaccaagtacttaagtgtggaagctcctgtgccatcaaggaggagtttaaacaaaccacctgccaatcacagctgagactgagcaccgaaagattctaccaacttaggtttggctcgggctttaacagttttgaagtatagtctttagcttgaatctcttgtgttttttgaagataaggatgttttatgcttcttgagctaattttataacatatttaatatataacctgtttatatgtaaaatcttttgtacaggggtgggaaggagtaatgaaaaacctgatttgtacatagtgaagtttatgtgcagaccgaagtcagtgaaccagtaactgaggtgtttgcaggctctccacatccttcagagtccgtgaagcgcccagtctgtgtgtctctggttcctgtctgcagaaaagcaaaatgaaaaggaagcacaagtaataggaactgtgcccgaggtatttccctagcaggagctgcaaagctggtcctgggggtctgcatcccctctggaaggcctgccccacatgccgtgctctgagtgaggagggaaggatgtgtgtttttgtttgttatgcatttactctttagggcaggacgttacaaactgatggtaaattgtgttcatgctatgtacatgtgctcctgaacttggatctacttgttaatggttccatggaagcaatcagcagtgtgtgacatgaactgctgcattatgtatttacttgtggaactgagatatgtaaacagagcttaccttttttttttttttttttttttctagtgtaaaatacttaagcatttccactattggaagaaaaaacatatatggacattttgtattgtatcttgtttaaaaggacagtcttttttaatcttcccacttaaatggcttttaaaatatataatacaatttgaagcttgtttagaaataggattaaatgtcttatatagtgctacagttttggaattagaaagtgatcaactataaaacattttaaaattaagcccagaaaacaaaatagtgtttaaagttagtttagtataaaagaaatttataagatttttttcttcaatataagatacctcacttgagaataaagaaagcacagcacatttaaagtaattctcatgaaaaccccattaaaataattgctaaacctaggacatcttttgagttgttagagtttgggataaatgtagtcaccattagtttctctgctggaaggacttaccttggtaattttaaggcagtgtaatagttcaattattcctcagtttctaacctgtgaaggcagtaagtgaatggtcccttctgcaactactgaaacaaattagctacattgagcataattgataattttgccaatgcatatagttttatgattaaaattgctgtggttggttgcattacatgacacacaaaactgtcctctacctcacgtgaaataaatattttatatggttttactaaaaaaaaaagactcatctatctggttacttagtttacaaattttggattatatttattgaaacatgacatactgtgctcttggcttatacctcaattgtattttgagatgtttgccattttcatgccttgtacataacttgtatagattggatgatattcccaataaaaacttttaatgccaatgaagtttggttcaagtcatcttgatatcaactgctaactttcctgttcccctacgatggacattttcctttcatttatttagcaggtctgtttctatgtgtgcgaatgcctgcatgtgtgtatgtttaccatgtgaatggctggtgcctacagaggatggaagagatggttgtgaggtgccatgtgggtgcccggaactgaaccagcgccttctgcaatagcaggcacgtgcacttaactgctcaactctccctctagccccagtttctctgtactttattacgcacatattacaagaaatatttattaaaaattacaaacttttaccagaattttgtggttgtcccgctacttggacaaaccttagggtaaacagtgagtatctgagggttgagacaggatcagcttggctgggggtttggttcaggtgatgtcattagagatggcctagaccagagggcctgctgtggtgagctcacgtgggtgttgacaatctccaagtgtggatgtgttttatctgttgatgat

SEQ ID NO: 27772 - DNA, 1190 bp, Mus musculus
ggccctggaagcatcatagaatgacacagcagaactagagatatttatctagctactgagtaactgtgttcctgctgaggcattaacagtgctttctgccagatccacaggtggcataatagacctgagggatctaagaaaggactgggccaatcaagcctgtggatatgcactttagacaggcacatgctgaggaatgtagtagaaaggaagaatgggccagaggttgtgtgagagaatcagaaaaacacatctgtaccaaaaagtcagcatccaccaagtattgtagctcacatgcttaatcccaagactcaagaggcagaagcaaatagatctctatctaaagctatcttggtctaatatatcaagtaccgggccagtaaggactacatagtgaaactgaaaaagtaaaacgtaaaaacaaaattctaggcctttaggcccaggcttggggaatgtgacctttgtgactcaatgctccaaggtatgctaatcataaaacagatagcgacattcctccacccacccgcttcctgggttcaaagagtgttcattcaaagaatgtgctattgttaggggctcttagaaaccgtcttgagaaataacctgaacaattaccaggtatcccttgtgacacttgtgactttgtacttccttgtgactcttaactggtatctttggtattttccaacaacgccctccgcacttccttgagttgtggtttcttcctttaaatacccccttatccagctactcggcaccatggtcctctatccctgcgtggtgtatgactgtgggcccaagagcgctcttgaataaaaatcttcttgcagtttgcagcaagaccgtttcttgtgggtgattttggggtgtcgcctctcctgagtcagaacgtgggggagtcctcacattgtgggtctttcaaaaccctgtctcaaataacaattcaatatcttagtgtgtatatttaagctttaatttaagaaaaagctccaggcagttaataagatctactagaatattggcatgtgttgagagacgatggagaacatgtctctttggtgtgtgtgtgtgtgtgtgtgtgtgtgtgtgtgtgtgtgtgtgtgtatgatgtggggtgtgtgtgtgtggtgtgtggtgtgtgtgtgtgatgtgtggtgtgtgtgtgtgtgtggtgcttattttaaggg

SEQ ID NO: 27773 - DNA, 1190 bp, Mus musculus
cacacacacacacatagatacacacacacacacacacatacacacacacacacacacacacacacacacacacacacacattcatctatacagaaagacatatttcccagtcttcaaagaaagcagggagtcagcaagagtggggccctttccttgtctcaggaattgactgaaggccttttccatgtccgagtccaccactttgtttctgcctccttgactcagctgccgccattccttctgcctcacttccctgctgggtagccacctcctagatccccatcctatggagcaatctctgatggccttgagcagcttccttgtccccactcccaggactaaatatggcacaatggtcttgtctgtacacactccactttccttgttaggtagggtgtcagcacctgcagttgcaggtctgtgtctgatgcgccaagtgcacagttggcaataaatggctctgctgctttgacagcctaagagagcaccagaaactatgagggttgccttggtttggcctcatgttctgacactgtgcatgtggcatgttctcaaattttcccttagcttaggctgtcttgcatcttctattttatctgcctgcctgtctgcctgcctgcctgcctgcctgcctgcctgtctgtttgtatgcctatctgtgtgtctgtctgtttattagcctatctatctatctatctatctatctatctatctatctatctatctatctatctatctatccatccatccatccatccatccatccatccatctatctatctatctatctatctatctgagacaaatgctagctttggattatctatgtactataggatgaccttgaacttctgatccttctgtctacctcctgagtgctggagtgacagctgtgtgccaccacagttggcctttgtgcctgcagatgaattcagccaagcactctaccaattcagctacatcccagacctgggcatcttctacacttcttctctaaccatcatgtctcccctctcctctcattgacttactcggaaagtttaggttgttggctgacttatcattcaataaggatcttttgcaaagggcagcatggcctaagaagacgatgagtgcgaacagcagatggtccaggtgtttgcgcgcctcttggcatcaacatctaccaactgtgtgactttgtacaagcc

SEQ ID NO: 27774 - DNA, 3197 bp, Mus musculus
tctcctgtgagctgccgtgtcagtgtagctgagtgaacactagctgtgtaaatagcttctcatgagacatttatatggatagctgtgtggtgtttccttccattatcaatagggactctttgtgaacgccctttctctgtagctaccaaaaaaaaaaagtcctggcttatggtcccatgtgaccttgtgtccgttaaacccagaatatgagtgcctttagcaagtgttagcatttcacagagggtagagaagacaggatttactgccattaaccactgttcattaaatagcttgaaatatcaacggtccttgtgaattctgctctgtgtctgcctccctctctccatttcctagtgcaatctcaatttgcttttgggtgaagtgtgcactctgggtgggagcctggctgctgaggctggcagtagtcatctctgtgcctgtgtttgatgccactgaggactcagagcttgagatgctgatgtggaagcaaacgtcctacagtgaccgcgctccggcttggttcttctgtagagtggagagaattatgtatacaaacagactgtagctctgggtggtgttgtacttcgtctctgcgtggatagagggacctttttaagcaagttggaggcctttgaaaatgacagtttccttccttcgattagctgaaaatattaaatttcctgcggtctctacaaccttctgaacatacgattaaaccaattttcatgtagaaatagtaacatttgcctcagaatttcattatgaagaattttggacatttgtcaaagtggaaaacattttggagcacacctaactctatctcctactgttgacatttccctactcgggtttcctcacgactcccatgagcccatcgctgtgttcttctgtctgcccatcaggacagatggctctatacatttcagacagcgtccctaccatgggtgtcatacactaggatttaatattcacatgttaatgtcttaggaagacagcatgtgtaggtcataacctgaggcagtaagcagtctctgtactctcctgtggatagcagtcttccttgtttctgttcttgagtgtgcttagggtttccaacaagtccgtaccaggttacgtggcccacaaacgttacgttcccgacaggacttgctgtgaactcccaggcgctgtaaccactcgcctcctatgcctgtacatagcaggattaaactctgagacaacagtactgtctactgagggctgggcaagccttaggcagtctacagcctccctccagtcatgtcggagagaactgcggtctgcctccatcctctgcccgcctcctgtggccagcgctgcagagctgaaggggtttgctcaggttggataggttggatggggagaaccaaatcacaatccaacctgagtgcatttaagttgtaatcttaggcttccagtgtaaccgaacacttccttttgtgcccttagaaggactgtgtttattttttaccaactagaattttagttttagacatttcacagttctcttaacacagagatattcctgtgggtatttgttgtttttgtgatgttccatgtagctcaggtgagtcacttctactatgtagccaaggctgaccttgaactcccccgatcctcctgcctccacctcctggtgctgggattacaggcatgtaccaccatgccaagctatataaattgtagttctaattgagtccaaagcaattgctaaaatctcactgcactgttgagcaccaactcatgcagggtctgtctgattgtttttgtctttaaatggcttttatgaccactctggctacgtaagtggtcacgtgaccccccctccccccaccccttcgtgaaaatggtgttctccatcactgacccctctcatgcactctctacctgatgctttttttgttggttttaagaaatgactccataagtcagggtgagcgatactgtcttaggcagggcaaagccctctcgggagcaaaccctcctggacgtggctggtcgttgttctgccttctttcagtatctgatcacccaccaaaggttctgtaagccagtgtgtcactttgtaagtctcacgttgactctgctcacctgtggccccccaccccccacccccagtcaactgtagtgacctggcatgggttttgtgtgttgccttcgaaatgccttattgggtatgccaggctactctgtcaagcatcccagctgtctgctgagacatacatgtcctctctggggtatgtgctcttgatccagaagcaaagctgatcttgctttcagtgtcaagggtgcgttttaattcagttattgtcttaagttagaagtgaagcaggaagccgagagaatgtgaacctttcacgtgatcagtgtggcaaaccgaaaatgtgcttttgctgtttcactagaaagaacgcagctaagaaatgccagtccaaaccggaaagtggggctgtgtcatatcacgctccccacttgtcacttggccgttgagtgtctgagcaggccaccgggcagtgggccagtctatgttctggggctacagagctgactgacgtcacaggattcaaaccaatcaactgtgaattgtgaaattgaaattgctcttttggtttttatttccttcagcctaataaatacagaagtctgaatgttatttaagcttagaccacttacgttggctcatcttggctgtgtattctcatgtatgtactgatttctgataaaggcttgatgacattgtaacgggctttttgtgttcagttcaataaaacagtttctgagtcttgtctcaaaagcgttcggttctgagtcgggaggaagttagcatcagtgattagcacccagctgtcatccccatacttcaggtgggatgtgcgctcccagttcacagcggtatgtggtctactgtgtgctttccaaggcttagaatactgaatttgaggacttgctgtggagttggcctagctacccatccacctccgactcttccttcccagctaacctgggaccggggtgtattctgttttgtgataccttctgatatttatgttctcttcaaattctgagagaatgaacccagaagaatgacaactcctgctcctggaaagaaacacatcagagagcagacgctcactcatctcttgggcattccacctatgaaatggggttatggacatagt

SEQ ID NO: 27775 - DNA, 1033 bp, Mus musculus
cccccgtcccccaggaagcctgtatattatggtgtgttacagtcatggatggacagagtgtagacaaatggagaccttagtccaaaattaaggagatttcagtgtcatcaattatttgtagcattgaagtctgttcttgtggctctctgctgctgcttctttttttgtttgttttttgggtttttttttgtttgtttgttttgtttttttgtttgtttgagacagggtttctctgtatagctttggctgtcctggaactcactttgtagaccaggctggcctccaactcagaaatccgcctgcctctgcttcccaagtgctgggattaaaggcgtgtgccaccaccgcccggtggctctctgcttcatgatgaagccagtcagaacacccagagcccaggcttcaggaagagtctggtttcagtcagatggtctgcatcccacatgccttcagagggcattagcttttgaagttcagctaaatccctgtgtgctttgaccttttagactttacattgagacgagactttgctggtctgagttgatctgtgtcctgccgcttgtaaatgcatgcctattgtcttacgcctgtctgcttgcctcttaccaactgaattctgcattttccacagtttttccacactatttgccttgataaaaagctccccctcatattcctttttagtttgccatgggcttaaagaattagtgaggaggtttgaagccctggaaatggatgaaggaccgtggtggctgagagcctgtgatctgctgaggtgactctcccaccttaccccacagagctgcctacagagctttgtgtagccctcggtctacaaccttgcaatcccaataggagaaaaccattaaacgtacatacatgtacctgattacgtcttcctgtgtagacaggatctaagagttaacagcgggacttggaactgtcccagcctgtgtttccagggagtgtgagcaatggcagcccaagggcagacaagtgacttcctcgtagtgctttctttgcagagaggctc

SEQ ID NO: 27776 - DNA, 1055 bp, Mus musculus
cttttgcggttttaggtttacgcacattagaggaattgacttgagttcttacttccaattatagagaaaacaggtaaacagagattcccgttttctgatgctcctgggaaccattaccaccacagtgtggtgtctacaagatgtgctgttagggtgtgtgcctgggtctcccagcagctcctggttccctgtggcatatccctcctcccgcccccccctccgtaattaacacataggtttccttgaattcatatacgtccagaatactgtgttcttctgaacatgtgacttcatctccagttgtgaaccatacacatgtaattctcgtccgtctctttccctgcttggatcagcttctccactcgctcaccccatcctcatggcctcgcttgctggcagttttggagacccagatttgactgtctaatgagttgaagatggatattcttttagaaaatatattttcagatgattcgaggatgtgtttgagatttcaatttggaattctattttcactgatgattatgtgacctcatgggatagtcattttgtggcttttgacgattgtatcctgacaatgccctgacaggtaatgggcatgcctggaaaatacccctgcctttttctttctttctttctttctttctctctctctctctctttctttctttctttctttctttctttctttctttctttctttctttctctctctctctctctctctctctctctctctctctctctgcccctccctccctccctccctcccttccttcttttaaaagctgatcaagtctcagtgtcatttctaatagcaaaacgccaccattgcatcttctccttggcctccttgaagagactttgaaaacacagatgactttggtgtctaatgattataatgggattcttattttttaaataaaaagccatagtgtatgtctagacagactgatggagtgttatatgtgaacttgtgttcactgtgtgtcctttgtcctttttccttcacatgtgtaagaccagcatgcccgtgctccttagggaagcaagcg

SEQ ID NO: 27777 - DNA, 1144 bp, Mus musculus
cagccatgtgacttttcaacttaattgctcatggatgcagtgctgctaattaatgcccatggccagagggatgacgtttggaactgagccaagcaaaataaaggcaaatctcgaagctgttctcagggcaaagccttatgttagtggggataaccaggcaggggacgtctgctgggctatgagtaaggagagacgccccaaaggagggtttggagagaaaagtggctttggtgtcatttccgtgttgctgagctctcattttaattttcttccctggctgctttaggtttgaagactccatcccttgtcacccacgggattatgcttgtggctttcctgcctgatgattcttttgcagcaggtctggcttcctttacctaatcggccttcaacctctcctcctatgtcagtggctgccaggtccacaaggaccttgcagctcccgccacagaaggcttttgggcaggaagcatccttgcctctggcaggggaagaggatttagctaagagaggggagccagactctgccctggaggagctgtgtaagcccctcttctgcaaactctgcaatgtcaccttgaactccgctcagcaagcccaggcacactatcaggtaagagatggaaaggacagcaggtgtcagcggggtgagcattttgggtgccggtgtcagcaggttaagcattttgggtgccggttggttggatggtgtcagctgggtgagcatttgggtgctggttggttggatggtgtcagcagggtgagcatttgggtgctggttggttggatggtgtcagcggggtgagcatttgggtgctggttggttagatggtgtcagcggggtgagcactttgggtaccatctggtcacaagttatggccagctgtggctggaaactcagacgagctagagaatgagcaccgtgtttcacacagtgggttctgcttgtacttctgaggagaatgtgtaatgtgctacattaattcagtgtaaaattgttctaaagtttgtacagcttgcgtcagttcaatgctacctaccacatgagtcttacactttattttacttaagacttttcctaagtgccctcttacagctgaggcaaatacaggtgacgttttataaagagaataatatggtattg

SEQ ID NO: 27778 - DNA, 1927 bp, Mus musculus
aatctttgagtagatttctatttaaaaatataaagtagggtttttgtttttatggttttttactactgagctatagaacttcgtaacgctttgatatcctgtagggttttacttaagggaaacaattagtaggaggacttagatttcttattagccaagttttattactcagaaaaagttgataaaggtcctatcataatattaatggatatatggacaatgcatataattaaaatgcttgaggccaactccttttttcttttctttttttcttttggtttttcaagacagggtttctctgtgtagccttggctgtcctcttaaaaatggatttatcaaaacatttttttaattcatagaaactttcttttgtgcttttctaaatgtgtgtagttctccgtttgtaaaaaccacttctgccctacattgtttataaacatcctatttttttaggttttgttattggcatgccagtgtgtgaatttgatatggttaaagatccagaagtccaagactttcgaaggaacattctgaatgtttgcaaagaagctgtggacctgcgggatctcaactcgcctcatagcagagcaatgtatgtctaccctccaaatgtcgagtcttccccagaactgccaaagcacatctacaacaagttagataaaggtaaggaggcggtccccgcagcggaccttgtgttgctgtagctgtgctgattgctgcacggttgccttttggtagctggatcatgcgcctaagacaaggaagggctcctgcaccctgagagctgagtgtggagtaatgacttctggatagcagtcactccttcttactgactcaccccttggtaaatgcttatctcactgacactcaagaactgagtttagaattcactgttgcatagaatactaacagaattagagctgattctccttttaaagtttaatgtggcgttaagctcagccatgggtccttgtgatccactcaaaaaggagccttggatgttgtgtctttagacagatctttacctctatttggattaactagatatggtttctggttgtgcttagcggaacagtgaacacttctcgaaacttgtcttcagagaaatgaaatagacacagcgatgcacctaacggtgttttttggttacaggacaaatcatagtggtgatttgggtaatagtctctccaaacaacgacaagcagaagtacactctgaagatcaatcatgactgtgtgccagagcaagtcattgctgaagccatcaggaaaaagactcggagcatgttgttgtcctctgagcagctgaaactctgtgtcttagaatatcagggcaagtatattctgaaagtgtgtggctgtgacgaatacttcctggaaaagtaccctctgagtcagtacaaggtgagtgacggcaccacaccagagctgcatggcacagcgttcggatgatgaatattcattttaggaagtaccacttgtaagcttatttttattagtatacttgaattttgcttaatactgatagtgaatgccagccaagtcttgtaccactgagctatatttatgacatatgtgtattttatgtgttggctcatattcaccccctttgggatgagtgaatttcagccagtcccttgtctatttatgtttatgtttaaataatgcaattattttagagttggaagacatagcagttacactaaccacaaaatactcatttcatgacctacctgctcctacaaaggatgtggggacaacattaaaatagaatcttggtttattacatttactactaaccttcttcctctctttctctggtcactgaataaatccagctgagaagcagtggtagcatacacacaccagttactgtttaataagagagacagtggcctttagttggtgataagtgggaaaatagggag

SEQ ID NO: 27779 - DNA, 1121 bp, Mus musculus
attcctgtgttttgttcacagtggagctgggacatagagtatacatctgttcattttccaaggctttccagtttccgtttggttataacaaatgatgcacttagtcctagtgcatgaggtttctgcctggtgcattcctggccacctgtcctttgtcctgtagtgcgtcacccttgaggtatgacgaataatactgactcagacaccacccgcaccccagctttctgagacagggacttactgtgtagttctggctgacctggaacttgctatgtaggccaggctggcttcagactcatagcgtaacttaacctcatgagtgctgggataaaggcgtaagccactctacccccaacttttggtcatttttatacagttctgaaatgtatctttgttggattgtcacttgccttgtctttagtgttgatgcagtatggagccatgtgtacactcaggataaagcttggtttgtcaattttctataggtggaatgaatggctgaattatgatatatacattcctgatcttcctcgtgctgcgcgcctttgcctttcaatctgctctgttaaaggccgaaagggtgctaaggaggtaaagtatcatgctacataaccagctgtggctccccaatcccccccctccccccctggttggttggttgttgtttcagcctagtcctgccatgtatgtaacccagggttcccttggacacacaattgctctcaagtatggatggtaggcatgtgtcaccatggtggttttttgtttgtttgtttgtttgtttgtttgtttagtaaaatgctaattgactaaagccttgggaaatattagtgaccttttcatttaagagcgtattggagccgggcgtggtagcacacccctttaatcccagcactcgggaggtagaggcaggcggatttctgagttcgaggccagcctggtctacagagtgagttccaggacagccagggccacacagagaaaccctgtctcaaaaaaccaaaaaaaaaaaaaaaaaaagagtgcattgggagagcctgagaagtccgtttctgatgtataagtatgtcatgagttcatgtcaatataatttgttaaccactgagtggctgctggagtga

SEQ ID NO: 27780 - DNA, 1118 bp, Mus musculus
ggtgagataactgaaggctgactcctagaattctgagtcgagtactcctttccatccccctgggagtgttcataagttaggaaagcaaaaatagcaagtctctgcccttattcattcctgggtcagactgtgaattaaattgacagaagccagactagcaggagaaaaaaaaagtgtgtgtgtgtgtgtgtgtgtgtgtgtgtgtgtgtgtgtgtgtgtgtgtgtctgtgtgtgtctgtgtgtgtctgtgtgtatgtgtgtgtgtatgtgtgtatgtgtgtgtctgtgtgtgtgtgtgtctctgtgtgtgtgtgtgtgtgtctgtgtctgtgtgtgtgtgtgtctgtgtgtgtgtgtgtgcttaagaattcacccagaatatgagactccaaagaaagaccaaagctggtccattctccttagctacactggggctgaggaaagctgacattacaggaggggaatggtcagaactacatgagtaaaggtggtcttgacactacactgaagcaatctctccatcagagttgtttgagctggacacagagacatgcaactgtagtcacagcacttgggaaatgaaggcaggaagctacatagcatattgaaggacagcctaggctacgtgagattctgtttcaaagagtatcatctcagagaagtctttaaataggtgacagtcaaaacctgatctcaacctccagttgactgtcagcctggtatcagccttccccaagtgagctaaaatgtgatctccttccgaatcgggagccttggaatccttgcctgccttggcttacttcctgtatgcaagggtggtttgtatagcatccaaaatatctgtgtgctggatcctaggactatggcagagcctgccctctatagcttaaagtttggacaaagacttttcagcagctaattccaaaagtgaaagaaccatgagacagagtgcaatcttctgagaaactagggcatttatgtggagaacgggctacaggaagaggggctcaccagtggcttgtgagaagaacaaatgagaaaacagtgagtgctgttggccccaggattgccttataaccaaatttagacttcattcttcataaaggtaaatattttaa

SEQ ID NO: 27781 - DNA, 1152 bp, Mus musculus
gattggatcttccacaccatcaagcagcatgctttgaactgagatgggagctgggactgcgagctggctcccggcttctccactgcatggcagtgagtggcagcaggcaggcagtggcatgggatggcacagtcaggaacaacattaggacttgagcaagaacataaacaacgtgctctataattgaaacactgtacacgcaagcagggtttgatagcactaaactagtttatttcaaaatccagctttagaataacgagcaatttcatgttatgccttaagtccaaaaaaggtaaactttgaagattgtttgtatctttttttaaaaaaacaaaacaaaacaaaaatccccaaaatacatacaaatgatggagacaaaactagaatgctgttgtttgtctgccagtgttctgtctaacacgtggacacgcccaaggctgtgactgctataggtctgagtaagctaaagcttatattaagttacatgaattggagaagaaggaaaattctgattttcccattgctgttcagacttaacgatttgaagtggggattttgatccctgcttaatgaggaacaacacttggggtgaagggactcgctttttgctttgaacaaacaacactttgatggacttggggtctcacctgcggttttgaaagcagtcacaatacttgcagacagctgcgtttttgttgggtgttgttttttgttgtttttttctctggacagtatttacaaggatctgacttatttcctagggaaattctgggctggcatcaagtatagcagtaagggcagaggagaggccgcagggagcccctgttcctgacctgtacagtgttcactttcagctgattgtttctccttttgcaattgaactgaatacttttttttcatgcatgttttccagaaaatagaagtgagtattaatgttattaaaaagattatttttttttattaaaggctatttatattatagaaactatcattaatatatattctttatttacataatctgtcccatagtcatgcattgttttgcaccccaaattttttatcgttggtaacagcatggttagcttttctctcggtctgtagatgaggctcaggcactattccatttatccaatacccgtgtatgactcctta

SEQ ID NO: 27782 - DNA, 1185 bp, Mus musculus
aaccctgactccgggaggtggggggcaaagtgaggcctgttcactgtctctatgaagagcgttgtaccaaagaagaaagaacattgagaacaccctttgacaagattgtctcgtatttctacactgtgctgccacttgctaattctcattttgtgccacatgttttgcacaagtgtatgaatataaaagtaattctggtgcggctctggtgcttcaggagtttagtaggaaagcaccatagtgtggaaggggctgatgtatgtgcagctctgagcagaaagggagtcatgggttttctatgactgctaaaaccacgtgcaaaagcaaactggaaagacgtctcattttacagctctcagatccgactctatcactgacagaagtcagggcaggaactcaaactaggaacctggaggaggcaggggctgaagcagagaccacagagaagctctgcttactggcttgctccccatggcttgctcagtttgctttgtttgtttatatttcatttttctgagacagggtttctgtgcagccctggctgttctggatctcactttgtagaccaggctgctcttaaacacagatccactgcctctgcctactgggtgctgggattaaaggtgtgaaccaagtcctagcctctcttccccttttgctgaaaaattgtgaacctgaccttatcagttacttcatcagtgtgggatagagagttattccagccgtcccctgcaagtacgtgttgctttcttttagcagacagtcaaaggctgtgctgctctacagcagtgctcatggtacacatcttgattccctaaagtgtcttctgcaagagatgggactgaaaagcacagatcttgtgttgtagagcactgggtcccaaacctagctgatgagcagaatttggggcagggcgccttgaaaaacacaggctcctgatcttcccacagaagacgttctgattgacctgaggttgacccaagggtctatgtgtatgtatgtgtatatatgcaaagctctcaaagtgtgatgcacagtttgatttaggaatatccataaatctgtacatgtgcacacacacacacaatttgtagtgctgtgctaggcagtggttctaacgctgagctccacccccagtgtaaaaggttgttttattagtattgacctccctccctccctccctct

SEQ ID NO: 27783 - DNA, 1173 bp, Mus musculus
catttcttgagttcagttgtttcccacctcctggtgaggctgtcaggagttggctgtgtaaccagtaagatcactgtgctcggtctgaacaggagtccaccttgagttgagagtgtgagatggagggcatcccattttccctcaggaccttaggtaactggcatgtgcccactaagaggccccactactgccctaggacccttcctcatgcctttgccagccacgttctcatttctttttgatgtaacaggtatagaggggcttagtgttctctcagacctgaaaggccaggctaaacagtgtctttggcctgtctcagaagaaggagcggaataggggacagtactgtgttggaggaggggtttaacagtttagcagctaaggacctttatgagtacaaagcaccaccttctaataaaaagtgaggcataattctgctgtttcttcccatcttacagggtacctttcaacagatgtggatttctaaacaggaatatgaagaaggagggaagcagtgtgtagaaagaaaatgcccttgagggctccaccctgcctgcccgtcacctcaacgtctgtagctttagtacactcaggaaaagatgaccatcttttgtagaatgtttatacatgtttgcatatttcaatttccacttaaattttttaaggctttaactggctctataaattaaatgagtttgtgctttccttgaaatgcacttattcttattacaggcattttataattttgtatgaatgtctattttctctaaatattttgctttcagtaagtactctccagctctcctgggggttggttggtggaattactctgtattgacaagtacaagttactgcctatgctttgtaccttaggctacaaaactaaataaaaatcactactgtcctagaagcgtgctggatttgtctgtgtgactggctgctgtcagcgctgcttctaccattacttgatgtggggaagcaatcactgactaccagtgtccacatccctttcctgctaacaattatgtatatggataattcacctgcatggacatctgcaccacactagttagtgcctggtgtctgcataagccagaagagggtgttggtttcctacaaactggagttacagaggttatgagcttttctatctgtgctgggttctctggaaga

SEQ ID NO: 27784 - DNA, 1138 bp, Mus musculus
ttaatttcctttagatttctttattttacatgatttggtgttttccctaaatgtatgaatgtgctccgtgtgtgctcggtactccacatatgtggagaccagaaaagggtgtcagatcccccgggactggaatcaccaatgatgatgagccacttgggtgctgagaatgtatgcagatgcaagagcaatgagggatctaaactgctgagccatctttgcagcaaataacaattcatgctacctttttcgttaaaaaagttaagctttataggttaaattacataagcatagaatatgatgatttttggagtctggtcagtagaatttggttcctctcctccctcgcccttaagctgcggagatgctgccattcaggtgcttatctcaaaagtgggtaacactagcgtgagcccagtgctcagagtgacttaaagcacatctgagttgttgtcatggcagtgcttcagttatctgaaacagtagtcagccaaaacgtgaagaatccttcagaaggtgactgattggaaacaccttttctctcagcatccgatatcaagatggatcgcccggaatttctatgatggccctgaaaagaactacgagaaaaccctggctatcctccagattgaatctgaaaaggctgagttacggtaggagagtgggcgggaagaatagcgcagcttcagaagttggatgtctgtgtgaagcttgagagggctcttctgggagaagggcgactctgttgctgactgggggatgatagctcatactgagaggaatgccctccccctccctcttagtctctgtctctctcccctttttaaatggttatagtgtatgtctctgtgtatgtgtctgcctggatgtaggcccatggaggccaaaagggcatccgatgtcctgaagctagagttgcaggcctgtgagccaccagacatgaatacagcaagtacgcttaactgctgaaccatctctcccgccctggaaagaaattcctaaagaagctactctgcatacagcagcccactccacaacctgcctgtttctttccatcccacatcactagagactgccctgtataacagccagaagccatatgtgcccctgtgtacctgtttctagagagaatgtcattagc

SEQ ID NO: 27785 - DNA, 1232 bp, Mus musculus
ctcctcctggtccctttctgcccccagtagttccccatctgttttgtgtcctgtgtatacctgtatacatcagtatggattccacatagcagaggacatgatgccctccagcttcatgcagttgtctgcatatgactgaatggtgtgccattgtgtaaatgtgccacattttctttattattcatctgttgatggacagctagagtgcttccatatcttgggtattatgcacaagaacatggatactcagctatgtgtctaatgagccaacttagacccctgagcagtgcggctatggagtggtgaaggcctctgtcctatggtggttctgctttgttattttgaagaagctctgctgactgctgtagtggctgcatctgctcacgtgtccgtatcctcacagttactattccctttgttacaggttaaaggagcaggaagttcgaaggctgatgcgtgcccgaggtgatggaccctggtatcaatttccaacccctgaaaaggagttcattgatcattctccaaaggcaactcctgacaactgatgattcatttgtctgtccaagaacagtgtgtccctctagtgggaagaaatgaataaatactctgtatttttgctctgatgtacacaagattctgtggctggttcttcatgaggttcaggtgatgtgttctctgtgggcctttcagcttcatctgttgggatttacagggtagtaatgaaacctggaggtctgggaagttgtgaattcctaaagtgacactgttgataagctgctgatgccgttgtctggcaggtggaaggtgcagcggtcctgtgaatattcaggaactgtagtcatctgtcattgcagatggggcttatttgggactacttggaattttaagttcaaaagaaatactgaaccaaccatataaaattatcaggaccagaataaataaagccttagagtttacctgtagcatcttgctttacttttggggtacgtgccattcgtttttagtgtacagacacaaactcttgagacacagtaactgagctcccgtagagctctgttctggaaacactgaaggtgcctccttcctaagcctggccgcatccttctggctgcgtccttctggctgcgtccttcctggtgctggtgttgaacccgggccttcagtaggctaagtacacactcacctcagagccacagctgcactctctagctgtgtttcacttttagatcctt

SEQ ID NO: 27786 - DNA, 1104 bp, Mus musculus
ctgagcaatagagttacaggcatgcacatgtgcctgacatgttgtatgttcaactgtttaacaaacacaaacaccagtgctcaggttagctagttaactagtcagctaatggtacacagttcaagggcatcctctgctatttatggagtttgaggccagcctggggtcagaaacactgtcttgggggtggagttctttactaaaattctgctccttttatgccgagttttgggcatggttgcactgagttattggagactcttttttcctgccatggggcaatcgctgacacaaatcgacatagatttctgcctttgttttcagatgggtgatctacaatgaccacaaagtttgtgcctcagaaaggccccccaaagacctgggctatatgtacttttaccgcaggataccaagctaaacctcacaggaattggcgagaagaagccatacacctttttaatttgccaaaaaagaaaaagaagaaaaaaagaaaaagaaaaaggaaaaataaaggaaaaaagttgggacagcagatgcggaggactacatgggtacttactgcttcttttaagagcttggtcacgacaccttctggagaagaactgggaatagggggttttgtgactgttcagagagagggtgatggaagaaaagacattggctaccagcctatcaataggcactgtctttccctctcttctgctttgggggggtcactggtaagggcttccctacagtgagaaaaatgcccacttttaaaatttttccatataggacatcaaaacctggactggcatttactggtggcattgtgtcttcatttcccacagtaagttctgacctagctatgtgtaccgggacatctgcagtggatgctatttttaattttaatcacatcaaactttatattacactgtatgagtgtgtgtgagtgtgtgagtgtgtgtatgtgtgtgtgtgacctttgtagtcttctggatatctgatggattggtgttcaaaggctaaatagttgctgttaaatgtatttggaaaaggcaggcaaacatctttaaaaattataactcaggaacaattgttaaaaatgagttccccacttggatt

SEQ ID NO: 27787 - DNA, 1164 bp, Mus musculus
cagaactcaaaactttttagtctataaggccctttgctactgccccccccccaaacaaaaggagcaatccatttatgacaacctcttggaaaagtctcagaatgcctctcagccactcaaacccacacaaatattttgaaatcccaagtccactgttgctagcccagatccccagatacatgctgccaaagctgtctgtcctacaaagggtgtttagaaagtccgtcttcatcatcatagatgccgtggctgctggatctcatcacaggtctttatagtctgtgaggttgccaggagacatggaccgaacagaggatggcattacatataatgtgcttctgcctgttaagtcagtatcccagggaacagaacaaggtctgtgcagtgaagctggtggataggaccacctacccagtgccaccagggtttcctgttgtcctaatctgcttttcattggtggaataaagaccatggccaaaaacaacttggggagaaaagggttaatttaatcttataacttaaggaagggaagtcagggcaggacctcaaggcaagaacctgaaggcgagaaccgaggcagaagcgactgaggagtccttcttactggttcgatccccactgctcgctcagcctgctttccaggaccacccatgctgggctggctcccccaccaaccattaaccaaggagttgctccataggcttacccataggctaattttaatggaaccatttcctcaattgaggtttcctcagatgatcttagctagagtcaaattaaatgaagcaaacaaacaaaacctaatcagcacacctgctctataattagtcatcacccttacagttggtggaaggttctgtagccctccagtgtggtgggatttggtcagcccacactcagattgttccacatacataaaacgcacactagaacgtgaaagcttcaacaagtagtgtgactactgcaaatgatgtgggatacttgattacatgtgctggccatttaacatggaaatctccactgttgtctggtctgagcatagctagtgaataatttagaggtatggctaaggccctcccgttagtgttctgcactgagaggtccaccgtgaaatcccatgggtaagacaggaacctgcagaggctccaaaatcggagcaacatg

SEQ ID NO: 27788 - DNA, 1149 bp, Mus musculus
tcagggtgcttagctaatgaatagagacaaactacaaattgctgggaccacttttctgggactaggttttcaaaataataatagctggaatgtaaaaaaattaggcaatgaaagcagatcattgctttgttaatcagattgaaagccatggtaaaattgactattaagtctcaacattgactgaagagtaaatttctgttcatttgttcacaggaaacaagattatttttggcatgaggttctttttattaactattccctctgtttcacctttagtattttgggagagtgactggagagttcttggtaatattgatggcatttgcaatagtagcgtcagtatatatttgaataagtaaaagaattagtcttgttttctggacacaggtgatttgttgtgccatcttagtagttctctatgaaaagttacatctttctgatttggttaaattgaacattttaaatggctttttaaaaaagcgattatagggctggagagatggctcagcgatttagtgcactgactgctctgccagaggtcctgagttcaattctcagcaaccacatggtggttcacaatcatttgtaatggggtccaatgctctcttctggtgtgtctgaagacaatgacagtgtactcatgtacataaaataaacaaatcttttttaaaaagtgattatatatttataaggacataagttctgatattgtcacaaaagaaacttcctgacacacacagggataactgaaacttcagtgtgttgcaacaggaaatttggagttttcagtacctgtgtagaaccattaaggcattttatttcaagaactgttgtatattagtgcaagcagtggctgataatctgtgcaatcttatccctgttgctttgtgtttagaacagttaggtgctgcataaggcagttattattgataaaagctgctgtgcttggctaaggacaaatttttttgttgttaaaaattagtttcactatgtagtcctccatgctgaccccttaactcatgattcttctatgtcagtttcccaaagtgctgggattacagctgtttactattaaatgctcaaccacacttcttatttttcattttggttttttgagacagggtttctcagtataaccagccctagctt

SEQ ID NO: 27789 - DNA, 1106 bp, Mus musculus
gatcgaggcttttgatcttaaattataggtaaaaaaggaggggatagtcagcctaagctatctcagacagtagaaacttaggcattaatctcactattaaaaattaattgtgctttaatcccagcacttgggaggcagaggcaggcggatttctgagttggaggccagcctggtctacagagtgagttccaggacagccagggctacacagagaaaccctatctcgaaaaaaaaccaaaaaaaaaaaaaaaaaaaaaaaggaaaaaaattaattgtgtaagaataaaacaggagatagtggtggagcactatcccaacagtatttgcttagattgtttgaattgttttagttaccaaaatgaggatgattataagtttggtatttatgatatttaaaatcttctggaagaggtcaagctattaatttaattcattctatatccttaatgatttttttgtaactggaccaaagacatgttattttgggagagaggctctgtatttgtgttgagagtaaaggagaaaaggctctggaccccttccagaatgatatggatcagatatggcaggggacgaccccctgaggatcctgactactgaaaagaaagacagcagcaggacaagtaacttgatctgctggttccccaacatgggggaaaaatgtctctagccaaaactgcagctaaatttagataatacatcttgttatggaatccttaagattcttctagccctccttcatagggcatggctgactgttcaattataaggaactctttcaaagtggtcggtctaagcttgctatttggttttcctcctgctggttcatgtttgtctttagcttgttaatagatagtaagacattgaaatattgctcttttaaactgctctgttatttaacaacagttatacttcttgtctttgtctttttcaagtttatcttgacatacacttgagtacagattttaagggagcatgaatagaaggatttctttgttttgctttacccaagtaccaagtgcagtgtgtgtctggctagtcttgagtgcatgttttggagttgtataagtgttgaaaaatatttactaattggctggtgggttaaa

SEQ ID NO: 27790 - DNA, 1189 bp, Mus musculus
cacagctacttttaaactattgcttgcttgtttgtttgagactggcatgtaatgcatgattaccctgtcaccgtgcccaataacaattttcatactttaaaaaagacttttttctcaagcactgaggtacgtcccagtactttgtttatgctagggaagctatcagcatactgttttgtttttttaactgataactggttccgtcagtgtaagtgagttagtattttctgactgatgtgttcctcttaggacagtaatcttaatgttcttggctttcatacatgtcacctatgccactttcctcttttggtgttagctttgtgtgactagcccacatgtttatgcatttattagttgttgacatggattttcccctctacttcttgattatgttgaatgatggtgaacatcagggttggtgtttttttttgtttgtttgtttgttttgttttatttttaagttttacaaaagaaaaattcctaatttctctcatttccctagtgcacaaaacaacttgcagcagcttttcatgaagaatttgttgtgagagaagatttaatgggcctggcgataggaacgcatggcagtaacatacagcaagctaggaaggttcctggagttactgccattgagttagatgaagacaccggaacgtttagaatctatggagaggtaagttgtctgcttcttgcctttggtcacttaatttggcattttagcagtctgttccatcgtatttttttctgtcattttatttttcagttttgagataaggattcacataacacaatgtttatttctgaaatcttgagaagtagccagtgaggcctccgtcgttaggaggacaggctttgaactaatactgcctggagtagagtcttagaagtcgactgaactttgtttccactgtataatgatgatggtgtttaccttatagttcgtgaagatttatttttgaactatgtttaaagaacaagaaatgaaagtaattaccacaatataaaattgaaataatcttatcagtaggtctttttaaaaaatgtgtctctggacaagcaaagcaactttgttttatgtgcaggatgttgctgtgtagaacaagctagcctcacagaggaaaggtgatctcctcccctgagctcagtgcatgactgcgctgctgtactgtgactgtgtccagcttaaagc

SEQ ID NO: 27791 - DNA, 1145 bp, Mus musculus
acaagagctgcttttgaaaatgttgttgtgctctttaagtcaattattcatatggatgaagtgctaagattttggtagctattctatagaacattatttaactgaactaggctttctcactagtaagaaggggttcagtggtgggtttgtaaaaagaaaatcaagttttgttcagctgaattctacaaagataagccttgttttttttttttttttgttttttgttttttttttttggattttgtagtattaataatgaataaaaatccctgatatttcagaaatacggaaattggatatatttgtagttctggttctttagttatcaatgcaaagaggggaatccatgctatgtacctttgtccactctcctgtcttgtttggcttttgtgatttgaattgcttatgtgctctttagaaagcatgcactagcaggagcgactttacagtgctgaacctgcggtgcttctgttgcttgtcatgtatagcaataccatattgtcctcaagtacttgatgggttaagcagtcttttgaaaaatacatgttcttaatccaaatgaaagaggagaactgaggagtgagaggggatgaggaccacttggtgggtaagttccagagaggacgatagatcactttctgtgtttgaggcattctagtatttgatcattcccacctgtccaaaatcagaacagtatttcttgaacactgatttgaatgacaatggatcaaaaccattcacttcttagaagaagcctttaatcacttctttactttgtcccttcaacattatactcaatgctcaatttatactacaggtctgcttcagtttgtcaatatgctctggaatttaaactgtggaaatgatcatttaaaatattgaaggtctctggtgggactaagtaagacttgaaggtaggtccccgccaaggacccagaagggtgatggatgcttaactcaccactggtgtagttccaagaagcaagtgaacaagattgtgggggaagggcttagggcccatcaacctcatttgttttctgaaaatacattgcgtatttattttagcaggttggaggatgaagctgctgttaagcttcattgtgtaatctgtgcaggttgcttttgacatgctgctgctagggctt

SEQ ID NO: 27792 - DNA, 1167 bp, Mus musculus
ttctttatgaaaaatatattagtgatctttgcacatgcttttatatcattctatattacctctagattatctatagctaatactgtgaaaatgccatgtaaacagtttacatttatttgaggcagagcaatagggaaaaaatagaaccatacatgtttaatatacatcccttcctttgtaattttgatctcatctgaagatgtagagagactatttttgtaaacaattcaaaggaaacattaggaaacttatgaagtaagcataatttttgttttacaaattttcgttctcattaaagttttatttaatcattactactttccagataaattagtgttaagagaatttttttataatttcagacctatattttattgggggtattagtacatgtagttcattcagtagatgaagcattcttaactgatgtcctcttaaatgaatatttcttgcctctgacatgaatatagtgctcaaagatccagacagcaatccatacagcttacttgataatacagaatccgatcagactgcagacactgacgccagcgaatctcaccacagtactaaccgtcgtaggcggtctcgtagacggaggactgatgaagatgctgttctgatggatggactgactgaatctgatacagcctcagttaatgagaatgggctaggtatgtaagcacttagggaagagttgtgagtgtgtgtggttgcattgtattgataatggaggaagcctttcctttttttgtatagaattcacaaatggtttttttttttcctttcttttctttttagtgtttactttaaatgagggatatggctgctatcttgggcactcattttcatatctgtcagactatctgaactgggaggattccttaaggtgccctttcataccattaaatcaacctaaatactcagttgatctgtctacaaacaaaacttaactgttttagtccctccccctttaaaaattatagtacatatttatgggggctgcaaaaacctagcatttattaataaggggctttgagatccagggtaatgttggagagatatcttatatttctgaatgatggtggttgtttcaattacatggcagtttgctttattatgagttattaaagccctcttaatttccagagggcagtgctttatgctgca

SEQ ID NO: 27793 - DNA, 1310 bp, Mus musculus
gaagttcctagtttacagttcttttacattacagttacaatagtgcttgtacaagcttgccaaagatagaatacggatcgccagtcttacatcgcactttcagttcctccatttggaattcagaaaggggagggatcctgaagaaatcatatgttaaacatactttgacacctactgtgttaaaaatatatcatcagatgtgccttgagaatagtatatgtaacattaaaaaaagttgctggctataggaaatgttattttgttttcaaaatatggcagagatggggggaggtgggtggggtggggtccctaacgtaatattctttatgaaagcattagctgcttttgttacatttttaataatatgcaaccacttcttcacccgaggaaaactagaatgaagcagtctaaaatattttgcactgaattgtaatttcttcattagtttagtctggaaactggtctgtttaatgtgttttttaaatgctgtttgtagaggcaattctgcagaccactggaaatacatgttaactcatctgcagggatactgggtgatattggcagtgactgttctacattgaggctttgtttggtttatttattaaagtgtacagtatttaaaaatcaaacatagctttagttgaaacactaagctgattagtcatgtccattcagacataacctgaactactgaaaagatcaatttccagaaggtttattctgtataaactacatgtttagtcttcagtagagtacttttcacattttctttctaccttttttttctttttttttttcttcccccctttttttgattttggttgtttgatgtgcaatatgtttttgtatgcaggtagtaaaataaactttgatcttccatttgctgatttttaactttctacttgttatgccaattgtttcaaagcggtaggagtacttacaggccgagaatagatagcattctttgattgcttttcagaagcatttattttgtttctcagatctagtgttaaaatctaaccatttaatcatttgtaatgaaccctccagaatcttaacacttaaggttttggctagtaaatgatttaggaaatgtataatgtctttgccattagagaaacatctttgtattaaattctaatcaaaggcaatttgtggaagatatgggaggcagaagataagcttttcacttttgcctttagttctttattaaaaactatttttaaattatggtaagcagtttttaataggccgataatgtgctttttgagtgataaatgactttgaaggttttcgtaccagtgattgaa

SEQ ID NO: 27794 - DNA, 1151 bp, Mus musculus
taaaaatgttgagcttgttttataaatgaaggataattcacatatagtttacaaacgggccattagatgtgtgtagcttgtcacgtacattctaattgatattaacatgcacggatacgagattttttttaaaaaagtctagatagtagaactttgaagtgagtgatgtacagtgaaattcttgcactctgtatagaacaggtatagcagattaaatatcaaaacctcactttcaaagtattgaaaacaatttaaataattggctttttaattacttggttctgtgtacatgggttacaaatttaaccatgagttgttgtaacaaagagaattttgtgtctgttgggacttgaagtgttttaccattaagctacatccctagcccacaaagagttttaatttccaggctgggaaacatgacactaagaaagtataattctttttattttcatccataatcagaattccccaagatcttcttgtcataaagattaaactatcttaaagatcaagtacagctgagacacttggataggacttagtaaggattcttttttttgttgttgttgttgtttttttcgagacagggtttttctgtgtagccctggctgtcctggaactcactctgtagaccaggctggcctcgaactcagaaatccacctgcttctgcctcccaggtgctgggattaaaggcgtgcacaaccacgcccagctatttttgttttgttttggtaaggattttttaagagctgagatttcattacctgaaaataacccctcagtgacttaacccaaagaggcactaaagaattgtaaggttttgggcttttgtttttcttacagatggattagtcagttttatttagtgtcagtaaaaagccacctccccagggctaacatgtcgatttaggttggcttctggtgttttggctgccagcctggttaaattttccatgcacatactacacaaaatgtgaaatcagaaaagtgtattctgaaaaggatgtgtgcagctcaaagcactgatgtagacaccatgggattccatataaacctgaactgagtgaagtgggaatgcaaataagtttctaatgtggaattcagcagcatgtcactccagtgggttcttagtgatttactttaggtgctg

SEQ ID NO: 27795 - DNA, 2449 bp, Mus musculus
gcccgcatgtataacatgatggagacggagctgaagccgccgggcccgcagcaagcttcggggggcggcggcggaggaggcaacgccacggcggcggcgaccggcggcaaccagaagaacagcccggaccgcgtcaagaggcccatgaacgccttcatggtatggtcccgggggcagcggcgtaagatggcccaggagaaccccaagatgcacaactcggagatcagcaagcgcctgggcgcggagtggaaacttttgtccgagaccgagaagcggccgttcatcgacgaggccaagcggctgcgcgctctgcacatgaaggagcacccggattataaataccggccgcggcggaaaaccaagacgctcatgaagaaggataagtacacgcttcccggaggcttgctggcccccggcgggaacagcatggcgagcggggttggggtgggcgccggcctgggtgcgggcgtgaaccagcgcatggacagctacgcgcacatgaacggctggagcaacggcagctacagcatgatgcaggagcagctgggctacccgcagcacccgggcctcaacgctcacggcgcggcacagatgcaaccgatgcaccgctacgacgtcagcgccctgcagtacaactccatgaccagctcgcagacctacatgaacggctcgcccacctacagcatgtcctactcgcagcagggcacccccggtatggcgctgggctccatgggctctgtggtcaagtccgaggccagctccagcccccccgtggttacctcttcctcccactccagggcgccctgccaggccggggacctccgggacatgatcagcatgtacctccccggcgccgaggtgccggagcccgctgcgcccagtagactgcacatggcccagcactaccagagcggcccggtgcccggcacggccattaacggcacactgcccctgtcgcacatgtgagggctggactgcgaactggagaaggggagagattttcaaagagatacaagggaattgggaggggtgcaaaaagaggagagtaggaaaaatctgataatgctcaaaaggaaaaaaaatctccgcagcgaaacgacagctgcggaaaaaaaccaccaatcccatccaaattaacgcaaaaaccgtgatgccgactagaaaacttttatgagagatcttgggacttctttttgggggactatttttgtacagagaaaacctgagggcggcggggagggcgggggaatcggaccatgtatagatctggaggaaaaaaactacgcaaaacttttttttaaagttctagtggtacgttaggcgcttcgcagggagttcgcaaaagtctttaccagtaatatttagagctagactccgggcgatgaaaaaaaagttttaatatttgcaagcaacttttgtacagtatttatcgagataaacatggcaatcaaatgtccattgtttataagctgagaatttgccaatatttttcgaggaaagggttcttgctgggttttgattctgcagcttaaatttaggaccgttacaaacaaggaaggagtttattcggatttgaacattttagttttaaaattgtacaaaaggaaaacatgagagcaagtactggcaagaccgttttcgtggtcttgtttaaggcaaacgttctagattgtactaaatttttaacttactgttaaaggcaaaaaaaaaatgtccatgcaggttgatatcgttggtaatttataatagcttttgttcaatcctaccctttcattttgttcacataaaaaatatggaattactgtgtttgaaatattttcttatggtttgtaatatttctgtaaattgtgatattttaaggtttttccccccttttattttccgtagttgtattttaaaagattcggctctgttattggaatcaggctgccgagaatccatgtatatatttgaactaataccatccttataacagctacattttcaacttaagtttttactccattatgcacagtttgagataaataaatttttgaaatatggacactgaaattatgcctgagtctttcatttctttgtggctagcatgcttatacataacttcttggggaactggataactgttcagccaccaagatcttgatgttaccagcaatgtctgttagctttaactgcagaagaaaaaaatggccgaatgattaataacggggaactgaaatgcgttgacatttctagaatagaaactagaagcatatattgtaagttcacccccctccttccctgagcagcgtgaataagcgcgatgtgggcttaagctcgctttagcacttgttgccagaacgagtcaattctgaaaattttcgtgtagcttagcagatgagatactgcgccaaatcagaaccaggttggctgggttggttttcattttcttcacaacacaatggccctt

SEQ ID NO: 27796 - DNA, 2156 bp, Mus musculus
atcctgggactgccatgttagagatggagagccattgttggcttcttacctccatgcccgtaggcatatgggcacatacaatagatacatacatgagtgtcacaaagtaagcctggatgggtggggatggcgcatgcctttagtcccagcactcaaaaggcagaggcaggtggatctttctgagtctgaggccagcctggtctacagagcaagttctaggagagccaaggctgctcaaagaaattctatctcaaggttaaaaaaaaaaaaaaaaggaagccttttacaaaacaatgctgttgatcgtctgtgtctcaatttctcgtccagttgctgagacaaacctcccaataaaaaagcaagttaaaggacaaagggttgattggacacacgtttcccgattacagtcggccatggcagtccagacagcaagaatttgagttgttaggcagcagaggaaggaacccatgccgcccagagcggtagtccagtcccacagcccagggctcactcacagtgaaggtagtaatccctacaggcatgcccaaagcccctctcctagggactctaggttctgtgacaagcaagattctagatctcgacagcaagatgacagttaagacaattcgtcacaattacaaatgcagatttattgttcagagatgcgtctctaaggtctttggaacaacaaaaatgtgaagccaatctgaatatctaatcctgaaaaatgagaaatttcaagaatttattatctgagggtgtaggagctattatttataccgaaaccgggaactctggctctctccctctcctcagactccagggcagcacggggcactttgaagttgcctcccgtctcctgaccagctttgctcagtaacctaaaatattgttttgttttgttttttttttttctttttctcatttcatagaggcttaggctcagtgaggtgtactcagagaaaagtgtacaaaaaaagaagaagaagaagaagaagaagaaggaggaggaggaggaggaggaggaggaggaggaggaggaggaggaaggaagaaggaagaagaagaagaagaagaagaagaagaagaagaagaagaagaagaagaagaagaagaagaagaagaagaagaagaagagaaaaagaaaaaaagaaaaaaaaagatagttgtagttggtacaatcatcaaggcacacacacaaaacccactgtagagtcggtgagttgcaattcagcatgcttcagtgggaatggcacaaagtgtgggtatggctccgatggtagtgtacccttcactcatgtcctagcactacattaactatggtggcatgggtgtgttatcccagcactagggggaagccagcctgggctacatgaagccctatctcaccactattaccaccatcaccaccaccatcaccaccaccacaagcacaacaacagagagagagagagagagagagagagagagagagagagagagagagagaggtattattccattgcctgccttcattttaattaagcattgattgctgggactcttgggagtgcttggacccgtggggttctcatgttactatcaaccaggactcatatgctctatccaaatcaagagtcccttttgcttccagccggcgcacgtagggatatctccaagtttagttatttactaatatgccttttaaaagtcccaggtccttcctctcctcccacacctccacgtttgggtctttcacagagactctgagaacttgatgagaaccgcccttgcagagggaataacctgtaattgcaggttctttctacacagcaatgaggaagaagttggcatgattttgttttccacagagttgacggttttgttttgttagacttctttggtctgaaatgatttgttgattcgctattgtgtgaaccaggctcagtcccattgcacttctgtgactgttggggatgggggaggaaataattggggagtggaaagggtaattggagtgcaggccaagagacgtgaccttgtgcgagttctgtgacccatgtgctacgtgaccctggaccagtcattgcagctgctcagacctcagtttcctctagtgtgacaccaggaggttgagtaaggttagtccttaggtgggtaaggctagcttttaggtg

SEQ ID NO: 27797 - DNA, 1175 bp, Mus musculus
gctggaccgagcagggaggactagccttggccttggaggttttgtctcaagcatagctttataatcatcactagactgcctcatttacagggttgaacttctcactgtgctgccaagttcacacagtaggggtttgcttggtcagaggttctgcatggggctgacggtttcctgtatagagagagaatagaaggagtggagatcagtagagactctgggcatggggatgactaatggaagtttcttatgtgtctgtagtagagaacttccttcttaaggccaaggataggttatttttgcagtgctgggattgaactcatgacctcgtgcatgcaaggcaagtgatcgcccattgagtcacatccccagtccagtcaggattagctctgtgtactatagcaggaacccttttgttgagcttagtattaatcacaagattgcttggctagggcaagatgcaaggccattggcagctgagagcttggggcctttttcatcttttgtttcttttctttgtctttgtttcttggcggggtctcactatgtagttttagctgacctcaaactcatagatatccacctgcctctgtgtcctgagtgctgggattcaagatgggtgccaacattttatttttctacagctgcccacggcctgcccacagttgtagctctggttaggccagtgtctcaccattgggcagcatccctgttatcgtcctgggttcagtggcgattgaagaggcttgccttgcctgcagcagaaagtccacctctttagtctgggtttacacttagaccccagtaaaggctatggacaccttgatgtatgtcaacagctttagacacactcctgaggacaccatttgtatctactgcacagcactgcagtttgaattgctctctgtgagccttgtcttactctacttaggcctctggagacacgatttatgtctcatttacttcccctgaccatttcatagaatgacagacctgggatttgaacccatgtttttccaaagcagcattctttttttttttttttttttgacacagggtttcatgtaggccaggctagcctagaacttcttatatggtcgaggatgaccttgaacttgttccttcgtcttctgtttccctgggattacaaatccatacccagtgctaggactgagccc

SEQ ID NO: 27798 - DNA, 1175 bp, Mus musculus
gaatactcttttttagactgagtgccttaggcttcgagaaaggtcctttgaggggatagaggaaagacacttgaggtgagattcccatagatgctaataagatgtggaggtagagggaccgtgggtaccaagagatccataggaggggtgtgtgatgtaagtgcagaggaacaaggtgaggggctgggaatgcatgtgatgggtttcttctcatgatgtttgctcttaagtgtttgttattcacttgatgttcatgttcttccagaattcatgctgaaatctagtttcattgtggtggggctaagaggtgaggtctaggcatttgctaagggatctggcagctatggatgctttggacaaagttgtaaagcctaaaactaaaaaggctaagagattccttgagaagagagaaccgaaactcactgagaacattaagaataccatgctgattaaaggcggaaatgcaaatgcaaccgtgacacaagtactcagagacgtgtatgcactgaggaaaccatatggagttctatataagaagaaaaatattacaagaccatttgaggattagacatcactggagttcttttcaaagaagtcagactgctctttattcatgtttggctcccataacaagaagaggccaaataacctagtaataggttgtatgtatgactaccatgtgttggacatgattgaattaggtattgagaaatttgtgtctctaaaagatgttaagactagtaagtgccccgagggaacaaaaccaatgttgatatttgctggtgatgattttgatgtaacagaagactacagaagattaaaaaaatcttcttattgatttcttcagtggccccacactattgaacgtccagctggatggattagagtatgttctgcagttcactgcactgaatgggaaggtttacttcctaagctataagctgctgttgaagaaatctgggtgaagaacaccacgaattgagctagaagagatgggaccatcactggacctggttatgaggaggacacatctagcatcagatgacctttataaactgtccatgaaagtgcccaaggctctcaagccaaagaagagaaagaatatctctcaggatacttttggcacaacatttggaaggattcatatgcagaagcaggacttaagcaaactacaa

SEQ ID NO: 27799 - DNA, 1292 bp, Mus musculus
atttaacatttagccataggtttaagtgatgtaagacatctacctgaatccaggtacagattccagcgttcttcagcacatagatggacacaaacacccaggtgacctgtggatgtgactctcagaagatccttctcagcaagctgaacagcagctataagcagaatatgggacattaaacttagaagttccagacaaagcccttcctctcaagtacttggaatagctcaatacttcctgaatggattgctaaaacatcagttttatgttttcttttttaaatatcctgtccttcaagtaataatactgttatgcttgtgataaaactgaattattaaaaatataatacatagaaaatacttcctgattaaaaaaacttattagatttaactgttacagagttagtttgttagattgttttcaagcttttcttaactctatctagcagcccagaagcacttccttcatgcccagcgacaggctgagcccccagtgtccccgtgcatcacgatgctgctctgacttcttaccttaccctcactctaccctcaactcagtagatgagtccaggttgccccatcagacagctgccaccaccttcctcagttgacagtcagggtttgtactgttcagggatgcttcaaaagtcagaaacagaattcaaagagtccttccagttggaaatagtggtatttaacctgaactcggccgcactagcatggactgcagtgcccacatttgttggtgtggagcacataggggagcctcctccctgcagggacgaagcttgagcttgtgggagcacagactgggaactgatgagagccttctgcctaagccagcaccacccagattccaggttccttcagtataaatgtatgtcccttctgtgctaggtagttcatggttcttggtcaggtaagggaaacaggttttaagtagttggtcaacacaaaagtgtgtgtgtgtgtgtgtgtgtgtgtgtgtgtgtgtgtgtgtgtgtgtgtgtgtgtgcgtgcatgtgcgtgtggtttaccttactgggtgtttgctttttttttaagggagagagaaatgaagttgggtgagtagggagaatctttgagaagttgggggagaagaaagaatatgaccgaaatacattatgtgaaaaaaatgacagaaattgtagaatgccggtctcaagctctaccagctgagacttgagcacagttcctgaccgtctaaaagcctgtttaaggctttgatgtattatttcccaaagtacttacttagtcacagaaacccctcct

SEQ ID NO: 27800 - DNA, 1149 bp, Mus musculus
gttcagattgttatttcccagtcttcaagatagttttatactccactgttctcagttgctgggcatttgttcttcaatcataattgtaggaattccaaagatgaattagagttcactgccttcctaagtagttggcataagtcaacttgaccatagcacattatgaagtgcaaaataataaacctttgcagacagaaatgcctgtctattcatttagataccattggttatctaggcttctgattagaacaggggcgtattaaatgcatatattattgtactctaagagtgctgtaattccttattgtagtaaactgtgtatgtttgtatcagtccctttcagttttaaagtccttgttttgatttctcaatggctttgtgagtccggatctgtggacagctaactggctcttgctccgcagcttgctgaagctcattccagtgtcaagtgcttggactccgtgtgctgtttcccaggagagaccccgtgtgcgtctgttggaagaatgctggagcgagtcataggacggtgtagtcccaaccatatcagcaggtatgacgtttatttcactgcgtagcctgggctgcagatttgtcctgtccaagtgaagcagggagcctgctgttgagtcacagcaattactctttgatttgagatgtcactttgaagctttgtggtgtggtcctttcactcaaaggaagagaaggcatctgtgaggagactctctatcttgtgaaggaattactggtttagcctttctaaacttcggtgaataggtgtgtgtgcatggcacttttccttggcatataactgttttcactattatttctcctgtactcctgttttattctctgctaggggtctggtgtttgttattcctttcctactgctttttgtgattacaaggaggggagggagggggtagtagaggcaggccatgaacactagaagagaagggggaagagacgagaggacagagcagggccagggagacaagagcaagagaggagcaagagagtgaggagtgggcaagcagccccttttatagtgaatcaggcatacttacttggctgttgccaggaaactgtggggcagagcttagacaaaatgttaacaatatgacccaaaatatttccataatgtagtag

SEQ ID NO: 27801 - DNA, 1809 bp, Mus musculus
ttggtttggtttggtttggtttgatttggtttggtttggtttgggttttcaattgatcattgattatagtgagcccaactttcctcttattgttccattcaggttgtggaatgcatcggatccattctataccaatgacaggagcatcttgactctctcgccaatggactcatctacttgttaaagggacagtaggactttgtggaacaagttcacttgtcctcaggtttggggtcaccatccagttgtaaaaggccagttactttctgaaatctcttgaggaattgacactttctcagagtccatgggaaacaggcagttatatgaacccttctcctttctctttaatttgaatgtgaatatattaaaatttggagataaagagatagtaacaatctctttgtctggtttgtcccttctgatcatgggactcctggtggcattgcagcctttgctgaggccactgtactttaatatcaaggtagagaaaggggtcattcttggttatgtgtagtttaagatgagggtggtttgggactcttctatttaaatctgcttctgtaaattttgctaaagatttgccttgagaactctattttttttattagattatatttgaagcttttcgtggggaaagttaatgtgaatatcaaggaattttggtccttcagtgacctctgttaattcattagtactttttaagtcacagagcaactaggagagcacgtttctaaccactgtcttttgcggtgtgggtaataagcttatactgaccccacttctttaacgatgctgtaacccagccagtgacgctaatcctacaagtgcaaagggagttttgcatctcatgtccaagtcagaattagggccatttactagacttcaaattggtgtttgctaatatttttgtggccaagtatgtaaacttgtagtgggtaaattcaatacttttgtcatattaatttactgtatctgtcttatcttttgcatgcttcaacctggctaatatatttaaatccaccgcatctctcctccctccccccattattactttcctctctctccaaagactctgttcatagttttataacaatattgtaaagttcaattgtatcaataaaaaaaaaaaacaagtttggacagtatttaaatattgcaaatatatttaattatataaattaaaatataagccataatgtctttctttggcccacttagaattgctcttgacttgctgtaaaccaaccttcagaataaaggacttttgttaagaaccctgttgttgcatgttatctaattgaaggtagactgccacaatacagagaattatgctaagtcccatcgtaaggtatattgttaggtatggttattgaatgaaaatgaaacagagtctaaaatgctaaatttttggcatcaaaagaattttatcagcaataagttaatgtgctatattgactaatcagatacacactagtcttaattccttaaatctcaaactctagtttccaggtaatctatcaccaagactcactattatttgttttatatataaataatgttttaagagttgtgagtgatttttaaagaactactcccacctagttctaatcacaattctgtccacacctaagatcataagaaggagttgtgagctcagtcagcttctcttgagaagatggccgttgctggaagatgacgatgcagctttccactccctcctcctgcatgagtgggacttctggccctcgctgaggctaagtcaagaatcacagagtgagaatgaagactgactgtgtgttacagattgtt

SEQ ID NO: 27802 - DNA, 2343 bp, Mus musculus
gtgtttggttgggggaatttaattttcctggcaaactacatgtactgctggtgtgagtagaatacctgatataagaaatatcaaaataaccaacacatgaaaaaaaaaaaggataatctggggactccctgaaatatgtcttgtgtttcagacgctcagaaaggttctacagaacaggtctgtggttatcttacccatgtttatacagtgtcctgcagtgaacttttatttaaaaaaatattgtaatgagatcagatgttagactccacactcgtgcatcacacaccacataatcggatttcattgtgctctgaaatacttctatgccttctgaataagttaaactatttcatttgttttgaatgttttggattgctatacaatataatattctaaatttaggcatgagggtattaggtttgtttgtttttttttttaattttttgtcatcgcactatggaacacaatgcaattcacttaatttataagaagatagtaagatttagattttgaaaatggttgtgatgagccgtgaagttcaacctttctcccatggcactgctctttgaggcgtggtccagccatgttggctgctgactgttgagatggcttactgctaaatcactgtggttgccaagtctactccagaagcagagattgtcagacaggcgagcactggtgcagataccaatggcttctgttctataaattatttgacttttgactgtttttgtctcacttgcatttgctatttccacatcacagcagaatgcagtcttgattggttttgttttttgtttttccatgacaggactcatgccttgctctcctgctgaaaatgcttgtttctctgataacatactgacatgtgaaaggggtgtattcatacatatttccatgaggaagttaaaatgatgaactaaatgttgggtgactggtcttcaataggaacagattttgcttcatgtatccaggtcctctgcagggtaccaaggaatgttcttcaggatagcggaacaatttatgcagatatggaaatgattaaaactgctttttagtcacatgatttggaaaatgcattgaaagcttaccttacagatatatcattaatccaatcataactttaatttaggaatgcatttctaccaaaagaagcttagagtaaatttctattcacgttacagggattggtcattaaaaggaaaagaatcttgctgttttcagtatttcttgatttcattttttgtaaatataaagaacttcaattatgaaaaaaattaaagatatatgtatatatatctttaaaagttttacagacctatattgtttattccctacatggaacattttgagttttggtattgttttcagattgattgattcagatatgatttgttttcaaatgagactccattagcttctttccctgcctcataaattttttttcataaaaatcttgatatttgtgtgtggcctaatgctttgggttttacagattttatttttaaatgcaagactttttaacaaaatagtgtttgtcatcagtttggtactaaacatttacaattactgtgtaattataaacaaaaatatataaagcttttattatgtagcaaaaagagttaaggttgttcaccatgatggcatcttagaattaaacaagacttgctagggctccaagagaaaattgatttaatgtgtttattctgagggtgactgtctggttctaggaaatgttttgtaatacaaatgcttaccctattgggggcggggcgtcggggagtcttccagaggaagggcacactcactcacacacagccagctattgccggcagaggatcatggggttcagtcttcgtgtgggtcaggtctccaagctgattcttttctttccagacagaaccatagggagagtttactttttgccaaatgtcagaacaggtacacatttttaaatgtaatgctttttaaatagtaaactgtataaaatgagaagtacccacatataaaaatacttgaggtcaaggttctcttgagtgactatcatctgcatatctctgtaagttcaagtgtgtcgtttccaatccctgtcatattacccacagaggcaataaaagcttcagtaaatttgccatgactaaatcttctcccatattatttcagtgttttagtgtttcacataactagactagacttgaagacttttcatggccgagcgctgtaatggcacatctgggggaagagaagctacgccacgtgtttgctccgtaatgtttacaatgtgctcagctgtgttgtttatttaactgcgttagttgtatactgcggcactgtgagtgcacc

SEQ ID NO: 27803 - DNA, 1161 bp, Mus musculus
tgatgacctaattcagtgccctagctttaaatgacaactctattcttacgactcagatttattttttcaacttgagttcttcccctaactccagacttagtctacctttctgctctatatctcctcttagatgtctaataagcatctttaataagcatatatgataacctctcctggatcccacccagttctgcttctcccaacagcccgtttacaatagataatggctactctgtgattcaactttttcaatacattctccagtgacacctttgattcgtcttgttctcattgaatcctatagtaagtaaatctttgtttatcttcaagttacattcatatctgaccacttctaacttcactgctacttcctggattgagcaaacaccagctctcggagcatttctgggccttgactaggacaatggcagtggtacttaagcgtctgagggtagagagtagccgagttatccatgccagtggctgacatatacacttacttggacccgagtctgtcccaggggcaagtgggaggatgaatgggtgaggcttgtgtggcactggcagacttagttacagcccctggcttatataattggcttctgcagtaggattacctgaataacaggttcttttgctttatcagcttaaaagatgctaattgttatttcactcctcacccacacggcgcctcattcagtttttgtcacttttaactagaggatattttccttctagcctccagtatccaccccccccccctgatattttttgttttaggtttttgggttttgttctgttttggaagattgtatttgagttgttgtttttgagactgggtcgtgatgtgtagtcttggctggcatggagcgtgctatgtagaccaggctggcttgaactcacaggagtccactggcctctgccttccaagtgctgggattaaaggtgtgcctcattgtgcctggactcctgaagtctttacccttttaagtatgtctgaataccagttatttgccaggttgcctgttttgcctagtttgcccactgggatcgacatcacttttctcccacacagccctttgacccagactaggtgacaggcaagactgtgaaggtgatggagtaggagtggtctgagcctccatgagtgagcagccttgt

SEQ ID NO: 27804 - DNA, 1172 bp, Mus musculus
tgacaccctcttctggtgtgtctgaagacagcaacagtgtacttacatataataaataaataaaaaaaaaaaacatacacactgtccagtgtacacataaaagtgtacagcgggcgccacactggagaagtctttggcaggtctccctaggatttacacaactaaattgtgtagcatagagcttggctgtctccccccagaaacatatagaattgtgtttactgtcccttctacaacatggttaagatgacattttcatgatgacacccacaagaagcatctttaaccctgcatgtgtattttttccttcagtcatgaaacaaaactagagagcccagatagcaaaaaagaaagaaaaaaactaaaagtatatattgagttggtctgaggatcctgacttctgagtctactgctaaaaagactgcaaatatatagatggtgcatgctgaatccacacttttatacaattaaattacatttggggggtgttgtgtgccacagcattcatgtgagagtcagaggacggcttccagcccattctctctgtcatttcgtgttgttgaactcggttcatccggctttgctgcaagtgccttcacctgctgagttatctctacgatcattggattttagggtctgggactttcctggcctctgccacacagacccctgctgttttctgcccttttttaaatcagaaagttaggcagaccacctactacaattgcaccacagtgcatataatctccctgtgacttgaagacatgaccatatttaaaaatgagaatgtacagaagatgtagggagacatttttatgttgagtgttcaaaacagactccataaagctaaaggccttctggggtaagttcttcagatcatgtcaagtgagatgtggctgtgttagaatcctgatggtgagtgcagaatctgtaagggcagagaagcactgacatcatactctgatgtgatgcattgtcagaagagagaggatgataatgatgggagataagcagcatctagttcagagttgtggaacagccgcctgtaagctatatacggggaatgccgtcttcttccctggaggggaatcagttttatcacactgtctagggtctgtaccagggctctttctttctctgtgttggcctagtcaacctagtcagcctggatc

SEQ ID NO: 27805 - DNA, 1607 bp, Mus musculus
tattgagaataaactgatttggaaatctttgcaagtcaaagttaatctgagataaaaatatgaatgatgtcgtttagaaactaacttgatttgttttattgtacagtggggagtaggaaaagattttataaaactaaaatatttcagggaaaaagaccttcaaattctggcattgattgattattctaagcaaccaaaccaaactgctgacttgttcataaataaccaaaagtagacaaactgttttcaatgtagcagaactcattcggctctcagatgttacagtagtttatggagacattttatttatcaactttaacaaataaggtcttacatgagttgggaagcttgtgcaacagaaaagttttccagaaagtttattcaaagcataatgttaaagacaaacagtgtatcaagaagttcagcttgtaagatacccagagctgttagcactgagtatgtatacacacacacacacacagagatccaccactttagcttagttagcagttctcttcttcttcttccttttcccttggcctttacttggtgccttctggtttgcactggtctgagctctgtgaatgaagtaatataacagctcactgtatcccatctgtcctggattgggtcactgggactctgaaaggtgccccattttatagaaccagcttttaatgtatatttgaaagaggccagaaatttgttaccttattttctttgggttcttctctggctccaaaataatcatttcttcttcttcactatctgatagcactataggggcacctttggaaaagtccaaaaaaggagtttactgcttaagcacatcagaggtcctaacgctcccatctccaggctaagggagctcccaagctctactgcccggaggctgacactctttccgaatcttaccctgttctaagtaagtagctccttgcagctctgaaaatttgtaaaaattgatgttttctataaactctttctttcctttttccccagaggacatgtaggccagaatgctctaattcttgctaccaggactgcccatgaaaaatgtagaaaactgctttgtttgcccatttttctcttgaacagtaattatatatgtgtgtaaataaagcatgcaaattaaccctttacccatttggtgggctgtgtgttgtctcatctttattcacatgttttaggaaagctctaccttcttcactgtcctacttattttaggtccactttcattgctcagggttcttaaaaccacaaacaaaaagcctctatgaaaagagatatacaagtgcaaagatatactagcaccgtaatagtgagaagataagaaaaagcattactgatgattaaaccaactggatgattctctatgcagcatttaatagtcctaattaattaggatctttaatttactcatttatctggttaaaccaacattgttcccctgccaaaacaataccaccaaaaggctgtaagtagcaattcccttctgttaacagtgcatactgctatgagttcagggaatagcactcacatgggggcagctcacaattgcctgcaactccagatttgatgcctgactctagccttcaaggcactca

SEQ ID NO: 27806 - DNA, 1178 bp, Mus musculus
atactcatacatataatgtaaaaataaaggttacatttttttgagtgattatgaaaataatagaaaactcttccatgtgtgcatgattaacgtaatcctcagtgccactccatgagataagttattcttatagagaagggagcagaccaggtttcctcaggaagattaggtcacttgctccgggaagaatgataaattaagctatactctttcagttctttcttgatagttgtacacctgatatgcttgcagcatttattataactcacatacacttagattgaaccctgctcatgtctcactcgataatattataatgttaggtgttcaaagctcattaataagatgtggaaaaatagtttgtcaaatgagatagcaatgataatgtaaggttaaaatatgatttcggacccttatcaaagacagttgtatttgactaaaacactgtttctctttttcctttttatgtagagattgtttatggaagtttttctttccacctgattatcaagttctgaaagtctctgagattgcacagcctggaagaccaagacaaatccttgcatttgaactccgaatgaatattattacagatgctaccattgacttgctgtttaccaaaaacagggtatccattataagattgtagagaatagtattaaaaatctgaaaatgactttgcagattttttgtgggtcctatttctatgtttagcttcatttctgtgggctccccattcctccttaattttaactttttgcttttatagtcctttatttaaagtgttaaataatgattaatattaataacaatggactttaaagttatcttctagtttctctattatattttgttaaattgctttaagtataatttttatataaatttgaatcttgatttgtacagagttttagtagttcatattaatagtgattatatttctttgataatttaaaagtaaatgataagaacataagtacaataaatgtcatgtaactcaatcttgttcttttggtaggaaacaaatgctgtgcatgtaaatgtaggggctggctcatatttagaaattaatattccgatgacagttgacgaaaatggtaagctatcattattttgcctgaaattattagtgacataatttatatattattatagtttgttagtccttccagagtaac

SEQ ID NO: 27807 - DNA, 1112 bp, Mus musculus
atatgaataatgtaaaattactatataaaatctattattacataaaaatatagtattaaacttatcaaatttaacattcattacagttctgcacttgatggaactctcaagctgttgctgataagtgggaccatgtaaaacagtgctagtcctcggcaggcagctgtttcctgtgcagcaatgccaaggccaggctgtaggatagtacccatgatagtccgccttccttcctttaacagaggaggaattagggacttgggctgtttgttacctgctacgttagctggtgtgtgttgctgaaactagagaatatttctttcccctcagagaattttgaccacatcaaagcttaatatctcaaagatctgggtattgaccatagacactgaccttttacagcagttttaaaagtctcaaagacactttctgttcatctcagtgggaaaataagttttaattactctccagattatatgacttcattcccaatgctgttagcattgtcacattttaacctctaacatttgttttgcagttccacatcaatgccagctaccccagaatttggaacatgccacagacatggcaatgtgaattggaagtatataaagccacataccacttcatctttgcacagaagaacttctttacaggtaatttctggtaaatatcgacagttacttgtgtggtgagcttatttatattctgtaggttttacttttacatttaatataggggtgtgctgacatgacatgatatgtgtgctttccttttttcctataatttttccatttattattctcccatatattgtatcccaaactgcagtttccccttcgtcctctcctcccagtccatccctctacctcctctttccctggatccacatctaccccttcaccttttcctcagaaaagaacaggccttcctgagacatcaaccaaatatagtataaaaatctaccataagactaagcatgtattctagcatcaaggctggatgaggtaacccggtaagaggaaaaggctcctaaaagcaggcaaaagagtcaagagacatcccctgcgcacactgttaacaatcccataaaaccaccaagcgacagaaatata

SEQ ID NO: 27808 - DNA, 1098 bp, Mus musculus
tgtatttaacagtttttactttttttagagtagagccttgccatataagaagtaaacatttcatgtgaattcttcctttaatgaaaactactgatttatacttgtttcttatataagacaaggggaggaaggaaagtctgatctggttatgagtaatactttaaagcaggaaagttgaatagttgtaagactttcaggcttaatcttacatgatacagtaacttaaaatactagtagctctgtctccacaccttttacctgcaaagtcatacataactctcttagataaaggcaaagcctagtgaggaagaacatgatcttgatgaagttctatacagatattttagagtataacagtgaaacacatctactttttttcctaacaagtggctccctttatttttataggaggaagacaatctggtgcagttttatataacagttttggaattatgggtaaaaatagtgtcacagaaaggggtggagtgctgacatccaataattcttctgattctcctactggcagtggctacaatactgatgtctctgatgataacctaccgtgtgaccgaaccagtccttcctctgacataaatggaaactcagtgtcagatgagcaagttggtgattttctaatgatactactagtttggaaatagagaactatatactcaatttaaaatcaatttctagagcatatttccttgtcatttcctgttttagagttgtaacattttgttgactatagtatgattacagtatagttcctgaatgggtataagaatatatactaatggtgcacatttctgcccattatactagttagcataatattctgcatatgttatacacatagtaaacattggctaaataaatgaatttatagaatttaagaaaggtagggtgtgattagttaattttagaagtcattttatgcttataggtaatattttatataaattgtaaatgtttttataaatatctgcttattttagatatcattttaaataatactttttttttttttgagtcagggtttctctgtgtagccctggctgtcctggaactcactctgtagaccaggctggcctcgaactc

SEQ ID NO: 27809 - DNA, 1202 bp, Mus musculus
cttcatgccttttatttttattttcaaattagtgctgactagtgccaagctacacattctgagtctaaagaatgcagaatcttcactattgtgataacaaaatgaattttgtactaatgtcttaggatccccatgccaatatcatgagagtttaaaaatacatggagagatggcttagtaattaagagtactagctgctcttgaagaggatctgggttcagttcccagcaccatcatagctactgacaaccatctgtaactccagttccagaggatccagattccccctctggcccccacaggcatggcatacactttgtacacaggcaaactcgggtgaagcacctgtatatataaaataagaataaatgaatctttaaagtttttttcaaagagagacattttaatccaactttctgaaagtatgcaagtagcatttttctgttttatagtatataataatcttattcaccataaactttttttcagggaatacagtagccactgacatgctgtctgaacatcctttgttatctgagccatcatctgtgagtttttataattggatgtcaaatgctgtgggaaatcgtggaagtgtggtacaggaatctcctgttacaaagtcaggacataacagtcttccaacaggtaatacagttatcattttcatattaaccgtcttcagtcgtacatacagttacagcaaaaccttgttcctcaaaggataactagacggtcagctgttaggatgaagttggaccgtttcagcaaaaagctaattaaactttgacttggtgttattataatatcaaatacaagatttaacgaatttaaagcatttaatgtggttggttaaacattcataacacaaaaggaggcaggttaaaaaacattaagtatagttacaacatgatatacctacaatacaggaaaatatcttgaatctgtctagttccctctgagacatcataactattaattatatactctttgtagttacttaaatatttaatcagatctatggggatagaaaagtaagatttctttccttaaggagagaaataaattagggccatttattaattttaaaagatcatgcatgtataaaaatatttggcaagatgttccccaagaaagtggtggctgtatcaagtgtaagtatatcaaccttcctttgcctatttttgaagttttccatgtta

SEQ ID NO: 27810 - DNA, 1148 bp, Mus musculus
gtatgacgggctggttctaattgatctgtggctaattctaagtttctatactattacatgtgatattagatagcaagaaaaaaatgtttgttttattgtttttttttaatagaagccaaatgattttgacttcttagttaatattagaggaaaaactaaaggctatctactagcccatgaacagactagactagtgcaaacatgcaatgtattgaatctcttgcttaatggtacagtgcaccttggaggttattatgtttataaatgcataagaatatgctatgtagttcttcacaaaaggaagtaacagcccttccctttgaacattttaggcaaggccatgtgaaccttcccccactggagttcaagccggcattaatgttggaaaccttcagcatcagtgctgttgtaatggaaaagtcagtgtgcactccgcaaaactccaccagtgccctttcctttcatgatctcaacaagcgctattacaacaccttccattgcaacttcactatttcctgccagtcaataagtcagcatgtggatatggctctggtccgtcttatccatcaattcagtacaatgatagatgacatcaaagcaactcagacagacattaaacttagtagatacacagctggatcagcttcccctacgcctaccttcaaaaccagaaaacatcgggatttccgttcatctgacttcagccgcagttcgagagggagtctcaatggtggcaacagagtaaataatgccaagaacaaacgggccaacaatgagaacaataaaaaggaatcccgaaacaaaaactcactaggaaggtctgaaagaagaacctcaaaagtatctaggaaaggttcaaaagatgtagtggatcatatgacgattcatatggatgattccgattccatcacagtgtcagagcaaagtgagccttctgctgaatgctggcagaatatgtataaattgcttaacttctattcacttatctcagatccaacagggatattggaaaagtcctcagaaacatttggaccagcaggtaacaagcattgttgtgatttacatttttctgtctagaaatgctaaagaagactgttcaccatattaatggtataaattattaaaatgcatagaaattggtagtcacc

SEQ ID NO: 27811 - DNA, 1091 bp, Mus musculus
ctgtacagttaaggacaaggctcctgttttttcatgtattattccaaccaagaccaaattgtgtaataggaattctacaatattgaatggataagtggacctgggttttctttctgttgtcactagacagttgcttgctttctgtttctttcttttctttctttctcttttttttttcatgaaaagtattaactgtatgactttagtatcattataattctagccaaatttttctggtagtaatttttactagaaattattgttaatcatcagaattttacagtagttgggatttactaactgtaataaatcacttacatcattgactttagttttctttctgcctgttcttaatttgcaaaagctgttctgttttggctgaattataaagctgcctatgacaactggaatgaacaacgaatggctttacataaggatattcatatggctacaaaggaagtggtagacatgctccctggtatccagcagacatcagcccaggcctttgggactctcttcctccagctaactgtgaatgatctaggaatttgcctccctataacaaataccgcacaggtacagaaaatcaaaacatacgaggctttattccagaattgaaagctagatattgctactcaaccatttctgtgaacatggattataaccattttaagtagagctgtttataacttgagcaaggaagaactcctaattcttacctttgcaaataagctttagaatcatcttattgctttttttaaagtaagagctcttaggattgatctttgtataaagtggaaacaggaatatttcaaaatgactttattacccccacatgtaacatggtagggaatttcaattttcttacaaagtgtagtatgaatattaaataattatttaaaaacttgcaagttatatatgtacttagatgaaaaaaagatgctatcttcataatttagggccagttttcagaaacgtattggaacttgaacttgtggttaagtaagaaaacgctgtctgcacttgtcagaccaagaagaaattgccctaagaatcatatgcagagatctgtcttattgttacagtcttct

SEQ ID NO: 27812 - DNA, 1143 bp, Mus musculus
ttcaggaaagccacacacataagaactggccatcgtagcccacgaaacaggggccagacaaacacagatattagctcttgcatattaaaaaggaaaaagtacacaggaaaatatatttcatttactcaaaatgaaattttattctttaaaaacctattttgctaatattgaggatttctagacttaaccatttctagactttaattatgaatataaagatttctaaagtttagaagtcatctggtctggagaaatgactcagcagtcaagaacacttgttgctcttgtcgagaacctgggtttaatttccaacacccatgtggtggctcacaaccatctgagccactctagttcagtggatctgaagccctcttctgatgtctgtgggcaccagacaagcgtgtggtgaacataagtataggcaggcaaaacattcatgcacagaaaataaatctttaaaaatgcattctaaattcacctttgcctcatttccctgtgatttttctttagtctaaccacactggagacctggacactggctctgctctagtgctgaccattgaaagtactctcatcactgcatgctcctcagagtctctggttagcaaaggccatttcaagaacttttgtatccgttttgctgatggctttgagacatcatgggatgactggaaaccagaaatccgtggagatctagtaatgaatgcttgtgagtctgatttattttctatataaggcttataattgtaaaaaaaaattaaaatgtctctgttgaaaattgaaggatgttcagatataggaatgctttagaaatgaaataagggttttttgtagttaaaggtagcaaactatatctgtaaaaactcttaacttcaggcttctggtaaggcagaaagacttacacatttgaagcctggtttttcctgtagttgaatgaccaaataaataatccttgttccatgatctgtaagaaagtggtaattgcaagacccaacttagtaagcatagaatagattgtgattctcctggactagaatttcagctttaattatagctgacacaggaataacccaacacacagcccaagtttctaggatttgaaagactcatagtggactcctctaattccactctgatgtatgt

SEQ ID NO: 27813 - DNA, 1365 bp, Mus musculus
tgtttactttgaaacagagttaggtgaaaatacgatgggaagtctcaaatgccacatttatgagttgatttattgatgactagggagagtagtaagtatttttgagtaagaaatcaaatggtgatagcatcaaaggaacacctcatggctgtaaagcataagaaaacagctgacatcacgtgcctggaaagagctcatttctgttctcatttcaacaagatccagctcttctcaagctcagagaatgattttggttttgtaactttgatgtttactgtgactacttagttacttgtaggtggtggatgcagcttataacggtttctgctgtatccatgggaaggttgagctcagagggaacggatagccgccatgctgttatacagaagaggtacatacacactataaacatggaaaccaacactctgtctggtgtttggagcaggtcttgctgtgaatggcagtgggtatctgatatggccatcatatagttcataagtgcttatactcctattcctaggaccttgaaaatgccacttctttatttaaacagaaagtagtagtgccggaacctggacactgaatgtattgtggaaaatgtgtgggattgatgtccacatggaccctaacattggcaaaaggcttaatgctctgggcaacacccttacaacactgacaggagaggaagacatagatgacattgctgacctcaattcagtgaacatagctgacttgtcagatgaagatgaagtcgataccatgtctcctacaatccatactgtaagtgcattcactgctaggaatttcaagactgggttttcctgagatagataactgattaacttgaggttatttcatgtgttgtggttgctgttgtagaggaagggagaaggcggtgatttctaggtctgcagtttacagtactgatgtgtgtttcatcataatgcctttatgaaatgtgccttaacctcagtgtaatatagtaacattgaaagtaaggtaaggtcaatctataaacacagaaagtagatcagtgggttttgagtctggggctggggatgaggtttgagaacagggaagggaagacctgctcttatgagaggagctttcctggctggtactaagagtgtggtagtgactgcttagctctggccatcctaaagctaccgagctgtacattctaaatggatgggtctcatggtctataatcgtatcttaggaaagggttttacaaataagtctttcaaaaagccaagtgtttatactgtgatatatacatttaaaatgtgcttttccaactatactgcttattctgttgtatcaagttatttagtagcaaaagagatagtgactttcagatttcat

SEQ ID NO: 27814 - DNA, 1163 bp, Mus musculus
cctaggtcctctggaaaagtaatcagtgcttttaactgctgagccatttctccagcaagtgtattcttttttaacagtagccctcagagtcaaacaattgcttccactggacagaatgtcggaatctgtgatcttttccaagtgtccagcttggtcatttttatgttttcttttgtgaagaacattgagcatgagatgtgcccttcctgggctgtctgaatgggtagtgcagcaccatcctctgtggccagggtggcacaacaggttttctagagcctgtcctgagtaaatgagacttaatggtgtttgttggcagttccttacagtacctacaccattcctttctttgcttctgtgatttttgactttcaaagaggaaagctgtttgagtattttctatgagcttataaattaagaaaatttctttaaagacttattcatataacactgggaaatagttcactaagcagacttcaatttactataatgagtaattccttgttttctgcagacatacctctcggaagaaagcaacaggctttgctgctgttcatcagctacttactgaacgctggcctacaaccccagtcaatcgaagtcttagtggcacagctactgagagaaatattgactttgagcttgatatacgagttgaaattgacagtggaaaatgtgtccttcaccccactacccttctgcaggagcatgatgacataagtttaagaaggtaagagacagctggaaaagttatatggggttcattagttagaaacactgtccatatatcatgatttatcacaaatgttccccatccaacaccgcaaaatttaaaagtaactagttgaagttacagtattcatttgcataacacagtttgttaaaataaatatatcttttatggcaattagaagcagatagctgatttagaatctggtaaaattgttaattaaaatagatctatagaccaggtattttagctcattggtagattgtgtatatattgtataagcacaggatttaatccccagtagtagtatgtacgtacacacacacatgcatgcacgcatgcacgggcatgcagacacaaagatataagaatcctttggaattctttgaacaaacccaaatttctttctttgtattgattgaaaagattctgtttt

SEQ ID NO: 27815 - DNA, 1152 bp, Mus musculus
tatgtaactatacaactattaacatacaaaagcacagattatacacttacttgatttggtatagaagtaacaatacaactaaacttttaagtcatcaagctacaactcttttgctatgttgacgtttagacaagaaagtattttaccagggagttaataactcctggccctccttcaaatttttattttgacacacactcaccaaattttaatctggcttgaagtaggcagtctcctcattctccttcccagctgcgattacagatgtgaccagcatactcaactattagtcatcgttgaggaaatccacctctgttgactacagtgccctacacttgctaacacaaatgtgatgtctacattctttatcacagtgacaacctcactgttcacagaaatactaagaattgatatttcccttggcttattttaagatatcttttaacaggtgtaattaaatgaaacttggcatggtaatagagctagtggtggttcttaagatctggctttacatatatttattattattattattatagccatttttccacctcggattttatccactcgaccaggacaaaaatgtccacttattatacacgatgatagttcctctgacagagacagagaagatagcatcacttacaccactgtggactggcgagactttatgtgcaacacatggcatctggagcctactcttaggtaagactttggtgtgcacacctcagtatgttcaagggtaccaaagtggttgcttttccaactgatgtgaccaaatgcttgacaagaagctgaaggtgaaagagtattgtggctcacagtttaggagcaaatacactgtccatcttggtgtcacaatatgaggcagctgctcacagtgtatacacaatcagaacaagaaaatgacaggaagtatagccaggctctaacacctcagaacctgcccccgacctacacttggtcgaggaaagcctcacctcctaaagattccacaatccccacactcttcaacactgccgtcagctgggaaccaagtgttcagcgcagcccatgagagacatagtgtatgttcaaaccgcaacacccacttcaccccccacaggcttaaagccaccccataatgagaaatgcatttattcactgtcaaat

SEQ ID NO: 27816 - DNA, 1125 bp, Mus musculus
tctccctccctctcccccctctctccctctcccttttgcaacctccccagccctacctctattctctcgagtaattggctatagccacttttatttaaccaatagctttaaattggtgagtcaggtttacacaacaaaggccactgtatgtgaacactcactcatctgggagcaaccagatcatgggattcagaatttaacatttgcatacataacaccagaccagcccccaagacttatcagcacacataaattatttttaggaattattacaatgaatacaaggctttcagactcaagtattcaaatatatctgctaaagtattttatccagagtatattaagggagtgcagtaatgttcatgaatcatacaccttgatagtgaccctgatttctaattaccatttcagattaatttcttggactggaagaaagattgaccctgtaggtgttgattatattcttcaaaaattgggctttcaccatgccaggactactattcccaaatggcttcagagaggagtgatggacccactggacaaggtgctgtccgttctcatcaaaaaactcggaactgccctgcaggatgagaaggagaagaaaggaaaggacaaagaagaacactagaatagcaattccatctgtgaaacacttgactctgttaatttctattacactgcaatttttttcagcaaaatttaaatggtactttaaaataattctaaattttgtggccattattgaaagtttgtaagttaatctgtttattctagctctaccattctgtatacagtaaagtattgcatgaaaatgtaaattttgtagaaaactaaattaaaagatatacatctgctcattaaagtttatgattgttttatgtgcaatatggttgctgcatttaaagtattacagagtaactgtgaattttttttcttcttggccataactgttagaaaaatatcttgttgataatgtcattgggggtcttttttatgtagacttgtataaagatctatttgtatataatttgagtaattgtgatgattgtataccacaaaaagattgtttgtaactattgtaataaagtcacaataacggcttcagtccatagttgtttcatatct

SEQ ID NO: 27817 - DNA, 1218 bp, Mus musculus
atatcgtagagtgagttaaaaaacacagtatattgaaattaatgggtgtttaaagaagtatggagtttgtgattccatcctgtgtttcttttctgtggaacagtaggcagtggttttctgtctggcttcccccacaccaaagtgtgcacctccacctcatggaagactcaatgaacatggacatgagtcctcttaggcctcagaactacctttttgactgtaaactaaaggctgacaaagactaccactttaaagtggatagtgattcaaatgagcaccagttatcattaagaacggtcagtttaggagcaggggcaaaagattaattacacatcatagaggcagaagcaatgaactatgaaggcagtccaattaaagtaacactggaaactttgtacaaccaacagtttcccttgggggcttcgaaattacaccatctgtggtcttacggttgaagtgtggttcagggcctgtgcacattagtggacagcatctagtagctttagagaaagatgcagagtctgaagatgaagatgaggaggacgtaaaactcttaggcatgtctggaaagcgatctgctcctggaggttgtaacaaggttccacagaaaaaagtaaaacttaatgaagatgatgaggacgatgatgaggacgaagaggatgatgaagaagatgatgatgattttgatgaagaggaaactgaagaaaagatcctagtgaggaaatctgcatgagataccccagccaaaaaatgcatgaaaatcaaaccaaaatggaaaagacttaaaaccgttaatatcaatatcaaagggtcaagagtccttcaaaaaacaggaagaaaaaactcttaaaacaccaaaaggacctagttctatagaagatattaaggcaaaaatgcaagcaagtatagaaaagggtggttctcttcccaaagtggaagccaagttcattaattatctgaagaattgttttcagatggctgacaaatctctggcagtggaggaaatctctttaagaaaagagtttaaacagtttgaaatattctgtcttacttcatttctgtaatagttgatatctggctgtcctttttataatttgaagtgagaactctccctactgtgtttggtaaatgctgtccaggttcagttgccaagaatgtgttgtctaaagttcctgtttagttttcaaggatggaactccaccgttcacttggttttaa

SEQ ID NO: 27818 - DNA, 1159 bp, Mus musculus
aaatacaataaattgatggtggtggtggtggtggaggaggaggaagtcctcaggctgctgtttggcaacaacagagttgtgtcccattttctgccctgctgacagtccatatgtccggaagcatatctgaggcttcagtattacagaacaccttcttccactccagttctcttccttcaccactcactctcttagattagccagcatcagtgactctaccccctagcctttgctaccaaatccagatgctgttgcagttgtgagattggaactgtctttcaggctagactttgctgagtgactccttgttactagcaacatggttccatttcgagtgtaaatacaaagacaggatgactctacacctcagagagcgtaaaacaccaccatgtgccagaaccacccacccagcaggcacagactgataaataaaaattattttgagaagtagaaaaattgcgactctataaacttattaagtcaataagtgttggggccggcctgtggctctcatgtctgggttcgagcctgggaggcagcctggagctgaaagagaagagggaatctaggtgggtcgagaaataatggaaccaagacgtgctagtctgctcaaggttcaaatgtttaatggcagacacgctttataaaggaggggggaggcctattcccaccaattcacccttggcgcccagctgcaggtgaccacgtgcaggatagggtgtagtctccagaatagctaggccaactcccagctggtagcagcgacagtggctgaacaatagagtaatctagggaggcaggctccaccctaggtaatctccttagtggcagcaaagttgaggtctggttcagccagcttcaggctgggtggaggtcacaaataagggacacatgacacatggatgtattacaatcttatcagcaaaaccatgcctgagaatttaagaagtatccctccagaaggaagtgatacaacacccttgtctggacctcggaaagaggaaggcacttggccctgcgatggcagtttccccatagatatgtcatcaaacgactcattgtgtcaaggaacagcaggcagagagctcttgttggctctgtacctcctgttgatgtggcgtcctcaagttgctctccatctgaacccagtacttcagtt

SEQ ID NO: 27819 - DNA, 1129 bp, Mus musculus
gatattgaataatctgctttggttatgtggagcctctcccagctgcataagctctcttccaccttcaatgacctccaaaagagtactattcggtgggatagaaatatgtctcagcatatatacactctggcatataacacatacaataaaacgcaataaatatttttaaagtattgaccagcctatagcttcatttgctgtttctcagaattgtaacatgagcatttattagttccataaactcataaaagtaaatactgtggtactgcttaactagtaagcctgattacctgtgcatgtgcactgcagtttgatttgatcaaacttttatttgtctggacataatgaaataattttgccaagtttcaggtaaaagataaccttaatctgaaattagcaatccattaagtgacctagaatgagcattttagcactgtattgagtgtgagagaacctgaatggacaagacacaaagaacagaggcttccccaaacatgaaggttgtgctcgcaaaggtgttacctatgaggtgaaaagaactgacacataccaagtgtgtgtgtgtgtaagttttaagttttatgctttaccaggaagctgccaccaagcagataaaggaacccctaatttacatgaagacatctggccagccagctacatatgccaccagtctaacagtaacatacatctgataacaatacacaactacatttccccaaagccatacaacaggcagactatatctaagttcacttctgagtctgacatactttttctgccttatcttctactccttgcatataattctttcttccatttgtgttcaacttgactgtaggccacactatactttcatgcatctctgccttctatctgacagaatcatttgtacttaaggaaaccctagagactggcagtaggacttagatcaaatatatgcactgtccctttctttcccagcttctgagtcctgacttctctagtcctgtagcgctcactgtgcacatcacaggatctgtccatatatcaatacagaatttagtttctatattcctttctctctaaactgcaaatattattcactgtacttgggaaatgaaataaatatattaaaacctcatagatgctc

SEQ ID NO: 27820 - DNA, 1171 bp, Mus musculus
tgatatcaccgggggcgggtcccggcgtggaggtggaggtggcggcgacgctgaaatgctgcggagcccgcgcgcgagtgctcagcacgcaggggtttgcggcggccccgcagccagagctctgcgggctaaggagcggctgcgagcggcgtgcatgtgccgggagggccggccccaggctctgcactaggtaagagccttcccctcccgccgaggacctggcaagatcaggtgagaatggtgctttattttattttattttcgaggagctggacgttttcggagctggctctagctctgtgcccggcgctttgcggtcggccctgcagcgagttccgtagccaggcagcgagttacgcgtgtgcgaacgcgggctggcaccgccgcgcacccgcgtgtctgtgcgcattgttggggaccgacccgccgggcgctcgtgccagacctgacttttcccgtccctgcgtgcgggcttgcctcgcgcagacgcgtctctcggacgcgctttggactgcggggcattccgtgggggcaaaacgtgcacggccgtgtgtgtccggggctcgtggctgtccatctcggcgagcaggacagcgtcccgggctggcaagggactcacgtgtttctgtctctgctcgtctgcagccggcgtggcgactgcggggacgcggacctgcggggacccgagagcccgggacgacgccgggccgcgcgcctgacgaccgggacgggacggtgctgtggagcgggcgccgcgcgcacccggcggatgtccccgagccgccctcggccgccgccaaccgcggagaagcgcccctgcccgggggccgccgaggccgcagcgcgggccatgcgcgcccggccgccccgccgcgcttgatgcggcgcgcgctccgcccgctcggcgcccccggccggcgccgcggaggccgaggtgagtgcgggcggcaggtgcgggccggggcgggccgggcggtcctggcggtcctcgcgcagcccgtgccaagcgcgcggcacccgatggcgctggggacccagcgcccgcctgtgctcggagcgcagtgccgcgggacgcggggagagggcgctgcctcctcccgcccgcgagctgttttcattcataactttatccggccggacctgccgcggctcggtgcccctgaggtctcgg

SEQ ID NO: 27821 - DNA, 1150 bp, Mus musculus
agcagaagaggaggaatgggataatgacgaaccccaattaccatctgcagagcaaccaggtgttcctgggcagggtctccgtccctcgaaccgtgcaggagcgagggcatcaggaggtgctggagggcttccccccctcggagacagagctgaacctcaaacaagccctgaagctccagattgagggctctgaccccagcttcaactacaagaaggaaacgcccttgtgagaggtaaggtgcacggcaaagcataaaggaaccaaactgttaactcctcttccttaaaatggcccctgcttggtgctctcaaggcccttcaggctcctctccctatgtattcatggagctcatcccagtggtgtgttcagtgtgagtcctccaaactccagcacctatccaaagcacttgcataacacaggatcgatagatccatatacagacgctcagatcaatgataggatcgctaacaggtagtagaaagtagataactgatagctatgctgatatgtagataactaatagacacagatgacagattggtaatagatgtgtagatacatggatgatgagaagatgataggtaatagagacagtgggtgacagatgatgtacagtagatgatacatatatgcatagatgtgtaatctattctttatctcctctcccttttcccccctcaaagtgttacactgagtgggatatgtttgtatttgatgctgtgttcatgtgcttggtacatggtccaaacctgtggcactctttcagtaaaactgtattggataagtagatgagtagatcaatatatcatttattaatcctaaattaagagttttatcctgtattatcattcccgtctatcaggagatttctgatgaaaaacagggttgttttctacatattccttgtttggttttgaagcactgagcggtacctagtggttagttgctacatgttaattctacgtttcacccagaaacaggtcatggatttaaattagtaatcaagttttattataataaataaaaagtcttgaaaaagtctagtagtgttggcatgtaatatacacaggtgttggaccatggtgaagggtgtggatttattaaatttacttacttacgtatttaggggcaagatatagatagcatata

SEQ ID NO: 27822 - DNA, 1143 bp, Mus musculus
ggtggatggcttgggcagcaccaagatcctgtttcaccacagctttgccgagtggctcttggatgtgaagcactgcacccagaaatacctgtgtaacgctgcagaaggacacaggatgctggccatgagctacacctgccaggcccggaacctgaccccgctggaagcacaagaatttgccttgcacttgattaattcaaacttgcagctggagccagccgaactggctctgtggatgatatggaatggtaccccagtcaaagactccctgtccaccttgatacccaaggagcaagaggtcctgcagctgctgatccgagctggtgctcatgtcaacagcgaagatgatcacacctcctgcattgtccggcaagccctggagagagaggactccattcggactttactggataacggagcctctgtcaatcagtgtgattccaatgggagaactctgctggccaatgccgcatacagtggcagtctggatgttgtgaatttgcttgtctccaggggagccgacttagagatcgaagacgcccatgggcacacgccactcactctagctgctagacaagggcacacaaaggtggttaactgtctaattgggtgtggagccaacatcaatcatacagatcaggacggttggacagccctgaggtctgctgcttggggcggccacaccgaggtggtgtcggccctgctttacgctggcgtaaaggtagactgtgcagatgcagacagccgaactgctctgcgtgcagcagcctggggtggccacgaggacattgtcctgaacctgctacaacatggtgccgaggtcaacaaagcggacaacgaagggaggactgcactcatagctgcagcatatatgggccacagagagatcgtagagcacctgctggaccatggcgcagaggtaaaccacgaggacgtggacggcaggacagccctctccgtggccgcgctctgtgtgcctgcaagcaaagggcacgcgtcagtcgtgagcctcctgattgatcgaggggctgaggtagatcactgtgacaaggatggcatgacccccctgctggtggccgcctacgaaggtcatgtggatgtggtggacctgctgctagaaggaggagcagatgtcgatcacac

SEQ ID NO: 27823 - DNA, 1235 bp, Mus musculus
tttcattatgaaaaaattggtctgtcattatgataaatatctctagaatctttcctactgcaggcttctagactcttccctttacctctgaactagaactgatatccacatcacaggaacattcatgctatctgctgactttttacaggaaaaaaaatttatacccagtatctctaaactcttattagtagcaatgattctataactgtaggcatttctttggccttaatccaagtaagagtcttgtagcaatactgaaataatattcagtctgtgttcaggattatggtttgcttcagtaggcactacattcattgaaaatatggatttaaaatcccatctatttctgtatcattgacttttcttataatcatataaattttatcttattcaactaaaatcaatattctgagacactcctatgcagtagtcccataattctcttgttgaagcataaaacataccacatacacaattctcttgttgaagcatagaaaataccacatttacaatggttaagaatttagggttcatctatggccataccaccctgaacgcgcccaatctcatctgatctaggaagataagcagggttgggcctggttagtacttggatgggaggccgcctgggaataccgggtgctgtaggctaaaaaaaagaaaagaaaaagaatttagggttcattcaaaaagatggctattcctaatgcctaatgtcaatgattgtaggaattatttgatcatggaacagggaaaaatatgaatttgtaagcagaagaacaaagttccactcagtgagttctgtcaacaactgtctaaattatgacagttgtagacactggaagtctcatgcagtaacaatgtatcttcagaaataattaacttcttaattaactgaaaggatgtaggatgctctcaatcttctctgcaaatactagatagttagaagataaaataaattgtagttatagttttataggatatagcatgagacagaaatataactaaaacacatctgtttgtttgtttgtttgtttgtttttgaatcagaggctcatctagtaggcaaggctcacatggaattcactcctggccctgacttattttaaactcaggacaatctgcccaccacaacatcccaagtgccacaattgaaaacatgggctgtcatgcctggcttaaaatctaatattgagaaaatatctgaaaagtaataatattaattttaaaacaga

SEQ ID NO: 27824 - DNA, 1144 bp, Mus musculus
aataaacatcacagcacagatacatttatttatacactcaagaattgcatgtatttcttcatgtagcaagttactaaatgcactgtcagcatcctaagatgtaccattacacataggcttcaaatctcaacccctaagcacctatttactttatattaatggtaaaaagggataatttgaaaagcaagactaaattaactaaaataacttatgataaatattaaaaacaaacaaccacatctcccatccaaaccccacagaagccaacttccatcgtcaagggtgagctggatcccaggaagtgccgtccagcatgctcatagaacttttgattaattgaaaaagtatagaatgttctgcatgaataaaactgaatttagactcattatgtgtaatgttgcttttggaaagaagaaggtctgtgtttcttgaggtgtgaattttaactggtggtattggtcatttggcatggtggagcagcagcagcaacagcagcagcagcagcaactgagaaacttgcaagacttcctgttggtctgcaatcggatgacagaactgtgcttccagtgctgtgtgcccagcctgtgccaccgaactctggatgctgaggaggaggcctgcctgcacagctgtgctgggaaactcatccattctaatcactgcctcttggccgcttacgtgcatctcatgctagccctggtccattgccacttttcggactctgagtcgccctcagttgcaccaggtgttcctgcagaacagatcagagccatcagggtcccagccatccctggccccaggagagaaggtgcttggatgggctcttctatggaccttgggcttatctaaatgtgtgcagagagattgagcttgaaagatgggtgctgttgctcctttccttggagccaataaacccatttttatagtctggttaatttgctgggcaagaaaaaaaatagaatgtaaatatcaaagcgaagaacattggtgtttactcccagtgagggggatggttgcaataaattccattacctttcatgttcctttgcaaaagagcgcagatgcaatattgacaggtcacacttccaggttttctagagctgcaggcaacctgctactgcacaggccacacagatgcccagag

SEQ ID NO: 27825 - DNA, 1172 bp, Mus musculus
gcacatacacacacacacacaaatctctaaaaaggaaaaaaaaataaaccaaacatgatgacacatgtctaatccaaccactgtagcacgagagacagtaagcttaggaccagctccagccagccagggatatatagtgagagcccatcttggaaaaaaagaaacatgaatagagagagaacggcgcttgctctctgcctagggtgaaagcttctaatctatcataggagataatgtttaaatcaagagttgaataagaatagggattttctgcaggttaacaggaagagtagcattgtagactcttagttcctaagtcagccaacatcatcatcaagtatttatgtgaaaccattttatttttctagtttctgggattaaacccagggctccgtgcacgctaggcaagcactctgccgctaagctacattcccagttccaaaccttgtacagtaacaccatcgataccacttaatactcataactgatgctaatttgtagaaaaagaaagcgctaagtgatggagagcattcggagcctacaaattcagtgtcttctctgagccctgtgaaagaacatggtgtgctgtttgaatgctcacctgaaaactggactgatcagaaaaagactccaccagtcatgtcatactgggtagtagggtaagtgtgtggaaagtgcatgaatgagaacatagggtcagaattgggggcgggggaggagcagaggtgtcccaaaacctcagcctgggggtgtcatcaagataaaaatctagagttttgattttgtaattgtgttttccccccaatacctcccttgtgtctcttccagtggagataagagaagatgattgggagagggatttaatcagagatcatcgacgttgtgaaagaaagacatggggccgggagggggaggaaggaaagtaagaggacagccccccattccttactctttcccattgcatcttcttttatcttctcctttctttccgtctccccttttcttcctcacttacacaactccttcaagacccttctgtccgtgtcactctgtccactgtgggccagcctcattgccactgggcagctgttcctgcgatccttctgtggatggtaccccgcttttacatccatcaacactgacatatcttcccgtaaagagcttctctctcc

SEQ ID NO: 27826 - DNA, 1105 bp, Mus musculus
tagtttcttagcaaatcaaaagcctgtgcactgatttaagtattttagtagatacctcactacagaggcagagggagaggatggcagttaaagttaatgtatatttatttgattctctttattgtttatttggattaggatacacatctgcaatcatctgtaaactccccctgctttctttctggttcacatacatttatgtcagctctatcgaatcatattaaaggcactgaagtgggggctggatcaatggctcagaggtcaggaacaagtacctcattggcagagacctgagttcagctcccagcacccacattaggtagctcaaaccccctgtaactccagggactcctttggcttttgccaggtgcccacacacacaattagaaaataaaaatcctttttaaaacactgggggtcggggtggtggtaaggaacaagctaaagctattgtatgtaactttttctataaaatactaatttctgtcttacaaatcagcatcaatctgcactgggtttttccaaaggagaggggttgctttccccgactgtggctaatgtgagcttcagcggtacagaaagctgacaagacagattttctttggctgtgagaatttggtgtgttgaaaagtatagtaaatgctaaatttattattgccatctacccaggtggacatcccagaggctcaatatccccctacattttacagtcctgggtaatgtctctttcaggggttatatatgttggaaggcaagctatctatcttagtcagggtttctattcctgcacaaacatcatggccaagaagcaagttggggaggaaagggtttatttggcttacacttccatactgctgttcatcaccaaggaagtcaagactggaactcaagcaggtcaggaagcaggagctgatgcagaggccatggagggatgttctttactggcttgcctcacctggcttgctcagcctgctttcttatagaaccaagactaccagccctgagatggtcccacccacaaggggcctttcccccttgatcactaattgagaaaatgcctgacagttgtatctcatggaggcatttcctcaactgaagctccttc

SEQ ID NO: 27827 - DNA, 1179 bp, Mus musculus
taacaaactagtactggacttacagtactgccaaatctttgttaagtttcatgatgtgttagtacactgttctattgctgtaaagagacaccatgacaaagacaactcatataaaaggaagtgttgagttgggggcttgcttatagtttcagagttgagtttatttgcatggtgtcaggcaggcaggatggtgccggagaagtagctgagagatacatcctgatctacaggcgtgagagacacagagagagatagacactgggccttatatgctcttttaaaacttcaaggtccacccccagtaatgcacttccttcaaaagaccccacctcctaatccttgtaatcttcctcaaaccagttctgggctctagtgactagacattcaaatatatgagcctatgggaaccattctcattcaaaccactaaacatagccaaattcttagttattttagacagtaaaggggcttctagaatgttaagaatgttgaaaatcaaactgcttcaaaggaaagtaaaaaaaaaaaaaaaaaaaaaaaagaaaaactgtggaagtagccagccttgtacgactgcaaaagcagcctcgctgactggattttttttttttttaaagatttatttatatgagtacactgtggctgtctcagacacaccagaagagggcatcagatcccattacagatggttgtgagccaccatgtggttgctttaagatttatgtatatgagtacactgtggctgtctcagacacaccagaagagggcatcagatcccattacagatggttgtgagccaccatgtggttgctgggaattgaactcaggacctttggataagaaaccagtgttcttaactgctgagccatctctccagttagctaactggattcttaaggatgattctagcaaattataagaataaatagtaaaaagaggcagggacatatttgttaacaatatattgaaatgggagctttcaagtcaaggagccaaacatagtaactaaatcatgaccatctgatgcaagatgcagtcatatccatggtactgaaaataacatgatgcttgcttggagtatgatgctatgtcacccaagtcacaggatgattattaaaagaacacacacaccaaaaaacatacttatcctaaagagatggtgagatataacatgcctta

SEQ ID NO: 27828 - DNA, 1148 bp, Mus musculus
acatctcctctgattgctcacagattaaagccaatcagacagaaaaccaaaaaggctgtggtatgtcagttatttttctaagttactatttgatgttttctttagaataaaattcttgagtgtgatctttttgatttttatactattactggaatttgaggtactctaaacaacatgaaggggagaaattgaacattcatggaaaatagcatagtttctctctgattttaaagaggtagtatttgggttttgtttgtgtgtgttaagacagtttttagtaggcaatccaggactgccttggaagtgtcctttcctctgcctcatgaatgctgtgagcccaggtgtgtacgctagcctggtactccctctagcttcataagaatggcaagttgattctgagaagtttggaactcttaagttaatgatgctttttaatgtatttgattttgtgtctgttttacctgtatatatatatataggtactctattcctgtctggtagctggggaggccagaaaaggaattaaagttccttggcgttgcagtttcagtcagctaaaagccaccatgtggttctgggaactgcctctgtaagagcaataagagagatacctctctagaccctaaattatattttaaaaatagttagatgaaaatattttaaaatactattggctatatactgtattaaatattttatttatacttacagctagtgaattgacatttaatattagccctttgatttagcttcagtttctacatttaatttcatttctagtcaagagtaaactagaaaatacagcctttaaaaaaaaggagaagcaatttaaatttaagcacttctgtgtttagaatttaatgagcatatgtgaagaggaaataatttctttgtgattctgtcttgagcctacttgttctttgtttcccatgtcatccagtcttgcctttgtttggttcccattgtcttcagcggccttgttccccaccctaccttctgcttgctttttgctcattggttagcgtgtcacacttgattgcacactctcacctttatgccttctggctcacaagtgcacccagatacatgtctgctccagactgccaccctgaagcagcacttggatctgctagttctgctatggttaa

SEQ ID NO: 27829 - DNA, 1214 bp, Mus musculus
gctagattgaatgagtaagttgggaaattctggttattaaagcctatattgatggctgagacaagaagaccgtgagtccctacatgctacatattaagaatatgtctgaaagaacagactgaatttacatagattgtgtgtgcgtgttttgtttgtttttatgaggcagggtctcatgtaccctggctagtcttgaattcctgatgctcccgcctctacagcccaggcactgggattataggcatacatattttagaacttctaattaggtctttagcttacaaacactatattctcaccatggcaaatacaattattatttttcacagttatttgctcacataactttgtgtatgtggtgctgggagttgaacttagggcctcaaatatgctaggccaatgttctaccactctattcccagcccctaactaactttaaaagaataattttatgaaagtaactattagaaacccagtatgtaaggaatatgggaatgcatgtataaattgagttttgtcatgtaatttatttttctctctgggtgctgggaattgaaccagggcatcaaacatgccaggcaagcactctaccactgagctatctatccccagcttgtcttacaggcagacacaggttgttagctcatgaacagctttcatggtttattccctaaatcataggtgtgattattcttcaccctggctgagtctctgtcccctaatagttactgacaagctccactttctataggaagataaacacatttatcttctagagtccatccccctagtctgaaatcagcagtttactagagaagtctatttttttctaagtcagggtctcactatgtagctcagactatggtgctacagcagtgtctgatgctggttgctttcagtagggtattctatgtaacatcacaggaattcataactataataaactgtataacaatgtcacttaaattttttagttatagtaatgaaatcgtatatttacatttcatttcaaaatcatagtttctgttccacaggattggcgagcgtgctattctcctgggaggatttgtggttgtatgggtcggcttctttatcttgttaccctggggaaatcagtttcccaaaatacagtgggaaggtatggtgatttcaattctttagcaccagcccctgcattctttacaagtagcaagtgataccttgctctatcttta

SEQ ID NO: 27830 - DNA, 1148 bp, Mus musculus
agaggggcaagtatactgtggagaggtgagctaaaggctatttgcattttcttctgaaggagaatatgggtgtaatctgcccattcctgagaaagtaagtcatagagtgatttgcagtttgtttggcattggcaggttcaagactgaggcatgtttactactcacggtgcttattcagatctgtagcaggagaaagcaggaggactgggaaatgtgcagtttggggaataaaggagtgcaccaagcagagtgcacagagctttttataattaaggaaattagcaccattgtttactgaggcaggacaggtgccctgagagtaaaacctatggaagtctccaactagtgaaaataggaattgatttgaaagaagagaaactaaactgagactgtggctatgtaaacagacttttatgagaactatttcccggttttggaagaccacgtgtgttggaatgctggttagaggctagttaagctgcttacaggtaataggagccagcacagcaccccagtctggcagtagaacttggatgcttcatcagcatgtaaaatgctagttacagagtcatggaggcttacaccattgttagaagctctataaggtcaagttgcaaagtagtcttccaggctgttgggagttccagaattgtggaacacctaccaaggaaatctggaatagagtcatcccatgagagaggctgtatatatatactacacgtgacaaagttggaggggcggagctgttcatggtcactggatcccagatgatagtcccacaagccccagatgctgatcatggtatagtgctttccctcctaggtttagctgttgctttgatccagtcttcccttgctataccccattcctctccgttggaatggaaatgtttactctatatgcctttgtacattggaagtatgtaacttgttttctgaaattatagaaactcacggttaagaccttgcctggcatctcagagcctttgggcttttgagcaatgttgggacaattaaagactgtggtgacttttgaagtcagactgaatttattttgctttatgagcctatgggagtcagagatgaaatgtaatggtttaaaagtgatttgtttgacagtcaggttgacaaggagtgtacttgtgataa

SEQ ID NO: 27831 - DNA, 2396 bp, Mus musculus
actgcagctcgtacccctttcagagaatgtccagtctttgggtgtgatgctcctgctgtgagaaacacctcaccagcgtgaacaagataatctgcctgactgaagatctgaggatgaggcgttggttgtgctgccaggtgaatttgttgccgttggttgtaatgtctggtgggcttcatcatcctaaacaggagacaggaccttcttaacagcaagaaagtcaccgggtcgtttttccccctcccctgccccaccttcccctcctccccttctctctctgccttcctttctttcccccacccctcccatgtctctcttaaaacaaaaaagtatcaaagacaaccagataggtatttgctactcagtgtgcagatctctggaaagcaagggatactgtttcacaggctgtgttttatttgtgttaagggaagagccctgggcagggaagaggggttgcatattcatttaagaagttcaggctactgaaacattcaaacgtgaattcccaaacttttctttccgggctttgtcagagaagggggtaaatgtccttctaagaaagatctggaagttagaggaatatccagcggattgaagtcagcagttcccagcaacgataatttgaaaccagttttatttctttcccttccttccgctaggtcaaatcaatattaattgtgccttatttcacttccataaacttgaattactttttgggaaagcccctctgtgaattgagaagtcactacaagcagcattgagcctgaggctgatgtcattctgtgtgtagaatggaagaggagtactcagtgttaactgccatatgttagaacacaaacatagctagcattgtgatggccaaatgcatcccctgggctcttttcttttccaagaaaaattgaaaaaccaactactcttccccaacagctgcctaattttaggagtctgaccctcactcgtcactggtgtgggtagcagggccgtggtatgaatgtctgtgtgagtgagtctggatgtctgtgagagcaccttgggggaaacttcctgcgatgctgtaaatacgagtaccgttttaataaagcatgtacaataaaccaaataagctcgagtcggactctaaatacagagccgtgagccagtgtgtcatgtactaatactgcatttgattcacgatgagggggaaaccctcttagaaatgaaaatcaggccctgactagccaagctgtccgtgtcccatgctcagtgtaacttccaaggcaggtccacctctgtgggtggttcaggtaagaagggatattacagtggacagtgctctcaggcctcgctgccactcagtgtgctggaagcaccagccttccaaagtaggaactgacatagaaacacagtattgtacccatagccagtaaatcccgttcttgtcagttaaaaaagttctatttcaaagcctgcttagtttgggttttggcttcattatggtggactcttagtcagggacagattgctctcacagagaaaagccccaaggaggtggcattaaagacgtgttcctgacgggtgcagtgcaagcagaagctcgggttcgatgggaagcagagggcgagcggtgctacactcgtagcatgctggaatagcctccagaagtgtgcttgtcaccacatcctgtctgaagaactcaaggagactgaagagtgttgggaagtgcttcctttatatgtaaaacactttctaaaagcaaattgttatatattatctatcctctggtgtagtaaattggtgtatctgaaccattgagcctaataatctgcgattgcgagaagccgcaggtattcatgcagtaaaaaacaatgcattttggtttttaaaaggaagtggttttgtgttttggactttaaataaactgtgttcgtagataatttcttaattccagtcaaatgtctcattgttaggtagtgtggtacccagacctagagggtctgtaaccggcctgactgatgggggcggggggttaggacacgtttcttttcttttttttctttttcttatccttcagtgttagaattcagacacagggcttcacatattgctcaaccatttacatcccagctccaaagtatacattcttcctatccactgagcctaaatctgtttgtggttcctccaatcaaacgtacgattggacatgtttgagaaacactgcatccaccttttgaagttgtgtggtccatgtttgccatacaataaaagttgaacttataatttgtgtccaattctgtacatttttggtttttatatgtgtgtgtgtatatatatatatatatttaattatacttatatgtgtatgtgtgtaggtcagaagtaggtgtcagatcccatgttcctggttttactgcggctgt

SEQ ID NO: 27832 - DNA, 1152 bp, Mus musculus
ccattcctctgccaactcccccagccattccccagacacccagccctgcctccccaaaccctaccttcccagcccagcttctccagcccagtcatcccacacagccaggcttcccgaagcctctctagcccagtcatttctcagcatccccagcccagccatctctgaacccagcttccccagtcctgcctcagaagggcgcttgcaaactcccacagaggacagtgccactccccgccccgccccccctcccccaccccttgctacgacccgtgctactcccgacagttgtctgagaagctgtgccccacccccatccctgttttgttctccttagcctgggtgcctgaactagtgggttggggagaactgtggatggggtgggtgtgagacagacacaagatctgactcttcccattcgcttgggaagtgtctctggaaagtgaagagtaacttaggtgcagagctggagagctgtgcctaagagaattgatcagacccaccccaaaatagccatcattgtctttgatgactattgacttgagtgtcccggagacacacagctcttgtatggggctcaggaaagtttcataagctaggcagactccaatcacactaggaagcccacagacaggactgggacgtggctcaaccggtagagtacatgccacacatgtgcaggcctcgaggatgatctccagcaccacatacgccaggcatggtggtacatgccagtaatcccccactagaatggcagaggcaggaagttcagaagttcaaggtcaaggtcagcctggtctacacagagaggagactttgtcttaaaaatgaaattcccacacacccaagaagccccttgccccttcttggtcatcctgggagaaaacatcttccctccttcattcacatgaggaatcccaattaaatatagtaaacaaaggaaacctcctacattgtaattttcttcccgctcctcttgttttatttgctctctggatttattgctcaagaatggcctccctttagcacccttccctattaaccagcgagataaaagccacggagcgaggtgggaactccttcagttctcattgccagttgtggggcggagcaggctgagtttacagcgggccgcagacatctgttgagccc

SEQ ID NO: 27833 - DNA, 1154 bp, Mus musculus
cccaacttccagtgagaacatctgaccccatcaaatctcaccaggtagtccagactacttcagcaggttattaactccagattacagccctccctaaagaccttagggcatggagagaaaattacccatcgctgagccctagggagcaacaaaagagaccacttgaaagtatactactttgacatagcgttctgacttattgctgcagtaataatggttatcatgattagatttgcactcatttatacttttcatatttatactgatgtaaaatgggccttcttttagcagattaactaatatcaacacagaaacagttacatatttttatttacttattttattttgagggagaggagacactgatccacccgcagtcctccctgttgctcttcctgctcaccgatctctccagatctgttttcctaatcattctaaagccctcccatggattttgtgctttttttttatttttcctaactttctttcttttggcagggtctatgttggctttgaacttgtaatcctcctgttccagcctccccagtatgagattacaggtatgtccatcatatgtgctgtctctgtctctgtctctgtttctctctgtatgcatgtttatatatgtgtggataaattttttttaattctttgacaaattcatacatgaaaataatacattttggtaactattaccctccctacagatatgggcttgtttacaggtgcgggcaaatgtggagggcacaggccaaccctgagtgctagtcttctagtgctttctatcttgttctttgagatagcctgtctcatgctggacctaatgaaggagccctggctgtccagccaacaaaccacagggtttcacctgtcatcacctgctcagccctggggttacaaacatgtgccaccatgcttgactttttaaatgggttatgaagcttgaccaacttcagtatctctctagtcacagtgcttaagactctaggtctacagagatgtataaggttaggtgaacacaatcaccacccaataataggaatctgatctggaataccattacgattaggcccggggatcaggatgtgtaacatattgttttaaaaaacgaaacctgaagcttgacttgagcaagcaagcctgcgcgtcttctg

SEQ ID NO: 27834 - DNA, 1149 bp, Mus musculus
cccaatattggtttatttctctaacctacggggaggatgtctttctgacatgacttgtttgtttggttggttggttggttggttggtttttttttttctttttggtttttcgagacagggtttctctgtatagccctggttgtcctggaactcactttgtagaccaggctggccttgaactcagaaatccgcctgcctctgcctccagagtgctggtattaaaggcgtgcaccaccacgcccggctctgacgtgacttttgctgggatcttggagcagcatgcctcccctggatctggtggttgctcaaagttgctcatcagatctcagttgccaatctgtgccagtcacaacctgggttcttcagcagattcccactgaacagggcgctttagatggaacagacaagggagagtggcctggctctggttaaagattcccagaattacaattttggttagattttccctaaactgcctttgaactaagttcagttctgagaatgcattctagagaccttaaggatgctgggagccctaaaatccatccacctactatagagtctcaagcctggaagtcaatggaacacctagggtgtatcctgcctctggaattctcaagaagctccccatactcaaggcagctttggtgtcacccagaactcacagggaagcaagacaataaagtactgagagtgtggtacccaggactagggatttatctcagtggtacagggtttgtgtatcatgtccaaagctctgagtttgataccagcaagtaggtactatgttgaaagacattaacaaaaaaaaatcatcatagtcacattgagatgcctctttgttttacgttctttggaagactctagaaggaaatctctcaacaatggcttccacaataggcagggatgcttgagaagtgccaggttgcttaacactcaggcttttggactatgtatcaaagtatttgtgtaaaatgtaaccatgagtcattcactaaaagatatctataaacattttcattttcttataaataattactagaggagaaagagagcaactagaagaaaggacggcagcaccctaagtgcttgtacctcatccaaagctcttcataaaggctccatgcaagaagcaggagcatgatttta

SEQ ID NO: 27835 - DNA, 1179 bp, Mus musculus
ggatctggggaggcagctggggctcagcaaagtgctcacaagccgggggacctaagttcgatccccagagcccatataatgaaaagcaggatgtggtggcatcgcacttgttagccaagcaactggggaggcagacaggcagtccctgggggttgctggacagccagccagccctagcctaagtggtgagttccagaccagggagaggccttgtctcaaaaaacagggtgggtactcctgaggacactggaggttgtcttatgttttccacatccgtgagcgtgcactctcgcatacacacacacacacacacgcacacacacactcacaaagggaaaggaaaaatatcagaaaacaaatgagacaactaaaaacttaaaattcacaaagctgagaggtggggggaaaggaagcttttctttctctgtgattcctcccccttctgaaacagtgacaagccagggccatcttgctggcatttcttctctgccctgttcccaccttttctgacacatatttccattcaactaggctacaagtcacccttataggccttgccaaatagtatttcgcaagtttgtgaaagactggtttctcctggactggagtccccaggctgccctgtaggctatagagcattcctctgtccccacacagccatggcaacagtgggcaagttacaactcaactcccaggttggagttaaggactcaggttacttcctcctgtggcccagttggccccgctttcttctgtggcagcaaactaaactgctaacctagccagctgtcaaagctgcccagtcaaaagatgtcccaactcccaatataactccagctccttaggaggcacacctcaagcatgacagactccccagcctctcaggggcgagtcaaggtcatccttggccaccaaaggctcttagtggaggctacatttcagtagtctgcacaaacttgctgagttcagaaagctttcacatacagatgacagttcgtctctttccctcattgctctcactagactcctgctatgttctgtttctcccgagccttctgtgttctctctccttttgatttggagctgatatttcctttctcatggtggcttttatgtattaaaacgattatggaatttaaaaaacatgtacaagtgtcataaaagtgtaaatttcccaat

SEQ ID NO: 27836 - DNA, 1936 bp, Mus musculus
ttctctccatggcctctgcttctgctcctgccctgtttgagttcttgtcctgacttcctttgatggacaaacagtattttggtcttgtaaaccaaataaatcctgtcctcaccaacttgttttttatttatttttatttttgggcgcgcgcgcgcgcggaggggggggggttcatggagttttgtcgcagcagtagtaaccctaagtgagctcagtcttattatctgtctgcgggtgacccactggtctttcaaaaagtgtgggtgtacgcaaaatggagagaggagaacttctggagccgttctgctccacgtcgtcgtgttcaaaagtatccggaagcagtcggtggccagccagccaggccaggcgccagccgggcgggggtaaaggcaggctgggaggggcgtcagagcctgggggtgggcgggtgggtgctgtggcgtgtggaaaggtcggctcctcccaccgtgacgtgatgcccaagaccagactaaagagcctgcccggaagatcacctgctctttgggttctagaaggcagaagacatccttgtccgctcgcctgctacctctgaggaaactcggggctctactcaaagtgctgaggtaggtggtccaccttggagataggtctcggggagaagggggacactggtgagggaagggcagaggcttccaggattagttgaggtaggggggataatatcctggaaccagtgagcgtaaatctcaagccggtccgccctggtctgggctttccttcccgccctttttttgccttcctttcccttggcgcccaccattttgagaccagatctttggtagtccaagctggagggaaaaagcattgacgttgggatggattggagcttcggtggccctgagcactgggattgcaggcgtgagtttacgggactggtctgcgggactggtctgcgccatgcgatggctttggggcctgttaggcaagcaccctaccaagtgggctacacccctgtcccatgcttctctagctctgcttccactccagattcagccatcttggaactaccccaaaagactccgtcaggaaagccataacgcttagcggctcattctgctgaatctagccctggattcttaattctttcaaattatttcattcctccgcttcccacaacctgttaatctctgcggtaacttcgaacctaggacctgaagcccagctcttgatccaatacccttcctctcccgtcctgtgtattttctgtgtatcttggatgtctagaggtctaggttggagtcatgtggggacctttctgcagaagaatggaggcctgtaaagagcctggtttatccatctcacttgtccttagcttagaagtcagtatctttcaaacacgggaaagaatttgaattctggaagttctgggcgtcttccctcaagatggctcaggaaggcaagcacgtgcgtgatggagctcccctgcccccctccctcgctcccccctccctcgctccccctcccctcccccctccctcgctccccctcccctcccccctccctcccccctccctccctcttcctcctccctctctctctccctcactttcccctcccccttcacctcccgcctctctcttaaacacacacacacacacacacacacacacacacacacacacacaccaccccagaaaaaagtgagtgaattgtgtggccgtcataccaagacttgggatccttcgcttcacaaacattcaagtaagtggtggacctagctatcctcaaagcttttatctcctaactcctagttagttcttcttcaggagaaagaaaatctgtattgtttttctcatttgctaaggaagtaggctcataccattgaagtataatgtggaagaaaaggagaaagtggagctctctggtaacggcctaagagagctcttaggggtga

SEQ ID NO: 27837 - DNA, 1151 bp, Mus musculus
aggtgtgtcctctctctgtgcccctggggagcagggatggccctcaaaggctggcagagagtaaagctgtcagcagttggtgcttcaagcacagggatggcagggaagagagccattacaagcggaagagggtcacaggtgtgtgtcagtcgtggacgttatggacgtaagtggtcagagtgtagactgcttgttagatggaccagagttacaggtgagagtcctttctgggaagaatgaatgggtggatcttaggactgtggctgcccattctgtgaatgaagctgtagctcacagggtgtctatctgaagggggcttttgattccgtgtggacgcctggtaattacagggcattcctttactgcatgtgtggctgtgcatgtgtgccttaggagacagggtctctcactgactggtctgggccttactggttaggttagtctggtctaccttccagggagtcctatgggtccttctgcctctacctgctttctgggaaccctgcctttttatgtgggctgtgggtgtggacatcaggtcctcacacgaggttacaagcactttaccaaccaaaccatctctacagtcagtctccttccagtgatcttagaaaatcagttggtaaacaaaaaagcccacaaactttttaattgagtgagtttctctggaggaacatataaaatattgcacttaaagtccaggagcctgaattcctgaatgaatcctgtgggtctgttccaaaaggggaaacttactatccgttgtcaacgattcaggaacagaggtatataaacatcagtgtgtgtgtgtgtgtgtgtgtgtgtgtgtgtgtgtgtggtttgtgtcacattaaaagagtgagaagcaccccagcagcattagatatggagttagtaaactgttgtatttttgaaaggtctatttttaattatgtgtctgggttggtatgagcacgggaatgtcagtaccacagaggctggacagagttacagaacatagtggggggtgcgggggggggcgcgcagtgggttcaggtagctgagctctggtgctgtgcaagagctaccttaccacagcgcttctctctagcccctcgtgctgctctttaaaaagggcagtacattgtgagaggacctcgacaagaggaggg

SEQ ID NO: 27838 - DNA, 1157 bp, Mus musculus
ctgccccatgtgctagcacttcaggagattggccgcttctttagcagttagtttagaagatagtgacctctaccgggtggttctagattctgccttgaggttaattggctaatgaagttttgttttaaaacatgggctcgaaagagagctctccgtagtggcttgtcattccctgaaggatttccaagagcctgtgttcagcagcccttggtgaattgagaggtcttggagaggggagcggttgtgttttgtgcaacagttatgttgagtcgatacaatcactgcaccctctgcttgtgtcggctgaaggagctggagcccacttcagtcctgggcgaggggaaggagtgtcgggtggagtgaagggtttctgtaacagggcactcttactctgttgataccgtgaccttgttatgggcagctccatggtgcccttgcagctgccagtgctctgaaatgaatgcctgtgccactgtccctttctcgtctccccaggtgtttaggaccgacctgatcactgccatgaagttgcatgactcctaccagctgaacccggatgactactacgtgctggctgatccctggagacaggagtgggagaaaggggtccaggtgcctgtgagcccagggaccatcccacagcctgtggccaggtaggcaccctggatagacgcgtgcttctctgctctcctccctgcaggcatagaagctgagagttagcgctgtagtaacatgaggcctcacaagaggcagaaatgtagaaactgttcaggcgctgagggcggtgagtcagagggcagtggcctctgaatttagcacattatcgcagggggtgagccctcttactggagaagagaaggtccaagatgtttttgggaatgaccgactaggcgaagtctgatgttactgtctgtttctctctgcattctatgtcacttcactgagtggcttagtgggagccgtggtggccttggtgcttcgggcagtggctgattgtattttaggagctgacagtgtccgatgaggaatttgagctgtggacaggctctttgcagacgctggtgtttcctcttgatctcctgccgtgtcgctcacctctcccaacatgtcctcgatcttcctttgggacaggctgtgtcgagttggtaccttttttc

SEQ ID NO: 27839 - DNA, 1219 bp, Mus musculus
atcttttcttttaaaataaatttatttatttatttattttgttttttgacacagggcttctctgtatcgccctggctgtcctggaactcactctgtagaccaggctggcctcgaactcagaaatctgcctgcctccgcctcccaagtgcgggattaaaggcatgcaccaccggtggccggcttaagtttatttgttgtagtttgggagcagactctgttggagatgtggtagggtgttgtgctgggaaggagatggctgtggaaggctgcagcatctgcttccattctgggtactttgaagatttctagctgaggtgttgctctcatttggtttcaaattcttagactatatgaacatagggatggtctggcttgggggttggaggaggaagttgcccctgacagtttcttctacaggacagaaagggtaatctggctgtttgttttcttattaaccagggttgtgtctgaagagaagtctctcatgttcatcaggcccaagaagtacatcgcgtcgtccggctctgagcccccagcgttaggctacgtcgatatccggactctggcagacagtgtgtgtcggtatgacctcaatgatatggatgctgcgtggctggaagtaaccaatgaagaatttaaggagatgggtgagactgttacttcattaactcacattggagagagggctggttagtccgcagtgactcatatagagtccctgagaggttggagctcactgtcacagccacctatgtcaccagagtcccagctctttggagaccagattgcttgtgtggctttggcacttgcaatgagacatacagtccacttggagctcctagcgcagtggtggactgcggggcggaagcctgacttgtttctgacttgaattcctgtccccgtctgcttctacccttacttaccatacaggaactgcagcccagggagcaggaggactgggccagtgccctgctcctctttactgctgtgatgccaaagtcccatttttactgcctgcagcctgctgtttctcagacggagcctacaaagtcagcttcaaaccctcttgtttttacctctttaactctttcctggctttctgagtgaggtgtgaccctggctgagagcccagacttggatagtttctctgctgggttggaccttaagacctcagttacccgcatttcatggtgtggaggctgaggtggtctccttatgt

SEQ ID NO: 27840 - DNA, 1242 bp, Mus musculus
tccttgtgtttgccgctcgtggatctaaatttatgcatttcagtttggtgaattcaaagtggggagggataagtcagttaaaaacgttaggatgtttgctgtgaaatctgcttcagggaactgtttaaagtagcaagaaagaaaagttaaaaccaaaacaaaacccaaacagcaaaacccaagcagcataatatgtagtcctgttctctgagtcagatcagtgtcggcaagagtgtgaaggggcgtttaacagggcatgcatttaatatcctaggatgctgcggaagttgttttgagttttgcttctctctgttgtgtcttccataaggaatggaggcgttatctgtggactggcctcagagtcacagagtagcattttctctggtgctcagttacctttatttatgtttatttgggagtttaaacacgccagtgtcttcgctataattctcactgcgcacttactcaggggagatctgcggtgttttcctgcagggatgccggagctggacgagtacaccatggaaagggtcttggaggaattcgaacagcgatgctatgacaatatgaatcatgccatagagacagaagagggcttggggattgaatacgacgaagacgttgtctgcgatgtctgccagtcacctgatggcgaggacggcaacgagatggtgttctgtgacaagtgtaacatctgtgtgcaccaggtgagtggggcagcagagcccagagagagctgggtgccgttctggtgctgagcctctcagccagcctgtactgcctggagtctagggtggttcttcctaatggagccgcatcccacagttgtgctttaggaaagtcttacctgactgtaatcccagggcatggctctctgcctttactccacgaaggcactgcgattcaactgggaacactggaaacaaacccgagcaaagggtgcttaaactctacgttagcttttaactgcggtgactaaaacaacagaagctgtctctggaactggagttttgttcttccttgtctcttcctagctcatggtggattcttgtcagtccttggtggttggcttgcccattagtcttcacgatgtcttccctgtgtgtctgtctagatagggttatcttctcacacagtcctggtcctgttggattaggtgcctgcctgcacagtgtggtctcagtttacatagttgtgtgtcacaactgtttctaaaggtcccgttttcaggtggtggtgcgg

SEQ ID NO: 27841 - DNA, 2573 bp, Mus musculus
tgatgggtacgcccctgatggggaaatgagtgactcagagagcgaggcatcagagaagaaatgtatccatgccagcagcaccatcagcaggaggacagatatcatcaggcgaagcatcttggcctcttgatgaaacagccggtgtggaagcacatggcttgttgccgtgtgctgaggagagctctgataataggggcaagcaaatacccattgtttctgagctacagacatacttccttgcaattcagattgaatttttttccagagtcatttataaatcattgtgagaagtttgtgttatttgcaacttgttgaggaaacagaagagtagactgtaaccataagacactaagattagaacctgaactaaacactataaaaaaaaaaccaacaaatgaagtaactttgcagagggccaggcttgaatagcaccatgtattattgccctctacattctccccaaagcacaaactcttgaatactcactcttacagaatcatagaattctgtgtggtgaacaagtcctatttctagaagccctcatgtaccatttatagcccacaaagcttattttctaggaatggtaaatgctgacggcatttggctcccaggctgtgtggtatgaggagctgaggttctgaagcttcacaacactgggatcttgcacatgtggcatccaggggaagagtttacacaacaggcattgctggaaggctgcagggacagagcagagctgctgcactgagatttggggcccgtgtagcaaggtcccgaagccctgagtgggctgtggacacaggacgggtggaggaaaagttgtccagaaacttctgtgagacagggcagctgaggcccaggtgttactagtccgcttgaccttcctctttcctaactgctggcctttggatccaaatgggatttccctggctactgccagtacttggccatctggcttccaataatacaatggttattcaagttcaagtgatgaacttctggtgactctcactctacagagtcaaccactagtgcatatttgggaaatccaggcttccaccatgagtggattccttaagcaaaaaggaaaacaaaaagcaaaataggttatattttaaaatatagaaaggcaataagttgcatcaaggttatacaggaaagaattcaaagtgtatccttgaataggtttctggagttggagttctaaactctgatttgtaacttggactttcgaattgcaaatggcaataactagtaagttatcagcaataataaatttagcattaaatttgagtataatgttctgtttttgcactcctcatatagtgcatatgtattcagacaagtggatagtgttaaagtcctgttattttctttggaattcaatgtagttgtgaatcaaaattaagagaagggaagtttcattagcaatgagatttagaattaagggcatttggaataagcccagtttcccctaaattacccttagtttattaatatcaatgttcagattcctgactcatttatacatctgtttccatgtggcagggacattctgatatttaatgagcaatgctttgagtttgtagaagctttcaagtcttccagatgattgtcaacaacagaaaaggcttattgaattccatcttgctatgcaagttttatcagatgatcaaatgacagatctgatgcatctcatcgtatgtatgacattttcaaactaagtcttaacttctcaagtacattgtagtagctaattcaggggaggggaaaggatgacccaggttttagattgactattttttgagctatggagctcctttgagactgctgtccagatcagctcgttgctactggtattcgaagattctcaggagtccaagttgtacttttgcttgtagcctaatttaaaaatgagatgttttgcatctgagcaaaaaccttttgctggatacaggaaaaggctggactctgatctagttatcttttgattacagcaacagctctgggtgagaatagaatttatagaggaataatctgtgaagccatagaaagaaaccctaaattaatctagtgagtatatggcctctcaccattttaggaggcaccagattcatttgcactattaggaatgctagttttgtgcaaaaataaatgccttacctgtttccccccacatttaggttgaaaagctttcaaatgttccaagttatgctgaaccaaaaacaaataaaacaaaatgaaaaaaaaaaaaaaaaataataataaaaaatttcccccacaaaaacataacaaaaaaaaaaaaagcccacacgtttaattactgctttgaaatgcaatggtatagagcacggtttctgacagtgtaatgatagctttgtaagttagttcatgtcatgctgggaactctgtatgaggcggccacaggcagcagcagcccacctacctacccacttgcattctattagtattgagcttttttgtttgtttgtttgttcttttgaatcttccttgtgcatcctgaccaagaaatatctttgattatgatcaatgtattatgtcaaaatgtaggctag

SEQ ID NO: 27842 - DNA, 1141 bp, Mus musculus
taccaccattcccaccaatcatacacagacttgcaccacctactctgacaaccagccaggtctactcattcaggtgtatgaaggagaaaggactatgaccaaggacaacaacctgcttggaaagtttgacctcacgggtatccctccagcaacccgtggggttcctcagattgaggttacttttgacatcaatgccaatggtatcctcaatgtttctgctgtatataagagcatgggaaaaggagatcaccatcaccaatgacaagggccgcttgagtaaggaagatattgagtgagtggtccaagaagctgagaagtacaaagctgaggatgagaagcagagagataaggtttcctccaagaactcactggagtcctatgccttcaacatgaaagcaactgtggaagatgagaaacttcaaggcaagatcaatgtgagggcaaacagaagattcttgacaagtgcaatgaaatcatcagctggctggataagaaccagactgcagagaaggaagaatttgagcatcagcagaaagaactggggaaagtctgcaaccctatcattatcaagctgtaccagagtgctggtggcacgcctgggggaatgcctgatggcttccctggtggaggagctcccccatctggtggtgcttcttcaggccccaccattgaagaggtggattaagtcagtccaagaagaggttgtagcattgttccacaggaacccaaaacaaataacatggaatgataaaactacttaaattggcaccaaaaaagcaacaaaaattgtattttttatttatatttatttatttatttatttatttatttatactccatattttatcccccaacccctctaccttccagcttttcctcatcccataccttctccccaacccctgtctccacatggatgtccccatccccctccccacctgacctctaaactcagtggggcctccagtctcttgaaggttaggtgcatcatgtctaaatgaacacagactcagcagtcctctactgtatgtatgttgggggcctcatatcagctggtatatgctgcctgtttggtggtccagtgtttgagaaatctcgggggtccagattaaatgagactgctggtcctcctataggatca

SEQ ID NO: 27843 - DNA, 1149 bp, Mus musculus
tcgatcttcatgtaaacttggccatagatgttggcaaggcccgaggcttcttcaagaagggagatgtggtcattgtgctgaccgggtgacaccctggctctggattcaccaacaccatgcttgtagtgcctgtaccttgatggccctttggagcctctcttctagcccctgtcccttcccctcccctatcctttccattaggccagcaacgcttgtagtgctcactctgggccataatgtggcgctggtgggctgggacaccagggaaaattaatgcctctaaaacatgcaatagagaccagctatttttcatggccctaactgagccaggggtggaggaggaatgcagaattggaaaccctctgactttatcacagaagggcagcagcatctctggactttgcttctgtagaaagttccttcccagccctagcctggagtcaggagacagcaaagagtaggcgctgagggtgtggatcccagggtcccagtgtagatgacgtttggcccctgacctgctttcccaacagctttggcctcctcactccttgtgcactccacttctgtcactgcagacactccactctccaccttgtattctgcagagtctccaggcctgttgctatagtgcccacctgaatgtcagtaaacagaagctgaaggaaaaaaaaaaaaactaaaaacaaaaacaataatagtaagttaaatttagtattaattagtaaaatactaaacatacctacctactttacaatgtttcaaaattatgatcataggtatgcatgtttagagtttaatagcaaatatgtataatgattttttactgaaacattatttgtaattggaaaaataccctagtaatacatcttttttaaaaatttttatttatttccaggatacagaggatgatccacaccaaaaattccagaacttgcccaccatgacctgtcacacttcatcctgctctatcccaaacatcaaaaggaaggctgaaagaatgcaggtaaaccctgataacagacactctctagacacagtaaccaagcattcaggaatgtgcagaaaaaacaaacagcaccagacaggcataccctatagctaataaagtacatgtaaaataaaagggtaactttaaagcatagccatgaa

SEQ ID NO: 27844 - DNA, 1099 bp, Mus musculus
gaaggttatgtactaattcatttttctgtgtaagaaaattcttactaacaaatctaaatttaaataaagtcttctcatgttggagaatatttaaaaattctggcactggtaaactcagaagcagagccaagcaggtactgctcatcataggcgccttctggctcctttgatctctgattgtcagcaccagatccaaggcccatagtcttgaatttggaatctccatacttggagcacttcccttccttaatctattgtccacctctgggaagggacacctaccccacaccactgggaactgtagcaacatacagataggttttgttgtttttgaatctcaaagaaattgctatttaaaaataaaacaaaagttactctggaaatcgccttcagggcacttcaaacctttctttcaactgagaagaaaaaggtttcctaaagtagattttctttttcttgtcttgtttcaatgagatcttacacaaaataaacatggaaagagaaaaaatattaaaagctatgttttacttttgttagcttaaaaaatatcaaacacaactgggctctctctctctctctctctctctctctctctctctctctctctctctctctctctctccttctctctcctctctggtttctcctgtcaatttttctctaaaaatgtttccaaaaaagtgtacataaagttattctgcttctgaacattgaaaagtgaaatacttatattttatgtggtactttgacaattacatagtccatatgatttccttgatagttaaggaaaataaatatatcctaatccatactcagaggtgaagaagattatagtagcataaaattgaatttatttgattttacatagtgtgcttgtggctcagtaagcaggagtctcaccaattagaggatgcaggctttgctcctacaacaaagcatatacacacagtcttgaattattttatcttttgctcttcaacacaattagatgctgtatttggacatctaagttttcttatttttcctatagctttatttgttgtcttccaaacccctcactctttttttcatttttatctttatttctcacaaaaagtat

SEQ ID NO: 27845 - DNA, 1198 bp, Mus musculus
ttttgttaggatctggcagattgagcatagttatgataaataaccactactctttcattgtatggttttaatagcttctttttttttaattgtcaaatttttacctgtgtccattgcattaatatttcaacacttgtaaatttagtgtttcaagaacctaagctattttttctcttgagtatttatatccacagttttctatcacatcaaaaactattttaaaccttaccaatgttctcactttgtttacagtttgtaaagctgtcccaaagacagattttgaacacaactttttcagtatctcattgagatgacattttttattgtgatttgttctaaacactttaaaatgtctgtatatacacatgtagatgtacatgtgtgtggagtataaacatggagacaggtaggcaatccatgttgtcttctattaatgtgtatggctcatattatcaatatttttataaacaaaacttgtttatattttgtgtaaagagtacaataaaagttttagctatgtcttgcctctacaccattaagcagcacatgtttgggttagtactgatataaactgtatcagagctgatatatacactcaaattcattggcttgcagaatctctaccttgatgagtattttcatcatcagaagtaccagaagttgccaggactggagagtacaaaatgaaaacattttctgggagatttaatctgcaaaagtgtccagataattgaacaatgaaaacatctctcttttgtgcacaaataattggttaaatagtttaccatatgcatagatatattgttatatcagcttaataatgcagtatcctaataccttagtagaaattgtatattcctagtatttagcataaaatttgacagttcattctctttaatttttaaatattattcattctaaatttgtgtgtatgtttgtgcacatgtgtgaatttgtgcatgcatctgcatgtgtgtgtgtgtgcatgtgtgtttcaacaattacattgtatcttcctagttaacaagttttcacaaattaaaaatttctgtaactaagtgccttgaataagaaagacaatctttgcttcattaataaatcaaagctaatccaaacagaaatgccttcagccagtatctctactcctcccccacgtatactccctatctgttgtatagatgactatgttttacagatg

SEQ ID NO: 27846 - DNA, 1154 bp, Mus musculus
ttttgcacttctaacagtgaaagcaggttagtctctgacttggtccttttttttggggttgccttgtccatcattgatatgaacattttttgcaatattttactctatcttattttctcctatttgactattggctcttggatgccttcttcttcttcttcttcttcttcttcttcttcttcttcttcttcttcttcttcttcttcttcttcttcttcttctttttttaagagaaaaaatgaggcatgtatctgtgggaaagagaagctgtgcagggagctgggagaagcaggggaagaggaaactgtgattagaatatattagataacacaagaatttattttcaaaaatttaaattgcttaaagtcctatattataataatgttagtcagaagaccaacaaggaccagagaaattccaaaatcccatctgagatgaagacctgatgtctaatgcctgctgagtaagagacagtaaaggtttccaagttggaattgaaatatagattttgcgggctggagagatggctcagcattaaaggctaggctcacaaccaaaaatataagagttcggttcccagcacccatggctgtctctccagccaccaaaagagaggcccattggacttgcaaactttatatgccccagtacaggggagcgccagggccaaaaagtgggagtgagtgggtaggggagtgggtgggagggtatggtggacttttgggatagcattggaaatgtaaatgaggaaaatacctaataaaaagtattttaaaaaaagaaagaaatataggttttgcaaaatccagaagtcaagtctaaatacaggcacttacaagaaatgctaatgaacacagatgtttatatgaaattaaccatacttacacacatatacacagacattatgattttgcaagggaaagatagggaagattttagggtggaatgaaagtcggagttatagagacactatgtcctatatgaagttttttttaaaaaaactttacatagtaaaatcttatcatagtttgtattcactcatcttcagaatagagattcatagatattgtgtttattttaatatcttgctatgtagatacaaaaatacttcgttctttaattttgttagcaattaaagatagattttatcataa

SEQ ID NO: 27847 - DNA, 1145 bp, Mus musculus
cgacatggccaccaacatgaaagccatgactgagcagggcacggagctgtccaaagagttgcataacctgctttcggtggcctacaagaacgtggacggggtgtgtggggggggggtaggtcctcctggagggtcatcttgaacattgagcagaagaccgacacctccgacaagaagttgcagctgatcaaggactattgggagaaagtggagtcggagctgaggtccatctgcaccatgggcctggaattgttggataagtatttaatagccagtgcaactaatcccgagaataaggtcttctatctgaaaataaagggagattatttccaatatcttgctgaagtagcttgtggtgacgatcaaaaagaaacaataaaaaattcccaaggagcctaccaaaaggcttttgatataagcaagaaagagatgcagccttcgcatccaatccacctggtgttggctcttaacttttctgtattttactatgagatcctaataatccagagcttgcctgcacactggctaaaatggcttttgacgaggccatcgcagagcttgatacactgaacgaagactcctacaaagacagcaccctcatcatgcagttgcttagagacaacttaacattaatggacatcgaacagtgcaggagaagaatgtgatgcagcagagggggccgaaaactaaaggcatccagggcaccagcctccttctccttaagaaaacctttttacatctccgttttttattccacttggatttactctagcaaggaagcccattcatgtgtatgggatcaactgtttatagtcttttcacactgcagctttggggaaactccatcccttggtttgtgctgtctctgccttcctggagtgcagttactgctgtagaaaagtatcaatagcttcatttcatagaaacacgagtaacttccagacacgtgtgtagaggagtgacagcgcacttggtatttaagtaatctgaaccagttctgcaagggagagtgttttgtattactgggaagatatgggaaatgtagtgcattacaatttacagtaattgtaataatttcttgatttctacattccttttctgaaccttcttgggggtttcctttcagaagcaacttttccatgaat

SEQ ID NO: 27848 - DNA, 1169 bp, Mus musculus
ctgtgcctaaatgacattagccatgaagtacattttacatcaataggcaatgcaaatatttatatataataatatatatatgggaatagtttataagtcaacataggtcacttgggtgactttacctaatagaactccttcatttactaatacctagtactaaatatttttaaattatatttattggaatgtatagagagtctgagagggaatggatacagtatctggaggcacagttacaatgagaggtaaggttttaacctttgtgaaatcatagaatcattaggtctgatttgataattacactcagaaggttttgcctctcttttgccttacttctactgtataaattcaaccttttaaatatttaaatttcctattataggtcattaagagaaatcaaggaagagtagataaaaagaaatgttattaactttacctaaaatttagaggcatcaagggaatcagtgttagattcttacctggcaggggagataccatgatcacgaaggtggttttcccagggcaaggcttatccattgcactctggatgtgctgacccctgcgatttctccaaatgtgggaaactcgactgcatattttgtggtagtgggggactgtgttctcactctcccctgtgggggaaagagagagagagagatcagtgttaggatttatggatataaacatagcaccagtgttctttctcttcctctctgccccacatatataaaaatataatcatgcaatcttcccctcccctccccctctcccttcccctccctctgtccctctctctctgtccctctctgtgtgtctctctctgtctctctgtctctgtctccctctgtctctctctgtctctgactctctctgtctctctctctctctctttctctgtctctctctctctctctctctcttccttgacaagcacaagcacagattcacacacacatacaacacataaaccacacaatgtcatttaaatttgacatttatagatacctaggaactatgttgctttgccatcaggttctgaaaataaagtgaacacagagagaagggtaaatgtcatagtttcacactacttgatgctgagaaatgtctatatactacattttgctgcaatattttgctgtctagaaggatagaaaattgaatggcca

SEQ ID NO: 27849 - DNA, 1152 bp, Mus musculus
gacttctacctgtttggttgtgttttcctgattttctttaaggacttgtaactccttagcagtgttctcctgtatttctttaagtgagttattaaagtccttcttgatgtcctctaccatcatcatgaggtatgcttttaaatccgggtctagctatccaggtgtgttggggtgcccaggactgggggaggtgggagtgctgcattctgataatggtgagtgctcttggtttctgttagtaagattcttacatttgcctttcaccatctggtaatctctggaggtagttgttatagttgtctctggttagagattgttcctcttttgttagcctctatcagcagacctgggaaactagatctctcctgaatttcagtggtctgagcactctctgcaggcaatctctcctcttgcagggaaggtacacagatatctggcgttgggacctgcctcctggcagaagatgacggccggaaacaggacctgtaccagaagctgtgttgctttggcctgtcacagaagctgttagcttctgtagtccacactctcacctgtgcagactagtttcggagggatctggggaccaagatggctccaccaggtactccagcaaagccctctccggcagggtggacacctctcctctggcagggaaggtgcccggatgtctggagcccaaaacgtggtctgcctcagaagctgtcctctagggaccttgggggtatctgccaactctgcgcccaggtgacctggtgttggtgccgactggaagggatttggaccctggtcaggctgggttttctgcttccctagtgctgtctcaggtccttcgtgattggattggaacagaagttgtgttccactcacctgtggtcctaagatcgagtagagagtcctctaggggacctggggggtgtcgttaggtatatttttatgaaaatagtttctataataccagctatctgcactaagcattataagtgtctaggaaacaatcccttaaataagaaaaacaacagaagtatcctctagctatccataaaatcaagcttgaaccaggaccaaaggaaaccatttcataagtcatctctttcacagagattttattttttttgtcttctaaccactgcacatacctcattaccctaaaaa

SEQ ID NO: 27850 - DNA, 1225 bp, Mus musculus
gtttagggagaattatacaaagaacaaagaagtgggcatctgctgacatgggggccgaagtcaggcgccaggcagtgggcactctggatcttatctctggaacatcgatcctccttgacagccttgggggtcaggctgtgctcaggggtaactcatgtccttggatggcatgggaactcaggaagagatagggaagaggggactataatttagcttttacagcctcaggtgccaggaaaggaatagggaggaaaggggggtgacaaccagctctcagtacaaggccatttggcctgctagggagattgtgaagggctcactttctcacgggatggtctctgacacaggaaggggactgggcaagtgcacacaggcccacacagacacatgcacccacacagacacagagggaacgggctgggatggggactgtgtgcacagcagggcgggtaggacctccacagccccttcccaaacagcctcttatcccttacacccctttcctcctctcttcccccatgttaggaacatagcgtgtttatattttatggccaaactattttgaattttgttgtctggccctcagtgccctgccctctccctttgcaggaccacagctcccgtcctttggcttctggtccttcctgttctccaccctggtttcttaagtagttggttcttctccttagtcttcctgactcaacccgtagtctctgtcccgctccccctctctgtggcagtttcatatttgctaatatgaatttgctcattaaacattttgttgtattttactttaaaaaaaaagaataggaactatggcaaggtcacgaagcccttgcccctgacttctaagattaagctgaccttaggtggggctgcttttgatcccagttgttgacattgaattttatcccagttggttcctgctcatcctttgtaggcattcctctgttttgtgtaaaagtcacttctaagacatgtgctcactttgagacaaattacattcagatccatactcccctgtgtcatgtctgtttgtcacccccttctcgccgactccttgcccacctgtaactggaacccgagctctgccagtggatcgaggacccaagtgaggtttgtctgctgcatataacttctcagcatctcatggtaccttctccaaaattgactatttggtccccaaacaggcctcagcagataaaaaaacattgaaatcattcta

SEQ ID NO: 27851 - DNA, 1177 bp, Mus musculus
tcaggcccctggcaacccagtcttggctgtgcagataaatcaagacaagaattttgcctttttggagttccggtcagtggatgagatgacccaggccatggcctttgatggcatcatcttccagggccagtcattgaagatcgaaggcctcatgactatcagccattgcctggcatgtcagagaacccctctgtttatgtgcctggagttgtatccactgtagtcccagattctgcccaaaagctgttcatcgggggtttgcccaattacctacatgatgaccagttaaaagagctgctgacatcctttgggcctctcaaggccttcaacttggttaaggatagtgccacagggctctccaagggctatgccttcagtgagtatgtggacatcaacgtcacagatcaggccattgcggggctgaatgggatgcagctaggggacaagaagctgcttgtccagagggcgagtgtgggagccaagaatgccacgctgagcaccatcaatcagacacctgtgacccttcaagtgcccggcctaatgagctctcaggtgcagatgggcggtcacccaactgaggtcctgtgcctcatgaacatggtgctgcctgaggagctgctggacgatgaggagtatgaggagattgtagaggacgtacgagacgagtgcagcaagtatgggttggtcaaatccattgaaattccccgccctgtggactgcgtggaggtgcctggctgtggaaagatcttcgtggagttcacctctgtgtttgactgtcagaaagccctgcagggtctaaccggtcgcaagttcgccaacagagtggtggtcacaaaatactgtgaccctgattcttaccaccgtcgggacttctggtagaggtggctgggggagggtgggggcagggctggctggggactttccccctacctgtcccctcctcctttccccccctcttgaagaagacaggcagaggagtgacagccgaatgacagccggcagcaactggaatggcagcaattaaggggggtggggggtggggggctagggcaggaatatcccgtcccgcgggattcagttattcgtgggtgcgagggggaccgcaaacctggaaggaaatgggagtaaaagaaagaagagtccatcaatgtaatccattatataaacaaactcaaag

SEQ ID NO: 27852 - DNA, 2178 bp, Mus musculus
ggaagcgctcaaatgggaagagaggaagtgcctgatcctggaggagatcctggcttaccagccagacatactgtgcctccaggaagtggaccactactttgacaccttccagccactcctcagtagactgggctaccaaggcacgtttttccccaagccctggtcaccatgtctagatgtggaacacaacaacggtccagatggctgtgccttattttttctccaaaaccgattcaagcttatcagcagcaccaatattaggctgacagccatgaccctaaaaaccaatcaggtggccatcgcacagaccctggagtgcaaggagtctgggcgacagttctgcattgctgtcacccacttaaaagcccgcactggctgggagcggttccggtcagctcagggctgtgacctcctccagaacctgcagaacatcacccagggagcaaagatccccctgatcgtctgcggggacttcaacgcagagccaaccgaagaggtctacaaacactttgcgtcctccagcctcaacctcaacagcgcctacaagctgctgagtcccgatggacagtcggagcctccctacacaacctggaagatccggacctcaggcgagtgtcgccacacgctggactatatctggtactccagacatgctctgagtgtcacgtccgccctggatctactcactgaagaacagattgggcccaaccggctcccatccttccattacccctcggaccacctgtccctggtgtgtgacttcagctttaacgaggagccccatgagctcttttaatcacaagcgtcttaaccagggatgttttgggaaactgaactaggataggaagttgcctggaaaaggacacccagtttctgccactactctccatcatttccagcatgcccttgaaaaaacattgttcacaaacctttccagctaaaacccgcattgaaaaggtgtttgcactccagtttgagcttgttgttcatctgtgtaccatcctctaccatttaggggcattagtagcataggctttcttgttttttagttgagggtattataaaaacccagtttgtaagcccttcagaattaaagtaagatgtaggaagttttctagacatcatttcaagttatttatttgtgggatttttaaatgtcagtgggaaaaaaaatgcatggtaatatttatttttttatatcttaatgtaaaataaagtggattatctagcattgtggacattttagaaccatgcaggtacagtcttaattccttaaaaattaaaatgtctctatttgctgatcgaacaggatgtacactaaggaactatttagccctgggggattggtgactttgtgtgtacattcttcacaaataattcctgtttgctatgcctttgacttctctgttgtgttttaaagaaattccgtagcattcagttctttagtttccactgtttagtcactgctaggcacttgtgccttttctgttgtgatgacgttggtagacgtgtgaagattactccaatcacttctcctgggatgtgctttttataagtagctttaggaacagctctggaacagttgctaagaatattagtgagaaaccttgccaagacgacagacatgagcccaacattcagctgagacaagaaagctcacgtcttggaggccagcttgggctatatgtcaagaccctttcttgaaaaagccagatgactggattcaagttttctagaaaaatataagagtcaaaaagataacctggagttctctttcaattgttgaagcctcttccaaacaaaatatccttccagtggtaaaatggtaaatatcttaatgtatgagttctaaatattacttaaggttaataaatggacttacaaagagtgcttttaatatcttgtctctttggtctaaaaggaatctgggagtttgtttggatcttgtaatactatatggtgttacacactatccattagtacactaaattttcatcttgacagttaacagaagtaactacacattctagcttctgggtgtcttggtcccaaggatggagccctccctccaaaatggcttacccctgcattccacccccaggtcaaggtcaagctagtctccccaatgtactagagcacttgagatgtttgtgggcctgatgcactcactcgctcacc

SEQ ID NO: 27853 - DNA, 1250 bp, Mus musculus
taagtaagaacaactgaaccctcaataagaaaagcctgaaagggaccaagcagctcactacactatcacgttacactaagagttggaacactaacacctgtaagaggttacatagttttcagtgggggggttgggatgggtgacgtcattgttacaaagagcatttcttgatgcattttatatgcataccagcaattagcactgtgcttgggcagtgctcacttaactggtgctatgtgaagactctgctaatacaggtatctagaatgtgaactgagtggatccaaaagcttcacacagaggagagcaagatctagtgcgcttttgtttgtttgttttgttttattttttgattttgaatatatatatatatatcatagcttaagctgttttaaaacaaaggccttagactaattttcggtttcctttcttgaaataagctaatggcttgtttgtgtaaagcttttttattaaaagaaaaattttaaaaatcttgtacctagcacagtattgttatagaatttccatgtaacattttctatggtagtttaagtctgtcggtttcttaattgtgaagacattaacagttggctccggccctttactgtaccatacctgcgtcactcgagtcgccctgctgtctgcagacacatcggtatcagttcttctgtcattcgacattcaggcccgcatgaacttgccaggtagctccagtgcctggtgtttgtttcctttctcaccctttttccttttctccctaattttctctttttcttttttagttgacatttaagaggggaagtaccagtgttcagatttgaactataatagtttgtatattcaacatttgaagtatattctattttgttgtactcttgtttcaaagtgtattcaagtaggttttctgaaatatagaagtgaaatttatcttgtggttttggtctctggtgatatttttcacaatgctcacaagccagcccaggctgtcgtttcagtcaggccacagaagtctggtgttttcttaatgactgcctgaagaaatgctactccggtttcgtctttgtcccattatagaaatatttgacaactctctgcacattcccacttcctttataactataaccacataagaaatacaggtcaggaaattggccaatcataatggacctatacatgtgaaacactttcagcactagtggtagcggcgtgcctggcatgtgcaggcccctgggtctggcctggcccctggg

SEQ ID NO: 27854 - DNA, 1229 bp, Mus musculus
taaccactgagccatctgtccagcctgctctgtggcctcaccactgcgaagtatgctgcgtctccactcttgacttgctgttagactgtgatttcttgcatctgctaacccatctgatacacacctttccttcttcccggggtttgttgttcttggctcttttttgtttgttgcagcatctttgttccttagtgtaagacttaaaacgaagtctcttaccttttttagcgagctttcacaagaaagtcaagtatgcatgctttgaatttagctcttaactcacgagccttgattacttcatttgtctcttaagactgtaaaagactatcccagccagcctctccatttctttgtcttatacatccatgtatatatgaaacacatgaaggacactgtgtggactgaatgaccttgtgtgaagccgagtcacagctaaatccagagttgtccaacaaaaccttgattgttctttccctttgcttttgtagggaggtgacacgggccctgactgcccggcagtgattgtggagccagttcccagtgcgaggttagagcagggctatgctgcccaggtgctggtctatgacgacgagacttatatgatgcaggatgtggcggaagaacaggaagttgagacggagaattcagaaacaggtaagacactgcagagagtccttgttacctataactcctatcttttaaccagccatctattttatgtgaaaaggtgttttgcctgcatgtatgtctgcatgggtgctgggaacccaacccaggtcctctggaagagcagccagcgctcttaactgctgagccatctctccagccccataagttgttttgtaagcttcagtattactatttattgttgggggaagcttatactgaagaacctattataaaatgccagttagcataggatggacattggtgtaaaaatctttgtttaaagcgagtttatataagtataggagagtcctatgttataattcttcactatacaacagccttaaaagttgttggtttttgtttttgtttaactacagatattcactagttatttacttataaaatcagtaggttagtatacaagagtgatatttcctaataaaaaaaatgagggtagtattctctttctaactggtttagcccttctttgaatcagcattgctggagcagtaccgttttgttttgttttgttttgttttgttttgttttgttttgttttg

SEQ ID NO: 27855 - DNA, 1336 bp, Mus musculus
caaaggcactgtgccaccactgccctgctgagctcagtactctttaccagtgatctctctctttccagcccagattttaaaaatttgttaaaatattccaggtataatattgcatctctaaaaaagaaggaagttataaaatttttaaaatattacaataatatgtgtatgggcgttttgcctgcatgtatgtctgtgcaccatgtgtgtgcctgaagagggcgctggatcccctggaaatggagttacagacagttgtgagttgccatgtgggtgctgggaactgataatgggtcctatggaagagcggcctgtgctcttaactgatgatcaatctccaaggaagctgtaacataatgtcttccctaacaatacctgtacacgatagcttggtaaaatgttattcaataagttaatgaatttgaatattcagttcttaggtagagttattgactgtcttttgacacaggtagaagcttgtatcctatttaattaaactgttgagtactaattgctttatatctgtcctatatatcttcaacaattcctcattgtccctcttttagaccctctggttaatcacctttagaagactggacttccggatgtctactccatctctattgaactaaaccatgaaaatgaaggctacagtcctggcaatcgtctgtgagccttagttccgttgcttcacagcatttgagacttcctcagggaacgcacgatggcatcggcggtggttgacagcggaggctctgctctggagcttcctagcgatggaggagaaaatcaagaggtcaggcatttaatatatctcatctctgtcttgttagtagagatccgtacatgagtctatcgtgaaatgaatgagggatacgggtactcaagagtggacgtgtaccgtgcataaacttgtagtggtcatggatgtgtttgcatgtaacttagtgatgggcgagaaaggtgctccactgagtgatgtgagatgagtgtgttagagagggctgggaggagcgagggcacgctagcttagggacagcttaggtttctgagagtatccattttcttagactatagagaatgagagatacactcattgtgtgtaaatacccaaactgcagttgtctgaagttagaagcttatgtttgctttccttgtcatttttatttcttagttattctgttatgtctaattcaggattgatctgtcagatttttaatctaatatgtgcagttatttgtatagttagaaaatgaagttttgaaattttctgccagtaggatttttgactcttttgtgtatttggtcattttcttgttaccgaaagaaagcaccg

SEQ ID NO: 27856 - DNA, 1149 bp, Mus musculus
gacagatctcactttctgtagccaggctggactggaactcttggcagtttttctgcctcagcatcccaagaggtgggattacagatgagaactactatgcacttcttgtgacagttctagaatgattttatttttttatgtgtggagaggtcagagggcaacttccaagagttggttctcttccaccatgtgggagttcctgagattaaactcaggtcaacagatttggcagcaaaaagctgggcttaatattgtctgcctttaatcccaacacttgggaggtggaggcaggagatatttgtgagttcgaggccagctggctctgatacggagattcaggaaagtcagatatacagtgagaccctgtcttgaaaaaaacaatataggaatagatttggcagccagtggtttttttttttttttttttttttttttttcccttcctcactgagcatcttaccagccaaagaccagttgctgttatttttcctgtgctggagatctcaccagggctttagcatgtgagcaggccatccatctgagttattcccaagtcttttaagactaagtgatgtgagggtagaactatatagcatagttttctttcagggcttacccatccagtccctttgctcccctttccctcctattctcccttataatgctggaggttgaaccctgtgctaaatacaagcagagatgtgcttccaactctcccattatactgactgggctgtgtgtgtgtgtgtgtgtgtgtgtgtgtgtgtgtgtgagaaaaatcaagagtcccaaaaatacacttaacctgaaacaaaggaaagcctcagactatgcttcacccttaggaatagagacatggtggctcacaaccatccataacaagatctgacaccctcttctggagtgtctgaagacagctacagtgtacttacatataataataaataaataaatattttaaaaaaaaaggaatagagacattgccttgtacagttgtaatatcattaacagattctttttcctaatactcaagttttccaactgttaatgacacccttttattgtttggtttttctcttttgagacaaggttttactttgtagttcagactggctccccagttcttggtattccacctacctcagcctt

SEQ ID NO: 27857 - DNA, 1174 bp, Mus musculus
atataatttaggttcatagaatcaaagttttcaaaatagtgttttgtattttaaaaggataggtatgcagtcatctgtgaatttgcctaattatgccaatagagtgactattcctaagtagtctgaatagtcagatatttgcacttgattgattaattgatttataggcagatttttactatgttgccctggctgacctggaacttttctaagtaggtcagactggcctcaaactcgcaagaggtctgtctgcttctgccttccagatgctgggattaaaggtaaatgccaccatgcctggttagatttttatcttctatttattcactaaggaaaacaaatctaagagtatttcagaaaacagaatctagaggtttttgcttacttgccttgtcagttttaaaaaaatattttaattctgtacataacctgtaaatgtattgttaaacacgaaatgtttgtagtttgtttttgagtttatagttaatttcttattgattactttcttcttttttcctttgttgttaaactatagaaaccctggctatgaaaggattaacgttgaactgtttgggaaaaaaggaagaagcttatgaattggttcgcagaggtttgagaaatgacttaaagagtcatgtgtgtatccttttgaaatgtatttaaagattgaatgggctgtttggatataagaaaacaaatggagtcaagaaatgtaaatccctgttaccatgaggaaatgatttttttcttaaactgaaaatggaactttttttctaatatgactaaatgcattttaacaatatatgttagataaattgtgtctatgatgcaggtcttactttgggagggcggtgttgctatggcctgaatattcatatctctttaaattcatacattgaagccttgtcacagagtgatgatgttaggaagtaaggttttttgagaagtgactggggagtggggatagagccttcaggaagctgtagaaaaaccctcagggagcttgttagcccctttgtcacgggtagatacagataggatgtgccatctatgaaggagacagcatgactcgctagatgatacatacagtagtatgaacagcaagcttcttttatttataagttgcctggtttaagtaaggtattttgtaatagcaaatggtccgagacaagtg

SEQ ID NO: 27858 - DNA, 1116 bp, Mus musculus
gagagttggagcaatgtgtagaattgttaaaaaaatattgttaagtttttgttaaaaatcactttattaaaaattaatactctggtagaataactatagtcttttgtcattttcattaaagtaagtttttaaatttttgtttgactttatattcattgattttatatatatatgtatatatatatacactcacgcatatatatacacatgtatatatgcatgtatataatatatatatatatatatatatatatagttcagtagtgtccatttaacccttaaaagtatttttctgcctctacagctatataatatttgatgttgaagtttttctaaaatagtcacctgcatgtattacagcgtgaataactgtgaagcagagtaatgtgatcttctgttttcttaggaccctgagggctgaacccagggcctcctgttctagtcaatagaggggcatttgctttgtgaacctaagataagtcttgtttttcccacactgtgaaggaaacaagataccagttgcttcagcttcggcctgcacagagagcatcatggattggttatgctattgcttaccatttattagaagactatgaaatggcagcaaaaattttagaagagtttaggaaaacacagcaggtaatgacaaaacagtttattgtgtctgattctaagaatgactgaaagaaagaagtttacatacatacctgaaaatctctgtggttaatatcgatgggcttgctttctgtttcttacgagattgcacacatgctcttttatgtcctgtgctcctgagaactgctctagttgttactactgatggtgctatctatcacggagtatcaagattagactgactctaacttgtagatagtataagatagtgttgtagattgtcttagttctttttctttctaacagtctttcctgattccattgtttggttttgaagcatgcctatcacctagtaatcattcctctgggagtctatatcggaagcaattttaaagcgtttggattttctttctttattattttgctgtgcagtaatgcttttggactgttcctgagtgtggatctgtttgcttttcctaattattagttaaaggtgtactt

SEQ ID NO: 27859 - DNA, 1186 bp, Mus musculus
atccagaggttccaaataaaccaaagagttaaagtggagaagatcagaacagaagcaatgtgcagtaactcagatttttaccatgaagtctccaggtttttgatattctacctaatttagagtagactaaagaaaataatttacttaatatggctaatgagtatttaaaataaggaaaatagatggaaatacttttaaatgattgctgatatatttaattggtaaggttctacataattttcttgtacaaattaccctttcacttgtttgtttgagacagtctccctgtgtagctgtagctctgcttggcttgaaatttgttttgtagaccatgctggcctctaactcatagagttcaccccgtttctgacatatcaaaggtgtgtgccattgcatccagccaggtgtacttttaatttagaaaacttgtaattggcagaaatccatgcaatttataattacatataaacagtttttttccctctttctctcctcccttccccgccccccaaagctaatatgttagaacggctaaaaatatatgaggaagcctggactaaataccccaggggactcgtgccaagaaggctgcccttaaactttttatctggtaagtagaataattgtaaaagaaagtgctgttgtgctttaaagatgagtatgtatttatattgaaggctaatgtgtgcattttgttagcgtttcaacagaatctttctcttataggagagaagtttaaggagtgtttggataggttcctaaggatgaatttcagcaagggctgtccacctgtcttcaataccttgaggtctttatacagagataaagagaaggtaaagccaaccctaataccctctctcagagccgcctggctgctgggctcacgactgctcactactgtttgtgagcctgctgtgagtcctagctcactgaatgcctgtgtacccttttccatttgtagtctgtttgctcttcggtgctttactgacttcagtatttgctttctatccttaacttcatcttataccaacattttttctaatctcttttccttatttttttttaaagatttagttatttattatatgtaagtacactgtagctgtcttcagacaccccagaagagggcgtcagatctcattacagatggttgtgaaccaccatgtggttgctgggatttgaactt

SEQ ID NO: 27860 - DNA, 1579 bp, Mus musculus
gaagcctacagagcaagttgtcataagcttttcccttatgctttggctttcatgcctcctggatacgaagaggatatgaagatcacagtgaacggagatagttctgcagaaacggaagaactggccaatgaaatctgaacatcattaaacaagcaaatggaatgactttggaccatatctagtgtataatatttttgtcacgcacctgctgcattgctcttacttacacagaatgagaggagtaaatgttcttgccttcaaatagtcttacgttttttatcctgctgaaaactatatataaaatatctaacattacaggatataggttcagtttcttaaaaaattaaaagctgctaaaattgaggggtttaaaagaaaaaaaaaatccgtatcctattcctaccttcccttcccatgtttttaactaatttatataaaatctggaggctataacagctaacatagcaggtgtgtggcagaaatattactttaaatttgtcttgtgagattttgctatatctcagacagcataaataaatgctgttttagcactggattctttcactgagcacaaagagttgttggggctttagcatctgcctgattctgttacggggttggtgattgaccataggaagtatgcaatgtgaatcactgtgtacagagccgtctacaacacatgcttgacgttgtagagactgggacacatagctaccaagcggattaagtgaaacctagaaggtgttcagtacgtgtgttgtgtttccaaaattcactgtacatgatcagtttggtgttcttgtaccacagtttttaaccgaaggaaccagttggaacaatctcaatttaactaaaacttgaagaactaaaataacaatgcaaacctttagcattgttttggccaaacttgttaaaactgtaatgcaagaaccaaatgcactgtgatgtggcaccaactaattagcaagcatgaatttttcacctgagagtgaaaaaagaaaactctaccatggcttgaagttacagagcagaactcctgactaccattctatgactgatgaagagactaatagctaaaacctcagcaggccttgttcacgatatgcagaaaagtgctgcagtttagatacctctggaacttttccacagtgtcacaggtttgtaatacttgaagcccttcatttctaagaatatatttctcgctcagttgtttcaggcaagcccaagactttgtaatttttaaagggcccaagatttttttttcaataacagaccagcttctttttcctgcagttacaaatgtaatttctttttttttttgttgtcaaacataaggtaccaaatatgcaataaattgttttgaaaaacagttgtgtgaatatttccactaacctgagttgggcttctgtgaaatgcacaggtggaaacagaggttgcaagccagaggcaatgaaacacactgtagggctagtatagaggggagcttttagagccggctaagtggtggtgtcaggaaagttccagaactaagcagaatgctgctcctttgttcagatttcactgaggctaggatggtggc

SEQ ID NO: 27861 - DNA, 1491 bp, Mus musculus
aaacaagtcaaacctgtacactgagaacgagcctcaggcttaatatttctttatgtttgcaaggtctgagcaattaagttcaatgaattaagtgtatataaaatagaacttttgtagtattttagttatacatagtacatacactaaagggaattttcagaagatcagatccttttatttcatagtacatgatctgcattccacatcccagtctagcaggttagtgatgcaaagatacttccagtctgaacttcagtgcttacacaggccctgtctcaggaacatcttaacagatggcaaaaaaaagtgagcagactttacgaatttttctcctatgagtggcaactaaggttcctgttgtttggaaaaaacactagtggtatgtccgctactaattcagtgttggaggaggcaccagccatatagtaggggtgtgtgtgtgtgtgtgtgtgtgtgcgcgcgcgcgcgcgcgtgtgtatttgtttaaattctactgtatatcaccatgaaatctgtctgtttgtcttgacaatgtttaaatgatgtagattgtcttagaatgaatactcagaagtactcagaactccgattccgatgccacccgagaggagtcagactcctgtcatgtatattgtattccaaccaatttactggaactattgaataaatctttattttctttcaggtttatttgacagtggatacattgtctggtgtcacaggaccttgactgggttcacctaaaacattgtactttactctgagtatatatttatttcaactggatcatttcacatttaccccgttgatattcagttaattatcagtgatactgtgggggaaaacagggttagataaacaagttggaaaaatgcagtgtgatgttgtaatctaaacaagtgccttatgtttattgctaagaactggtgttatcaacccttttactaagaagggtccctcggcctgtattcatgtaggaaagtgaagagccttctgttttcttcatagtcacttactgtcatgtctcattgaaagttacaatctgacgagcttagtttacttagctttaattagataggtgagtcatacattttcaccattttttcctgtatttattatgcacaataaaatgatctctaatagcatgactaaaagtagtgccgatgttgctggaaagctttctgggtcgtacgaggccctgttttttcaccgtgattgtaccgcatgctctactactctcagctgtgaagtgaaagctgtgaatgtatgaagagctcagaaaaccatggagtgttgtgacaaactcacatcctttctaatcaattggtaagactttctgttgccgggcatagcatctgtttggggaaagctaaaagggaaatactgaaaatgctaggcatttgttattttagataattactgtccttggattctgcaggtcgaccttcctgatgggaggagtcttcctatctgcatcgtgctcctggttct

SEQ ID NO: 27862 - DNA, 3088 bp, Mus musculus
tgtgagaagaaatggatttaccttgtttgcatcaagttatggaagggttttaagatacactttcaggaagaagagagggaagttatatctaagcagttgttatggcaactttgcagtatctccagtagtgttgctaattttttcttcttcttgggtacacattaattgtacataacctagtacagtctggcttgtgacacacacagctcattgaattcaaacacaatagccagtgtgcattctaaggcagaatgcaaaattctctttgaaatcagtgtcacgaaggcagacatgctgatatcgataggtacaaatcagatctctagctaaggcttctcgtcacagcggatttcaaagcatttagctgcttccaagagttcacacctgcgcggttaatcccgctagcgtctcagcctcctcaagccatatgtaatcacaattgcagaagtacagagaaaaccccattattttactttagcacattagatctgtaatgtaactgggtcgctctgaatgaatgccgagtttggggaacactcccctcccccaaggtgtccatcaccgagaaggcctgggaacaacagttgctgaagccggtagctgtccacagtgctacctgtggcctgtgtcggtttaggcttaaaagctaaagctttccaagctgcaataaagggctctgggaaaggggagagatgcttgggagtaggtggaaatggagagaggagacaggtagagagcggtttgatattctgtggtcagttgcatcttggtcttcacaactttcaggagtgctttatctggggctgcgacacagcttttccatcaagagccccaggtggagaactcagccctcagttgtgatagccacccctgggctctttcacaagcttcctgacatacctaccgtcaggctctgcacccaggtgacgatgctgcccgggagtgctagtcacatccctgtttgaaagcttaaggagcgagttccctcgggagaaacgtcctctggactttcgaggagcctcctgcaaagaggactgaatagttttcagactgcaagtcagcaggataggatggcttctattctgtagaaagacaccattcagtaaactctgacaggaggctgagtctgtgggttcagattctgagaggagcttttctgtaaatgtgcccaaagagagttggctgctttggggagaacaatggctgaacttcagtgaccagatgagaaggaggacggaggacgagagaacaggttccacctccaatcgcccaggctcacaggatttcacacctggggatggaaccttagcctcagttgctgtaggggctcaacctctatcctaaagggctactctagcaatctcatccaaatgggactcaaaaacaatttgggggggcttaagggccagcaaaaaacgtttagcaggtaaaggtgctgttggcaagccgatggcctgagttaagccttaggacatatatagtaggagagaaacaactcctgaaggctagcctctgaccacacccagcatggcacgcacccgcccctccacacacacacacacacacacacatgtggctgggaaaccgatctacttttcccatcccacagtggaggaagacacactggacttcaaacccagcagcaatgtgtcggtgacccttagacacaggaagcagaccctcagagccgagcctccctgtctcccctcgccctgggttcctggtgcctttcagctccttttcttctgctgtgtgagaagcctgggtgtgtgtgtgcagaatggcagcccagccgattgctccacctctttccttatgtcttaagttcctcttctctcttgctggactctgtgcctttccctgactgtgacccattccagtcactgcccctgcctccgccttctctatccctctccctccctcttcctttccctccctcttccttttactccctcttcctccctcttcttctccctctccctcccctcccccttcccttgctttcccttccccctccctccccttccccctccccttctctcttcctctctccaagttaccaagcataggtaacttgcttagtcataggttgcaactgttaaagaggccagaacctcactgtggagaagagaagcagacagcataggcgctgcatagagaattagctgctgagggaggttggggtttgctccttgcttgaaccaaaacagaaaagcctccgaatgtgccttctactgtagaaggacataggaagcgggcaagtctggtcttctctcaggatcataatcacaaacagccatgattgagattctgtgtggtagagaagaaaaagaactgtgcgctgtcttcctgacagctggcgcttgtgggcttacctgcctgacgtcagcacgggtctcgagaggcctcattcagagctgtctcagtccaaccctgcatgacttgacccatctttagcatctttcctatgctgaactattattgccttgtgttagagttaggagttaggactaggaactaatccatggagcacgtcccccctaactggggcatacgctggaactaacagaagcaaaagaaagaactgaaattaggacacaaaagaatgataaggttacagagtaacaggcggaagacttgagtttcttagtacagattcttattttaatcctctcaatccctgacctctccagcaactaaaaaggaaaccttttttttttttttgtcaaggcctctttgaacctgactgggactagagttcagcctcattcccctttggggttcatcagtcttgaaaaactgtttccttatcaccaaccctcacacacacacacacacccacacaccaacaaggccatgtaatcatttacaacatttaattgtgacaattaaagttgcgttgagcagcaaatacagctcaaagtccaacatctgcctagcagctagaggccctggcttacgtccctagtactgggagtggaagggtcaattgtgaacactgaaataaaaggttgtcttcgtgagacagtatgtgacacttttattaattttacttaattggtttaagaaaaaaaatctaaatttctca

SEQ ID NO: 27863 - DNA, 1053 bp, Mus musculus
tgcctggtttatggttatgctgagacgagccttgggccccatatgtgttagatgaacactttaccagctgagccttccaccccagactgcctagagtgggtgctgaagctggtgggggtgtgccccttctctgagaactcgggagtgacacccagtgcatgtgggtgagccgctcccttggcactgaggtcctcggttgacccaagagtgacctttcccgtcttaatgtttaggtttgtccacccccgtttcgggccgatcaagtgcatccgcaccctgcgagctgtggaggccgaggaagagctgaccgttgcctacggctatgaccacagccccccggggaagagtgggcctgaagcccccgagtggtatcaagtggagctgaaggccttccaggccacccagcagaagtgaaaggcttggcactgggtcccagagacctggagtagaaacttggatctatgcactacatttatctgacaacgggacaaccagggactattcatgccatgacatcacatcctctcaccctgcgttagcaacgactctctctctctctctctctctctctctctctctctctcccccccccctctctctctctctcgcatactaactaggtttgactgtattactcgtaccagatttaaaattagctagccttgccacaacgccctactgagaggtactgtcgaactgtagacagcatgatgttctttgatggtgaaagtctaaatctggaccgtgttcagagataccaaatgatgaggctgaaaaggggaaacggggttcttcagtctcttcttcttctttttatttttttttccatgatgttttctctatggccagtgcaaatggtgttgtcacccttgcatgttgccaaccgcagggcaggaagcaattacatctttatatacacgtagggtcatttgccttttaacctttgatctgtatctcttgcagtagaatggctttgtttttgttgttcctctcctagtgacccgaagcccagtgttttgagtaatttctttagcttcactatactagctatac

SEQ ID NO: 27864 - DNA, 1179 bp, Mus musculus
tctgacctcacatgctcaggagtttgttgttttcatgacagtacttcagtactacacagagcagggcttcactgtgtgtatagcttgtctttcttggacgagcatcgtccctggggagaggaggcagcccttaaaggaagctaggaagtgagctgtggacaaacagtgctgcgtgatccaagaagcaagaagacctgcgctatttaaacgtgttccgtttagagagtcatcacatggaccgaggatgttaagaaaatctctcctccaagggtagtgtgggtgcactttcatgccttctacgagtatatcttcagaaaaatgatttttatgcaatacgaccatattcatgactgccatgttcatgactaatgttaaaaacaaaacaatacggacgttgtacgagtcagaggacccctacatttagaatatagcatcgagttttattctcaggatgtgagctgaattatggcatgttgaaatttttcttttgtaaaatgtgtgtgtgcacgtgcgtgcatgcatgcgtgtgcatgtgtgtgcacatacaagtgcctggagaactttgtatgctctttttgtatcggtttgggaccatcgggtcaggagctgatgtgaggtagtttacacatggtgtttgaccctaaatggcctgatactcttcctgagccctggtggagtatattcatctccttcaacttttctgactacttcataatattttagttataaaaccaagaatgccatctagggtacttagaaggctttccttttgatttaaataacacacaaattcttcttctagaaatatatatatatatatatatatatatacatatacatatacacatatatatacatatatacatatgtgtatatatatatatgtatatgtatatgtatatgtatatgtatatgtatatgtatatgtatatgtatatgtatatgtatatgtatattcccaaatgaaaacacacatttttaaaacatcagtgattaagggcaggggagatggctcagtgggtcagagcttgtgctgagcaagcataaggacccaggttcaaatcctcagaatccatgtacagaactgggggtggcacaagtttgggggtggggccggaggtgaaaagattgctggcactgctagccaccagcttagctccaagtatcctgagagaacat

SEQ ID NO: 27865 - DNA, 1106 bp, Mus musculus
ttttagaaagtgggatgtagttcaatggtaggatggtttcctaacatgcagggttcactccctgacactgtataatcaacagggcgttgtggtccatgccatcagttgtagcatagatagatatacagggaaatgacttgtatacttgtatacttgtatacacaggttaaacattatggagaattattataaaacgttggaattggaggctggaggattgtaagttaaacggcatcccaaagatgtctgtcctgggctacttcgggctacatgagctcttgagacaaaaacaagagcaaacaaaagacaagaaaatgaaagaaaaaaacaaaacctttcaatgtttaaagaagtgttgtctttttcttgtttttggacatggtatctaagtaacatttatcttaaattgatagtgcgagcacacatttgtcaactggtatgcatgcatatgtgttgggggtctagcgggtctcattcttagtttctgggtctcttactgtgacagatttggtcagactcggtttgagatgaactccggggatctgccccctgtaatgcatacaggcttgtgtgtcggtgcctgaaaccagaactcaggctctcaagcatctgaggcaaatgcttcctgactgagccgtcactctggtctcctaattttagtttgattttggctacaatggtcataagtaagacataaagcggtacttaacactggaaaacccaggctcttttaaacagcccagtgtttgtaaacaatgaaacctcatttccatgaccggtgccaccttccgacaccccccccccccccacacacacacacacagaaaactttctgaagcttgggaagtagcacttttttcttttttcttttttctttttttaagtagtggttttgagttgactcttgtttattgttttgatagactacctaaaagaatgttttagggctagtagttggtagtgtgcttgcctagctagcatgcaggatgtcctgggttttattcctctgtgccaagtgaatgctggtgatcctagcctgtgggaagtcgaggcaggagggtaagacgtttaaggtcactcttggccatacatgccctgggctactt

SEQ ID NO: 27866 - DNA, 1199 bp, Mus musculus
gtatagcacagggggaagggttaactagtctgagtaggaggtctctgtcaggctgtaactgcccctctgcgcacacacacacacacacacacacacactcacatacactcacactcacacacactccctagattacaaagcaaaagttgctagtctttgcacacactgataagtattggttcataaagaatcattcttagacttcctaaaaaagctttgccatttctctcttgcctggcccgaatgggtaatggctttgccaatttcccatgggccaattggtcttggagtccttaacaggcagtgcctgtatcattattcgtttgctcagggcttcttcctcagctccttcatctccctttcccattccttatgaatctccacacttagttgaggtcaggttcacctcagtctccacactgaagatggtcaggagtaacatgacagccactgcataccaacaaaacaaaaggaatgccctataggttaaagggagtaaggccccaaagctcactaagtattgctttttgtaatattagcaagagaaatggtctgatggtgagccttttgtgtttttagcaaatgccaaaacagttggactgtgtatttgctgccgttattgagtccaagcagaagatggacccaaatcacttcccagctctggctttacttgaagaagttcttgtcacacacacacattgctaatccatgtgatgtattaaatcatacttaatttgcagggctatagcctactctgaataattgattgaagcccactggaacttcaggtgattagaatagtacccctcaaaacaaagggaatcgttaagtagggggtattaaagagttgtaaccaagctgctgttaaaaagctgtggtctacaaatataagtccagtaagctttttccacgaccagttttacctgtatggatatgattatcagccatctgagaagtgtgactgctgagttattccccagtcccacgtgtcttcagacctgaaatcaggttcttctctggaccctagcggcgattccacaccttctgggaagacagaagcagatgtgttcttcctcatcagcacggcggggggggggtcaaggcatcttctggcacatctgtctaagtgcacatcaggtctcactctcctgttctgtagcagtggggctgtcttctgtacagtctaaatcttttaatgt

SEQ ID NO: 27867 - DNA, 2052 bp, Mus musculus
ttgagaaggctggagcttcccctacccccaacttgattaagtacaattgagttgaaaatgactatatttttattgtgtgtgtttttcccctttaggctacatttaaaagtccttcagattgtctgacagcaggaactgaggagcagtccaaagatgcccttcacccctccttatagttttcaagatttaaaaaaaaaaaaaaaaaaaaaaaaagtcctttctcctttcctcagacttggcaacagcggcagcactttcctgtgcaggatgtttgcccagcgtccgcaggttttgtgctcctgtagataaggactgtgccattgggaatcattacaatgaagtgccaaactcactacaccatgtaattgcagaaaagactttcagatcctggagtgctttcaagttttgtatatatgcagtagatacagaattgtatttgtgtgtgtgttttttaatacctacttggtccaaggaaagtttatactcttttgtaatactgtgatggtctcaagtcttgataaactttgctttgtactacctgtgttctgctacagtgagaagtcatgaactaagatctctgtcctgcacctcggctgaatgactgaacctggtcatttgccacagaacccatgagagccaagtagccagtgatcaatgtgctgaattaatggacttgtcaaactttggggcagaataagattaagtgccagctttgtacaggtctttttctattgtttttgttgttgtttattttgttatttgcaaatttgtacaaacaacttaaaatggttctaatttccagataaatgacttttgatgttattgttaggactcaacatcttttggaatagataccgaagtgtaatgttttcttaaaactagagtctactttgttacattgtctgcttataaatttgtgaaatcagaggtatttgggggctgcattcataattttcattttgtatttctaactggattagtactaattttatatgtgctcagctggtttgtacactttgcgatgatacctgataatgtttctgactaatcgtaaaccattgtaattagtacttgcacactcaacgttcctggccctttgggcaggaaagttatgtatagttacagacactctgttttgtgtgtagatttatgtgtgtattttaaagaaatttcacctgcttttattaccctgtgagttgtgtacagcgcatagcaccaagtcttcagatagatgccacgtgcttacagccttctagggaagcctgccagatgatgccctgtgtcacgctgtcatagttcccatgggaactctgtctgtcgctcaggaaaggggaacttttatctaaggtgatgttctttgtctgactggggttcgcctcctactactctgagctgttggcttttgtcacgatggaggtggctttgtggctctgtcctgaagaatcctgtcacttctcggtccccacctctgttctctttggctctgaacagtgtaaatctaaggaggaagtttacaaataggacttcagtgatttatggagtgctctgtgcgcctaagtacagacagtggcaggattagttaaaaatgaaggcagtaaacttggaaaccagccagctataaatggacatttattttgaaatccttagcttaagaatttgagaagttttttcagccttgagcagcctaatgtgtctcaaacatttacgttttttatacattctatttacctgaaatcctgccagaccaggataattggttttacctctcattccgtccatcggtgtttcccagtctcccacagtttgaggaatagatgtaccccagcacccctctttgcctttatgagaaggcctggtttgcatgagaagaccaaattgcacttccatgagaagaccaaattgtttgtagtgttacttagctctcccctcgtttgttagtgtgtgttaacaagaataaaatgtccctgctttcacccaccgttggccagctttgtcataggcttcccaccataactttcactattttaaacacatattgagccactgctcgtc

SEQ ID NO: 27868 - DNA, 1102 bp, Mus musculus
agcctccgtgtgtaatcattcagtagaggcagctaccgccctggcagtggtctacctgctgaatgccactgaatgactaggaggtgtctctcccttcagaagctgtcaatttcagcagcaacccctgttttccttggtgttaagatcccagtgtgaatcatgggcagttgtctggggcacagtgaactccaggaaaggcttcgtatctgttttgaaaacaaacatcaaacgtgtgagctccgagggtccttttctgggagaatgttcgctttctggtctattattgtacatgattgctctgtgaaaagacttcatctatgcagccttgtttgattcatttcctttggtgtgttctgttgttaagagcaaattgtattatagagctatttggatattttaaatataaagatgtattgtttccataatatagatgtatggagtatatttaggtgatagatgtacaacttggaaagttctgcttggacaaactgagtctaagttaattagcaaataatatatcctgatgagcaggaagccctgaaacctaacaacagtaagcggagaaaatcacttaaaatggaaacagttccccaaaggtgttcaatttgaacttgttcaactgcttaatatatggtcccccccccccccaaaaaaaaaaccttgaagttcttagttttcagctctccaagttactgattttaagtgaagtttctctgtggtttcagctggggagtgattgttcagtagagtgtgcattgtgctttatgcaaaccaaacagcctggccctgtggccggggacagacagacagcccgtcaggatagagtcccgcccttcgccaccacagcggacttgagtaacagtgcagatgccttgctcctgttccattgctatctgagaagtgcctgatgaggatggtaaacttacagacacaagaacaatccttactgtgcgttgtataaagccataaatgtacataaatcatcttaagtggcttggtgtgtgtctttcctagtgttcaaaggttcctgagcgagcatgtttttattcagtcatcaagcacttgagttagaccgtcaaccccagtgttaatggcgtatgac

SEQ ID NO: 27869 - DNA, 1175 bp, Mus musculus
accatagccagtataacagaactttttgttatgtcactccccaaactcaacccccatcttccttgtctccatagatgtcctcatcttaaaaacctactgaaatgactttctcttggcacagagttttctactcttgtcattccatgcaaatagaaccattcaacacagagcctttgatggctggcttccctccatagtatgctatatctcttcagagccttttgtgttttgttaataatgagcttaactcatgctgctgctttctgtagaacttcagcttcaaatagcagtaagtactgattataataatgacacaataaatatcctaggtgaatactatctaaaccagacactctatactatacatactatctcttgcctcaccctcactacaagctacacaggagttataatggcccatatttcccaggttaataaagaggtgccatgctacttgtcaagtgataaagcaaatattccaactcagtgatttgactctaagtcattcttctctgttgcatgacacttgcttagtctgtctcagaagatatacagcatcatcaacctcatcaaacccctgacccttgactgtagctttgtctaacatcaaagaaataacagagaaccagttccttcatggcacccccagcacaactgatatgctcaggctgaggatacagtaaccaagaatcttgtgccctagtgtcaggaaggtctgacttctaagcacagatctgccacctttgactgtatgtgtcatgctattgctttctaattcttgatttctgagcatatgaaatatggaagacacctttaagagttgtcatgagagtgctttttaaaaatgatggctaggacggtacctaagtccaagtaaattttggcagtatctgctattgattattaccatattggacaataatagaatgataccaatcacacagaaatgatccccagggaactctgaactgtcggggagatgagagggcatctctggcagaccttgtgtatatgatggaaggtatggatgcaaatggaaatataaaaaaggcaaatcagggctggagagatgactctgtgctaagagcatttagtgtccttccaagggacccacgtttaagtctcagttcctgcattaggtgactcacaaccacctgcagttccagttgtgggat

SEQ ID NO: 27870 - DNA, 1132 bp, Mus musculus
gacagaatggctaatactggtgtgttggttgctttggatggagaagggaagagcactgtgttcactgagaggaaagaaatgctcctgttctcattgcttagccatggcatatccctcggaaataaaccccacggaagctgcattctgtttatcagacttcaaggctcagagcatgtaacaatgaaaacaccaagagagcgtgaagtgggcgcattctctgtgtccagactcattacagttgtgggagtgagaaagggacattgcaaagatgctaatcactaagcggggcatgggggggggggcttttaaaaggtattggtgcttttagttgttaccttctgactcctatctcctatgctgatggctgagtctctacaaaggggacatggatgcacaaggagaaggtgtgtttataaacaacaaggccggacccagtgagagaagatgaaagaaagatgagtcaagagccagaaggctgccaggttcttgtcatgcaatgctctgtcatgcctcatctgcttcatctctagagcctctgttctcctatgtggagtctttatcctctccctgtgatacctgcctagagtacatatattctgtgtactttctctccaccattgtgtgaggaaaaattgacaatgatttggcagtgagctaaaactagagtcagatcctttttcgttgaagtttaactttggagttagaaggttgacaatgaaggggaatgacagtcatagttagatcccctgaaagttgtgtgtttgaagaataaagtctaatgccacacaaatgagttcaagcaccttggttggtgtctctccaaacctactgcctcagatcttgctgtttcagcacacatagtaactgtatatacattagtaatcatacatagcccaagcccaactgggcagcccatagttctcagagtcctgtgcgctccaaccttgtaggtaatcgctgtggtcatgagggactccagagtgagtaactgtacatgcataagtagtaacgcatagcacaggccaactcggcagcccatagatgcacgtagaggttagaggtgaggttgggaggcagaggcttgaagactgaatttgagaccaggggacctaaatggctctccatctctcag

SEQ ID NO: 27871 - DNA, 1131 bp, Mus musculus
cgccacgcccagtgagctgaggctctgctaaccgcttgtgcctctcccgcaggtccactcagcatcggcactggagagctacccggcccaggcagacggctttcctagctatccctccacgccaggaacaccattttctctgcaaacaggcctatcccaaagcgggtggcaatgaattttaaaggggtttattcttcttgggagcaacatgagatttacccaagaactgcagtgaacaatctgacagatgacattggccaatagtttgaaagagttccttagggacacagggacagagacacaggttgtgttttgaaagtggttatatcggaacccttaatctgacccatgtaaataagatgacaataaattgtatcgagaatagtattttaaacgtacttgggggttagtacctcccttcctgtaagctttgaattatgtgaatgatccacatagactattgaagaggagactgaagtctttatagccgaacacagccttaagtctgcttgtattgcctccacagacagaagtgatagttggacctctggctgcatgtgttactattaacccctgcgggggttgctattcttcagatgcatgttagcatcaattggaacacagtattctatatgtatccacaactcggggcttgaggcaactgttacttttaatttattaccaatagtcatatgtactgctgaatttaactgaatatatttcaggaaagtaaaaatggtgcttactatagtctttagaatgactttcaggtgttttcaactaaaaatgtatacccagaactacttacagatctataagtaaaggaggcttaggataatttagcaaaacatttttcataatctcggcagtatgccgacaggtgagtcccaggctaccgctgttcctcattgtaccctgggagctcttggtgaatgtttacagtcatgggatgtctttccactcacacactcatctgaagtgaatgtgcggcagcaagagagaagacgtgtgctgtctgtgtgtgcagtgtgcgctaggacccgtgctggtgggaggtgacccaccatcatcctgaacagtagctccacactgggggagggggagaggggagaatgtgaaccagaggactac

SEQ ID NO: 27872 - DNA, 1168 bp, Mus musculus
aatatcactgaaaaacagaaatctgggcacttttatttttatcatgatgcttctaagggtgcttgtaagaaagggagccgttgtcaatgagacctgtgtctggctgacctagctttagtgccacctaaaactaacacacacacacacactcacgacctttccctgccattcatccctgcatcaaaggtaaggatgtgtataatatttaatgttctttgtatcaagaacatctgaaagcgggtgacgtgaacatctccaggcctctggttttatccacgtcctaagctttcactgtgcacgcttattctacaaaagaggccgatgaatatcataacaacagggaaataaaaactttgacagtggtctctcgaggtcaaaacattggcaagtacctgggagcgtggtgctactgttctcattgattgtcatcttctccacggaaaactgtatcttctgaaatgtcgtttttaaatcaaaggacatttctgtgcatctagacccatgagttgttttttttttctcgcagtgcctaaaatgcaattcaaagagagagtgtacacttgcaacgagaatgacgggcgtgtagtggccatgatctacaggagcggtgacatccagcacaggtcttctgtgagatgttacacgaggcaggggtctgcgcaggtgatgatggacttcgaggaacgcccaaataccgatgtttccactgtcacattcctccctggtatgtgtgaacttgaaaaggttttagatcttttatcatatttatttattttgtgtgggtgggcctgggggaggggcatgcgcatgcccagagctgacatgcgaagtcagatgataagtcctaggaattggaatttctctcccctcctccatgtgtgtctggaggattacactcaggtcattaaatttatggacacagtgccttaagcccctgacatttctatatgtaattaagggcaccaaatgtgcactgacaaatgtgtactccagaaaatgcagtaaaatcaagtttcctgattttccaacaagcgtccaacatgagtttatgcgcactgtacagcaaggcatatacattgggacacattaagtagacagccttagggtctcttcattaaccttttgatttctaatcatctattttattgttagttcagaactcagagga

SEQ ID NO: 27873 - DNA, 1237 bp, Mus musculus
taaggcccagcttgaacatctgaaacctcaaatcccaccccccagtgacatacttcctccaacaaggccacacctcctaatggtgccacacactatgaacctgtggggcccacttttactcaaaccaccacagcactcaaagttaacaccttgcatccacaaagccatggtttcggtctccagtactccagaggtagaggcaggaggatcagaagttcaaggtcaaaccatagctatccagtgatttcaaagccaaccttattcttttccaggtattgatgattataactgatactacaaatattaacacacattatttaaagtaacaatattttggacaggtatttaaaaataaaattatgttgaagggactgtctttgaaagccatgaagacaagttgaataaagaaagaatacttactctttccggtggaggagtctggagacgacgatcagaaatggcaccacgcaaggggaagaaggaaaagaaggaagagcaggtcatcagcctgggacctcaggtggctgagggagagaatgtgtttggtgtctgccacatctttgcatccttcaatgacacctttgtccatgttaccgatctttctggcaaggaaaccatctgccgagtgactggtgggatgaaggtgaaggctgaccgagatgagtcctctctgtatgcagccatgttggctgcccaggatgtggcccagaggtgcaagaagctgggcatcaccgccctgcacatcaaactccgggccacaggaggaaacaggaccaagacccctggacctggagcccagtcagccctcagagctcttcttgctctgggatgaagattgggcggattgaggatgtcaccccattccctctgatagcactggaagaaaggggggtcgtcgtggtcgccgtctgtgaacaggacttctcattattttctgttaataaattgctttgtgtaagcttaaaaaaaaaaaagaaaaaaaaagaaagaatacttaacaccaaatagaagagtcaatagaagaaatgaatggagcttgggaacttgaggactttgggtagctttccatgggcagcctggaagtctgctttgggctgagagcagatttgggagggcagtacacttattttttccattctatttgcttccctacttcctaccccaaatgttagcctttgtctccattctgacagctgctccattcttttttttttaatccctgaacactattttttta

SEQ ID NO: 27874 - DNA, 1136 bp, Mus musculus
aaatgtttattgtaccttacttatttgctgcactgccataggcagcttagtacttctacaattgctgtaataaattaccctggaaatgtcccaaggttaaaattcaattctggaagaatctgttttcgctgtttatgaagtgtgcttacacatcagaaacaaggtactttaaaaagtaacctggaggtgaccacttgccctgctctccttgctgtcttggcctgactcccatcccttcctggtaccagtggaccaatattcttgcatctctcttcacactttctttgctgttatcatgggtgaattccattcctaaggcctgcccctcatttcatttctaaatgttacccttctccgtggcttacaaccataatttcccaccagatacagatcacaaacatgctgtgttctcaacttgaaaacctctcctgacctcattgtttttctcagctgctgatttagaggtctccttatcacttccaagcttgtctgtgatctcctttttatcatctttctttgctcacctatccagcactccttagctgactctaccggtgtggcatcattagtcactttctgtttgaatttcagtcagttagtatacaggtggaatgttgcatgcctttcatcccagcattggggagagtcggaagttaaaggcatcttcagcttcatgttcatttaataagtaaagtaaatagaaaaatgattacagggaaaacagtttacacatgtgtggttggttgtttggggaatattgaatggatgaagatactgccaatagctggatgtttaactgagttgattaaaagagggttgttctcattaatctcggctagagaaatagctagtggttggccttaggtagcaggttatgtgctgtacagagctttaagggcaggagtgattagaataactaggcgggtgtaggtaggtattggtatagtacgctcccaatggctaacaacagaatggtaaaaggtgcagtgttggcttaatgtaacattgtaaatagtcattgtcaagattgtgattagtagatcccgagcataaatagaagtgctttaaagaaagcgtgcacacaaggaagtagctcctagattaactgttaggattgggtctggttgattaaaggt

SEQ ID NO: 27875 - DNA, 1109 bp, Mus musculus
ttactgagttccagttactctccggccaagcacatggcttacagctgtgatgtaattctgttccactctccctgtaactctgaagggaaggtgccctccttagccgaggagacagctgatgtagtgtactcggggaggcttgctaatcatcagcccaggagccaggactcaagtccttatcctcaccctggtttgctgatgatttaaaaccagaccactgcggtgctcatccgctccggtcctgaccttgtgctcccagacccaggccccaggaatcagtaactgcacccatagtgctcagcttctgcggcaccatcctgttcagtgtgccttcggtcccatgccatccacactggaggtgcaccgggccagcctcatgttttaagagctgtcctcaatgtctcagggatgctaaatcatttctcttctgcctctgttttagcgctcttacttccgtacctttcttatgtacggattccatttcctggtgtggttcctctgtgtcaaaggaatcagggacacacagtgcgggttcaaattactgacccgagaagcagcagcccggaccttctcgtctctgcacattgaacgatggtaggtttctgactggaaggtgtatcgcgttgcctcccgtgggcatccagacaactggacacaggcttgtcatctcccaacaaatatccagatagagccagattgaaacgtttgttatatgttcatctaagcacaggctagagtgtaccctgtctccttaatcttctttcacctcttacactcccttcccggaggtaggtctctctctgcagtgtggccgttaattactgagctcgtgtgtgtgtgtgtgtgtgtgtgtgtgtgtgtgtgtgtgtgtgtactctctctcaatctctctctctctccccacccttcccatcttcaagcctagccttttccattttttttctctcctgtgttcatccttcctatcttccttcagatcctgtccattgaccctgcctatgtccttcattgaccttgcctatgtccttcattgaccctgcctatgtccttcagccccaggcccatccactccagccacagccttttcttaaaagaggtccctacagcta

SEQ ID NO: 27876 - DNA, 1183 bp, Mus musculus
accactgggctcgtggagagagatagactgctccaacttgctcactttagtagcctttggtatgtttcttcccaagacaaagttttattccaagaaacaaagaaagaattggttgaccatgaaccatcttattttctcctctcttcgttttcgtttttgtctttattaaaaagtctgttgtttgagaatgacacatggagggactcatggctcccgccgcaaatgtagcagaggatggccttattggacatcagtgagaggagaggccctaggtcctgagaaggctcgatgccccagtgtaggggaatgtcaggacagggaagggggagtgggtggattagtgagcagggggaggggaataagatagggagttttcagaggggagactagaaaaggggataacatttgaaatgtaaataaagaaaatatctaattaaaaaaaacaacagaaaaaatcagaatctgcatgaatctaagtatgacctaagtatgacttgaggtgagttgacttggggctgctgttgctgctccaagacaggtccaggctatgcatttaagaagaggtcactttctgctttgccttgacctcatcattgaggaagagctgggaagtgctcttctgagagctctcctggattccgtttccacagtgacacctctcaggacatgaaacagggctgagtttacttaccgccagctttatacactcaccactggataaagcgtttgccagggaaaaacttcaatagagaaatgagaactgatgtaaccaaattaaaagcatctccaacgttacacatactcaattgtgtcagggaagaacaatggatcaaatttggggtgctgtcattttacatttaagaagcaatctggaaatggcactcaatttgtaatactagaaagacagctttcaaagcggaagacgtttcactgtaaaactgaaggaagacacagacttttctgctttattttccaccactgtccaaaggccacatgggagactgggagtttcacccacagcttcttggtgttttctctaagctgttctatagacagctgaagcttcctgggaagaaggtgaccttcaggacagttaccctgacaggaaagacctttgttatgacagcatctctagacaattgccagctttgccaccggcatcctggtaccacagtagtgttcc

SEQ ID NO: 27877 - DNA, 1158 bp, Mus musculus
ctgcaatgttcctcttattcgctagctcttctgcctactaggaaaccaaaatggccttgcgatttaaacggaagaaatgcttctttaagtctttatgactgaggctagggaattttttgatagaatgaatttttatgaattctttgagaattttgtacatgcataaatgtgttttgattgtatccccccacactccccaactcctcccaggtccacacctccctcttccaacctcatgttcttttgtgcgtttgttttaaatagtccagtgtgtgctgcccgtatgctcatgggtgtgggaccatccactgcaggttggttcatcctccagggaccatgctcctcaagaaaactgacatcttgttccccagaagccatcaactgtcaatagccccccagctaggccgggggcttgtgagaccctgcccactgcaggctggggtgttgactggtttgatcctgtggaagtggcctcagctgccgtgtgtgtaagggtcctgtcatgcccagaagatgtgagtttatccacgcctcctggacttctgactcttggccattccactccccatcctccatgttccctgggctttatggaggtagactaaggaatgttgaactatgatttgtattctattaaaatttgaattgattgttactggcactaagaaatcacttttccatatctgcttctgtaaggttttcctaaatttctagaaagtaaaacacaaacattgcacttactaagtgtaatatatctccactcagtcattacaatttatactgaaagccagaagtgatgggaggagcctgtccataccacagggaagaatatggaacccttggtggggagccccaacttttgcagaatacaggacagacatttgcccattttcttttaagttacaaatatgtaattaaatactccatggtattttatttctattaattttaaaaggttgatattggtttttatagttttggcctattgtaatcatttctgaacctgtagttgactagcttatgaatttcatttgaaactggttaatgaatgtgctttgagaataaaatggtttttgaattgctgggcctcagatgtattcactggacttatatttcaggaatacagaactaatgtttttttttttttccttatagcct

SEQ ID NO: 27878 - DNA, 1463 bp, Mus musculus
ggacaactcttgggaattgtttcttcctttcttccctgttgaggcttctcccttgtctctgctgcagtgcactccgggccatgagcttgcagccagttctcgcgctgcctcagccagcatctttcgtggattccgtgcggcgtcagcttcggatcaccaggcctctcagccacctgctctgccatctccacagcctcacgacagtagttacttttaagaaacattaatatttgaaaatatgtaggtttggttgcctgaagttagctttattaactttcatgatgcagacatgcatttgtgacgttgtaagaatgggctaaactcaattaatgtgcacttctccctccaacagtctgggtcgtattaacggtccatgtgtggggctcatattctagatcacatgccgggcacagttgttcagttgaggaagaagggacaaagaaagatacttgaaatctgctgcccccgttgtctgataaatgtgctagaaccatccaaaggtacctagaaagattgttgacgacagtgagaaccttgtgttctcaggcatcttcatccatgttgggatttccctggccagtgagctgcaagcagcgcagcctaagtgacccacacacacattaattctaccaaaaagtaattgtgacgttactgtgaaaaccatactacaaagaaggcccatgtgggtgtaagcttctacaaccaggcaggccagcacgcacggctcctgcagcctggtgattggctctgtcattgatttctgttggtatcttttctagattggcatttgaaagagcccccttcttccatcatcatccaaactaagataagcaggctataaggagcggcagccctgccctcttggcgatgtgggtagattgctgtgctttccgctgggtttgcaggcttgtgagtagaatggcagccaggaggggcattgctttccttgctgaacccacacatttctgtccttgccttaacagggtgtttgagcaactgttggaaacaaggggagagaaggatggctgttttatatttcactgaaatgttcttacacaaacattttattgttaaagtgtctaggtttaccctgcaatccattgttttgtttaataaaatgttttctcttttataataatagtgtgcaaggaatctgatttcattaagcttttgagaaacttaataattactttggctttttttctggttataaattctttgaagatgccaaaatgacaaactctgtggatttggggtgcacggtgtgaaggattgtgtccaacaaaggttctatgcctcttactggcataatgagtgtcaatagtcccagctgcagttgcttcgctattggaagagaagttgttgagatgttttggattctgtaagcaatgttccatccttggctggcctcttttactgctggacatgatgcttgaatggggcggggtgtttcccggtcaata

SEQ ID NO: 27879 - DNA, 1099 bp, Mus musculus
acccaaaacctcctgggcgagttaggtaagctggggtatcgggcctctgctaaaaaggctcagttatgccagatagaagtgacctacctaggatatgtcttgagagatggacaacggtggctcacagaagccagaaaacaagctgttatgcagatcccggccccaaccactgctcgccaggtaagagagttcctggggaccgccgggttttgcagactctggattcccggatttgccacactggcagctcccttatatccactaaccaaagagaaagggaaattcacctggaccagagaacatcagctagcctttgaaactctcaaaaaggcactgctgcaggctccggcattggccctgccagatttaaacaaacctttcaccctatacattaatgaaagaaatgaagtggcaaggggagtccttacccaggttttgggaccatggaagggcccggtagcctacttatcaaagaaactagacgctgtggccagtggatggccctcctgcctgcgagcgatagcagccacggctgtgctagtaaaagatgctgacaaactgactatgggccagaatgttactatagtggccccacactctcttgagagcatcatcaggcaaccaccggaccgctagatgaccaacgcccgaatgacgcactaccagagcctattgctgacagagcgagtaagttttgcacccccagccattctcaaccccgcctccttactacctgaggctgacgaggcccctgcacataagtgtgaagaaatactggcagaagagactgaaatccggccagacctcacagaccaaccttggccaggggcgatgacttggttcacggacggaagcagctttgtggtagaaggtaagcggaaggctggggcggcagtagtaaatgaaaaggctgtcatatgggccagcagtctgccggagggtacatcagctcaaaaagcggaactaatcgcattaattcaagccttaaggctggcagaaggaagggctcttaatgtctataccgcttttgccacggctcatgtacacggagcaatataccgacaccgtggactgctgacgtctgccggcaaagatatca

SEQ ID NO: 27880 - DNA, 1218 bp, Mus musculus
agtgctcttaaccagtgagccatccctctagccccaaagggtgtttcttaaacagccagtcacctttccatctagagaactgggagcagaagtataaagctcataggaagttcaggagccaaattgtctctagttgaagcacaatatgcttttaaagattaatcttcacatatgacagacgtagtactgagtatcatgtagtaagtaatatatgagaaaaccagttcaagagataaccagagctagttacaccataactaagaagaccagttactgggttagtacccacagcattctcgtgctgtatgaggaagagctgttggtagaacgttgttacaagtacttgataaaacccaggttcttacctacagcccctatctcaggaaaagaactgcattagcacaccaacatgagaaaatgagactttatggataggatgtgagttccctcacttccagcttggttctcacagtagcttctcttgctggaagagtagagccagcataccaccagtggtaagagaaagaatccacctgggaagcccttacatgcactctcaaggcccaagagtcaggtttttatgagcaaatactcttcacaaactctgaactcaatttttactaaagcatcctccttctgctaattacttctatacacacacacacacacacacacacacacacaagtcttttcactagaaaattattcataatcatcttgtggtcctggttcctggtgagccaggtgcctatatggtaggcacttagtagatggtagattagataaatgctgctttgagcggcagatattactaataggaatttcccaagcaaacagggagagctattatagaacacgatgcattgaaaacatttaatacctgcttattttaaagtttgtgtagatttcattgtctagggcagttttatctttatggagaattaaactgatacacagagactcttttctttcggtaaagagcaaagcatgaagcctgggtcaaaaaacaacagacttggtgtcctctctgtgtacagatttcctaattcaaaagtgtatattagagaaagataatttggatgtaggacatagaaacacatacggagacatttgtagatgacagcaagctgagtgagtaagtcctagaactaggaggtctcctgggctggttgagctggctgcttttctcggcctcaccgtctttctccattttgccat

SEQ ID NO: 27881 - DNA, 1157 bp, Mus musculus
cgagtccactggaagcattgataagcccctgcagtccattggcaccgagaacaccgaggagaacaggcacttctactgtcaactgctgcttactgctgatgaccgtgtgaatccctgcatttgggggtgggggtttgatcctcacgagactctgtaccagaaggcagatgatggacgacccttcccccaagttatcaagtccaagggtggtgttgtgggcattaaggtagataagagtgtggtgcccctggcaggaaccaatggtgagaccactacccaagatctggatgacctgtttgaccgctgtgcccagtataagaaggatggagccaactttgccaagtggcgctgtgtattaaagattggggaacatactcccttagcccttgccatcatggaaaatgccaatgttctgacccgttatgccagcatctgccagcagaatagcattgtacccattgtggagccttaaattctccctgatggggaccatgacttgaagcgccgccagctatgactgagaaggtactggcggctgtctacaaggctctgagcgaccaccatgtctatctggaaggcacatttttgaagcccaacgtggtcacccctggccatgcttgcacccagaaattttccaatgaggagattgccatggcaacggtcacagcacttcgttgcatagtgccccctgcagtccctggggtcactttcctgtctggagggcagagtgaggaagaggcatccatcaacctcaaggctatcaacaagtgtcccctactgaagcaatgggccttgactttctcctagtgccgagccctgtaggcctctgctctaaagacctggggtgggaagaaggagaacctgaagagttcaggagccccagaggagtacatcaagtgagccctggacaacagcccaagtgaccagtctggagacgcagccagtgaatctctcttcagttctaaccatgcctactaatcagagctgatctaaggctgctccatcaacactccaggcccctgcctacctacttgctattgaagaggggccttcagtccctttcctatcactcttgctgccttcgtgtgtgcagtgttgtctgtgaatgctaaatctgccatcccttccagtcactgccaataaataactatttaagg

SEQ ID NO: 27882 - DNA, 2850 bp, Mus musculus
gttgcacagatataaaattttatgggcaaaatactcataaaaaataaaatttagttgagtgtaatgatacatacctttaatcccagcactcaggagacagaggcaggtggatctctgtgagtttaaggccaatggtctacatagtgacttctgggacagtcagaagtacatagtgagaccccgtcttgaacaacaacaaaaatttaaattaaaaaaaaaaaaaagaacttacaaggaggaaataacctggtcacccttcattctattacaggtgaaaattccggtcagacacccatgaccgtcaatccccagcagacccgcttccctgatttcctggactgccttccaggaacaaatgttgacctcgggactttggagtctgaagatctgatccctctcttcaatgatgtagagtctgctctgaacaaaagcgagccctttctaacctggctgtaatcactactgttgtaacgtgatgcagctgtgagctgacgcgagtcttgggccttgcggaccaagtgatgaggcagagcgggcctgcagctgcaccacgttctgcctttgtactcacactccttgtccgtgtggccacttaatcattgcctggtgttgattcgcaggaacttgcgttacacagaaataaatactctcttttcattttctgcaagcctgcatttctgtggcagataaagcaggatgggttgtgcagaatgactttagagaatgtctgcagccctatggctgggttttattacagttagcttaaattcatatatcaactgattctaagccatacaaagctgacctcaggcagtgaattctgataggcagcttggtccaggaagtgatttacagtttcaaaagctgtattgataacagtagtaacaaatgctttaaaacttatttaacttgagcttcaaaaaaaaaaaatcattgtatagatagtaattttctcctgtagggaatacagtgtagtttggaatccatgctggctctgatggcttctctcattctgtgtttacaagggcacagagtaccaatgttgccaccgttcatcattttcctgcttagcagctccattctgtgagcaggagagtaacttcaacatctgtcacaattcttgcatgacagatcgtgtgaaagagaccagtttggtcacaatatgaatgattacagaacaaaattgttttgtttttttttaattgcagcttggtttttttttcaaaatgcagcttagaatttgatgtttgttatatatatatatatatatatatatatatatatatatatatatataaactctgtaattttgtagctattacagagggtagccaaatgtttttgataaatcagtggcaactatatttttatcttttggacctgattctgaaaacatcaggccaactaggtcgcagcctgatgaaccatgaattttgtgtgctgttttgtattctgaggcattattaattctgctttcaagatttcaagtgtttaaaataatcctgtctatgaaactgtttgaagaatgaagccgatctctgattaacacatacagaaaggccctcgtcaggacatgagctgtagatttgtacgtctgaattcagtaaaattgtttcctaagtatactatcctaatccttttgctaaattggtaagaaaaaaagtccaaggtatgtactcaatgcctcttatgtaaccaacatattatttgtttcgttagcttttaaggaccgagagcttcatgttcctctggcaggcaggccgcctgcacttggcaatgacgtccttagctgtttagtattttgaactgacattatttataatctatgaatttaatctctttttttaatttttattttgaaagacatcaagaagctggaaggaagcttttagttgccgtgagggtgaaggcttctcggttgaggatcttcagtaagatcccttttgatccattgaaatagaaacgcacagagtacatttgatcttggtgggaagaggcaagttgaaaggtcagaggcaaagtagcagagccagggaaggtggcggaaaggccaggtgatgtgaaattaagtagacatgtcagaacccctcaaagacaaggcaagcaagacgtgtgagaagtgccccaaagtgctccgctgcctttatgccaaaagacaccgctgttagagagaagagggtcagggtgcactttactgggaagggcagaggaggaaggagtggggctgtgacattgtccatgtattggcagacgagaacatggactgctgttgctttcagcactcttaaagtgatctctctttttctgaaggaaccccaatttatgtccacgttaattccttgctctctctctgagcacttcaagagagacaagtaggaattttttgttgatactaggttgaaagggagcactctttcgtttcctcttttgttagcaaaagttgcaaaaaagagttgtacattctttctgaggaaaaccaaaaacaagccaaaaacacaagggacctaacaaaacttgacagtgttactatatttaaaaatatttttatagatgcattgcaggttattaagtgtaaaaaacaaaagatactcctttttttaaaaaaaaattagttaagtcatctatgatttatgttaccaagttttagaagcaattttctaataagcttgtggcattatgaaatactagaataattttcttagtaaattagtttaaaactttttaattaatatagtatttttctagagtgaaatatggcccttgactgtttactaatagataaagccagatattataattgttgttgttgtttttaagaacataaaatatggtttgttacagaacactaaa

SEQ ID NO: 27883 - DNA, 1227 bp, Mus musculus
ttatttctgtccttgagtctgtgtatatgttgtagtacactgattggttgatttatgtatgttgaaacttccttgcatttctgcagtgaaaccaacttgaaaatggtgtatgatttccctccctctctctctctctgtgtgtgtgtgtgtgtgtgtgttgtagtgtatgttcttgagcatgctcttgcacatataacaagtgttggccagaggttgatattgagagtcttcgtttgttgctttattatgattattgagacagggcctctcatagccagtgagatccagcacctccctgcttctcaaacctgcttacagacccttgctgacacaggagtcttcacgtgagtgctggggctcctacctcaaatcatctgctcgtatattgagaattttgctgacttgctatctccccaccccccttaatgttttagtttaatacttttttaacattttatatattttcatgtatatggatgcttcacctgcatgtatatctgtgtactgtgtgagcagtattcatggagacccgagagtgcttcagatcctctgggagtagagttacagttgtgagcgaagacataggtgctgagactcacacttgggttttctgaagaggacagcaaggtactcttaaccactgagctctctctccaaagtgattttaaatttgtgttgttattctcagtattgttactgtatggcaatattacattggggaggccagaaggctctgttgataatgtgccttccatgaaagcaggtctatccaagttccagtatccagcacctgcatgaaaatcggtgttgcataacatgactgtcacctaggtgagggaaagacaatagatctctgaagctgatgttcagccagcgttgctgaaccagtggtatctgaaagcgatcatgctgtcttgaaaaataaaggtggagagcaactaaggaaagatacttgacatcagcacgcatgtgtgcatacatacatatatacacatgtccatacatgtacacccacatctatatgagcactcccacaagatactaaatagaaaattagaaacaacagccaccctcctatgtatgcattaaatggaactatgtgtatatcatatttagcatagtaccaggcttttttttttaaagatttatttattaaaggtggtgtacacctttaatcccagcagtcgggaggcagaggaaggcagatctcaaagttcaaggccatcc

SEQ ID NO: 27884 - DNA, 1168 bp, Mus musculus
tatattaatagtcaatgccatatctctgagctcgcaattgcttaaattgttcatccctcagatactattaattctcaaatttacaattgcttatgcatatttctagttaataaataaattatgcacatgtgactcttaataactttgcaagccttctagttacaactgctccttaagaaaattgattaaaagtgcaattagtcactgcccctttacagccatgtatttaaaatattttgtcaactagttattaattcaaaagtttaggtattataaaattttaaaactttaacttcttaaaagacaaaaaagagagaaattgtatccccgtacatactattagtgcattcccatgcacactattaaagtcttacctttattttcaaaatctaatattttaatgtcaaagagtttaataaatgctttatagtatcttaaagggatctacttattggcttatagattaatcctaaaacaactaccttattagaaaagggaaaaacaggttttctccacaaaacgctgcagaagcatattggtaaattcgtgtgacaagctggtaggtaagttgactcatgtcctgattaaattgactaaaaaactaaattaaattcatgttttagatccatccttacttgtcatttttccagtttagactagcttctagctttttaactttatggcaatagtacatcagagactgtatattcagacttagtaaaattagtcatttaatagagtcataatgatttttctcctttcttcagtgtgaccagccattctaactcaatcttagactggtcctaatattcagtccaatgttagagattcctatattctaaattacctagcaagttaattcagagcacatcccccacatcccctagatccctaacctcagaaagattgctggccttacagctagtggaaaaagctattaaagagcaattggtcacttaatacattggtaaaatagaaggaccccctgactaacgaatagaagggtccagatccagttctaatttggggtagggcctcagtttgtgttttttcacgagatgaagatagcgcgcagtggctgccagataaattaatttgttagatgaacacagattctaaatcttctaaagtatcaccttgaggactaaaattcctcttttgcttaaaa

SEQ ID NO: 27885 - DNA, 1435 bp, Mus musculus
atagacagatgtcccatgctcatggatttgtaggattaacatagcaaaagtggtcatcttaccaaaagcaatctacagattcagtgcaattcccatcaaaatccaacgtaattctttacagaccttgagaacaatactcaatttcatatgaaaacacaataaacccagcatatgtaaaacaatccagtacaataaaagaacttctggaggtatcaccatccctgatctcaagctgtactacagagcaataaaaataaaaacctcatggtattgttgtaaaagcacacatgttgattaatggaatcgaactaaagacccagaactaaatccacacatgtatggacacctgatttttttaaaaaagaagccaaaattatagagtggggaaaaaaagcatcttcaacaaatggtgctggcctaactggatttctacatgtagaagaatgtaattagctctccctttctccggcggccgggaagatggcggacattcagactgagcgtgcttaccaaaagcagcctatgatctttcaaaacaataagcgggttctgctgggagaaaccggcaaggaaaaactccctcggtactacaagaacatcggtctaggcttcaagacgcccaaagaggccatcgagggtacctacagagacaagaaatgccccttcaatggtaatgtctccatccgaggtccgatcctgtctggtgtcgtgacgaagatgaagatgcagaggacctttgtcatccgcggggactatctccattacatccgaaagtacaatcgctttgagaagcgtcacaagaacatgtcagtgcacctgtccccctgtttcagggatgtatagatcggagacattgtcacagttggagagtgcaggcccctgagcaagactgtgtgattcaatgtgctcaaggtcactaaggctgctggcaccaagaagcagtttcagaagttctaaggggactctggccaatgccctagaacaaataaagttattttccaacgtacaaaaaaaaaaaaaaaaaaaaaaaagaagaagaagaagaaataaatgggatatagtcttgaacgaattgacacagaagaaaatttcctggaaaacaaaacaaaacaaaacaacaacaaaaaacaccagtagctcaggcactaagatcaacaattaataaatgggacctcatataactgaaaagcttctgtaaggcaaagggcacacaccatcaaaaggacaatgggagcctacagaatgggaaagatcttcaccaagcctacattcaacagggggctgatatccaaaatatttaaaaactcaagaaactaggccccccaaaatccaaatagtgcaatttaaaaatgggtacagatctaaacagagaattctcaacttaggaatctattatggctgaaaagtacttagagaaatgttcaacatccatagt

SEQ ID NO: 27886 - DNA, 1099 bp, Mus musculus
acctggaagcagaggtcctgaaggatcactgttcactggcttgctcctaatggcttactcagccaggacaatcagcttaggggtggccccacccacaatgggctgagccctctcatatcaatcatttgttaattaaatgccccacaggcttgcctgtgggccaatcttataaagacattttctcaattgtggttctctcttctcagataactctaacttgtatgaagttaacaataaaccagccaggacagtctgtaattcaagatgcttaaaatacttaattaattttagactatttacaagcctcataatacatcttgacaatagctaaaatgatttggaacatggtaggcaagcatacataggacttgtagaactttaaattcaaactccagaccattaaatcagtgtggctgggaatgtctgtaatgaattccagtcttgttcttataaatagcatttttattctaaagtgttaatttttattttattggaacttcctgatttgcattttcggcttgtttcttcttgcctggcaaggtatttctgagcaatcgaacacgttaaatcacaggagattgtttgttttgtcatatggggaaaaatgtatccacgtcataggcatgaaaaaaagaaaaaccagaatagatgaagtataagcttctactgaaagatattaaaccgctctattggttaaagtgagttatggagcagtctggcctatacacccagcactgttagatagtatgtctgtgggggtgtggttgtgacataccagcagatcagtgtctcatgtaagtggtaccattattgtagcgcagagggtttgtggcccaaactggaaaattattttcgagatggtcttttgctaaaagagatgatcaaataggttggtcaaagcctgatgctgctgctttttttttttaaaccaatgctattatcatttaaatattttattcaaagctacaaaaatgcatttaaaataattgatcatcttctattctgctgaaaagtgatacttgtattctagcaatcctagtaagttttggagggtatttacaatatttgggaggaatccctgatactgcttatatctgtt

SEQ ID NO: 27887 - DNA, 1170 bp, Mus musculus
gaagccttcacctcagttttagcttaatttcctatgtaatatctatgaccaaagtgtatggccacgtcagcaatgaggtcatattaacaatgtatccatgataggcaaccaacagcagtggaaatagcctggattactttggagacctcaaggatacccagctaatgactcagaggacagtagctcatactggctctgggatttgtacataatccatcatatggcttctgagagtggcttgttttcactgtggagagtacctccattcaaactttaaaagcattttaatgtttttatgcatgtatatattgtttgttgaatttacttgcctttgtaacgccttcactcctttctcatgcctctccccctgcattgctccttagacccctttatttcaagtcttatgtatatgtgtatattcatgattttgtatatctatataagatctaggaaccagaagtgacatgtatttgtctgtgattagcttactttatttgatataattatgtgtagctacataattttctgaaaatgctgtaacttttattggctaaaaaaggtggtgtgtgtgtatgttacatttttcttatccatttctcagttgttagctacctacattggttttatacttcagctactataaatattgctgcatttaacattgacgtatgtgtttctctatgacatgtatgacatgtcaacttaaagtcttgagtaagttctcaggacgactatagatggatcgtgtggaagataagtgttaggctctcctggaaacctccatattaatttccataatggctagatagtttacattcccactagcagtgtgtaagacctgccagtgtttgtgattattggtttttttaatgactgacattatgattgtggtaagatggagtcccaatatagttttgacttgaatttctctgatggtttgtgaagttgaacattttaaaatggtattagccatttgtatttactgccttgagaactgtcttttcatttttttaacctatttattgattgggttgtttgatttcttgtatagtttttgaacttttaataatctaggtataaattctctgtcatatgtacagctagggaagatgtttcaatcattgtgtaggctaggctattttttttccccacagaagtagctgtttactg

SEQ ID NO: 27888 - DNA, 2206 bp, Mus musculus
gaattgttgtactgaagatgtatattttgcttcaacagcttatcattgcaagtgtgtagatccctggctaactaaaaccaaaaagacctgtccagtctgcaaacaaaaggttgttccttcccaaggtgactcggactctgacacagacagcagtcaggaagaaaaccaagtgtcagagcacacccctttacttccaccctcagcttctgccaggacccagtcatttgggtctctgtcagaatcccactcacatcacaacatgacagagtcttcagactacgaggacgacgacaatgaagagaccgacagcagtgacgcagacaacgaaattaccgaccacagtgttgtggtccagctgcagccgaacggtgagcaggattacaacatagcaaatactgtgtgactttccggtggttggttgacttcccttataatgtttatttgcgcatatgatttgattttttgctccttttagaagtttctgtagaaataacttattttttagttttctagtgtaatcaagttcctgaaacaggctatttgatctctgatacttatctccaatagtatacagccacttcactaacaaagtaacagattggtgctgtaactcaggcatcaaattagctctctggggatgacaaaatgtagccaggacactttaaaaatcctcagtatagcttgaaatgaagacctagatcacagtctgcaaatgtcttacacatgaagtctgctatggtcatctagcatgagctaaaacaactctcactttcataaaagttgcctagtgtggttgggttggtacaagtctcttctgatagtccctctatgttatgattaatgagtggcaacaggcagtttaggatttttcttcataataccacagagaaacttatgtcttcttcctttctattcccaagtagtttttcctcataggaaaggtctagtgtagacttcaaatactttaaggttttcaaaaccactatagtgttatgagtttgattccacgggaatgtctctggaccttactttccatatttcagtatccttttgtgttgtgattttaaaaaatgttgcataaaaataccaaatttcagcaactgttaatattgagatcacatacctcttcataaagagcatcttatgctaattagccctgctgaaccatgtgcagaggaaattgttcaagtattggatttgaaaataagtgcttttgtttaatagacctaatgtattgaggcaatgtattatgaaaagcaaaattatataactctgtaactatgtagaaaatatacttaaatataatcagaatgctaagactttttatatggccttgtatgatgagagcttcaatgttaataaatgttttccactttaaaagccaccaagtattgttctggtgaactcttacattaaccttatatgcagggtgctataaaggagaatgatggagtcatacaccaccttaagatgtgatacaaggttacttactaattacttacaagcagtcaggtttatccaccaaagttagcactgtagccaaaatcatctcctaaatagtgtgaattagggaatttggttgtaaattgtgacacattctttacagtagatgcatttagtgacttagtgacgtggaaaattgaataaaatcatgtagtagaataagtatatcacttatatgagcatttcattatctttttaaaatgctgtattttaagagaaatataacactaggaaaagaaattttaattttgaattgtttcttttaaaaatttatactcagattgtttctttgttgagttttttgtttgtttgcttgtttggtttgtcagttggtttggttcggtttattgagccaaggtttctctatgtagccctggctgtcctggaagtcattctgaagaccaggctggcctcaaactcaagaaatcctcctgtgtctgcctcctgagtgctgggattaaagacctgcactaccactgccagctctttcttttcttctctttttaaagatgatttaccatagtaataaagcaacatggtactgacacaaaaatatacacagatgaacagaccaaactgaggacccggatataaagctatgaaattatagccacctgatttttaacaaagatgttacaaatacacattggagaaagggcagcatcttcaacacatgggctgagaaaactgggtgtccacatac

SEQ ID NO: 27889 - DNA, 1721 bp, Mus musculus
gttggtggggaaaggtgtctttctttctgccccttccccttaaataattgtgttcatttttgttttgtttccttgtgtactccagcattggttatagtcatgggaaaggaaggtgtccacgcaggcacaattaacaagaaaacatatgaactcgctttatacctgaagaggtctgtaaccaacctttatctggcatcataattgcagcacaataatgatttgcatgatatcttgaaactgggggaagggggcatgccaagttgggcatcacttcgtcttagcagttagtggattactgattactaaaataggttaatagtaagcaaggtgccggtgtacagtctctaactcgatcagtgtcttttcagcactttggagcatttccttggctcatctagtcttccttttgtagcgcatggttgggaggaaaaagtgcatgcctctgtacgtcacacctttctcacccctccctaccaacacgaggtgtttggtctgcttccattctcttctgtgtagtgcctggtttatttaactaattaatacctcctctgttgatgagctattgagagttgcagtgttttactttttaatacagtgactgcacttgggacagactatttgtagtgtctataggacatgaagcgtgcagcttggagagcaaaggcacttcctcccacgaccttactgcagtaaccataccgatcaaattcccagggacattctgtcattgcagtagctcagacctgtcttttcttgcacaccagctgtgctcttgagaaaatgtaaaggctgccattatggatattaggtatcccaacataaccatctggagtgtgtccagtttatttttcataggaccaatttttatttgcagcttaggtttttatatgaagttgcattattgtggacttggctgtcttgtgatgtatttttttcatatgtatcctgtgccatactattgttaaaatgaactgttgctattgtgagatggatttcctttcgaatggcactaccttagggacattctagtattgcttctattgtttgggcattgtggataatgtacagatttaaaaacaaatcttgttgctgatttgtccatttctttccctgcactttgttacatctgggatacagtctaactcatctgacttaatatgcatttaaaaaaatgccataactattaaacaccttgtttacagacagatgaaataaatttattccaaccaaatactccattggactcctgtttttattataaatttttggctttgttgttattgttgatcttggagggtagaggggaggtatttgctgtgtagtccttgttggcctttaactcaaagtactcctgcctaagccttcagaggcagctttagctgacaagggactctgagggaaagaccaaactcatctgcaagcacatgaaaggccctacaaatttcttttcactaagctttggcctactaaatgtggcttttgtgtcttcattttatgatcatcctcagacttaatgtgaagaaaagtaacctgctagggaataaatatatcacgttggcctctcgatgagaactcagtctcataagcacgaggccccactggcaagaagagtttctggcaagaagactccattatggagggttcttctggactgaagtgtcagtgactgtagatttgtagtctgtgttggcagcctgatgtcagccaggcagtctcataaa

SEQ ID NO: 27890 - DNA, 1100 bp, Mus musculus
tgtcagccggccggagtggccccagctgctctaggaggcgtggtgcagccaggctccgggcttactggggttgggcagccccagcccgtgcagcctccgcagcagatgggtggcagtggtcagctgccagccgtgcctggtggtcctcacaccgtggtgcccggagttccaaacgtgcctgcagcggtacccgttccaagcgtgcctagtgtgcccaccacttctgttactatgccaaatgtacccgcgcctctgggccagtctcagcagctgagcagccatacgccagtcagccggagcagcagcgtcatccagcaagttggttcacccttagctcaaggcacacacagtgcaccaacaagtctaccacagtctgacctaagccagtttcagactcagacccagcctttagtcgggcaagttgacgatactagaagaaaatcagaacccctacctcaagcaccactttctctcattgctgaaagtaagcctgttgtgaagcctccagttgcagatgccctgacaaaccctcttcagttaacacctatgaacagtctggccacctctgtattcagcatagctattcctgttgatggtgatgaagacaggtatgtacatttttttaaattttgaatatctgatagagttgcttgccccaaatatcttaagatgcagtttggggagtttgtttccacttagggtctttatttttaaaacttaaatttggtaaaaatcaattcaaagttttgaagtaaggagacaaaagtcacgggatttttgttgttgttgttttgtttttgttttctttttaagcaattaaatggatagtgattcaacatgattgatgtatttcagcttaatagtttgaagatgagagctggtattgcccccccccccttcagtaagaaagagggtccctttctaaggtagtaaattactttttaatgtttatggtagagttttgcctgagttggtaagactgaaaaccagaaagccttttcctgggggcagggaagtgatggaatagaagcagtctccatcagtgaatttggaagactggagagaatgataaaatgtgaagtctagctttgactatccct

SEQ ID NO: 27891 - DNA, 1638 bp, Mus musculus
gtaaatgcaattagcttaaattttggaatcttatggttttctatagctatgccctttttactcttgaattggaaagcacactccattatagggacatgtaactgtcctataataaggtgcttttaaatggtcacctacacggcttagttttaccacaatcattgtcacctaaaactttttaaaagcttctagggcatattgtaagtaaagatgcttacagctgcatctgtttctaatgataatgtttctgttacacagccttgaattttgcatgagtaagtatagtcacctagggtcccattcgagcctggattgaacattttctaacttaatcaaagtgattgcagttccactaaaagctatcatggtgaaatgaaattagagatggtttgctgatgtcatactgatcagaattatcaaagggtttactgtgtagatacggagaaagacaagaactaaatgccttgtcgaaacatgtggagtcccgtgtgccatatgatatcttagcatgttaattgcacttttaataccaaaaaggcacatcaactaaagttttgattgaaatgcccttagggttctaggtctatcgatctaaatgagcatttggaatgaaatgaatttactgatgaggatcagtctagtcttcctttgtatgacttcgtaggttgtgattgatcattttctttttactaatagtaagggtgagagtaatgaggcaggtttgacattttctggtactattgaaaactacaattagtcctatttatgcacttagccagaacttggtgcagacaccaagcaatatctgtttatgaatggagagaagcctgcttatgtttgctttgttatttgcctcaggagatctcttttgaaatacgctgttttcaaaggaacagaagggaaacttgcccctgttctgagagcagtgtaaacctcacagggctttggatcccctcggacccccttggacacagaggagaaggaagggaaggagtgggtcgggatgcacaggaatctttcctgtatcggaccaggaaagaaagctggctgtgggtctgtagggtcatgactgttgtctgcctcttttcaccctgtaagtgaatccctgaacttggttccctctgaagccagtcttggttaactaattctattttactataactttaaaagtgaaagatattctctaaatttatagcaggtgccttatttcctttgaatcaaatcattccataccagaatttcccttggtttactatagataattggctttaagatattcttgtttttaaacatacaatgttttaattattttgttaaattgctgtagccatcaatcatttcacatttgtaaaattacattccctttgtatcatgtaatttacctattcagtgcattttatattcaggttggattatgcatatttgggtcaatgaaagttgtgtctgtttgatttatggtttaaaaataaagttccctggatatttgatgctgttgtaaaagaaaatgattttgcagagtttttatttgaatacttttcatagtttatagaaaattattttaaaggaatgcctgtacttagcctagcagtggttgcaaatgcctttaatcccagcacttgggagatagaggcaggcaga

SEQ ID NO: 27892 - DNA, 1225 bp, Mus musculus
actaatctgtagacctggctagcctggacttagatgtataaaccaggctagcctggaactcagtgatctccctacctctacctcctaaacgcggatattaaaggcacgtgttaactaacacacctgccctaaagtgttttattgtatagaatttctgtttcaataattgttaaccatggctagtcttaacttctaacatctattcaattatcatttctctactaagctaaaaccaaacaaatatttcaatatgtatcactgaaagttagggtgggccatacttaaccatacaatgtaatacttaatttaatacttagccatacaattgtcataaataatatgattattattcagacttctaacactgcaaaagttctattaagttttaaaactcaagatctgaaattgtcatatattgcaatttgatatctctcaaatttcttttagtctctaggttccttcttaatctcttttttaccccttatagtagattgtttcttttttctttttttgggggggggggtctatgtttatttgttggtttgcttgtcttttgagacagcatttctctcggtagccctggctattctagaactggcattgtttgccaggctggtcttgaacttggagatctgcctgtttctgcctcttgagcactggattaaagatttataccccacctggccagcagttgattatttcaaacactcatttttgttttatatttttctgtagtttgaagtttgtttttatttcttatcatagaatttaacatgttaccagtcttgtataaattgctaattgaatatggagtttttgttatataataagatattttaggattatctcacatatttcctgacatttgtctagagtcagctaatattctaagccagctgaatcccttttaatggaaaacaatatttgcagactatagtcttgactctaaggcttcattgcactatagaaatcatggtaactagactttcccgtctctttttttttttttcttttttcctttcctttcctttcctttcctttcctttcctttcctttccttttccttttccttttcctttccctttccctttccctttccctttccctttccctttctttctttctttctttctttctttctttctttctttctttcttaatttctttctttctttctttctttctttctttctttctttctttctttctttcttttcggaggctg

SEQ ID NO: 27893 - DNA, 1219 bp, Mus musculus
ggcttttttactggagtgctctgcctcattacatgaaactacaataaagagtttgtagttatcctagccttttataatgagttcagagcttgataagttttgttaatttattatccatgtctaattcatttcttctcattttagacacaattgcaaataaattacatttgcaaaaagttaatgactttaatttatcacctggaacccaaccttataaggtaattcttgcttttatttatttttatttatatagcacatgtgttttttctgtttttaaaaagaatgtcaaaaaaaaaaaaaaaagaatgtctaaaaacatccatctcagtttatgtgcttctaagaattaagcactgatttctacatgtgtatcttaggtggcagtttatgtcccaggaagtaaaggtgccccctcatttgttcgactgtatcagtatcccaactttgccggacctcaggcagcactggccaataaaagcttctttaaagctgataaggttacaatgctgtggaataaaaaaggtatgatgagtaatttttcacttttgttattggatattaatttaaggttcatatatgtgtaaataaaggaatatagatgactttaactttatttttaatctcattgaatactgtttttctgttacagctactgctgtgctggtaatagccagtacagaggttgacaagacaggagcctcctactatggagaacaaacactgcactacattgcaacaaatggagaaagtgctgtggtacaattacgtgagtaccccttaacagttttcctgtggttaaaaacagtaaaatgataaaaagaatgtttcaatgtcgggcgtggtggcgcacgcctttaatcccagcacttgagaggcagagacaggtggatttctgagttcgaggccagcctggtctacaaagtgaattccaggacagccagggctacacagagaaaccctgtctcgaaaaaccaaaaaaaaaaaaaaaaaaaagtaatacagtcaaaattcttaatccagtgaataaactcaaataccataatgttgatgataaacttcctctgcattgagcagcttaatgtcatcctcaagtacgcctgactttgacagactccagtcagtgtggtttagtaggagaagaatctgtgagtgatatgttgtaatggctctctgagcagtaactaccacagcaagtagatgtgctgagtttagtaacagc

SEQ ID NO: 27894 - DNA, 2185 bp, Mus musculus
tgtgtgtgtgtgtgtgtgtgtgtgtgtgtgtgtgtgtgtgagagagagagggggggggtggggtggggtgggggaagattatcaagaacagcaaaaccaactactttaaaaatcctattgtgtagttcaaatgtcttgccgtgaccaatctaatgaattaattaatgggccctttatactaaactaatttaaactgagcagatgttaagttaaatgaaagtttactgctcagtgcctctcttagcattatttttaacaaccatctgcctaagttttttgtttttgacttacagataatctcataaagaacatactttagattcacacataagtaatgagctaatttactgtttttagaacggttgaaactcacctcactaaagaaaaattcagcgaaacctctttacaaagtgtattatgtaaacagagatcatttgtctagtaattgaattatcttaacatcatatatcagaattttattgtatttgaaagacaaaattaaaaatatttttaatgttttcatattgttccagagttctaaagagaaatttagagttgataaagacaataagaatgatttctcagaaatagagcataattttgaatagcagttacatagcagctgtggcaacagaaagggattaagtggaagagccaaatgtaatcctggacttgtgagtggaagttatgagctgagggaaggaactgcaatgggagacttgatgttgatgccacctgactcttagatgttgagagcagcttgactactggacacacactgagtgcattcaggcaatgcctcttacagcctaaagtggaatctactgtgatcttcagatagcaggaagatagtctagtgatggaatgttacccttttgactagtatcatagcactgctagcctaggttcttttggtaatagacattgtaatttaaacggaaagttccatatatatgtatatattgactagatcttaaaaccttgctaatatggttgcctaccacttcagactccacatcttgcaaagtttaacatcggaggggcctttcttcaagtaataggcattccatttgtgatgcagttagctttatggcacatagacattcataatttgagccatggatgttcatgtgtacttgacaggtcaaactatgaaggacaatgtcaaatctaactttctccatgtatgccttaggttgaatttgtttccaagttaatagcttttactggcttagacattcacactcatctctgttttattttatgcttagtcatatttaaatccagaatttaatagtctactagacagataaatgagatgcatgaatataaaaatatataagggaaaggagatggtaaactatttataactttattatattactaacatttcaaagtttattagttgcttataaattgtatagttacaaaatgtctgtgctccattaatcagaagatcgcaacgtatcagcaggctggctaattttactggtgttttcaacacagttgctattgtggaaggttttttgcattaattaaaaagttggtaaaacctggcttttacctcagcgtgtcagatgtagagaacacgtgctctcagtgtgtgagtggcagtggctgtgcactcgcattcgtgacagctgctcagcctgaacagctgtgcaatgcggtgagctccagtcatggttcattcttacttcagagctttagtagtttggaagtttgactgactggcacattctatcattgtcataacttaaataattcagttaaaattttttaaaacatgatttgatatttagggcttttcttttttaaaaaatgagaagcaagtaaagaattgtaaagatttgggacttctttgtggcattgtgaaataaataagccaatgtgaaaggaaccctgctttgtgaaaatgattctgtcctagtgtactttatgtagcagatgtgttgaggggattctgcactgtaaaggctgtcatccagtgaatggtgtttgctttctcgggcatcttaagccaaccagtttgtttaacacctatttctgactctaaatcttacctgttttagaacttaaagttgttttcctaagctttataatttgcaggtacagtactgagccattgacagtgttgtgatttattcttgtctggaacataaaggaataacatacgttgtcccat

SEQ ID NO: 27895 - DNA, 1188 bp, Mus musculus
gccaatccatcgtggtaggctccgcttaatatctggggctaaagacactttcagaaagtttctggaaattgttgcttttgtgaaatgctgcagttagaaagcttcatacaagaaaagtgtccacggatgaattgtagaatgatggcaaattctttctgacccctcccttccaattttgggataaaacatttagaggagtatcatgaaattaatttttcctgtttgttcataaggcaaatgactttccttatctgagaatgtgacaagacttcatttttatcaataagaaagcacagctgagaacctatttaccatgtgctaagcataattttgatttttgtttcttaatgaaaattgggttaaatttccttccctcctttcaaactgcatgcactctttgaaaatctatcaaacatacttttttatagcagcacctaacttccggccctttccttacttcctcctctgtaagtgtgcttcgcaatgctctggtgtgcgattgtcatatgttatttctttttaggtccccatcctcagtaaaaaagaggacgtctttgcatatttagctaagtattctgtgccaatggttcgagcaacgtggctgatcaagatgacttgtgcctattactctgctatttctgaagctaaaattaagaaacgccaggctcccgatcccaatttgggtaagtgagccagtgggcaatgttttatatttcactactggttcttcaaataattgtcacctgcaccctctgagaactcagcatcccagcccccacccccaccccccctccccaccccatgcagctgacaggcagcaagccctgttgatatctccaccatcgtctcttgtctagacagaagcaacctctggctggctttcctgcatgcttttgctgcagctgagcaggcctccagtccacgtaactgttccttacctcctatgcccctgcccctgagctcactgcctctttttctggtcagtgccactgcctttgcgtgtgtaatgacagttgatgccagttaatcttgctacttcaacacagttttctgcttgtagctggagtgatcctgttaattgtgctcagaatccttttatgactagctgccgagctcacctgctgcctgctctggccagcaccaacagcctgcatgttgttttttactttaagccttaccggaagcagg

SEQ ID NO: 27896 - DNA, 1168 bp, Mus musculus
tgtgggaatgacgttccactgtggcagtctatgcattgagtttctaaagaatagccttatggataatttactttcctactgtctgacagtataatgggttttttcacgaatcttgctatttatcaaagcattgtttgtacatcttaaagcatttgtctatggcttaatcttactgagtattgctaagcgtgtatttttggaggaaatgtaaccctttgaggataacatttttaaattcacttacatggccagtcctcccatgtggttttcattttcccattttctcaaggggtgggggtgatggtggcagatttttcttttttatgatttcatttcgtggacattcataacatttctgcctgtctttttcatcagctattttgtgagccttttgtttgaagctctggtatatgaggcactgtggcttgatgttgcttcctttatttatgatgttcaacatttgttttacatgacatagattttttctcccatgcctggagaatcctgtgagaacatcaacccttccttgagcagaagactgtcagtcaatggtgagaaactgctaaagagagaaaaaccaagagaattaattttcccatcaaattacgacctcctccgacacctgcagtatgcaacccactttcctatacctctggtaagacacgtttccatcagtgtgtaccatgatgattttataaggccatcagtgattggctgtcagattatccactcgctgtgcttattataagctcattagtgaatggttgtctgattatccttgcactcctctgtttacacataatgacatgtgaaaacgacgtttgctgcatttgaaggctataatcaggattgtacaggcagtatacagctacagtgtgaaaagttacggtgtgatattagtgactaataggtttaatagagtttcttatcttaatatcctttcatcagaaggatttgagtcactaagtaatgtctaaatgttttctctactttaatttgaaagtcatttgctgattagtttttacttgccctgttttgactgtcggtacttttgacatttaacaaatgagtaagagtttgggggcacagggaaggtaggatggttgtttatgaatcacaagttcttctggcagtgaagcagttgggtgagaaccccagtgcccacgaa

SEQ ID NO: 27897 - DNA, 1149 bp, Mus musculus
gttcaaatcccagcaaccacatggtggctcataatcacccgtaatgagatctgacaccccctcttctggtgtgtctgaagtcagctacagtgtacttatgtataataataaataaatcttttaaaaaaagaatacttgctgctttaaaacaaacaaacaaaaacagcaaagccacaatgagctcatacacaggtgctggaaatgctgcccagtggtcggccctggctcaagctattttagacctaagagttaatattgacctttaatttgatgggtcctatataaagcttatggctatggaatgtcttaagattaacaaacctcataacatacagaacataacaagatatgtggtcagcatgactctggtctgagtcaagttatttttctgtgtccgttacaacagcaatatgaaatagctggtgggcatagaataaaatggctacagctatgctggggggcaggggcaggcttccgcattaacctcaggaagaatgacttttccatacagataacaatctgctattcagaggaaccctgggctgaagagatgatccttaagcggacatatttgcataattgtggggaatcagaacactgaaaatctcctctcagtggagttataagaaatagggcctttctcatgtataggtataaaaatcactaaagcaatagtctcctactctgtaaagaaatggtgagctgctgcctcctcatgtctggagtgtgtgacaggaaataagcatctaaacaggagcccaacttcaagagaaaccatagtgaatgctaatggcaacagaacgtaatcacatgcctgccttggttacattctgcctatgagtcttcttgccgcttggaccttctataccatgctcagtttttctggttttgttttactgctctttatttccatttgaaaactcttctaggacgaaactaccatttaaaatcctttcacatcttaaagcctttttctttaactttctttaccagaaatgaataatgtatgtatgtatgtatgtatgtatgtatgtatgtatgtatgtatgcatgtgttggggtgctggatgtggggaaataaaggggtgggagagacccatgttctaccagagcttggggagactgcctcaggaatccacagaaccatct

SEQ ID NO: 27898 - DNA, 1135 bp, Mus musculus
taaaaagcaagggagtagatactcatgacttgggtaaaccagtagggttgttgttgttttgttttgttttgtttttgtggagtttattagcaacttagatgtttttggtcctgtgaaattcagaataaaaatgcaaaaggcttcggtcctataaacaaaaattcaaaatgaaatgcagaagtttaatcttctggctcccttctcaaggctctgtcattttgtgccaggctgcatggagcagatgcatggtttcagtctgtctcacagtcctgaaggttctgggtctctgcgaattgacagaggccacgggtggggcctcgcaagaatgaccatctgactttgtcagacactacaaaggagtagcagaagtaactgtcaggctggacacccatactgtcagtctaacaagaggaaatctaaaaagagcaaaaattctctggggcaaaggtaattggaaccctgatgtctgcctgggattgtccctggtcttactgtagctgcagaatgctgatctcaggccaaacgacacgttctcagaagctgtttctctgtgaaggctgcagcaggcacattcctacttgtaccctccagcacttctcttttagtgtctcttaattatctgaagtaacaggctgaagagatagctcagtggtttatagctcttgccaacacccagactctagtcccagcatccacatggtagctcacaaccatcaataaattccagttccagggtatccacctctttcttctgatgtcagagggcaccagtacacagaaggtgcacatacatgcatgcaagcaaaacatttgtacgtataacataaaataaatacatccgtaaaattaaataatatttccaacctctctccacttgtatgcatgagtacagggtttactgctgccctctgctttaggaaggctcagagttgtgtgttgacgagcagcagaagctcagaggtcactgacttttgcatgaatttgtttacatagctctaggcaagttaagcacttaactgtcaaatgacgaatgtggtcagaacctgcagagttttcaaatgtgttcttttgtaaattgtcaagttgtaagtaagacaaattatgtagacatctttggccacaaggctgtaataat

SEQ ID NO: 27899 - DNA, 1207 bp, Mus musculus
tgaagctgtagtaataatagctacagtgttctctgtttggattcattttaaagttttgattcacatggttttaactagctaaggttcccccactcccctttgctttattttttctggaaaactgaacatttatctgagagtaaagcacacctgtgtgggtgtccacaggagccttgccctgtactggcaatgcagcaacagatgagcagagagtggttcaaaagatgccagccccctctttgggacacacatgccctgtccttgtgggatgctaattgtgcccagtctgcaccatcctttagtggtgcgtagggacttccgacctttctccagtttatcagcacaactccggtctgattttggatagcactatttccatgttggtttgctaactgacctgtttctgagtatttaacaaattgttcccatggatttttttttttttttttttttttgctctccagttgtactctggattaacacaataccacaccatctctctgtaccattatgccgaggttcctccatgtgcttaagccaactttgaatgcttccacccagcactggacctggagcattttctctggtctttcttagatttctctctcttttttttttggtctcaccattttcccctcccgcccaactctgtcttaccgaatcaaaagtaaaagttcctcaaactgtctcgtatctcctaagcaactatcaaactgttcttctagcatcctttgcagatgcattagaaaatagttcctgtgtgctgtcttcacttcccttctaccttgtaatctattttcctgtgtgacttcatggaaactgcacaaatccagccccactacccattgctcagcctactcgttatttttaaaagatatataaaggcagcatttgttttttaattgtgaaagtgcacacaaatgttctgtcttgacctgttttcttttctgaaataaccctgttgtgagtttcaggctcacctggacttcctgtaggagctcagcagcctcagagcttgtagtccttgtgtctttgtacttgtggatggagttaggtgtgtgccccacacctggcctttgggttttaaatagtgtctctcagagcagagtctgaacacctcaccttaccccagcctctccagtgctgggattacaggttcaaaccaccacactcagtctcttgaccacttctcagggatggttcagtg

SEQ ID NO: 27900 - DNA, 1136 bp, Mus musculus
ggtggaccaaactactgatttgaaagctgtggcaggtctcgcgggagtggacacattagctcttcactcgaccgtggcggtggggtgaacattttttttttttttgcatcactttaatttgaaatgttgatcattttcataagcactttataaacttcgttcgcatttatgaaggacttggcttcgcttttgttgtggtccaaaggtgctgaaacggattgttgcttagtacttccgcttcttcagggcttctgcaagagccacctggaggactgtgggagtctctcagaagcagctgcactcaaatttgttcccagtggcaaaatctttatccagattcttcatgaaggtacaacctataaccacgggaggccagaagaaccacggtggaatcggtccattttacttactgccagttttggtttaaaaaaaaaaataactgtccagtttaggttcttcagaacctcatgccaacttgagaaaaataaaataaaatctcacagctggccttagattccacagtgctcagacttgacatggtttccagagggttctggtagtcatcaaaggtatacttgctgttaattttgtatggtaagtatttacaattttgaatttaattattaatgttggtgtcagtcttggttgtgtattgcttctactgtatttataaaccggtgcaaaaagcacaagtaaagtaaattatacatcaaaatttattataaagaaatagtaactattttaactttgttcaagtatgtggtaatttgctcctattagagtgaaaaaatacagtaaattattatcagtttgtgtaacttaagagtattccgtataatatttttttagaattagatgcatacaattttgaatgtgaaaattgcagggcattttaagacatgtagggatctttccctgtcctttgttgggttcactttctttttgccatatgatttcacatgtaatgtagtcaagcatactgtgaatagattgtctatgaagagcagaccctgtagaactacttttttaaaatgtagctagtacgacttcagatgatttctttcgcagattgttattataaataatttatatcttcctaggtgagttacccattgcagagtttgactcattcaaat

SEQ ID NO: 27901 - DNA, 1436 bp, Mus musculus
gatgaggaaaaacctagagctctttgccctgcgcgttacaaggaaagcaactggaattttaaatttagttattatatttactgccacttaattctgcattctgagaggtttttttttttctttcatagcaaatgcatgtggttggcattaaaattgtcctaaggaaaaagctctattgcagaaccttgtcatttgctgggtgggttgcagataggaaattaaagaccagaccttgaaatctaatggaattgggtatacttaccatttctggctataagaaccccttaacatctgtgttatattgtaagctgaatctttagagggtggcatttcttgttttatgtaccctttttcatctaaaagtagagggagactactctacggtgggtatcatttgacctctggcagccatagagtaccaatgttaactggagtcagctcatgtctgaggtaggggccaaaagaaagtaggcattacggaaagtaggcatcaagttccagatgaatggcatgtgctaacaaagctcttggtcttagtgatctgggctaactgaatgacttttgcttttttaatttacaaggctcctttataaatagatgaaataaatttataagtagatgaaatttggacagaagccagagaaattattctagaaaaatcccagtctttagaataaaagaggtgaatcatatgatactcccacatatatttgggttaaattaaacatgtaatgttagtacggtgaaatatgaaaataaaacccaccatttaaatacagtgaaacttgattatatagaagcagttgtctagactcgtggaggaattctgccttagaaagtctgtcttcagaatggctctgaaccatgggtgcctgagcaaggctttaaagttataaggaagtgtcactgtacctgtagagcatttcaggatgacaggtgtggacaaatgtgaaacccgctttgcacttcccaatgtgtgagcattaggctgccctgtacatgtagaaaagctagcctgcatttgttttgtcttgtttggtttcatttttaacgcaggtattaaaacaatgggaactttcagtgtgaacaaatggtaaactattaatcataatcagaacagttctgcgcttgttttctgtaggttttatcaaaatgtttgtaaaccagtgacaaaatatttgtgcattgagattaacacgggctgcaaacctaatctttcacgttgtctccattcattctgtgtgcgatgtttgtaacattggtggaaaacagacacaaggcagctggcaactgttagcggaagaaaggtctttttactgaaaattcaggtgcattcgccatttgttaatttgtagcggatcattttctcttaatgttttttattatttgttggcaaaatcaaagtgccttaagttaagagtttgctttgaaatcca

SEQ ID NO: 27902 - DNA, 1584 bp, Mus musculus
aatctaaaaaatcctttgaaaatttttttttacaaaaaatctgcgtctcccccactggagacttttatttttttcttcctcttttataaaataacccggtgaagcagcccggtgagatcgacccgcctggacccagcacctctagcctcgctcccccgggttccacggccgttgaatacgcatcgattctggttgaattttgtccctctgagctcgcctctgctcccccagacgtgactgaggtgatgttctacgagaagttcagcctgggcccatcctctccatccgggtctgcagggacgtgatcacccgtgtctccttgggctacatgtatgtgaacttcccccagcaggtggacgcggaacgtgcttaagacaccatgaattttgatgttataaagggcaagccagtatgcatctcgtggagtaggcaacatattcattaaaaatttggacaaatccatcgacaataaagcactatatgatacgttttctgcgtttggtaacatcctttcatgtaaagtggtttgtgatgaaaatggctccaagggctacggatttgttcattttgaaacacaggaagcagctgaaagagctattgaaaaaatgaatgggatgcttctaaatgaccgtaaagtgtgtgttggacgatttacatctcagaaggaacgagaagcagaacttggagccagggcaaaggagttcaccaatgtttacatcaagaacttcggagaagacatggatgatgagcgccttaaggaactctttggcaagtttgggcctgccttaagtgtgaaagtaatgacagatgaaagggaaaatacaaaggatttggatttgtaagctttgaaaggcatgaagatgcgcagaaagctgttgatgagatgaatggaaaggaaatcaatggaaaacagatttatgttggtcgagctcagaaaaaaagtggaacggcagatggaacttaagcacaaatttgagcagatgaagcaagataggatcaccagatatcagggtgtgaacctttatgtgaaaaatcttgatgacggtgttgatgatgaacatctccggaaggagttctctccgtttggtacaatcaccagtgcaaaagtaatgatggagggtgggtacagcaaagggtttggttttgtatgtttttcatcccccgaagaagccactaaagcagttacagagatgaatggtagaattgtggacacaaagcctctgtatgtagctttagctcaacgcaaagaagaacgccaggctcacctcactaaccagtatatgcagagcatggcaagtgtacgagctgtgcccaaccccgtgatcaacccctaccaaccagcacctccttcaggttacttcatggcagctatcccacagactcagaaccatgctacatactatcctcctagccaaattgctcaactaagatcaagtcctcgctggactgctcagggtgccagacctcatccattccagaatatgtctggtgctatccgtccagctactcctagaccaccatttaatacaatgagaccagcttcctcacaggttccacgagtcatgtcaacacagcgtgttgcta

SEQ ID NO: 27903 - DNA, 1095 bp, Mus musculus
ttgggcactcagctcctctacaagtttgagagaccacagtatgctgaaatcctcgccgaccacccagatgcgcccatgtcccaggtgtacggagcgccacatttgctgagattatttgtgagaattggagcgatgttggcctacacgcctctagatgagaaaagccttgctttattactgaactatctacatgattttctcaagtacctggcgaagaattctgcaaccttgttcagtgccagtgattatgaagtggctcctcctgagtaccatcggaaagccttctgaggggtgtgctcgccctctctccctcgtgcttggatctctgtaaacagtttggttcttagtccttcttttgtacaaatgatgtactttgaagaccgttagtgtataacagagttgtttgtttcctctttgattttaaacagagaaaataaaaggagtaactgctccttttttcttccttttttcatttcaaagtttctaccagtgtatcagtgacggacaacagagagacatgctgtagagtgtttgcctagttgacaaagctgcttttgagtgctggtggttctgttcctttgacactacacacttttataatatgtgttaatgctctatgacaaatgctctgattcctagtgccaaaggttcacttcagtgtatataactgaacactcatccatctgtgctctttttttttttttaatggtgcttaaagagcccatcctttgcaagtcatccatgtcattccttaggcatcttatctttgctcaactgttaaagaatggtggcttgttttcatgggttttgtatttgtgtctaatgcacgttttaacatgatagacgcaatgcatcatgtagctgcagttttatggaaaagtcaatcttgtaggagttgtttttcagatcttcaataaattttttctttaaatttcaaaaaaaaaaaaaaaaaaaaactcgctaaccggatccaagaacacattaaagcaatcatccatcctgaccaagtaggttttattccagggatgcagaaatggtttaacatacgaaaatccatcaatgtaatccattatataaacaaactcaaagacaaaa

SEQ ID NO: 27904 - DNA, 1115 bp, Mus musculus
ctcataggtgtgtcgagagtaccagcgtggcaattgcaacagaggagaaaatgactgtcggtttgctcatcctgctgacagcacaatgattgataccaatgacaacacagtcactgtctgcatggattacatcaaggggagatgctctcgggaaaagtgcaaatacttccatcctcccgcacacctgcaagccaagatcaaggctgcccaataccaggtcaaccaggctgcagcagcacaggctgcagctactgcagctgccatggtgagtggagacagcagtgccctcctgtcagcaatcagaaaagatagtgaacaatttctctactgccagctattcatctattaacctcttcctcccgttttgctgaagatatgtttgttcaggtatcccacacaatacataaagaagctaccattcacagacgcaaggataactcctcaaatgttgctcatcctcttagcctaacccctaagactgtctcattctggatgtagggtttctgaaattcctgcttcataaggaaccacttgtcgcctttctgattgaacgacactgccatttccagtctctgatttctgtatgccatccagctggcccttgttctccttgagtgtgttcttccccacatcaaggctcttctttacatttatcttgcctttaataacatcatctgaaactatttaggagaatagcttcaacaaaattgtttttaaattagctgcaatgatccttttgaatgatccgctgtcgagatcgtgtgaaggcctactgtggcagaaacatgattattacagtgccaaatattgactaagccactatacagggaagagaagagcactagcactcaaggagtgtttaaaaaatgaataaataagtaaggatcatttagggtagatgctaagtggtttatcttaagatcaacttcaatgagacctagtagatgagtttaaggaggccatttcttcttggcttagctgttttaacgctgtcctttttaatataaatatataacttattctttaaatattcatacaaaaatcattgtcatggcacagtaaaatgatcatgagagaggtcttttctgtgtttgtttatggatacttgagcaaaa

SEQ ID NO: 27905 - DNA, 1320 bp, Mus musculus
acttgctgttctttctttctctctttctttctttctttctttctttctttctttctttctttcttctcattaaacttgttttaatggtctcaaaattctatgacagatttttggtcaagttgtttccattaaaaagtactgattttgaaaactaacaacttaaaacagccacacacacacacacacacacacacacacacacacacacacacacacacaaatggtccacaaaacattctttccttctgaaggttttacgatgcattgttatcattaaccagtcttttactattaaatttaaatggccaattgagacaaacagttctgagacccttcttccaccactgattaacactggggtggcaggtgttaggggtaatattcatttagccttctgagctttctgggcagacttggtgactgccagttccagcagccttcaatgtaaagaacgtgtcggtcaaagacgttagatgaggcaatgttgctggtgacagcaaaaatgacctaccaatggaagcagctgattatcatgaaccatccaggccaaatcagtgctggctatgctcctgttctggattgtcatacagcccacatagcatgcaagtttgctgagcttaaagaaaagattgatcgtcattctggtaagaagctggaagatggccccaaattcctgaagtctggtgatgctgccattgttgatataggccctgggaagcccatgtgtgttgagagattctctgactattctccacttggtcattttgctgttcatgacatgaggcagacagttgctgtgggtgtcatcaaagctattctttttaatatttcccacaacacacttctttcaagaccacacctccttatagtgtcactccttgtggttctatggtggccatatttattcaaaacatgatagtggaagttgttggtggtggaagtggaaagttctcataagagaaagaacatgctacagaagaaagagcatttgccaggatcttgaaaaattagtattccccagattcatatccttccttgacaccccagtttagatacgttttttcacatctgtaaaccttagttttcataaatgtaaaatggttgaaatcaggtgtccaacctgctgttaagttaataacaaggtatattagatactgtgaaactgtgttgaagagtcataagggatgaaaagccatggagctcatggtccatttgagggagtcctgcctggacaagcagaagaacttctcacatcctgacacagagaggcaggtctcatgatatagtcactgctgttgacatcagtgtcatgcttctgtc

SEQ ID NO: 27906 - DNA, 1212 bp, Mus musculus
ttttctgctagatcttgaagctttacattttgtttgtttgtttgtttgtttttcttaaggcaacacagtacaatcttttttgaggtgattttttgttttgttttgtttttttgttttgtaacactaccaagaaattgagcattgctattggttttaatctgttttcttcaggcagttggtaactttaatgccaacatgttaagtgataactatgtcatttggctgctaaattctgtcattttttaaatgaaggtgaatttatgttacatatcaaaatttgtacatttgagtaacgttgttttagcgcttttgcaagaaaaagtttatttttataacatttgtgattttcatgtagaagattgaaacagatatctgtggttaacagtgctattgagtggtatggaacagtgttacttggcattttgagccttctcaggtttgtctcatcagtggtagcttaacaacctctggattgattgtgtataattgtctttgtattcaaaagaggttcatgtcctgtaaaagcacagtattgtttggctggagggagctgcagaatcgcccatgtttctgtgactttgctcgtgtgtgtgtgtgtgtgtgtgtgtgtgtgtgtgttccaggcatggcagccaaccttgtatctgctatttaaaataacagcagagcttcataattgtggtcattagagttgttcttatcataattaaaactgagattcaataaaactatgaaacatggtgatggtgtctgtattattagactgttcttgctcaaatatttcctcacttttgttttgatttgttttgtttttgttttttgagacagggtttctctgtatagccctggctgtcctggaactcactttgtagaccaggctggcctggaactcagaaatatgcctgcctctgcctcccgagtgctgggattaaaggcgtgtgccaccacgcccggcatttcctcacattttaacatacgctgcaaggctctttgttttaatttgggtagtttcttaaaatgacaactacactatattttatgataaagggagaatcctcatgcaagataatccctaacactgttcttatttgatgtttagtcgcaaataaggacatattctattctattctattctattctattctattctattctattctattctattctattctattctattctctctttcacacacacacacacacacac

SEQ ID NO: 27907 - DNA, 1428 bp, Mus musculus
gaaaaaaggcccttccaaggaccttggatccaaggaagtgagagaatggggaagggacgcccagggagagaagagagaggtggggggggaagaggcccccaaaaagaagagtctttatccaggaagatttagatgaggagcggagcaaggcagcaccagccctgagctcccgcgggcgcccacctctgggggctcggcagtcctacaccagcctgctctggtcccccagcctcgtggccacaccgcgccaccgcagctgcagaacccccctccccaccccctcccctcctctgccctgttactgctcggccagaccaccacagccaccaccaccgccaactccggggagctcgagagacctggaggcgagcagtggggcgcgcggcatcgtctcaatgtatcggggagtcgcctcggcgccccagcccggctgagcagcctcgggcatgttgctactggccagagagcatgagccaggaggcgctgcgagccccagagccaccgaccagcgagtgagcgagccagcaagttagccccggagcaagctcagggagcagacaccatgctgggctcgggccttcccggagttgggttgcttgggaatgcagcccaaagtgggtggtaaactccatctaaggctaaataccggcacgagaccaatagtcaataagtacctgaagggaaagttgaaaagaactttgaagagagagttcaagagggcatgaaaccgttaagaggtaaacgggtggaatctgcgcagtccgccccgaggattcaacccagcggtgcatgtccggccatgctggtggttcaggtggatctttccctctccccgttcctcccgacccctccaccagagcgtcgttcccccctccctccccgcgtccagtgctccagcagcaggcgcagggggtggtgtggtgggagcgcgcgggtggggccgggggtggggccagcaggggaccgtcccccggctggcaaccagccgccgctgggcgcacttccaccttccaccatggctatttcagagctctcctagggacagaaggaaaacgggagacgtcctgcttcctctctggctcctatggagatattcttagctctggttaggatatcagggtccctttgagacaccaagttatattccctgtctatctattatctgtttttggtgcaccaaattgtccatatgtctgtcaattcatgtttgtttttgaatgattgttgttctgtgtttcatgttgaaaaatataattggttaaaactttatctgctggctctccatcctttaacttgtttaaaaagcagtctcaatttacacagcagaaagtgatataagcactgtggctgagattcagttacagctgaaaaagccctgctgagggccgattgcaaatggagctcttaaagggacaggcagccttttgc

SEQ ID NO: 27908 - DNA, 2671 bp, Mus musculus
gagaatccgtcttccctgatgagcatatctgcttccttcaaccttagggactaagaaaggaactggatagccttctacaagagaagattgaaagccctcatcctgtagactgggacgacactaagtcaagagactgtgcagtactgtcagctattctagacttgatcaaaactcaagaaaaggctactccaaggaacttgccaccacggtcacaggacggatattatagctgacagctttctgtgatggcctaaaacctatcctggtgtccataatttccaatttttttcttttttttagtttttggcaaaatgccaagccctgggttatgacttgcttttgtgtgtaagttagaaactttcattgggtagtaaagagttaatgtgcatgactaaacagtgccatctagctactataaagacattggaaaaagtaatatgctttctgaccttatcctctgttgtagatatgtccacactttgggagaattcccaaagttgtaacattgagaaattcctttatgctattatgcaaaattaattttctgttcataatgactgtccagagacaataaaaatagaaagttgggccaaaaagcagtatgaagtaagaatttgaatacaaccacattttttaaaaatgaaattctattattagtaaatttgttgtaataaagtccgatatttaataaaatgtacaatgtataaatctcagctaacttcttggtttggtttctagagttctacctatcactgggctcactcgattgcttttatttgtttgcttttattttttaactttttaaaaggttcaatacctacggtcctgttctgtgtagcataatgtagcaacagagcatgtgtctggatgtgatgatgaaggtcctgtctcagctcatcaccttttccttatttgaaagacaggtaaagattgtgaggattaaatatggtaacatgtaaaggaccacagtgtctgatgcatatggtcttcacacagtgcttgttactatttgtccataaaatattttttaacctttagtaatcaattttaccattttattttttgtactaaggaccttggagatggttaggccaagggcctcacatactagatgactgctatattactgagccacatccccagccctgtaaaacaccatttttatgcttctttatgctcttagtggaggtgacaaacaaggctgttttcaggcttgttagctattgttttcttcctagttttggactcccttctttttttcctgttgtagtccctacctctagcttgaaggtgttgcttttgttctatccatgagccagtgattattctgagataatcaagtttggtcttctttccctagtaagttgtgagatgaccaggacatatgcatagcactgccatggatttgctgccgatgctggttcaggtactgctgccatgtctgagtatgtgtcacgtggcattgtgtacaaagatttggatgcactgtgtcccttgtttatttttttggattgtctcaccaaaattatgcttctccctaatcatagtggtggtgttatggtattgtagcatattagttttgcccctaaagtcaaggtgtgtttacaagcaagtatttagcctccacagcaaatgcaaaaatgttgttagaattgttttttacagagaagcagtacacaaaaataagtgatgtcttgccagcatctgctgctgtctgacatagctaagcaagatagagggtggcttgcgggtgctctgaaggttcggctgcttgttcacagattacgactcctatctgaaaaatgcactccaagacccagaatgacttgttctgagtgctcttaaaaaatagctcattaagaagaaaaagctgtctcacatcactctgcacagcacaaaggacaaactggaaaaaaccactgtaacagaaacttatgagatctaccgctgtttcaagagcattaggtacatgcacatggtaccttcctaattaattgacctggaaaaagagctgtaataattttaagtcaattaattgcaaagtgtatttttctgcatttgtaaaacaaagtctactctaaaattattatttggtatctgcacccaggctaagtaaatggtggcatatttccttccattttcaacactgatcttatatttattcttcagtaactataattatgttttatatctatatatttgtaataatcctatatgttaaacagcatctttattctgattttttaagaaccatcttcattggagaatatgggaaagtgtatccaggaaagtaaatcatgttatcactgttagtttttaatagtcttccatacttttttaaggcttgaaggtagtgtgtatagttagccagtttaagagtataacttcagtgtatttggtctactgtgtgaaattgtgtagccaacaccgcagtcttcatgtagaacattcccatcaccctaagatgttctcttgttgcttttacaggtaaaatgccctcccctgcctgcttctaccctctggtgcccagggagcagcttttcgtcaatacttttgtcttttgtaggttttctgggaatggattcacacagtccatgtgtccagcctttttcatttaatataagcatggagatggctcgtgcttactgtacatattagtaatttttattgt

SEQ ID NO: 27909 - DNA, 1159 bp, Mus musculus
agaatgagtacggactaaccttgtttcattatatagattttagatgcaaatactttcagtgttccccattaaatataaggttagctataggcatgttttacatatgtgtgtgtgtatgtgtgtgtgtgtgtgtgtttgtataagtatttttgaattatattctgtctattcctagtttgtctagaaattttatcatgaactttgtcaagtgcttgttctggatctatcaagatgattgatttctgtccttgagattgattacatattacaatccatttattgatttatgtatgttgaactacatttgcatttttttgggatttgtgatggaacctattataggttgtaatgtatcatcttctttctttgctcttgaattcctttacaagtgttttattgacaatttttgtgtctttatctctttagttaacaagacaatattggcctgaccagatggatttgtttatactttttattcctgttttgtggaataaaattgacaaatactagtatttcatcttccttgagtgaatgatgggagcatgtgggaaggagaacaggaaaagatgcagatggtgaagaagggcagatgtagataaaggtacgtggactgtggactgggttataaagttcattttcccctagttttaactaactttttttttccttccatgttctgtggtggatatagaaatgtaattgatagtcatgaatcttcatggcttcagaatgcttatgctaattccatgggagttcattgagatataaggagtttaggtaggggcaggtgcttgtttgagtggctagactaatctagccacatagtggtttgattttgttgttgttgttttgcaagtttattacaacaaagttatttttataaaaattgtttgatagagctcagtagtgactccatctggccctaggttttttctttgtagggaaacttttaattgctgcttcaatctcttctctcactatgggcctatttaaattatttatatcttctggatttaatttaggcaagtgatatgtgtttagaaatttattcgtttgtctaggtttttttcatactattttctaatgaccatctgggtttcattggaatctgttgttacttatgttttgcatcttttctccctttacattcttaacttct

SEQ ID NO: 27910 - DNA, 1165 bp, Mus musculus
aaaaaatgctatttcagtaaattgccattgcctaagccaatccccttattgatactaaagtttatatatacacagttttcctaaagtacctgaacttcacttaagccattaaaaggagaaatgtgttttctcatgtatacgctttcctttctgttcttttattgaacatttcttcacgtttatgtttgcatggtaggtacaatgttgcgttttctctcccaaagcttctctggaggttattaacatgtaatagctataagttctattgggacaagcctctgaaaagataccttgcttgctgaagctcattttttaaagtaaacaatccagtcagattacattttacagtcgcttagggacaactactctgtgaagagaagcaatgagtactgcaggatcttcagccagacataaagactagtgtcttgcagactgcatgttcttactgttcaggggccctgactcctgctcacatgctatttgccttttctattttataggccctttatgggactacatcagaaactgcaacatggagacggtgtgctaactacgtcaatgggaatatggagaatgctgtggggaggctttatgtggaagcggcttttgctggagagagcaagcacgtggtaatgtttcagcacagcacagcagcatctaaataacaccctagcagttcatgtggttgataagcagttacagtcgttcacatttttgcttaatttttattaattaagcaaagaatctgtgaatcataatgtaccattgttctcaacagatttcaccttgggcttcttaaaaagtctagttatgtttctgcctttcccacagaagtctagctgtgtttctgccttcatgatgtttaattgaaagcacgtgtctattttccagaaacagtgactttaatgtacactgtcatgtattagacttataaagttgtctatttcccaactgaccatttcattaagtaccaaaaatgtaagccacagtttatttgaaatgtgagaaaggtatactattttctaattgctactgaaattaaggcaatgcagtgtaatggcatagtaaaacaacttattgaaatgctacttcttgcttaattgaaccaatggtgacattgagagctaatatggtattcttctaaaaggacagcaagaactaggac

SEQ ID NO: 27911 - DNA, 2749 bp, Mus musculus
tataacaactttgataaatgtattagatgcaccttacagataaaaacaaaagacaaagcaaaaaaacatgcaaagtcttcaaacaggctccaaagtctgtgctctgaactcctgcttggttaataccttcctatttaagcacagagtgaatgagaaggatctaactcatcataccaagtttctatttttgtttctgaattccctcatttgagctgcttagagaacttctgcactggagctggggagatggctaagaaattataggccaggctcacaataaaaaggacaagaagacttctatggtttccagtgtgatatggacactgagagtccaatgctgacagtaactctttctgtttgtttcaaaggatcattgggactttgcagaactctgccgagtttgcagatgcctttcattgccgcaagaattcatacatgaatccagaaaggaaatgtcgggtttggtgatcttcacaagatactgaacatccacggcaagatttgccaaagccacggaaacaggaactcttccctcagagaaactgggccccggaagtttcttcagcttcctggggggcaattcacagagacgagcatgagctaacataaatgaaattagattattaaatctgctgtgaatgaaaggggagggagcctacgatctagcaaatcaatcacttcactgtgtaaataatgattactttccaacggtagtactaccgttcacttctgtttctcacacagactgcagctttcatgttgtctgtagagaacagtgttaacacttaaagcagactatgacttctgatcaaaaggaggacgatgctcagtacagcagggcaccaaagcacagatttgcccctcagcactcacttttgtttgcaacattcatgctccttccaaactctcccaaagaactcccatacagactgtggccttcaggctcgtgcagttttgaactcattttaccatacataagttattcattcatcccacatcaatttagtttgaacactcttagagcttaaactagagtatctgaaacggttcccctatttcacccactttagtgatgttgagattcttgaacccccctgcagatctttgagcaatttcttgctcttgctgcccctcagactcagtcttttaaaggatttgtagtaatgtataaagaataattctatatttaattattaactacatttatgactgaataaaccattgctataggtaatcattgaatattgaagttatatggccaagatagttttgaagatctgtaacatgatatacagacgaaaatttgagactctttaaatctgtaaatcatattgatgaaaagctttaagtacaaactctgggggtgagcattaccattggacgggtgtcttgagatacataatagttgtggtttacaaacagcattttcaagattaagtctgtccctagtggctaagaaagggtctaactgtatctgtgttgctccatgaatgcttagccttcaggtttgtcatcagatgaaaatattttgataataaattgacgttgtgagccccttactaggcctgtgtgcacgccatgccacctagctttagaaagcctatgtctgaatcgagatgggcagcctccactgtacctgcttcttgaattctacagctcatggactctaattggatttcctgaggcactcatatgccttccttgtccttctgcttactttagtgattttcactattcagtataaattttacaaagattcatttctacagtccttatttttatcaaaaggtgaaaatgaaaacatttctatccaaactcttagttttcatgccttgtgagaaaagcccacttgcttgtaaaagtgttacagtacaatatgtaaaattgtatagaacaaaaactacagttcagcgaactgatattctctgaacacagcaccctagctaaaatctataagaaatggaacactgtagctttctgccatcatcatataactgctaggcatacattatccagatctccagcattatgcactagctctgccccattttgtctttcagtcatgcattacttcctatcttacttctctctgccttacatttgtaaaatttagctgtatgattggtttatatgtgaatctatcattgttgaataaggttctgttgtgtgactatactacaaatattccatcttattattgatggacttttaaggactccatgaactcctgtctattctggttttggattgttacaaatgatataactatgcattatgaactgtgcttatatattcacctttacttgaattatcattggaatcactttcccaaacctatccaaaactatcataaattttaaagacacggtttcagactgtgtggttacaaacatccttatctttttcccttttaaaacaaacactattgtcatgaataatacttatatgactgtttctttgaaatcaatttaaacatacttgagtactatgaatggtggtagtagaagatttcagttaaacagctatctctgggttattttcatttatgtcctgtcatagcagccaaagagacagaagtgaagagtcaatggccactagcatctccactggtagttcattaaaggatcaagcttccaaacctatgtaacagcaactctggtgcctagattcctgctgtatatacagcatacagcatattctttgagctaagggattttaacataaaagttaaaatggtaattttttccct

SEQ ID NO: 27912 - DNA, 1161 bp, Mus musculus
tgactacagggaagaagctccaagtcaacttgtttctccactaaaactgcagcagagccaggagatggtggaacacattcagaggggcttgaggaatggctactgtaaagagactctcctcccttctgaaatattcaacaatattccaggtgtcaaaaatcacagtatttctcatctaacctatcagggtgctggctttgtgtataaccatttctcaagttcagatgcaaaaacgaaccaaatctgtgagccccagcagcctagggctccagatatgcatgcccctacacctacaccatcaacacatgctcctttggctgctttgaaactgccaagcccatgcaaatccaaaagtctgggggacttaacatcagaggacattgcctgcaattttgaaagcaaatatcaatgtattagtaggagctttgtgacaaacggcattagggacaagagcgtgactatgaagacaaagtcattagagcctttagacgccctgactgaacagctccggaagctggtgtcctttgaccaagaagacagctgtcaagtgctctactcaaagcaggatgtcaatcagtgtcccagggcattagtcagaaagttgtcgtctagaagtcagagcagagtgcgcaacattgctagccgtgccaaggagaagcaggaagctggcaagcaaaaagctatggcccagagcaccagaggaggagtggtccttagaagtaaaccgcccgctcctgctctggccgtgaaccgtcactccacgggctcatacattgcaagctacctgaggaacatgaaagctggtggcctagagggtcgaggcatcccagagggagcgtgcacggcccttcgctatggctacatggaccagttttgttcagataattcagttctgcagactgagccaagcagcgaagataaacccgaaatttattttcttttgaggctttgaattatataaagttgcattttcattgtttacatgatactctagaagatgttagatttttttccattgtcaggaaatatgatactgggctttgaaatgatttccaaatgtatttttaaacttgtattttggtctccctttgcctcatgcatttgtatatagattctgtggcctttcccaggaatccatgatctttcccccaaggtgttgta

SEQ ID NO: 27913 - DNA, 1188 bp, Mus musculus
gccagcgttctatcttaacagtgacacatcccaggaccatgagcgctgagttattacaccagtctcctggttgcagtcttgctccattccatccgattctccactcagtcagggtggaatcgcaacaatggttatctcattgtgggccatcataggccacctccttctgtggcatgtagagtccttgaaagaggtccagactatcacactttctccctctcccatttagagctctgctctaccctaccttactcagatagcttcaataatgagtcatctctagaatcccaggcttcaaagaggctggaagtaggagctgaggcagtccagctctgaaccctgtgctctccctcatctgcctcattcctcttttctgaagatgccttttgctttttctggcttagaactggctatccacagctccctggtttatatgtcttccttacaactgctcatcagagacaaagactaattttacagggcctacactttcattggatagttaatgtgatgagcaagagtaagatttgccccctgcagttagttcaagcctcacggatgacctggtgtagtgggcactgattgtgagaacagcctataggttttcaaggtggggtaaaaaaaaaaaaaccacagtaccttagtatttttttttgttgctataacaaagtacctgaagcaaggtataacaataagatattaaagctaggtacttagaataactcttgatttggctactagtggggactttttggcagatgtcataacagaggatggagtgtattcaaaagagatcacatggtaagacacctagagaaagggagagacctggcttgctcttttataaataacccatagtgatagggatggagtacccattattctctctcattcatgctgattccagttaccaggtcatcttttcatagctcttagtggttctgtcatttcaacactttcatcacaagaagagctggactgaatacaaattgatccttgggcagcttactagcatcatagcaaaccagaaaacataggatgcccctatagatatccatccttggctcgtttcccctgtgctgctgctgtcctcaccaaaggtccttcatgttgcctaggtactgtggtcccaggtgtcttcaataggcttgtactcacatcttcagtgacaaagatactttgtttatc

SEQ ID NO: 27914 - DNA, 1141 bp, Mus musculus
aaaacaaaaaacaaaacaaaacaaaaaaacattgttaaaatcagaatcaatttgaataagttatgatcaatgtaatatacttttagaaagtagtgacacactgtaaaaagttacccagtagaaagatgtatatatgcagaactaatgttttgccttgttcttctgcctccctgtaccctagtgccagggattgaactcagggcctcaggtactctggtctagcagcacatcattactgagctacattaccagccctatagtgctaatgtctgaagaggaagtttaagtatcgactgttatattagttgtctaggacagccatatttgacatttgtttttcagttttatcaactttataataaaggaatttaaaaaaacattctttctgagatcactctttttctccagtcatctttctagccactgctgagttaggaccactgatccaagaggtaagaccaccatttctcgtaataaatacagttatttccatccggtagttagataagaggatttcccttaaaacagagatgaggacggcagcacagatgtcagaaaggaacgatctttaggacatcgcggagcccctgaactcgccaattctcaaactaccctgccttctaactcctcattgcatgagagagtattctgccttgatagtaaatttggagttgggcatggtagcatgcacctgtaatcccagcacttggtaagtagggactggaagataaggagttcaaggccacccttggttcatacagaattcaagaccagtttgagctaattaatatgagacactatctaaaaatcagaaatatcaaaagcaaaaccacccccaaaccactttaatgtatatattaaaatcttcctgacaatgtaagcctctttcacaaggccaacagtatttgctaactgttgggacttgatctaataatggagtccttcaaggggaattcagaatgcttgtgcgaaatctccaagaaaacaagacaagagtcttgtgacctaagtttctccaaaagcaaaattgtttttgaaatgtgctttcgtgcccttcccaggcatagcagataggagtgagcttactccagagtattcattacagctggatattgttacttgtttatatgcctctttggaa

SEQ ID NO: 27915 - DNA, 1148 bp, Mus musculus
acatagacagtgatatatgattataatcctagcacttgggagtttgaggcaggagaattgtgaatatgaggccagtctgtattacagaaaagcgtgagccacgtactaagaccttgtccaaaaataaggaaataagacttcaatttatcttaccatttacaataaatgaagtattgaaatattttctcaaaatgtacttgattaatctctttaattacaaaatagaaacattaattattgaatgtttccatattttaaaaaaaatcacagaatatgggccctgaatatagctcagttggtgtaatgctcacctagcacacacagagctctgggatgcacacctacaatcaagctttgtgatgcatgcctataatcccatcacttgagaggtggaaggagagattcagaagttcacggttatccttaggtacatcgtttgaagctagcttaggccatctgagaccctgtctctataaagcaagcaataagaaaaaaaaaagttatagaatgtttgttataattttgtttttatagctttgcaaaaaacttggaggctcgtgtgttacagctctggatggttactatgtggaatccattatctgtgttctcattggatttggttggtggttctttcttggtccaaaatttaaaaagttacaggatgaaggaccatcctcatggaagtgcaaaaggaacaactgatgccaacattactggacattctagaaggtaactgtagcttagtgttaccaagaaagcaatgataatcagtgtgtaggagtgtaaaataccgttttaggaaatttttaatttaaaatgccaaatagttgaaaagtacagatgtatttgtatgtttgattatattttcctttgccttatcaatgtattgaaagtttacttaaggctaggaaacaacccttttggttttattacttgatttctgttaatttactgaccaaagcatattttaagctgcagtggaatagtcatgggtggtcaccatgctgccaagtattgttagtgcctgtcattgagtcgtatttaacatgttggtacaatgtatcaagtggagcaaagcttaatatgcaggtactcactaactagattaaccttattggaagttaattctcactttgaattgtaaattt

SEQ ID NO: 27916 - DNA, 1210 bp, Mus musculus
ccttttcctcccttcccctcccttcccctccctcccttccttccttccttccttccttccttccttccttccttccttccttccttccttccgagtcagggtctttatgtagtccagggtggccttgaacttggtatgtaacttgaggataaggttgagctcatgattttcctgcctccctcaagtgctccttctcctcttactgctcctcctctcaccttcacacaggttttccttctctgtatacctctgctgcacactcagcttttcaatgcgtggtctaggcaattcttctcacccttctcacactcttcatcataatcccaggggtatctgatatagaactgtcttccaagtgtgttgagtgtcaggaacaactacagtattgagatctgtaaagagagaggacttttttttcaacctttatttatacatgtgtgtgtgtatgtgtgtgtatatatatatatatatatatatacatatatatatatatatatatatacatatatatattgtattaaataattaaaaattagtagtcaacattgtttactgactcctcttccaatcaatccacagggctattatcatatctggaggacctaattctgtgtatgcagaggatgctccctggtttgatccagcaatatttaccattggcaagcctattctaggaatttgctatggcatgcaggtatatctgtgaattgagtttgagagttgacttaatgttttcttcttgtgatttaaatactatttgtctctaagataatttgggcaacatactactgtatattactattttgtcatggaactgaccttgtaaggaaacctgttcataagtaactagatcacttagcaaattactatttatttgtttgtttgtctttccgttggtccatccatccatgcatctattcatccatccatccatccatccatccattcatccatccatttacttatttgagacagggactcacatgtaccactggctagcctagaacatgtaagttaggctagacttgaactcagagatagtcctgccactgcctccctaattggtgggattaaaggtgtgctcctttatgtgccacgactgtacacttttaaacagtgagaattcctgctgtctctcctacctactttcatttgttgttctcaatcatggtcattttaactatttattagacaagaacaatattgaaca

SEQ ID NO: 27917 - DNA, 1225 bp, Mus musculus
tctatgtaaatttttacagtgtcccattgctatacagtttttaccttctgaattttcctaatctactatacagcaaatttgtatttctaaacaaaatgattgttgtagttaggatttctatttctgtgatgaaacaccatgatcaaagaaacttagggagggaaggatttatttagctaacttattcttagtcaggacatgaactcaagcagggctggaacctataggcaggagctaactaatgtacaggccatgaaggagtgctgcctactggctgactcttcatggcttactcagcctgtttccttatccaactcagagccaccagcccagggagacaccgctcataatgggcagggtcatctccagtcaatcacaaattaagaaagtatcctacaaatttccctacagcctaaatcttagggaggcattttctcagttgaggctccctcctttctgattattctacttgtatcaagttgttataaaactaagacagttcattgacctatcaattatggttctccttgagatattagtgtgtaaattttactttttttaatgtttaggggcctgcagaaggaagaaattgttttacttacacatggagacagtgtagacaaagttgctgatggattcaaggttgtagcacgttctgggaacattgtggcaggtaaaaattcagatttcattaaaacttttttcatagtgatcatgattctatatgagatattcttaaattttcatttaaaatctttactttgctttatttgttttttaaaaacatttattgtgcctgtgggtcagaggactgctacagtgttctttccttcacctatttggatctcattaggttcaggtttggtaccgagtgcctttacccattgaattgtgttgtgggtatgtttttatttttttcatagctgttgtaaatgtggtaacttaatgtagtaacattactaaccaaggaaattattcagagtttacataggctttaaaatatttaacttaaaaaataaaattcacacgaataaattaaaacatatgaatgtatgtgtatctgtatatatgtgctcaagaaggtgagaaggttacgggttctctgaagctgagctgcaggcagttttgagctgtctgatgtatattctggtgatcaggggagaaaaagtaaagtttagctcaggatggtagaagtgctagtcatatctttggattgtaataatgc

SEQ ID NO: 27918 - DNA, 1100 bp, Mus musculus
cacggaaaagaattagcaaaacattaaatatgacaacaagtcctgaggagaaaagaaaaattattggtgatactttcgttaaggtacctttcttttaatgtggataatgtatactgtcttatgtctgttttagtgtgtttttattattatcatatcacatgccaaactttgctaattctgttttacttttgaatatgcactgtatgtgtgtgtgtgtgtgtgtcctgtggacaggtagacactgttttggtttaataggtatgcatgttgctaagctgctgttctagcatttagggatggtcctttccgttggcactgcacttctgttgggtttaccagtggccatattttaggtaatgtcgaagggaatgctcacatacatgttttaatcacatgcaatgtacaatgttttcagaaatttatttttgtgagtttgatggatctactttcctggttggtactttagaaagaatcaaatttaattgaaactttgttgaaagattgatttctcagaaaattgttctgctctcgtggtaacagattgccaatgaagtaattggagaaatgagtctgaagcccgaggaggtttttctcgcccaaggcactttacggcctgatctaatcgaaagtgcgtcccttgttgccagtggtaaagccgaactcatcaaaacccaccacaacgacacagaacttatcaggaagttaagggaagaggtaaaggcttgtgagaacttggccctaaagtatgtccatgcaacatgtactgttcttccatccttttttgtttcttctcagtactttgaaggttgagtaaccattaccacaaactaattgtagaacatttatattatcctcaaaaggaatgcagtgcatcttgtactcattagcagctcttcattctgactgcttcccacatctcctgtcaaccctagacaaccactagccactctttttctttttttttttccaatttacttttgaagacatgatatctgtttgtattcctggctgactggctggcctggaacttgctttgtagataggctggcctcaaactctcagatttgcctgcctctgcctcccacatgctgggattaaag

SEQ ID NO: 27919 - DNA, 1137 bp, Mus musculus
gtttaccaccacacccagttcatttggactcattagcatgaacattattttttctaattgccttctttgtgtccagtgagaaatagttgagagctgatgggtctcttcattttcttttcttttcctttttttttttttaattttgtgtgtgtgtgtttgattgtgtctttgtgtatgtttgtgcatcatgtgtgtgcctgttgccagtggaggttagaaagagggtattggatccgtagatgattgtatgcatgctgagaattgatgctgcatcctctggaagaaaggagccagggctcttaaacagtgagtcatctctccagcaccagaatttgtttttctttataagacttgtaaggattatacttaaaatgtgtttcaacaaagattatgaatgccactgaatagtaatctaattccttctaagcctcacaggagaaaatatcttaaatgatagtctacttttttcattggtcccttattttcttatagggaaaagtaatagaacctctgaaagattttcataaagatgaagtcaggattttaggcagagagcttgacctgccagaagaattggtttccaggcatccttttccaggtaaaaacacacctgggttttgttggttggtgacggtcatgtggattcagtttagaccattctgaatcgtttctcttcttagggactatgtgacatgacaaagggagagggtgacagggaacacattctttgaagtgcctactgtatttataccgttatgtgactcattctcttttttgtttgtatttagatactatataattcctgggagtttagcatatagtattgcttccagatgaggaagtggagcataaagatattttaattacatttgtacagaattcttaattatagatctaggatttttataccatgagtactgtgtgtattccatggaaaaaagagaattaaatcttcatttctcctcttctgtttttaaacatagggtctcttgaaaaatagttctcttaaaaaataataagattcctctcactcccacctccaggttgctttggatgctctgagttcatgcattcgaggtcagcctggtctacagagtgattccaggacagccagagctacacaaagaaagccggggg

SEQ ID NO: 27920 - DNA, 1599 bp, Mus musculus
gctattaaggatgtgttgtcctggaaagatatttaatctcattgcctcgtcttatgaaggcccaacatcaaccagactctgcataggtcctctgtctccttgaaacaggatttatgtggctcatcctcaagttcatcatgtatttttctacaccacaagtactgtcttcagtgttatgctactggtaattgaacccagaaccacatgtgtatgcctggaaaacactaccaattgagcctcatgcctagttgcattcctggttataagcaagaaaaggcatggcaagagacagtggaaaagctggatagcacttaaaaaatgaacaaacaaccccccccccaaaaaaaacgaaaaacaataaacacaaacattcatctgtggccaccagctgaagaacataccatcaagatttggtcatctcagattctttaaaaaaaaaaaagctcatttgcagtgtttgcagactttcactttactttgcatttttggaagagctattagaatatatttctgttttgacaacagataagtattcataactgctaactattggcagagcaggagctggattcaggttttctgattctctgttgaggttctgtgtacaactcatcaagaatatactttcacagtattgcctcaactggggttctggggggcccattgtctttcagaagtaccagcatcctccctcccagtgttctgaccttgctttcccactgctcccctgtgtgatcctccccagtccccattcttctagactctgcagagtgatgttagaaggcaagccctcgttattattacctcagtgaaggatattcctttaattagcccaagtctagctttaagtaccggttagacgtttttgacttgagaattccttcttgattgaagtagctgtaccagatggcagagggaaactatcttttacttgaggcttttctttcactgcagtaatggcttttgctacatctgcatatgtgtttttgttgagattggggaccatttgtggtaattgaatctaggtccagttgtagtatgtttgtgagtatttaacagccaaatgagtccccagaatatcaagatgccagctttcaacagtaggcacgctgtatgtagaagagtcacagcccatggaaatgttcacgtttgccaactttggttgctgctgtctgaggaatttaaaaaacaaaaaactcaaatctgactaaattggggtgtgtggggcacgtgtgcagagtttttaagtttctcagaaggaaaaattactattaagggatataactggtctattgttagagtcaactaggtgaggaatgtaaactggagagtcttgctgggatcctcattaactaagttcagaccctaggtacagacttttggatctcattgcatctatgttccacagaagttagacataccagcctgtgtagggaatctgaaaggtaaccgacattgttacccatgttgagatctgtatacccccatggactgatttaccctctttcttcctatttctttttttttttttctcttagaagaaatctacccctgtgttatagccacctgcagttctgtgattgctcaggtcataggcta

SEQ ID NO: 27921 - DNA, 2540 bp, Mus musculus
attgaaagggaaactcagagtaccagggcattttattaaaaggcaaggagtcttgcaatgtgctgtaatcacgaggagaaaataacttgtttcctacatctgtcagaggtcatggtaacctggactgagctgttattatttataataggaggaagaagttaataactggttctctgtgttccaagcacaatattacaacttttcgaactgtaaatcttagagtgaatcctcttcctaaggaattaaacagaagcctcattttctttttaacaaggcttcaaatttgtaatttataataactcaaagttaattgtaaattacagggcctctccaatttgagggagggaaacttgcagaatctttttttttttttttttaaaagaaaggcagccaaggtagttacctaaaaatagtacccaggcctatgagtgttggcctgtgaggccaaagcacacactgttcagctgtatggctttggccctgggtggccgggaggtcagcttgaccctgccatgttggtttgatgtgcgaagtcactgggatcattgtgtctatgaccaggctttcgcaccacaggcagaatattaagtgagagagtatttctactgtgattattgacacatgagagaccaaaagaatttttgtgaacgtaaccctggaattctttgggctctccaaagaatttacagtggtttaaaatggttgtcagcatttttccatgaggactttaataaacttagccccgtttgctcaaggttccttttaattgtgaagtgctgatcacatacatttttgggggggtctagcaaagagtagcctcatgttgtgtggtcataacccccacccccccatgtcttttccccactcattatgtacagattctgattttgtatgcaatgacttcacagtttgcaaagtgcagcactatgatcactgatttcatattcctatttgccgttcaccacacccaagaactttctgtaaagggaaatattactaatatctagtttctgcttgtaaacttaagaggaacatatgactctatttttaactttaaagatatttacaaggagtagagctgtttctgtgctggtagatgtttctgtggtctgtgctacttagggaactcaagaggagtgcacttgtatagtcatgttactccttactgtctgcctggagaatcattttatctccaagtgttcagttcttttcagtgatacattgttacctgagtgtcatttccaggtaatgtggaatgaatggggaaatgagaagggattcaaagcaaagtacatttcagtaacacatatgaggtaggctgttttgttgttttattttaatcagtatttggctggtaaaatgataatttgataaaccatcatgttaccaaagctaaaccaaactccttctaagtgactgctgtgaacttgccactaggtggcggtgcctgtgtagctggggagaaagtcaccacctttatctttatctgacagtatggtcagaagctcaagaaatcgggatgtcagcctcaaatttttaattttaagtagtaaccaaaagtttgttgggagagtgattatgcagttttcttctgtcttgactgtttcctgcgactgtctttgtttttaactctgaacatgttctctaactctgtgctaccacatttctgtgtgtgaagtcatgcagccagtgtatcagccctttgtacttagaagtgtggcccctcctctctagcctcttctccaccattgaacattgcacataggattacgaagtgttcagtaagacagtgaaatctgtggcaggcagagtttgtaccataaaaagaccccatacatcacaccagtaaaataggacattcagagtgctcacattctttcctttctcatatgtgtgataggtagactcttagtgttaagaatttttatttcacgatttactcatttataacttaatagaagtcttggattaaatatacaacttgtactgtttgatatattgttttaatttggaaaggataatttgaagttaactgaaatgatggaagtggaatttatactctgcattttaaaaaaagtcttgttattaataagtatgattaaactttgtttttaaaaatgtgttttgtttttctgtaattctttatgtgaaccataagagtatttattacacactttatattagacctctttcctacacgtgtaagtgccctgttgaagtctctggccagatgtctgagacagtgacaggcgtagcacagttacaggaaggaacagtccgtccctgccctagtgtgctgctgtgtgcctgctgggccttcctaccaggcattatgttaggaaggatttgtatgaatgtacacgtgtgcatgtatgaagaataccagcatatcgtttatttcccacctattttgaagtcttagggtagttaataggagattgggcgggtctttcattttatttaattttaattttatattattgtgcgggtagatactcggacacatgcacaatagctgaggtagagaaaattggggtagc

SEQ ID NO: 27922 - DNA, 1228 bp, Mus musculus
gtacgatacaggtgtggggtaccttaacgctgaaagtcaagaaatttcaattcataattttgctaacaggtgcagaatcttgtatttttatagcttttgtgtgggaagcaatttgtagtggagttggtggcaattttatcttactgacaagtacctgatagatcaagctttttgggtacataaaataatctcaaaatggcagatctaaatttcacctttttacctcctgtcaagatgttcaaaatcacccccatcttaaaccctgagaagaccttatagacaaaatttttttccacatttttgccacagataaggtggaacaattaccctgactttattactattacattgtttctgcaaatctgtaaggaaagctgcagagtactttttcctctattaaatgcaaataaaatattttacagtattatattttactgtattaatacatatatgtatacatatatagctatctttgagatatatcttaccaccatatatatgtcctaccacataatatatatcttaccattggtaagccccacactgttccatgcaaggtgacaggccactgtggctctgtgctggtgcgtctcatccctgccccagaggcactggcattgtctctgctcctgtgcccaagaagctcctgatgatggccggtatagatgactgctacacttcagccagaggctgcactgccaccctggcaactttgctaaggccacctttgatgccatctccaagacttacagctacctgacccccgacctctggaaagagactgtcttcaccaagtctccttatcaggaattcactgatcatcttgtgaaaacccacaccagagtctctgttcagaggacccaggctccagctgtggctaccacataagggtttttatacaagaaaaataaaagaattaagtctgctaatatatatatatatatatatatatatatatatatatatatatattaccacagtaaaatatctcaatatatcttaaagatatatatgtatcttaccacaataaagatatatatttatatcataaaacttactagttacctattttggggggggcggggttcgagacagggtttctctgtgtagccctggctgtcctagaactcactctgtaaaccaggctggccttgaactcagaaatcgcctgcctctgcctcccaagtgctgggattaaaggcatgtgccaccactgcccggcttagtt

SEQ ID NO: 27923 - DNA, 1153 bp, Mus musculus
gcttccatagtctgtcaacatttgtctcgtaattgttaaacatagataataaatatgctaatatattgcaaaatagtgctagtctctactcttccctcatctttcttcatcctctaccgaaaataaatcactttactggagtaagctttataaaaggcaacgctgggccatgctgatctgctcaaaggatcaagccctaacctcttaacccagcatacaaagctcttccttatctggctccagccaatctctcgagaccagtcttatctctaatcacctcccacatacactctgacctcccacatgaactgcatgtgcttcttgcattgtatcctcatgctctgcttagttaactttacacatattaagtcacctcgtggtggtctagtaactaagttcacatgtcacattctgaagcaatccttgttacctctcctgatacctttatcagcaatggcaggccttatttggtattttcttaaagatctcactatgtatctggttggttgtcattattttcttcattattacatctagtttattttgtgtatcatggggtgaagggcatatgctatggcacaataatggaggtcagaggacaacatgtcagaatcagttctctcattttaccatgtggatcctgggaatgtcaggcttggcaccaagtgttttttaccccagagctatttcaacagcctctcaaataaaaattgtccaagacaattaaattgtatactgagttcccagatgtataatgtataaacagaaaactatctgagcaagaaatgtagtaatttttgttttactcaacacatatttctgtattggttttgattgttctttttacctctgttaatctttctagttgtggggtcttttcacttttttttattttttagtattcgaaatatatacatgtatgatatgtgaggcatacttgtgctcttatgtgggtactggtacatacattggtgagatatttctggaaatgctgcttaattaattagtatgtgaagtttttgtgagataaaataaccattgttaaaaactatgagaatggggtcctttcccagaattccaagttagttttctatctggatttttgaacaagtatgtgtgatggtatgttcattagtaaaacatgtaacggggt

SEQ ID NO: 27924 - DNA, 1193 bp, Mus musculus
attcaggaaatctgcatagagacgcttagactttataccaggaaaaaggtaatctcagttactcggttggtgctgatgccattttggagattgtaactgttataaaaggaatactaactaatgtcactttcatccatcagcctaactatgaattgctggaaaaggaagtagaaaaaagaaaagtagccttacaggaagccaagttaaaagcaaagggattgaatcttgatggaactccagccctttcaactcttggtggattttctccagcctctaaaccatgtgagatacattcagaattaaataaaatgtaggcactggaagtgtatcctccttagaaagttttggcattggtcagttgcctagaaaccattaagaaattgttagtattgtgtgtgttgggtttttttgttttgttgttgcttggtttggttttgcgacaaatcagcttaaggattagaagtatagtgtatgttgtataggaaacttctcctcagctaaatcctgtttttaatatgtccttttccattaaaagcatcaccaagagaagtgaaagctgaagagaaatcaccagtctccattaatgtgaagacagtcaaaaaagaacctgaggatagacagcaggcgtcaaaaagcccttacaatgggtaagtatgtatacctcaagggcttgagcactcagtgttacacctttgtaacaggtggtacacctccggaaacaatataacaaatattgcctgcatttttttttaagtgtaagaaaagacagcaagagaagcagaaccagcagaagtgctagtagatcaaggtcaagaaccaggtcccgttccagatcacacagcccaagaagacagtaagtaaggggtcctgggtggtgcaggccttggactcttaaaattaacatgttgtttttttttttttttttcctccagaattaggaataagtatttcatgtttttgtatgttgtgttttgttttgagcaagttttagtatatagcattaatttgctaggaattacttggacttttagcatagaggaaaaaactttggggacaaacttcaaatgtatgtgtgggtcccagggactttgggcttggtagcaggcatctttacctgatgagccatttcattgactctagttgtgtgccttaatagcatttttgtttattctggtcatatatcccgaccctgt

SEQ ID NO: 27925 - DNA, 1176 bp, Mus musculus
cctgcatggacggggtaggcgagagccgctcctccgggatcagcgagtggtcgatggtgagcgacacctccgaatacaggcggtcgccgatcaggatccctccggtcgtggtcgtcgtcgtggtggtcgtgccggagctggagccgcccgcgctcggggcggcggacgaggcggaggcggcagcggcggcggcggcggcagcggtcgaggtcgggtgaggcccggacgccatagttccagcgagctccacgcacgcccgacgcagccggaacccaaagcgagactaaccagcgtcctcggcgcgacggatcttcccgtgaccgccggcttccaggccgccgcacgcagcgtgcgcttccgccctgacgtcaccacgccgacacgccctaccccaccccactccactccccgcgcgcgccaacgagttcctccgcgcttcggtcggtgacaccgggcggaggggtccggatgggcagggcggggcagggtgctggcggctcaggggtggtaatggctttagtcaccggataacccggactctggcctggtgagtcggccccgatacccctgcacggtctgcgcgttggtgacagtccggcggtcggcgacaccggagtgtaacaaagtgactctgaaccgggcagcttcccagtttgagcgcctggggtttccggaaagctccgagcgcgcgtgggtgtcggggtgtagcctagaaaggcatgcctagccctgacctcacttcgccgggtttacagtaatctggaaaatccctagttccaaaaataggtttatggcgaggacagtacacgggcgatttcattgcgctggggagtctcgtcttaaagagatggtttttgtcagagtggagagaaagtaactatccctgtgtcaatgaagagaaaaacacagctctcatcttacatggagtttggaataacctaaatctgtgttccgggaccatggtcaatcaaaatggctccaggataacccatcatttattccctttaagatgagagctgtggtttttttgtttttttcgagacagtttctctgtatagttctggctgtcctgaaactcactttgtagaccaggctggccctgaactcagaaatccgcctgtctttgtctcccgagtgctgggattaaaggcgtgcgccaccaccgcctggctgaga

SEQ ID NO: 27926 - DNA, 1174 bp, Mus musculus
tgaagtactagggagggaataaagacaggaaatttgtttggtgagagctaacttgggcttgagttaaaaagaaagaaacgaaacaatgtgttctgccggactctgagagaaaactaatagggaaagggaaagttgtagattaatttgaattttttcatacatgtaactagaacatctctgtaaaatgtcctctagtgacttgaaactgaaatgtcctaaagcatacacttgcttgcctatgtatgatccagctcctctaactagctgctgcctcctttttgttaacgtcactggaccttgtgtgtattttctgcctcttccacaagaggaaggccgactgtaatgggctatacagcctccctccttagtacccagtgacatcatcattgccaacatagctctgtactgcttccctagagtacttattaacttaaaaggtttcttctttttctatataggattaccaaactaataacaatgaccaggcggtggttgaaatctgtatcacaaggattaccacagccatcagagagacagaatccattgaaaagcatgccagagccctggtggggctgtgggattcctgcttggaacacaacctgagacctgcagggaaagacgaagatactccacatgcaaaaatcgcctctgatatcatgagttgcatcttacaggtatgtcagtgtgaaacagcaggcaagtgggtactgagttggcagcttgtgcgaacacatgatgtctctgaaccgagaggcaatttttttgtgcccgttagatactgtaaaaagacaccacacaccaccgggagctaagccagcaggttgctaactaatcaactgagaaaatcctactgagtcccagctgtaggagagccatactgtaaagaattcaaaataataccacagcaagcttgagagcacgcttgaggaggccaaaagaagatggcagatgtcctctatcactttccacttcttcgtgagacagtctctcacagtatggagatgagcactgcaggcacatttagctgtgctcagctttttatgtagatgctaggggtttgaactcaggccctcttgcttgcactacaagggctcctgtctactgagccatctccccagcctgattaactcgttttttttaaagtctatttcactatgtactgtgaatacccatc

SEQ ID NO: 27927 - DNA, 1107 bp, Mus musculus
ttccccatccccactaatctataatcctctagagcaaagcacgtcttattcacatagattatatccttcttctcaccccaccccccacctcctcacaataccttacacattaatatttcctaaataaatatttgataaatgcatgcaaagatggtatacccttaaggactttaacaatttctaggagagatgccaagatttcccataaaagctacaagacccaacaaggcatagctgagatattaagtactgcggaagttgagctttgcctcgtgcctgacatagatttactcatgtatcaaaagcatacagagcatgcgggtttgggggtttgtttggttggttttttttttcacactattctttactgttattaaggtttcaccaatgtctttcagttacagagcacttcacttatgtaattccacacttgtgcatggattgggctctgcaaactcccctgaaatctctcagacactgggccaccaaccaggcagcatacaagagctggtccaaggccccagacacatatacagcagaggactgcctggtctggcctcaatgggagaagatgcacctaaccctggagaaacttgagtccccagggagtggggaggcctggggggggacatcatcttggagataggggagatgagaaatgggattagaaactgtgggagggcagacgggaggggggagcaacgactgtactgtaaaaaatataaaagtagtataaaagaaagagagagagagagagagagagagagagagagagagagagaaagtctagcggtggtagcgcatgcctttgatcccagcacttgggaggcagaggcaggcggatttctgagttcgaggccagcctggtctacaaagtgagttccaggacacccagggctatacagagaaaccctgtctcgaaagaagaagaagaagaagaagaagaagaagaagaagaagaagaagaagaagaagaagaagaagaagaagaaaggaaggaaggaaggaaggaaggaaggaaggaaggaaggaaggaaggaaggaaggaaggaaggaaggaaggaaaagaaaatgctaaactgaacaaagaaatagaagaacttaaag

SEQ ID NO: 27928 - DNA, 1180 bp, Mus musculus
ttaacttaggtactcttgtatatttttcagaatttttgctggacatttgggtatatagtatttattagtacttgatactttattcttgatataatatatggttaatacttgctagttgattctacaccttcctttcttgggtcttcctttcttttccttcgtttagctgcatatcacctacagtagcctcagtaacatatgttgaagcacaattgaaaagcataacctatcaatgtgggatggggaaaagctgttggtagctaatttatatacttttattgtagaatacaaggcatcttaggaaggtttgtagattatctttcaatcacattagaaatcaattggtgagttcttttttaaagaattattctgtgaggattttcaagaaccttatctcgtgtgtgtgtgtgtgtgtgtgtgtgtgtgtgtgtgtgtgtttgtgtgtgtgtgtgtgtgtgtgttttgtcctagggattgaacccagggtcttgttcatgtcaagtaaacattctaccactaagctaatcctgcacgtgtcagtttgagggaaagacttactatccactaagttagttatgctgtttgcttgcattgccgattttgtttctttgtacccatttcttcatttctctaactgccaacttttaccaggtctgacattgtcctgttattctcttattaaaatatgtcaaggcatttgtttcttgtttgagataatatataaaaagaacaagtgatagtgatttatagctattctggcataatttgttgtagagtgcttttttttccccctttttcactcatgatataaaatatcacttctattaggatgtctgtggcttgtgtcttaggtcctgggcatcctgaaatgcagaaattatttgttattaaccttgtttcatcagtttctaacatgatgctgtctagctaataattgatttctgaaaaacttaatactattttcagtggattaattgaatgatgaatttctcaatgaatttccagcactcattttaaagcatgttctgtatgggaatttgaaatttttagaaaaaaatctaaaattattactattatcaattattaattatcttaactgcagtttcctctttccactcctctcagtccctccctctcctcccccaaatccacttttccttcattcctcttcagaaaagag

SEQ ID NO: 27929 - DNA, 1146 bp, Mus musculus
gcaacccgtcaccttcctggtagatactggggcccaacactccgtgctgacccaaaatcctggacccctaagtgacaagtctgcctgggtccaaggggctactggaggaaagcggtatcgctggaccacggatcgcaaagtgcatctagctaccggtaaggtcacccactccttcctccatgtaccagactgcccctatcctctgctaggaagagatttgctgactaaactaaaagcccaaatccactttgagggatcaggagctcaggttgtgggaccaatgggacagcctctgcaagtgctgaccctaaacatagaagatgagtatcggctacatgagacctcaaaagagccggatgtttctctagggtccacatggctttctgattttccccaggcctgggcggaaaccgggggcatgggactggcagttcgccaagctcctctgatcatacctctgaaggcaacctctacccccgtgtccataaaatacggaccgagttcagttcggaccggtggtagccttaaacccggccacgttgctccccttgccgggaaaagagaccccccacgactgcctcgagatcctggctgagacacacggcaccagaccggacctcacggaccagcccctcccaaatgccgaccacacctggtatacagatggaagcagcttcctgcaggaggggcaacgtaaggctggagcagcggtgaccaccgagaccgaggtaatctgggccaaggcgttgccagccgggacatccgcccagcgagctgaactaatagcactcacccaggccctaaagatggcagaaggtaagaagctaaatgtttatactgatagccgctatgcctttgctaccgcccatgtccatggagaaatatataggagacgtgggttgctcacctcagaaggcaaggagatcaagaacaagggcgaaatcttggccttactgaaagctctctttctgcccaaaagactcagtataattcactgcccaggacatcagaaaggcaatagtgctgaagctaaaggcaaccgaatggcggaccaggcagcccgggaagcagccatggggactgacacaaaggcctcctcacttctcatagagacctcaaccccgtacactccagacttcttccatt

SEQ ID NO: 27930 - DNA, 1108 bp, Mus musculus
tctagatgttgccaagttggcaatattactaccatgacataagtgtgaagacctgagagtgtttgtacagtgatgtacaactgtattgcagcactgaggaagttgagacaggagaattccttaggctcctttgttggccagtttagccaaagtggcaagttcctcgttcactgtcttaaataaaaataattgaggatgatacctgacattaacatttgcccctccatgtgcacaggtatgcatatgtacgtgcacataaatgagcatgtgtacacatatggccatacagacagacactaacatggatggacacagaatgttattgaatgtttgatgtgaaagtgtgagattaagcattcttttctgtatttgattatgtatatttcttttctttgtaaattatccattcaagttattcattcatttgtttttctttgtaccagtttgaattttaagtgtagtttgaatttcaagtccttttggcatatgcattgcaccttattgctagtttatgccttatattttaattttgttgttgttgtttgagacattatttctctgtgtagctctggatgtcctgcctctggatagcctgcctctgccctcccacttgctgggtgctgggattaaaggcatgtgctataccacccagatgtattcattttcttaatgatcttttctgcagaataaaattctattttatacatgataaatatctatgaaatatctatttcatagatattttttcatgatgtgtaagagttcattgactcttcctataatactaagatctttttcttcttaaaaaaatatttattgtttacattctaaatttaaaaatagttttctgcccaagtattagagcagttaatatgaattacattatttaaatttttaatttcaatgtcaaatctttcatttttattatgtaatttacctgttttgtgtgcatatcttatgaactttgtattctataacatttgtagttttgcctatttgagtgtttggatttttttttttttgataaaattcttgaggatttttttgttgttatcgactatacaactattcgcatatagggtattttatttatttattgttgtattac

SEQ ID NO: 27931 - DNA, 1189 bp, Mus musculus
tcttggatgaattggaattattaataatatttcaaatatttgatgatttgttcagttctgctcttccagctgcactatggactactctttatgaaaggcaccaaacctggacatagtggtagatccctataaacagggctaggtggctgtggcaggaagatgtcagttcaaagtaagcttggactctttagcaagttctatagtaaccttggctgcagcaatgagactcagccttaaagaaccaaaccaaagtaagacataacagcagccactgtgacacttgtttttagttctttggcatctgcctgaaatccttgcccttactttaattaattaatttcataattttcattgcatcagatcaaattttatatttcattaaagacttcttgacagttaacaacagattacagcagtttctctggaagtgttaaaaactttgccttcatagcatcacagcaggtatttcatttgattgacttttatgattatataacctttttctcccaatcattattattcaatctgtctctcctttatatatcatgttcttcatacctcgcttagattctaccttatagaaagtatttgctgaatatctatcatctgtctctgcaaaaacgattccattcttttgcagtttctcaacattttctgcttctcaagagttttgtctcattataaatactaactataatttccgtaaagtgtataaataaatatacaatatcggcaaataactatgaaacataagcttaggttgcaccatgcagaccaagagataggactttgtgagcttgctggaagcccctcccctctgctgtagctacttgcattcctatactattgcatttgtcattgttttgtttatattttactgaatcgaaattgctcagttagataactaagcttttgattcttaaaaaatatatttctttaaggatctggtgagatggctcagcaggtaagagcacttactgctcttccgaaagttctgagttcaaatcccagcaaccacatggtagcttacaaccacccataatgagatctgacactctcttttggtgagtctgaagacagctacactgtacttatgaataataataaataaatctttttttaacctatgttttttaattagatattttcctcatttacattttcaatgctatcccaaaagtcccccata

SEQ ID NO: 27932 - DNA, 1579 bp, Mus musculus
gtattgggatacctcgggctaaatgttcattaaataaaggaatcgtttttgcttagagatcgatttgtatcacgcgttcttttgaaacctgtaacctgacttcagtctttacctgtggaaatcatatgcccaatattttagtcatcactgtgcattgctgtgacagaagacctggcctaacttcagggaaaaggtgtattttatttcatcttatagtttgagcaatgtcaggccatggtcagctggctccactgcgtggaggcctgtagcaggcagaaacactgcaagaggccacgtcccaggaaagccactcactaatgcctgtcgggaagcaaagagacaggcaggggctaaggccatggtacttcagggacatactccagccacctgcttctagtctgtcccctacctcctggtagctcactcagctctaagtgcatggtgcagtccattgataaagtcctcatgctccggtaaccgtctcgggacaccaccagcacacggccaggctttaaacatttgagccttttggagacagttcatagccagaccttaatgcccatgctagactatgtgcctgacccagtgtcatgatggaaaaagaatttctgagaaataagagctcttgcagcactcctgctaggcagtgtctgccccctcctgaggaagccgctgtgtcgtgtgtagaatgacattctctaatagacaagcgtggacatctctgaagtccataccaaacatgccagagggaagagctatgggccttgctgtacaaaatgggatttcaacccctggcacaaacacttttttccccatttttctctgcttgcttttacactgactctctgaagactggagctgagggcacagccatgggaaggccctgggacatgaggtcatttagattccatcttttttacactttagagctactgaagttctcttctctgttaaggatgaaaagtggcaggaccttacactcagttgcaagtactataaaaacgtttatgttaaaatgtttgttttcatgtagatgttttcttgatctaagcaaaggctattttccttggctctacaaataaacatgccgagaatgaaggaggcccatgtggttgttaatgtgaacacggctatgcagtagggatttcggaagggattaatctcaaatattctgctttttaattctttatattatttgtaaactgtgtgttcccatgctattaggaagtgtatatctaggaatggatatacgctatcaatgggtcatagggagtcttccacacttcttccatctatactgcaataaaaatactgtgatctactttctagtattccttccccctaggtttctcaataacaggtacaccaaatacagatgcttgaattgtaacaaatttgcatcttaaagataaactttttgtggaaaataaaaaaagtcaagctttgtttggttttcatttgttttaagtaagcaaataaacttggtcctaaagaacactgtgactgcttcctcccttcgttttgtcgtgtcattaattttgttttcttctggttctttctgaaaaccacaatatgccta

SEQ ID NO: 27933 - DNA, 1164 bp, Mus musculus
tagtggagaaaagaatactgtaatatatcacatctttttagttaggacattcttattacgtgactgggagggtggctggtgggaagaaatacactaaagttttgcgtcttttaaaacatcccaggggtcttgttctgacgttcctcatgactgtacatcttaccatccttcatcgcttcccaagcccggctgctcaggaaggcggtcatcgggtgtctagcatggacttggcagtatctagcaagtttatttaggtaggtctaggaagcgggtggaaacgtacagaggacacagatgcagtggcagtaggcacatctttggaagggtttgtcttaaagccgggggtaccagagtgttcagtgagtaaacgacgtgtggtggatgagtgccaagtgctcagagacagtgtgtgtaagtgctgttgatactgtcctgtcaaacaccacttcaaaagaccttatgaatagatcatttagatatcccccttttaaatgaaagccagttttgaagtgtgtaactaatttatattatctagtacagtttcgaaaataaaaatcatttctttgtcagccaaaaaaatcttgagctgtaagaaaaaaaaaatagggacactcgctaggtaggtgaggccctttagcctagccggcttcagcagaggcaaggctgcatgtcaggcaggatgtgggcggctggagcccgagcagcccacactgcctttgttttttcctcggggcgaatttcttgcgttttcccgtcgttttgggcaaagggcttaagagttactcttaaaagtttatggagtcgtttggaggccatgagcttttgttggccaaggctagctagcggcagatggagaaactataacagcttccagattgtttagaatgctgtcttccctagacctcttctctccacaggaaagggtgagattaaccccgtgtatttcccaatcccttaaactaatatgcacaaaatctggctgcataggtcctctgctttaccgtgaaagcaaacagttctgggatgagtcccatataggggagctcatagcaatgctattcagaggcagagcagggtcccgcggccgggatggggtgggggcagtagggggagccgatcgcagggcttctcctcgcagactcacctccttgctggcctgctgga

SEQ ID NO: 27934 - DNA, 1140 bp, Mus musculus
tcttcaaataggctttcctgtctgggataggcttttgcatcttttaaacataaaattgtcaatagaaagctaattgtaaggcattaagttgatatatccctgtattttcctcatttttcaataaattgtgctaaaatacttttttatgtttgtttttaggttcccctaaataatatgtttggttattccactgagcttaggtcttgcacagaggtaagcagctttaaagcgagttaaacttcacttcagtgcagttcagaagctactgtgcacattacctccaccctgacctgcatgagcaaacacatctctctctctcctgcagggaaaaggagagtacacgatggagtactgcaggtaccagccgtgttcaccatccacacaggaagagctcatcaataagtatttggaagctacaggtcagcttcccgtaaaaaaagggaaagccaagaactgactctcctcactcaggatatactgactatttgactaccacacttggggatgatggagtctgcttgaatgaattctgacggcagaaacaaatttaggagcccctgctggcccacgttcaggagcttctgtatgtacgccaaggataactgtgtatttaaactgtattgactatttttattgtttagtaaaagaccttaaataaaattatattattactgatgtatatataatattatataagggaagaagagaataattttcagcttaaaatatatataaatttacttcactgctttttttttttttggacataagggctgtgtgtatatagcccctgttggcctcaaaactcacagtcctctcatcaagaggtaggattctgggcacacaacacccgacaccgtgcacatgtatgtacgtctgtggtttagtgtgtgaatgtacatgccagaggttgtcttttgtagttgtcctctaatttaattatttaggtaaagtctctcactaagcctgaagcttgtgttgctgagcagaacatccagggattccccctgcctctgtttccccagactgggattacaggtgtggtccaggcccagctgttttcacatggttcctgggggcttgaactcaggtcctcatgcatgcctgcctaccagtggtttactgacagagactcctctc

SEQ ID NO: 27935 - DNA, 1100 bp, Mus musculus
taaattatagcccatgagatgcagttacagacaggaccactctgttccctgaggacctctcagtaggaggttgattcctttcccaggcctccagaggcaaaaggggcatctgctcctgtggctgctgtacagacagctctctcttcattcaggaaggcattttgtacttcacttgccttggagcagatggtctagcagcagaaacagtctaggataaaacccaaaatctgctgggcgtggtgatgcacacctttaatcccagcactctcgagttagagtcaggtggatcttggtgagtttgaagcaagcttggtctacaaagtgaactccaggccagccagggccacgtagtctctgtgtgttctctgattgaaagtctttcaaagccccagtagtgtgtgatttcagatgctaatattaatagtgcagttagtctgtgtgtgaagactttgacagtggtgtgttcctgtatctggaaactgcagcatgcagtctattcagaacctcgggctggccgtcatcgctatccttgctggcatgatcctggactcgaagggatacttgctgctggaggtgttcttcattgcctgtgtttcttgtgagtgtgccccgtggcagcgttgggtttcttacaacagattcaagtgttgatgtttttacagttgggctttgtcatactgctgaaactaaactagacagtgtgcctcagcaggtaagggtgggaagccaggctctgccttggtcgctgaagtagctctcggcttctaggaagctaagggtaaagttctgattttgttcatttgtaaaggcacatggttttctcagatagaaatccctgcagaactacttcttagaaatgacaaactggccaggtgctgccaattctggggataagaagagaggaagaagggtcagggcgggtgctggttgggggtgtcttggctcccactcctatagggctattctgccactcctgggctaagaagcagtggtttcctagggggaaaaaacgctgtggcactccagggctcccagaagcaaagatgaacagtgtgttttagattccgattaagaggggtttggtctgtgcttgcgtttga

SEQ ID NO: 27936 - DNA, 2440 bp, Mus musculus
ttaataagttttgagacttgagtaggatgaagtttaacagcctgtgttttttaaagtaggtggtactctcctttttcatgttacaaagttggaaatgaaaggctaaagagctggctcagtggttagatgtgtatactgggcttacagagggccaggggtggcgtctctcgggaatgactagaggagcagctagcagctctagggaacccagggcctcttccgtgggcacctgcactcatgcacaccgccctccaataaaaatgatttgtatatttctgaataaaattttacatcacaagaagcttaatgactaaaatgtttagaaataacagaaaacagaaattctatcatgtattttacaacgttacactttcattctgaagactgcacggagctgcctgtctttctcgctgccttctggtgatttcctgtgttatgttttgcaggtaaagccgtgagaagggatagcattcgcggctgactggaaaccttcaggaagacttccttttttaaaacgtcatgtagaaaaatgatagaacggaaaatatatttatatttgaaatatgcctacttaaagtgattcatgcagactatcttagcctttcataaccatgtgttgtggaaggtttgtttctggtcgtgaacagtgaacagtttacggaatctggaacattcaggcaaagacctctgtaaggatctgcatcttctgctgggacgatttctaataagggcgtcctgcggatgaagcctttcctttgtattatagcaggaaaaagccacaaaacaggagggtctgtggtagaaggctgttacatacataataaagaatgacattttaaccgcactcactgtgtcctagagaacaatatgtaattgctccatatttccctctaggagattatgtgtgaatgtcgttagtgatggctgctgagcagcaagcctttggaagttttttttttttccttaaagacaataaaagtgtccttcagtttatgatggctacctatatacatggatccataaaaccaatgcaaaaggtagacttgatgcctgccttatatttttacaacattgcaataacaacttcaagtttcctgtggaagataatttccagaaatcaaatctgcaataaagaaaatgtcctagatccaatctcattgaatagttttataggtgtaaggtacgtggggtacatagccttgtatgcttcaagctttggcaccaagggctggagagatgactcggtggttaagaacatttactgctctttaagaggaccccaggtcagttttcagcatccacatggggccactcatagtcacctaactccagctcccagggatccagtgccctgctgaatcttaagcagtacagaaacagtttgaaaatgcattccttttctttttggtttatagtttgttatgcattcttcacttgtgagcttcgaggctttgactacatgtgactctcatagcacatgtcaagtatatgaactggcccctctgcactggtcctgtcttcccactgtgtccacatgaggtgtggggagccttgacatgcttatgaatgggctgggtgcctgctcggctcacagggttgtccatctcgatttccttctcttgagtgtattctctagtgcacactctaacctggttccatctgacttaaacaaaaaccgtagtttccagctcagaatcatcctaacatagaaacttctctaggccactcaggctgtatacaattaatgatacctatgaactttaaagcctcatcctgtgcctttttagctcactttgatttgtcaggaatttgtggcattgtgggcttggggtgtatttgatcgtccttagattgtcagctccatgagagcagggacattgcctggtttgttagtgactctatcctagtgcctagcataatgaatgtacaaaactttttctttctcctttttgtataatgtataaaataaaaagtaattggaacaacctatttggaggataaatgactgctgcagactaaccccttctgggtctcctatctcaagaacttccttaggcacagtttgcaaaacacaagaaacatcaaacaagtttccctgggtctctcctgctgtgcttcatttttggctaacgtgcagggcctctctcagcctcccctgtgcaaactgagggtgaatcagcaggtaaagttttaaccatttttttttccttttcttttcaacatgaaacatagaacagtcagtcattcagacaatgaaacaatcattcagacacgaaacaaaaacatacatgaactgacacgtggacagattggttcaccaaacatacacaatacaaagaaggtagagaactcgatgtaatcaaaactaaggatttctcctgtaggggccagagaggaagcaggacatctaccgatttctctcggtccctgggagagctcc

SEQ ID NO: 27937 - DNA, 1995 bp, Mus musculus
catgttttaaaaaatctcaatcctaagcagggagtgaattcatgaatgtttgacttatcatgatttataatgcacatctaatacatatttgaaatttaaaacaagagtttttcaaggggttgggtatgtgtcccagttattaggatgcttgcctaccatgcacagtgccctaggtttgatcccatatgaacataacatggttgcacatgccagaaagcccagcactcaagaggtaaagacaggaccatcagaagttcaaagtcgggtgaggatctgtggggatgcccagaagagcgaacaagagaagggacagacctagagttattaagaatgggcctttgcattgtataccatttgggctattagcggtgctcctgggcaggagcctccaagtaccccatcccctcctgtcaccatgacttccatcataacttctaaggggggaggggaaggggggagattttatatatatatatatgtatatatatatatatatatatatatatatatatatacatatatatatatatatcaagttttaaattattgatagtttgtctggattaccaaaatcactctttagcccttcctgtggctattatgccgacctgtctcccctgcctcttcccgcttccctcaagccaactatacagcccaccagaaggctctggcagtgcccatgggccccagaagcaccagctccttgatcacctggggtttgccatcacggtgtctctgctgttccacatgcccttctgccacctctggggtaaggaaaccaaaggatctcagtgggggtgggagcttcagcctctcccctcccccctcgccccaccccagagaccctgctcacaccagaagagactattgaaagatgattcattttattttttctctgacctttccatccttgggaaaacagaaaaacaaaacaaaacaaacaaacaaacaaaaacaaaaacaaaaacaaaaaaagaaagaaagaagaaagaaaaaaaagacaaaattgaccgcttaaaaaaaaaaaaaaagacaaaaagacaaaaaaccagagcccacctaatccatagaaagtaatgtctttctccctccttggaatttttcttctgttctgtttttggaaataatattttttttaaagttgccttattgtggagcgggaacctgaactaatgcccaaatgcctgttttccttgagcctctggaagagctccacctgcctgggatgtccctggacttggactgactagaactttcctcaagactgagttgcatgtacggggcctcctacctggaggcaagagttgggacagttctatcagagctgtgcccaggacacccttgctgttgcattgtctgaagccaatgtcctgtgtctgcacactgttgccactgtccttgttgtgcttgctgtcgcctctccaggcccactctgctctgctccaccccgccccgccccgcccagccctgggaaaccccatggccaagtttgcttcagactgttgtaaacataattggtcttgcctggttaaaaaaataaataaataaaaaagttcaaagtcatctatgtctacattgcaagtttgaggccagcctaggactcataaatctatgtcatagatggatagacagacagacagacagacagacagacagacagacagatagattaaatactaagctactacctggtcataaaagctacatgtaaattagtattatcaaattcagaaaagatgataaaataggcaacctcctcaagtagtagctgtttcattagccttcactaatggaagtgtgaggcttcatttactaatgttagtgttagacaatgtaaaataaagtttgttctttctaaagacaagcatcatgaggcagccgctgtggtgtgtgtgtgtgtgtgtgtgtgtgtgtgtgtgtgtgtgtgtactgttacaagagcacaagagcatatacgcatatacattggcaggaaaatcagcaatgaggaagttg

SEQ ID NO: 27938 - DNA, 1433 bp, Mus musculus
cccctgggctatgagggtgaaaagtgcgcgcccgaggctgcgcacccctttgctaatttgcgggttagttaaccggaggaagtcaacttgtgcggggagggttggaggcagctcaggctgctgttggctcccgccccaaggcctcttagggcgatcgcacctcacggctggccggcgccgcgcgcggggaggtccgggtgggcagcgggcggccggaacagtgggctctacccggccactcactctttctgcctcccccctccccaggattaccgagaggatgggatggatctaggcagtgacgccggcagcagcagcagcagccgcgccagctcacaatccaactccaccaaagtgaccccttgctccgagtgcaaatcctcatcgtcgccggggggtagcttggacttggtgtctgctctggaagactatgaagagcccttcccggtctaccagaagaaggtgattgatgagtgggctccggaggaggacggggaggaggaggaagaggaggacgatcgagggtatcgggatgacggctgtccggcccgggagccgggggacgtgagcgccaggatcggcagcagcggcagcgggagcaggagcgccgccaccaccatgccgtccccgatgcctaacggcaacctccatccgcacgaccctcaagacctcaggcacaatggcaacgtggtggtagctggccggccgaacgcctctcgggttccccggcgacccatccagaagacccagcctccagggagccggcgcggaggccgaaaccgggcatctgggggcctctgccttcagccaccggacggcgggacgcgggtcccggaagaaccccctgcgcccccaatggactgggaggcattggaaaagcatctggccgggctgcagttccgggagcaggaggtgcgaaaccagggtcaggcgaggaccaactccacctctgtaagttggcccgggtgcgtgcccacgcgcgcacacccgcgtacacacctcgcgcgcagcccacacgccccttctccgcgctctcgccgggggtggccccattcatcctttcccgagggtgggggctgggccggagagcctgcctcctgctcccctggggtacgcttgctctgtctgggagctgtctgggtttacaggatgggcggagagaagggaggggcagccagagggcagcagaaagtcgggctagaggaacccgcgactcattttgatggaattacttatggagactaggttgtgagtcacttgcctgaaaataaatctagggagatttcctgaccgaagtcagtgcctgcgggggctttttcacactataatagttgtggctttgtccatcctcgtgggtcttccagcgtctcccctcacatctccccctgagccaggcagtgcctgtgcacatgaactcagtcgcctgcccacac

SEQ ID NO: 27939 - DNA, 1433 bp, Mus musculus; identical to SEQ ID NO: 27938

SEQ ID NO: 27940 - DNA, 1220 bp, Mus musculus
gattacgcagtcaggaacctaatgctggaaacctacggtgtgggatacaagtatcatttctatcagagaacacactatgggagaatgataaagttttttctttctgtgattagaaattatgaggactaaatgtatttattctatggttcaacagtttatcctacaatatctcatacggtagtcagtcttttttgtctttctatgctaatactaatcttactcttaagagtgcagatgcaggtctcttccaggaagaactaggacttcaaggagacaggtggttcagtggaaaggctgtttgccatcaatcctgatgacctgaatttgatctcctggaaggaaagaagacatggacccacacaatacatacaacatacacatcatacacacatgtacccacacataataatagtgatgaaaggagaatatacatacatacatacatacatacatacatacaacatacacatcatacacacgtgtacccacacataataatagtgatgaaaggagaatatacatacatacatacatacatacatacatatatacatattctgttatatagccttggttgtcctagaactcactatatggaccaagttgacctcaaacttggcgatcctcctgcctctggctccagagtgttggcattaaaggtgtgtagagacatacccagctagaaaaagaggtctttattttaagatgtagaaggaaaatgttcaggttgtaaacacaccagcttgccagaattgaagccttggcttagtcgtagggttctgctcaaggtcctgagttcaatacctcccattagttgtagggtccttgtctaatcgtgtttgaggccctggattcatttgtgttcaaggcactggataataataatgaagaaattaaatagatttaaggaatacccaatgtgagaaacttttgtaaatataatatttttattctttgaaaaattcatagtgttttgatcatattcacaaacaccccaattttgtgctcactctattgagtgtaatttgggctgcccatatcctcctgagtgtagggccatcactggagcatggtcgacttgccagggtctcactcttaaagaaaactggccctccctccctcagaagtccttagctgcctgggtcctcagttagggatggggctgatgctagaacattggctggcttcatcacgtgtactgtggtagtcctgtggaggag

SEQ ID NO: 27941 - DNA, 1220 bp, Mus musculus; identical to SEQ ID NO: 27940

SEQ ID NO: 27942 - DNA, 1153 bp, Mus musculus
ggcttcagagaaactcgatttaggcttaagtaggaggaatgaagaaaattaaccgaggtatgcttttattccgttttaatagtatattatagataaaattaccatcctggaggatacataatagccccatcaagatcactttcagtgtgttgaaaacaatcttcaaagcagggagacaaccttgcttttggtttttatagctcctgcaccctggaaacttgcaatgtagaagtcataaatccgattctctcgttaggaaaccccattcattacattatgtattgtgaaaggtactaaactatacaacattttaaggctaaatttttgatttcactctttcagaagagcaatacactgataagaatctaccctgaaagctacttctggatataaagcctggcagaaactacatgatgcggccaccacatccacacacttgaaacagcagggccgcggctgggtacaaagcttaagaggggcctgctgaatgctgagtgttctcgcacttgtaagaaattaagcccaggcacactcaacacattcctggatgcgacttcctgttggcttatttatacaatctgaacgattcccgaggagagctttattgtccacagaaattgagtggaggtgtcttcagggttggctcttttccaagaggctcctcttagagccaaattatccattgcactttcttagagagtttactaaaaatatatgagagtttactaattgctgaacatatgttactggggggaaaacgaaaagaagaggataaattcctacttttaacactggttactttaaatctgtggcgcttcctcccaaccctatattaatctccaaagagaaagaaacaactatgtctgtctgtctgtctgtgtctgtatgtgtctgtttgtgtgtatgtggtgtgtgtgtgtgtgtgtttgtgtgtgtgtgtatgtgtgtgtgtggagagagagagagagagagagggagagagagagagagagagagattttaaagccttggtttaagtctaggcaggcaacaacagttgatgttgtatcttggagtccaaagctgagaggcagtcttttttttctgggacctgtgttgcctccttttcagttgaatgggtgagactggcctaccatatggaaaaggatgttct

SEQ ID NO: 27943 - DNA, 1153 bp, Mus musculus; identical to SEQ ID NO: 27942

SEQ ID NO: 27944 - DNA, 1147 bp, Mus musculus
ttaagttgacaaaaaaaaaaaaaaaaaaaaagcaaaacaaaacaactccaggttctcatagcaagcttggagctaaaataaaataacatgtgttttaattattccctgccataaatggtgaaaggagattcacgaaactaagtgtgacatatgtcatatctataaatggcagtttagtttccaaaccccttgctcttgcctctggatatatgttgtcttcgttagggctactattgctttgatgaaaccccaggaccaagaagaattcagggtgggggggaggtatgcagtctctgagggaaaccaaggctgaaacttaaaccaagcaggagcctagaggcaggagctcatgcagagaacatggaggggttcttactggtttactcctctcgcttgctcagaaccaccagcccaggggtggcgccaccatgaatgtgctggtccctcccttctcagtcactaattaagaaaatgccctgtagacctaagttcagccggatcttatggagggatctttccagtgagggtgcgtcatcccttatcattatagcttgtgtcgtgttgatgttaaactgcccagcacacatgctgattatgaatcatttccataaatgctgcttggatgtgagggtaaaacctctggaagtgttgacgtctcaatagagagataaatctaagtcccatagggtacacagaagctagggtcagtgtaagagagccccaaacccagcccctaagttctgtggactgagtaatgaagggctggagcactaccctggccatgcagacaatggggccgcatggccctagccatgactctctgcccaccccttttacgagtgttgtctgtcagctgccaggaatgttggtagccgacagttctcagctgagaccctttggggttaaacagagctgttttgtcttagataatgcctctttctccagataaggccatatctaatgattgattaatgctgggaaacaaaggctctgcctttccctagggttggaacaacttagaagggccagccaacctccagcccccctactgctcgagtgagacccttatttacaggtgcactggagtcagggtataccttggcttactgcttcattcttctcggctgttgacttggagctcgctctt

SEQ ID NO: 27945 - DNA, 1148 bp, Mus musculus
ttctcattgggctttgaactacaggctcagccctttctcacatgtttcagaagtcaaaaataatcatgactgcttgctactgggatgtttttccctctgtggtatcttgttccgatgaccaagaggtgtgtgttgatcaggcaaatgtcatttgatgcctgacctcagaagactatctcagaccgtggctctgggttccataattaaacatggtcctgttataccttttaccactcttctatccgtgctcagaacagtcattctaagtaggccctttttgaggtttcttgtgaccgatgggctcattgagatcaagtgggtagtggtactgctgccaggcccccacctatgtggagagaggaccctgttgctagtgccccaccccagctgcatggcaactagagtgaagcttgaagctgctctcccttccttcacagagcaagcagagttcttcctattcggatagagacacaactgaggaggagtctgaatccctggatgacatggacttcctcacaaggcaaaagaagctacaagctgaagccaaaatggctctggccatggccaaaccaatggccaaaatgcaagtagaagtggaaaaacagaacaggaaaaagtctcccgtcgctgatcttgtaagcagcggaggctggcatgcaagcgggcgtttggggctgaagatgggttctttcccagagttatgcaaacttgggtttctctgaggcagtttgtcagaagcaccggcaattgagaaagaacaaagtccgtttctttttccggtctccctgttacactgagaaacacaggggcagcatttcgtagaattaaatgctcgagggccagtgattcagatctcctgtgttcctgctcttgcacaagtaaaggttgctatagttctctcccacctctttaaggagatggtggaatgtaatgaattagtgccctggacttagcagtcacggttagctctgccactggcctgctgcagggatccgacaagaggctcgcatgccagttttcacatgtgccctgtggataacagcacccggttgggagtatggttgtcgaagacacagtgagaaggcatccagggcaccttacctggcactggtatagagtagtaagcagcagctgatagtgttcatgtt

SEQ ID NO: 27946 - DNA, 1148 bp, Mus musculus; identical to SEQ ID NO: 27945

SEQ ID NO: 27947 - DNA, 1326 bp, Mus musculus
gtttgtttgttcctttatttctgtttttttcagtataaataggtattcttataataaagccttgagttatttacaatgtatgttattctgattgtatgtattctatttgatatataaattgtaaagtatcttccatactttatgaaacaaaaatacaggagaaagggtttggggaaaatggtacaatgtagatgtatatcgaagtttatagttcacataacaaacgctgggaacagctatggtatccatcagctacaattagataaaaccacgtggtattcaccggcagtgattagtctctcatagaagggttgagctgtggcacatgccgcaacgtggatgagcctaggagaacttccactacgtgaagtaggttagacatggcacagacgtcagtcctgcggggctcacacaaggcactcggattaagtaagttcttctggtcagaaaagaggcaagagggacaggccctggaggagggaattcattgtgtaacgctggccattgctgcttggggtgagagccctagaaatggagagtggtgatggttgtatagcatcgtgggtgttgtgaactccgttgtcctctttaaaaggattaaaatgataaattttctttccagttgtttttttttttaaaccatattgaaaaagtagtcaaactgcttttgttgttgttgttactctattgacaaagttggtaaactgcattttcttcattcttccctgacttcagaatatttgggcctcagacttagagtctaaattttcaaaactctcctcactggatgaccctgtttgtctggctttaatataatgcatccccaagtccccaaaagctttttaacagtgacacagacatccctctaaagtgcccttgaccctgctcttagaattggtgcattacagagctcatgcacactaattgggaaaaacatcacccctttccctccactgtaatttctcatgtaggttttgttcatagaaatgccccatagttcccaatatgtaccttttcttttatgaaatgttggactgttcaattcttagtctagagtttggatacacagatatgttcaattcatgaaatctaagcaattgacttatatgttatacatgctttctactttgttaaatttcagtgtaatgtttcaaaagaaaaaaatggttaaattttatgtttagtatgtttaccacaataaaaaggttaaaaaaaaataatgaagtctgtttgtgttctttggtagctaacaattcaactcaatcttgacactgcctactagagtcagcaatggactccacaggccacagatcgcagctggactgc

SEQ ID NO: 27948 - DNA, 1125 bp, Mus musculus
aattagagcccttactttaactgtcgacacactctgaggctgagacttgaattttcgctgtagttcagccaaccttacaatgagagtttctgtttgattttctgcaacttgagctctattgctacaagagagaagattctcctcaaggacacacttagcaacttttagatcgtttacttgtgtctggagccttttgattttatcacacaactccttcctttcattcatcattttttccacagatactaagagcagccagccagtaaaatcatttttcgattttttccccatcttgtagaaagctttgtgcactgaatcacctaattcattaagaaaatcaagggcattagggggagggcgggggagggcgggagagggcgtcctccagcggctccagggctggggtgcggggcgcggaggggcatccgggttggggaagggcccctcccctgagacggcggccggccgccgcgaatggctctcctgctggccgcttgcggaggtttggattcaggattcatccccagtgtccaagactttgataagaaacttaccgaggctgacgcgtacctgcagatcttgatagaacaattaaagctttttgatgacaagcttcaaaattgtaaagatgatgaacagagaaagaaagttgaaactctcaaagacacaacaaatagcatggtagaatcaattaaacactgcattgtgttgctacagattgctaaaagtactattaatcctgtagatgcaatataccagcctagtcccttggaacctgtgatcagcacaatgccttcccagactgccttacctccagaacccgctcagttgtgtaagtcagagcagcgtccatcttccttacctgttggacctgtgttagctaccttgggacatcatcagactccaacaccaaatagtacaggcagtgggaactcaccacctagcagcagtctgactcctcccagccatgtcaacttgtctccaaatacaatctgcaatagcaatctgtagcaacacaatgcagggttctctagagtcacagaacttatggatagtctctagataataaaggaatttattgatgacttacagtcggcagctcaattccataattttaaagagccc

SEQ ID NO: 27949 - DNA, 1148 bp, Mus musculus
tatgcaactttgactaagttaagagaattgtttagcttatacattcttttaggtcttatatccacattatatatttcatgaaataaatcagttcttatatcaatcctgtgcccagtacaaattcacattgcatattcataaacactaaagggtagattacaatagaaattgtagggcatgggatatagctcagtggtagaatgcttgcttagcacacattagtgtccgttggttctcctatagagagggaagaatagttggcataagaagggaaccttgtaggtcattccccttttatacttctttaaaccaagtgtacttattagtcttccattaagagtaaaaatagcattcaaagtcttggggacatgtaccactgtacaaggggtctggtcagtcttcggctacagaaacccaatgcggtagggaagaatggtcaaatctgaatagtaatgaaatgatctatttagttgtttactccttttcattattagggagacttaggagctattgatgaaaaatatgacattgctatttcatcctgttgccatgcattggactacattgttgttgattctattgatacagcccaagaatgtgtaaacttccttaaaaagcataatattgggattgcaactttcataggtttggataaggtaagtattcataataaacttcctataatttaactttgaggtgccatatatttttcccttaaaatttctaatttttcttcaccactattggcccctttttttttttttttttttttttttttttttttaatttaggttgtgtgtacatgttttgggaggttaaagggtaaagtttgtaatgccttgactaaaaacttccagttgttatggtgttgtccagtggatggatgattgttagtatgtttctgtttgagggtggggacaggaggttcaaggcaggatttccttgtatagattggctgtcctggactttgctctgcagaccagggtggcctggaactcctccccattgccctgagagtataggtgtgtgctgccaccacctggctctatgtttctgacttctatcactaagctgtttcttcatagaacctttatggagatgttgtgtaattgtattttaaagtagaactcaattattttcactatatc

SEQ ID NO: 27950 - DNA, 1166 bp, Mus musculus
gctaagcattgattgctagatggaaagtcagggtggcataaacagcacatcaacttcacatcttacaacagatgcagagaaatacgataaacttcccatgcttggctacaagtgctgtcagaaatgagacattacctgaaagaagactaaaatcaaattagaaaatgacaacttttgggttgaatattaataccttaccctgtttttattggcttgctagttaatgttttattctgattaataagtctttttctttaactgttacatgttatagtggctaacttggcagttctttgtatatgtagatataagatttttaaacaaatgacaagatccttgaggtccacaagcctattttgatgatttgaagctttccaatgcacagatggagaggatttataagttgttttaaaaatctaggccaggattgtttaaacctttttttggggtcaaggctattcataggtttaggagcagtcatcccaagtagcactgcttgctgcttgtggataaactgtctagtacacttgagtttaattcatccttgatatcagtgaggtctcaaaaacccatcagaaagtgtctggactgctggctctagcaccacaaagcaaatcaagtacatattttgattttgtattttagccttgtttttatatgaaaactatacgaaacgtacattgggacaattatgtttatgtgattcatctaatagattatgatgtaaaaactatattcatcttaaaatgttttcaccctgtagcttgagtactgggattataagtatgagttgatgctgtacctgtttagttttaaaagaggtcattaagtcagaacctttaattttgctcacttgacatggactaccatgatgcatgtggtagaacttttggttcacagccattgaaatcccctacacaatgttttccagaaaccccttatgaatgctcttgaatggagactttatttcaaataaaagctgtgtttcttaaggtcagaacaatgctgacaagttttatcactaaagtccacttatcagacgcaaaatctaggcatggtaacaaaatgaggtcattttgaagatgcaatgaaggtgaggggaaattatgtaaatattagcaagcgaagaatattggaacatttttcaaggggttactagcttcttt

SEQ ID NO: 27951 - DNA, 2286 bp, Mus musculus
atttcattggtttttttccctcttttccttcagattgatgaagatcctagccttgttccagagtcagttcaaggtggaacatttggtttcaattcatcgaccaatgtaccaacagaggggttccagttttaggaagatgttgtggaggttaggtacaatgcagcaccgagaaacatatatatatatacacatatatataaaaagggttgatccatcaagcttggctcatgggatctgctgctgcattaaatcgggagagaaaatgtgaagatttcatttggaaccacagaaaatgcccaaatgaggtcaaggtggcgagtgggtgcgagtgagaatgagtggcaatgtaaggaaaacttgacacgaatgcttatttaggttgagaggaaagggctacaggtcacaggtcttcggtgcctgagacggagcattgacttactctatcaattgagaagtgaaatgccatcatcatcaagccttgtaagcataaaagcgatgcccatataagtcaaggaaatgagcccaggcctcgctgtgaagcagtgtgtgaatggacagtgttgaatgggtgtctggctccgtgctagagagccaggttcatctttcaaatctagggctcttcgcgcatgaagcagactcctagtcctggggtgactgtgtaacgagagtatggttgtggtgctgtatgtggacgcatgcaagcttgatttgccttcagggggctgataacagacctagtagatcatcaaagtgagatcgatcacaagtgttaatgtacactggacatgaaaacaaagaccggtttagcagcagacattggtttactctgcagcctgtgttttctattctccctctaccttatcccccacccccaccccaccccaccccttttttatttagttttatttactttacctagtatggcttttttagttgcttctcaagtcagaaaacttcaggaaggtttccctgtgcatttgcaccagatgagtgtttgatgctatgaaaagctttccatatcatcaaaactaatttgtgtagatttttgcatgaaaaaaatcataaatttccctcacaatagactgtgttgcagtacacaagttgccataatagtataaaatgtgcttttaaagccattcttttcattttcagagataacataaagatctttgcatgaagtaaatctacagcatagttcatttttagattttgttgagtcctgtaaagaagaaaagtttcagttgtgatagaataccgtgctgtgtttaaatgttaacttgttttcaaactttgttttctatgaaaatgatatggaaacttctaaaatggaatttggtgcatatgtactgctgaataaagaccgatgaagaggtttgagtagatgtacaaatcaagtaatggtttgaacacctttaataatatgcctaatctgtttaattgttttagaatctttttatcttagatgtaggcagccatgaacaatctattttgagccactttagggagaaaaactttgtatttttaaaacttgcataaaaattatgcaagtggtttttataaattggaataatacctcagttttgaggttatgcacactaaattaaatatgtcataaattaatttgtacaaaaagaactctttataaggtggctcattgtaggaaatcctgtgccttcccctttgagcacaagtgttgcatgaacaacagtttgctataagaaacataccaggttagccaccattagcatctatatctactttgtgtttaaaaatcaactggtaattctgaaacactgtagaatggataaaaattattttgtgatcataactctttgttgaactagagtatttttgcagcattccttgtcatcaaaaacatggttaaactttaaaactagaagcagcagaaaactagcttgtaaaatttattcaagtagagtacaggctaggctgtcttggggaaataaacattaaaacttaaagcaatgttttacaaggggcgtgtgtgtggtgtgtggatttctttttctatttaatgtttttaagagtatacctcaatggctccttttagcttcttatctgtcttaagcctttttcctagaaccatcatgagacatgtcataagccctgtaatttcattctgggggtattagtatttcagttcacagaacttgttcagttgacaccatctacaaatgcagtctccctgttgacactaaccaaggctttgaccttccttcactttctccagtcaagaggattaagagacagcttgagttatatttt

SEQ ID NO: 27952 - DNA, 1207 bp, Mus musculus
ctgacactggttgataagagttcttaatatcaaacatctcgttgcatctcgtgtttcagactgctgcactgcgagctgtgggcaacattgtcactggaactgatgagcaaacacaagtagttttaaactgtgatgctctctcacacttcccagcactcctcactcatcccaaagagaaaattaataaagtgagtatttttaaaatattaataaaatggtactctttgtttgtggaattaggttccatgaatgtcttaaatagcattgactttttagtataagatgttacaggcttcaagagaagatatgttagtctttataatatgctcatggggttctgaattcaaacctagagcctttggcatactaagcatatgttctaccactgaactataccatcaccaataaactgtagttttgactctcttggaaatgatgaaatagagatatttgggtgttgaatgttgctgtgagtggaaaattttaatacatgtagtaattctcctagtttaatgtttcattgatagttactagtgtaagtgtgtgcatgtatgtctgtgtgtgtgtgtgtgtgtgtgtgtgtggtggctatgaaagggggcactgaatggtgatgctgatattggagtgcatctgaggctgttgtagaaataacatgggttgttgataacaacgttgccgatgattaaaacccaaaaacagctcacctaagtagcccagcaccctaaactctctaacaggattattaaacatcctgtgatctgatccaaagagtctagtatatgctagtgttcactatactaattagtatattggtgaatttaaatttggtaaattccaataatgttctccatagggtgtgaaatagttgttgttgttgttgttgttgttgttgattactaacagaggttttagtaatgcttgtgaccactatcattctagcaacaatgtagcatcttcctgggttaaaggcagttttcaacgatcattaaagtagaccaatcaagcaagccaacaactggggccacatttagctcttgagagaactagtacaatgactattataaataaggacactgaaagaatccacttgcatttttgacatctccattattatggctaattgagatttatctactaggataggattgttaaggtagagggagtagaataaagcacattatttgacaaaaggatgctacatttc

SEQ ID NO: 27953 - DNA, 1135 bp, Mus musculus
tccccctaaaatgtaaattctatgagacaaggaagtttatcattatattcctaatggcttcttaaatgctgactgaggtttaatgaacatttatggaaaaataaaagtactcttaaaaaagctgagtgtgtgtgtgtgtatgtgtgtgggtgcatgcacacatgaagatgccagtagtgagctttttgacatgggtgttgggaattgaactcaagtcctctaaagagcggtacattttttataaccactgagccatttctccgggccctgtagaatgctttttaaacagtgcttaaacaaaataattcagtaatttacctcttaatgaagatttgtctattaaagttggatataaaatcacaaagaaagatgaataatattttaaaagtggatattaaggtgggaaatagcaggtaagtttagcttgtttgaagaaatatatactacaagtagaccttgggtagaaaagttgtggtgtgttataaaaaatattgaactagatccaggatatctgagacttgatattcttaagaaaattattctgagccgggcatggtggtgcacgcctttaatcccagcgctcgggaggcagaggcaggcgaatttctggtctacagagtgagttccaggacagccagggctacacagagaaaccctgtctccaaaaaaaccaaaagaaaggaaggaaggaaggaaggaaactattcttttcctgtctctctaaagtgaaataattgaaagtaaatgatttttattctttcttgtgttatttaattaaaattttttattaagaggaactagagagatggcttggtggttaagagtactaactgctcttccagagaggacccaggttcagttctcagcacccacatggtggcttcacaaccatctgtaactccagttccaaggagtcaggcacccttttctgacctctataggtgccacacataaaattggtgtgcagacaaacctgcaagcaaaaacctcatacatataaaataataattaaaactatttttcatttaaaagtaatgaaaagaagcatttagaaaggaaaatttactctgacgaagtcccaagacatgggacagcccattttgaacaattccaaggaaatgaccagcttttgctc

SEQ ID NO: 27954 - DNA, 1203 bp, Mus musculus
ccggctcttctttctttttttaattaattaattgacttattcacattacatcccaatatgaagtgttctgctttttttctgggctccttttgctgttttggagggggtgaaaaaaaaaagtctgactgtgtgtgctgtacttttcaccccagtgcagctgcctgtcctcatggtcacctgcttgtcaccagttccctgcagaagctttttctttaaggagagagcaaggacagttcccacctgcgggatgacagcaagaggcggcggcggctgggggttacacagagccttccctaccttctagaaactgctcggtccgttgctaggtttaaacagttgttttgaggaagacacctcttgagagaatgcgtgtgggttttactttcaggatttgctttcccaacggtaagaaatgcaacctgagatttagcacaaaaaagcaagagaaaaaggaaatggcttgccggggttgagacttgagctttgcgctcagtggccagcgtttgaggatcttgacccacactgagtagaaccccatccccttgcctttgcagaccaggtttgtgccttcaactcacacctgagcatgcatgggggcgtttagacaaaacaacttagtccgtggctgcatcactagaatgactctccctctctcccccagtaatctttacttaactgcctgtaacttctcagggaggggtgaggctttgtgaacccttccccattcctgagcgattccccacaccagctcttgtgaaggcaagttcacataactgccaagttcgtgatcgcaacagttgtctagtcaagatttaagacagtggacccttttccccctaagtgtcggggctcacttcttcatcctctcatcttcctctacccacctcccttacattccttcggcttttgggaatggtgcagatgtctcctgtagggctaagcaccgaataatcatttaatctcatctcccattatgggtctctgcatttactaccacttattacaaaaagaaatttctcaattcaaagctgaggacatcactaatcttaaaggtaagaacataaatattagaaaatgatttgacaacatagccattcagcaaaccccactttgtccctactgcaggtccctagccacagtcttttgatccaagtttatggtgccaggcatgatgtccctctgggacagtccactcaagtccaa

SEQ ID NO: 27955 - DNA, 2410 bp, Mus musculus
caacgtggtcatcccagacccagacatcttgacctttgacctggacaagctgcagccggagttcatgatcttggcctcagatggcctgtgggatgctttcagcaatgaagaagcggttcgattcatcaaggagcgcttggatgagccccactttggggccaaaagcatcgtcctgcagtccttttacagaggctgccctgacaacatcactgtcatggtggtgaagttcaggaatagtagcaaaacagaagagcactgaaccctgccagatctcagctgccccaaactagaggactctcaacatactgttctcttcatgtagtaaaaggtgtgggtataattaggatcatgcgtcccaacacagaacccccttccctgatggccttgaatccctttggagtactgagcagagggttcccttgctgacaccgcagaggctgctaagtttgtgtccccccagcccttctatcagtgtttgaaacacatacataggtagccacagatcccacatatgaggcaaaggaaaggcaggccatatgttttccttcttaataatgtacttttcatgatctcttctgtggtccttcagggacctgacttggcgtcctctctgaacctgggcagggcaagctggtgatgccaacacttcaccatgacaatgaggtggccatgccctctgccttgaagcagtttcctcagaaatgctctccccttctgagtcttggtcttcagtactccagcatcctggaaggagacatgcaacactttgtaatttgttgcctgctcttagagacttgagagttgggaagccagtgcagcttcctgcacgccagacctccccgcttccgctcgcttccttcattagttcagtagagtcgggatgcagttagccagcccttacgcctctcatggagtgcagcctcgccatttgttcacaccttacgatgcatcgagggctgccgctgacctcaccgtgagacgtgagtttttgtctcccctcaccaagactccccagagaggggaggaagcaggacggaaagcacatcgcagtacagtatgcccttccatcttcaaggaggaattaggctgggatggttctccatgaccttttgaaaattgctgtctgcactggagaggaaggcaggagtcctggggtcaccagtcacactcaccaactgctggtttctgcacagcccttcccaagcccaccctacctagtagctttcatgcctttcaaacagaggtgggagaaacagcaacctagaatcacccacgggtgctgttcccagctaccaccacaagttggtatcggggcgcaaactactgggacgtgcttcctggcaagagaaagacctttcatggtcaattgcaaatctctgtccatacccaggcaaataggaactgtctgctgtgacctggagggaaagagcagactggctcctggggacctgtgtgcactggttgggagttcaagcaggaaccctcagagataagcagcagagttatttggggcctagattactgctcttcccttactaacaccaaagttgtgggggtttttttcccagtctctgtactttgtaagttaatttataggacatattagattgtcctgtttgctgattgaaccagccccaaagagccacgattttcattgcagacctacaccagagccggccttgttttgttctctcagagaggctgtgtgtcggcatgacttctcaagccctgctcattagctctccctaccccggccctctccttcagctgcagagcttgtaggaagccgagtctggagaatgaaagacttggactctgaggactgcaaactgtctggattcctctgggaacttgctttcctttggctgcatcaagaattaataatggcttcccaggaaatctgcttacttttgtatcttgtgttttcaacattggaattagggtcttttctgcttctcagaatgttttagtacaaaacacattctatcatgttagacagaagcattgattgtggagagacgtgcactgatgggtgtgtattatgggttaggtgggtggggaacagagaagtcaggtgtgggtttaaccagtgatgggatgagcttgttggcttaggatgctcttaccagagagtacccaaaacccatcttctaactaaaggtccagactcaacagcctatacagtcaacttcccttctgtatttgcttaacacaaaagtatataacaagaggaaaaaaataaataaatttgagacacaaatgtttgggtgaagaaaaaaagaaaactgccaagttagttggttggtactccttgagcaagcagggtttcttaaccagcattgctgaacccccctagttccagagccttctaactgaggtttatagatatagatattatagatcgatcttg

SEQ ID NO: 27956 - DNA, 1106 bp, Mus musculus
cgtccaaaatagcctttgtttgttacaccagcactcctgattcagctctttatgctggtcagatagggtgggggtgggcggtatgaactatgaaccctgaacagcctctggttacatcattctcatttaggactttgggctagttgggtgcatcttgcaggaatagaggaatctagcggtcctcaacacggtcctcaacacaagagaacacgtatgctaaaaatgttttttcaggtacatggttttcttgtcagagaagttgggggaaccatacttcacagtgcgaaataaattcatgaccaagctaaatgtcaaataggagaggagaaaacgcatacagagccctaacagagtgtctgtgagcttcatgttttccaaatgaactcgatcacagacatgtctgagtgaccctcctgacatttcagtgggctcttcattaccaccttggaatgacggtttgtaaatcagaagcactgagctctcgcctgcaaggctggcttacagtagaagcagtattggaatgttatgatttaatatgactgacagtctcccattgacagcagaaggccagcaggcatattgaaaggtctccctccttttctgtaagaagcaagggctttgtcatgctgggctattcttggctgggctaccacagccttcagttgtttctctgctttccaaattaaaccaaaatgtttgttttttctcatcattgacacacaccaaaaaaagaatgcatgcttgattttaatttgtttttgacattttaactatttttaatgtataatagaaatgtcacctgttaatattaacacacacttattatctttcctctcttcacaccagactctgtgaaataatttgcaatctagaattcatacatcctgaaattcatatcctatgttagcccttctttcatacacacacacacatatacacacacgcacgcgcacggttaagtctggcaacttataaggcttggccatatttccctagacgttatcctctgccttgtcagtttgtttgtctgtggcttttttttaggggagggggaagagatgggcagctgtaacaagtagcccagatagatctatgggtgaaacaca

SEQ ID NO: 27957 - DNA, 1195 bp, Mus musculus
gggacagtgggtatgcgtggcctcgacagtggtctggtggaagccaggtttcctgtcctccaaagagagaggacaagaaggaaaggtcaccttgtactatgtggttgggttttgttttgtttcttttctatttttggtcctaagagactataaatcgtaatgccccaagagcaaacccgggactgggagtgtttatcatccatctcctgaccatgtgaacagcaaatttgtcatttggaaagctagcctatttcagtagtacaattacttaacttcaaatgcaagcaaacactaaatgtcagatttttttaacaacaaaaaatggtctcttagcattacacattccaagttctaaacatatgattcatgttttgtactttgaacaagaatagcaaaatctattttctgtatgagggggggaaaactaaatatcagccatgggattttttttaaaccaaagaagcagtggcttttaacttctgccagccccatcttcttccctacactattgagccccgctgggttacactcatcggcttactcatcggaacagcacctcacaggaatacggagtcagcgtttacagaagaaccctcactagtttctgatacgatcaaggccaggggcggggcataatacagaaaggaggaagaggaagggaaagaaggaagggaccactgtcatagctgagtagtagtttctgtgaatggtagcatagctcagaggttctgagcttgtcctgagccatcactggacatgctggctttgtgtaagttcttcttaaatccacttgacatcacgacattctttcccttggcagcgggtccttcctacgtaaaacatcagaacaggttgtttatcagaagataccaagatccataatgtatcagccaggtttaaaaactcttgacatgtttaatgatgaactcacaggtcaaccaggctttctgacgtcagtccccaaaacccatctgtagatcagaaccttgccgaaacctctgtgcactaggcgctacttagggcgtttcatttctactgtccatacttgtctctacgagacatgagaaagtgcaaggctgcgagagggggttgggtagagctcggagcaggtacatgacatgtcatttggtccctttgatgtgctgggtagagttggcgttgtagagaccgctgtgttcatgcaatcactaattct

SEQ ID NO: 27958 - DNA, 1194 bp, Mus musculus
gctgaaactcatggagctccctagacaggagtcaaggcctgaacttagtgattgctttcacagaatttaacttgggtcgtttaaaggtgacagaggagtcaaacataatgcaaacgaagagttttgctaaccaaatcaaagggtcagacagtctggatggctcaggctgtagattagaatttcttaagatttccctaaaagaaaaactaactagtccacagccagaatacagtgtggagttgtatttattagacagtatagttacataatggttcagtgtgtatcttaagtggttattatgtaaagatatatatatatatttcttgtaaaaagctttacagagttatattgaaaacattcatttgtattgttttcatttgcaaggtactcaatgatatggtacgtaagagttatcaaatcaagtattatttaatgtcatttcaattttctaaatgtttaaaggttatgtatggtctcagtattatatgatgaattgcctttcacatttgagctttgttttattcaccactgatcagtttaattaatgtggcgttaatgtgacatcaaaggttattactgactgtccgtaatctgttgaactctgttgcactgtaaacatagagaattaaagcaagaaaattcaagctttgtatagttttttaaaaatgtagtcagtgtttctcgatgtcacttcatctgtctcattatcctccaaagaatttgggaataataagaacttcaggcagatcatttcctaaaggcacagaaggctgagacggtcttagtgtttactatcacagtgtgtaagctagaaaggggaagtggaagacccaggttgtattgttaaccctcccagtgtgtgttttctactgagtaatcaatttgtcaataaaggatttttaaaaagcagaaaggccaccatggagttgggagtctgaggcagagcctgactgaagtctgtgctttcacaatgctggtgcttccttgtggaagttcccaaaaagaggaaagaggattccccgtcccccattccagggattatgcagcttcctcggagagttgagtaagaacacgtaactccttcctattaattatctggcaataagtgttcaaaccttcctcagaaaatacagcctcaggagcggcagtcagctcctgcgatagctgatttctaactccacatggaaactgcag

SEQ ID NO: 27959 - DNA, 1190 bp, Mus musculus
tgatttaatttcttgactactggactttgctgtagctcactcagtcatactagttgggttttattcttgagtactgcatttgccttggctagtcttgctatcactagatagtatctggtacagttataatctgcctgttcacacttttcagtgtattacttaacagatttttctgtgtaccttcagaccagtatcaaactgtctacttaatgtatgtcatagatgccaggaagggctctttgtccattaaatctgttgtttatttatgtcaaaaaaattgtaatatctagctgtttaagcttgctacttgggtattgtactagtgtgtgttctcgtcctctttctaatatataagtattaaattaatcctatagaattatcttttaagtagctcttgctttgcttatttctggttcctcttagttcgggttcctactttgattattataaagcctccattctttttctctctgtttctttgttttaaagttttcattctagccttactgcattatgttcagtgtatcaagaatagcaagctgtttttagctcctgatctagaagtattaaaattatgtagtcagtatatgaacatttcccaaaataatgtccatccccctacacacagacaccctgaaactcattctgtaaattttttttaatggtcattgatgttttatctgcgtgtatgtctgtgtgaaagtttcagatcctctggaactagagttacagacagatgtgagctgccatgtaggtgttgggaattgaacccaggtcctctgaaagaacagccagggcttgtaaccactgagccatccctcccctaaatgtccattctttaaaggaaaaaataaagaagccacagagtaatgtagaaagatattaacttgagtggaagcttatgtttgtgaggttgcttttgggtaataaaggcaccaattcattttcttacgaaaaagtaaatttctgtctgaagaggaatactttttttttttctttaaataaatttcccccctctgaaagctacttttaattcttgctcaatataatagcacagtcattgggttgccctttcatttgctgccattgttgccatggttttatagtgatggattgcaatgatgttaatcacatgttccttcaaagatcttatgagtctatttaatttttttcctttttttaaaaaattc

SEQ ID NO: 27960 - DNA, 1122 bp, Mus musculus
taggtgtgtgccagcatgcctggctttgtgtggtggtgagaatcaaactcaaggcttcaagcactagggacaagcactgtacaatcaaaccacattcctacctccacattattaagagaatatgttcacaaccacattttcatgaggtaaacttaaaaagataatctaatctttggatttcatgtgtccctttcttaaaacagtgtaaccactgaaggacatggctcaggggtagagagcttgatcagcatgcataaggtcccatatttaatccttggttgtgcaccctcttccccaaatgtagtatacttagttttataattttaactttgacttattgatgtccttaatgcattcatagaaaacatttaagttactaatttttaaaattagaatattcactattgaacaactaggagtgaaggagtgcaattgccttcttttccaggtgatgaatggtgctatcctgcagcaagtgtttgtggtggattatgttgttcagtcccaaatgtgtggagactgccatagagtggaagctaaggatttctggaaggctgtgatccaagtcaggcaaaaggtattgaaaaaagatgatgagtgaatcctgagtcttgaatttcatcactgtccattttcttttctttttttctttttttaaaatacattttattcattgattgattgatttttttttttctttttgggttattttctttatttacatttcaaatgttatcccctttctcagtttccactgaagaacccccccccatttcattcccccttcccctgcttcaatgagggtgcccctcccaccctggctggggcatgcagccttcacaggacctcaaccccattgatgcccaacaacaccatcctctgctacatatgtggctggagccatgggttcctccatgtgtactttttggttggtgggttagtccctgggggctctgggggctctggttggctgatattgttgttcttcctatgggcttggaaaccccttcagctccttcagtccattttctaactcctccattggggaccccatgttcagtccaatagttggctgcaagcatctgcctctgcatttgttagactctggcagaacctctcagg

SEQ ID NO: 27961 - DNA, 1815 bp, Mus musculus
ttttctttttgtattgagaaaaggcctttttgtttctttttttattaaaaataaaagtcacgttttccctttattttgttggaggagaaccaagtggacaatctcttgacttcaaatcattactacatatgaaatcatccatagatatttgtacatcatagagatccttttgagttaatcagattataactatgagaactacatttggtctatggataggctgctgcttcctattttttttgtctcagaagtgttttgaggtttgttcagactagtatctaggtggggaacacacattaaattatatgaatattgtaattcttaatcttttcttcagagataatgcctttctgtcttgttatgacaccaacttttttttttttttttttttttttggtttctcgagacagggtttctttgtgcagccctggctgtcctggaattcactctttgaccttgaccaggctggcctcaaactcagaaatccacctgtctctgcctcccgagtgctgggattacaggcgtgcgccaccactgcccagcctgacaccaacttcttaacctgaaagttcacatattttgtagagtatgctatcttctagatctctactactgttagtttataaagccatttgacttcatttacagtattttctctaaattaaaaagggcatctgcattttggtaaactaaaatattttatgagagcgtttaagagatgagtatttttaattttatttggggagaggggagctgtgcatgtgcaccagttcatgaaaacgtcagagggcaacttgaggatcaagctcagatcatcagactttgtagtaatctttatccactgagctgtctctccagcccacttcagtgtgtgcctgtgtcagagttttggtgaaattcataggtttttctgaactctaggtttttgtttttgttttttaagttttgggtctgttttcttgctttaggattcttttgccttctagttaattttttgctcagtctgagttagccagtctctgtgaagacatttttctgtgaaaatgctatgtgtgtatgttacatgtgtgtgggttagtagttcagggggcaatgttaatgtctttttcaagttttggattgtttttatggtttcctttggagtaattttctgcattcctgatttgttaatttgttagttttgattgttttagaattctggaaagttgaaagctgttttaaatgaatattaaatgagaaaaagtcaatattatatttaatttttccatgatatgatttctttcttttctgttaagcacacccttggggaagtctggatccagaagacatctgaaatgaatacagataaacagtatttttgccgaactcacttgggacatcttttaaatcctggagacctggtgctggggtttgttttattttgttgtattttaacttggcagatagcattgtaggttttcttcaggagccaatgaatatttaaaatactaaatttgttaatttcaaaaaatttaagagtgcttaagatcctttcagttttttttttaaagatttatttattttatgtatatgagtacattgtagtatatgagtacagatggttgtgagccatcatgtggttgctgggaattgaatttcaggacttactgcttgatccatgcttgatccagtcctgttctctccagccttgcttgttccggtccaaagatttacttattatatgtaagtacactgtagctgttttcagacacaccagaagagggcgtcagatatcattatgcatggttgtgagccaccatgtggcctctggaattt

SEQ ID NO: 27962 - DNA, 1213 bp, Mus musculus
ctggtgccttcttagcagtggcatacccagctagcacccatgtgttatatgtgttcaaggatagctacatggcccccacaatgcattgtgttacagtatctagaagttggacaactctgtcagagattagtattttcattctaaaaacaagaaattctttaatagtaattaatacaccattcagaaataacactgattcaaaactttcacccaatcactagaatactgaggtcttgacatttgactctgcaaagtcctttacagaaaacttgaatgtaagattctgtgttactttggcatctcatatgtgtttgatctggaccagctctttctttaagaaagagtatgttttctttagttgacaattttaaagaattcaagacaggtatcttacagagtgacctctgtttggctttgttgtcttttcctgtgactaggttatatccttttggcagtgccactcaagtgatgccagacatggcacattatcataggatgcatgtgcttccatgagtccagatgatgccaggcatggttcattataggatatgtttgctgccatgagtccagatgctcccaaactttgcattcttttctggcttcctgttctgagaacaagctcttccatggagaattgtttgttcattttatttatatatattatattattgtagacttttaagttatcccacaaaatctagtatggtttaattgtgtagaatcattattattacttgctcttaaaaaattttttttttaaattttatgtatgtgagtacactgttgctgtcttcagatacacctgaagagggtatcagaccccattacagatggttgagctaccatgtggatgctgggaattgaactcaggacttctggaagagtagtcagtgttcttaccttctgagccatctctccaaccctatttcttgctcttttaaaagttcattttcaacatatagccagattcactctttgatatatctgaagttttaatgtgtgcagattttgtaatcataatcaaagttctggtcagctctaacacacaaaatcctcattctttgttattaaatgtttcctctattcccttagcaatatctaatctggtttctgaacttagtttgcttctcctaaagtaaatgagtgacatcacacagtatgtgggtcccccctcccctttcggtttctttcatttagcctagttacttgatgt

SEQ ID NO: 27963 - DNA, 1172 bp, Mus musculus
atgaggccgctcctgggctgtccgggcgcagtacgtgtggtgtcctggtgtgtaccttccatgctgtgcctggacgccgatgcccaggctgcacgaccacgtctggaactatccaagccgcgaggcacaggattaccatcgccttcctagctacgctgatcactcagtttcttgtgtataatggtgtctaccagtacatgtcccctgatttcctctatatccattcttggctcccctgtatatttttctcaggaggtgtcacagtgggaaacataggacgacagttagctatgggtgttccggaaaagcctcacagtgactgagcttcagcacatgggtcagagtggaagcaggatgtggagacactggtcctgggtgtgatgaagatgatctttttctcaatgttccatttagactgggctgacgataaatgactcctaaagacgtgttcacttagtctagactagcaaatggaggcaaggactacttacctaaaagtcttaccttgctcccccaccctcacacctgtcttctttggaacattccatcccaggctgtatgtgagagtcgggtaaggggggcagtttcccgagtattagagttcactcatcattcaaagcaaatgccatatttcaaagccttgaatcaaaatgaattaccaactagcagttttgtgtcagtgcccaaaggagggaggttgatggtgcttaacagagatgaagtgtgtgtagtaagaatatttatccagaattaaaataaaggattgtgtaaagaggggttgagagcagcagtgagttggaggaagatcatctcccggtaggacctatagtgcagccatatctccaggtcacgctcaggctggcgctcacgtgtgggtttcatcagtgtgggaacgatgctttttactgccaggaggtttgtagacgacaatctcactgaaagccgagggcagcacaaagtcaggtttctgcactgggatgctggacttctcacctcaatttaagagaagttttatccgagctctggaccatctaagagtgagtcgctgtctgctgtttcagtcataatgagccgaaattgtgtctctgtcactccagggtggagaggactcttccacagccctgtggagcttgcaatctgtgattgcttcgtaacaggttgagtgtgcacgt

SEQ ID NO: 27964 - DNA, 1164 bp, Mus musculus
tatgaaaaccaatctgagccttgtattctcgtaaatatttattttgtaatttttgttaccgcacgagctgttccggagaagggttctcgggtcatttcagaggtgcgtggaggcacactcagcaatactgtgtcagccgtgacatccctcagtcataccctccactgcacactagtcctctgacatactccagctttgtaagttcagtgatttttacttacacatttaccatttttgtattccaaaatgtgtttgttttaagttatatggaactgacctcctgatgcagtccttggtccccaggcggggcagaagctctgtgcctgtggacacctgggtttgggttaaccctcgaagggctcctcatagggggttgcttttttttttttttttttttttggagggaaatgtttgaagtaaacctttgttttctgaaactaccttggctaaaagaaaatgggttgtgctagactttgggatggtccttaaagttccctggaaataaaaacaaatgattggtattttgaagacattcttcagctaagacttgagtgtcttgcacaagccacagtgactggaagaaaaataagtgatcttggtgatgcacttgattgtatacaatgaggttttttttttttttttctcttaaactggaaataaatgttagaaataatgtagccaaaaaaagtgaatctgaaggatgcttttgccaatagttatagcagttacaacaaaccaaagtgactgagtttgtacaaatggtaactagtaccaagcacactcactttcctgatctgaacacccagcgaggttcatgtccgtgctaagtttgcagcattgtgttcttttgcattcttttttttttttttttactttttattaaaggttcaaccccccccaaaagaaatgtaaatgaagaaaatatctaattaaaaaaaaggggcaatgttgtggctggcaagtaccactaagcttgatgacctgagttcaattatctagaacccacggggtggaaggagaggtcttctgacttccatatacacagtcagtctctctgtgtgtctgtttgtatctctatctctgtgtctctgtctctgccccccccccccatgcatgcatatgaatgaacagacagagtaaataaataaatgtaaattctgaatg

SEQ ID NO: 27965 - DNA, 1216 bp, Mus musculus
atggctgagccatctcttcaccccaaaatatagtttttctaatgtgatgattcaaaaatgtcatttctaggccctaaaggagagactggtgacactggcagcccaggacacccaggaaccactggacctcaaggtcccaaaggccagaaaggagagaaaggtaaccatttctcatccaactcaggaagactctgcatcattttaagaaaagcagtttgctagaaaagaaagctagattattgaaagtggactttttaaagtgtaaacactcgataaatcatctcatgtattaatctgacataaactattaactttatacatggctaactgaaaaacttttaagtatatgagaatatcatgcatacacagagtaacacacactctctctatatatgtatatattgtatatatatatatgttatatatatattggaaatagagggagaggcttttttagttattcttttttgatatagtctttttctttattaattattatctttaaaataaatttatttatttatttatttatttattttacactccatactttattccccccatccaccctcctactgctccacgttccatacctccttcccacccccctgtctccccttggatatctaccccccgccatgtttcttgacctctaaactccctggggccccccggtctcttgagggttaggtgcatcatctctgaatgaacacagacaaggcagtcctctgctgaatgtgtgttggaggcctcatatcagctgcctgtttggtggtccagtgtttgagagatctcaggggcccagattcattgagactgctggtcctcctacaggattgccctctcctcagcttgttccatcttttacctagttcaaaaacaggggtcagctgcttctgtctgttggttgggtgccaatatctgcagatgatatctctttcagctgtttgttgggtcttctggagtgtggttatgctaggtccctttttgtgagcattccatagcctcagtaacagtgtcaggccttgggacctccccttgagctggatcccactttgggcctgtcactggaccttcttttcctcaggttcctctccatttccatccctgtaattctatcagacaggaacattttttttttttagttattcttttaaaaagttattcagacaatatgctttgattatgtttttccctctcccaactcctctcagat

SEQ ID NO: 27966 - DNA, 1195 bp, Mus musculus
gtgtgggatgtagaacagttgaagaataggagaggagggccaggaaatggaatatggattgtaaaaaaatgaattacaaatgaaattaaattttaaaaccccaacacatactatacatgagtttcagctctttacagaagggaagtagatacacagaaacatctacatgcacatacacacatagagcaagagagtgagagagctagagagagcaggaaagagagagcaagagctaaagagacatgggagatgtaaaaacaaatacttaccaagaatctcgattctttctagaagggaaacaaatgcagatgatgccttagcaaaacaaaactctcacacttcagagaaggacattggagttccaggaaactggcactaggatttgtgaatagaaaagcagaagagggcgtttttgtagttcttgattttaatcttgatgtcttcagccatcctgattcctaaagactgtcctggaggagcattacttcaatgtgacccttagcaaaggcaccccctttgacagctacttccccaaccagaaccagactaagaacggttggcagaactacctggacttccaccgctgtgagaaggcaatgacagccaagaggggcaatgtgtccctgtgtgcatgggaccggcatgtgtacaagtccccctgcccgtatcatggatttttaaaaattcatttttaagtatgaatgttttgcctgtaatacttacatgcatcaactggatgcctggtcctgaaaggtcaaaagaatgcaatggatcccatgggaatggagttatcactggttatgggccaccattttggtgctgaaatcaaacctgggtcctctacacaaacaggaagtgttcctaaacactgaaccatcttttcagttcctttggtctcagcctgggatgattgcatagcagaagacacatttcctgggaagatctgacctggctctgcccacttctcctctgttctttgtctttctccctgataggaaagggggaccttggtatatgatggtctctaccctgggaccctgaatcatgatgcaactactaataaaaactcactggaaaagttaaaaaaaaaataaaagaaagaaaaatagaaccactaatgatacagagctgcataaatccatcgaagagtcacagggaatcataggtaggctattaagttgtagttccataattt

SEQ ID NO: 27967 - DNA, 2531 bp, Mus musculus
gaacacacatggcatgtactcactgataagtggatattagcccaaaagctcagaataaccacaataaaattcacagactatatgaagattatcaagaaggaagaccaaaatgtggatgcttcaatcctgcttagaatggtgaacaaaataatcatgggcagtagagggagggacctgagaggaagaaataagagggaaggaaaaagggaagtaggaccaagtatggaaagagacagaagtccagagggtcaggagaatgaatagaagtaagtagcagtgaggaaggggaaccagcagaaagtcccagatgccagagaagtgagaggtttccaggaccaaatgtgcgtgacatcagccaaaatacttaacagagggtagatagaacctgaaaaaccacctccaatatatagacatggaccccagctgaaggatggggccacccacccatctcaaaatttttagcccagaatttttaaccctgaattgttcctgtctacaggaaacacagagacaaaaaatggagcagactgaaggaaaggccatccagagactgtcccaccttgtgattcttcccatctgcagacaccaaaccctgacactattgctgataccaagacgtactcccagacaggagcctagtatggctgtcctcggagaggctctgccagcatctgactaagatagatgcaggtactcacagctaaccattggactgaacccagcgaccccaatggatgagttagggaaggactgaaggagccgaaggggcttacaatcctataggaagaacaacaatatcaactaaactaaacggaacctccagagctcacgggacaaaaccacaatcaaagagtacacatggagggacccatggctccatctgcatatgcagcagaaagttgtcttatctagcttcaatgggaggggagactcttggtcttatgaaggcttgttgccctagcataggggaatgctagaggggtgaggtgggagtgggtgggtaggttggggaacacactcatagaggcagggggtgggatgaggtagtttgcagagggaagactggggactagggacaacatttgaaatgtaaataaataaagtaaccaattaattaaaaggcgggggctattagacattcttatatcatctaaaggccacctggagctctgggttatgtaaatccaaagagcaggtgctctagtcaagaaaacaggaactctttgttcagggaacagcttcaaaagaatggtgatttatagaggtagaggatatatgttaatagaggacacttggcatcttcctctggctactacacatgccccgggcacatgcagcagcacgtacccactcacagacatattcacatacatgtaaagaagtaactaagtagatcctttaaaactaaaacaaagagttgagttacagttgagtctgtcaactcatttactgaaagtcttctaagaaaagcaccattctcatatagataataaagcctcatttctctaccccaggtggtctccattcttttttttttttttttttttttagctcctggattctatgatgttcttttagaagtatgtagctgcctcttgtggaagatagacatgcatgttctgacagctcaaagaaaaaattatttatggagaattgttgccaaacagcctgctgtggctcttagagcatttctgtgtatctgttgagccaggcagctgccctgtcatgcagactgaatgtttaagtgcattgtggttggctttggtggtttgtatgaaaatagcctttgtaggctcatttggtgtggccaagctggaggaagtgtgtcactactggggggtgggctttgaggtttcaaatgctcaagccaagccaagccaagtgtccctctttcttcctgctgcctgtcaatccaaatgtagaagtcttagctacctctccagcatcatgtctgccttcatgctgccatgcttcctaccatggtaagaatggactaaacctctgaaatgtgaagccagcccaaataaaatgttttcctttttaactgttctcatggtcatggtgtttcttcacaataatgaaaccctaactaagacaatggccttgaaagaactaatccttttctcatgggaaaggcccatattcactatccagtgcaatgtagataatatttctggactgagtacaaaacaagaaacttttccagggtctgtctgtctctttaccccctctgtctctctctctgtccctctctgtgtctctgtctctgtctctctctgtcgctgtctctctcagtgtctgtcttagtgtgtgtgggtattttgcctgcaagtctatgcatcacgtgtcagtagagcctagaagaaagtgttagattccgcaggaactggagtccctgatagttcggacccattgtatagttgatttagaaataggatctgggttccctgcaagagtgcccaaggctcttaagtgctgagccatctctttattcccaagggttctgatcttatgcactcaataagtctaac

SEQ ID NO: 27968 - DNA, 1188 bp, Mus musculus
cctggacttccccaaaataagcttttgtaccattgcctttcactgtctggactttgtttttcaagcaggtcagtcaatgccctttagcctgactgcaaaaggcatgcatccccgcctccaagcaggtggcagttactaatcttcactcaagtaacattctagtacatattgtggcttttggtctgatttggaattaaggttagctacgagggccagacagtctagacagacacccagatcttggaatcatattaatctagacagaggtacctgccaagaggttgtggtttattgatagtataccacagagccacataaagaattggaggcaaaggttaaggccttagaagtagtagtcttaacaatacggcagggcatagcatatattaaggctagaaaggcagaaattccagatattagcaatagtcacttggacacttggaacattgatgaattggccaatgatttaaagataacctaagtgcattgaatcccctggattgggttcaatatattatcatacttgctattattattggcactattttattagtaaatcgttgtgtttccactcatctttagagcactcctaagatctatagctatgatgaggtgggacattctggaacttcagcaaaaatataagaatgggagaatgctatgcacactccagtgaagtttgcttggcaggtcgagaggcctgggagcactcatgaggcaaagagtttcatggatgctcacctcctggaactttggcattctcataaccagtacattcttaccctatccccacgttagtctggtgtatggatgcacgtgctctcctttagtattatcttattaaaagtgccttttaagattgaattctgatatagttaagccttccccagtgttccaacttcctagaaagaacttggaattcagtaggaattcagtaaggaagttacctattcagtaactaattagcattacaaaagacggagcctgcagctcagggatggtctgcagaatgtttactaggacagtaagtacagtctaaaccaaataaggatttactataaataaagttagggaatcccactgagacaggtttcttcactaggcccaaggaaatcaggctgaactatagagcataaataaattttatgcctcagtccagcctttcttttttatattaataacagggag

SEQ ID NO: 27969 - DNA, 1120 bp, Mus musculus
taggggtccgagggacacttatgaacccattcttactccatgctagaatttggactgctttgtacataacagggaaccccagctgctgtgacttcatgagggcaatttgacaggctcagaaagcattgcttcatcccaggctattctagcatctggcttttatgatctgttctccaccttttcattatacactgtgtgggaaggatatgatcaaggtatttcatttgtggcttttcatctcacatagacttattttctgtacttgactaattgtcagttttttcattagtcattggttagtgcataagaaacttctctgatgagatctgagggacagactagtctaatttacaaggaattgatgttatatccttttagcatgaaaatagtagtagataaatttatcaacatgttttaggtatattttgaagttttaaatgtcttgcattcattatttatttcgtgtgtgtgtgtgtgtgtgtgtgtgtgtgtgtttacatcaagggaactaagttttcttggattacagaagagtttctagcttctgtgaaaaggattctgatcctattgtggtctgaccccaccccgtaggctcctagcccctgaatagctgtagccattttgttacatgcctgccacctttttcatattgttgctgtaacaccaggcagaaccttctgtgcctacacatgagctcattgtggctttgtggttgacactgaaaaatgctactaataagtgaaaagttattattataatacttgtgttcgtttatctcaatgttataaaattcacctgttcacctcatatctgccacctatcttaccttactcagcctaagggttagctgaaaatactttgtctagtatcccacaatgtatttccttccttccttgccttttaaactgagtttccctataagcctgctctgtaaacagactggtaccataattaggtcattcattcttatggtcctcctctgctcagtctagagtgtgcattcaataccatccctgcctaactgagatcacttttcatgtggtgtgtggggcaagtactagaccacaatagatcccaggttcattgtgttaaaccccagttaatcagtcttttctgactg

SEQ ID NO: 27970 - DNA, 1120 bp, Mus musculus
gtggctcagatgattatcactggaagaaggcaggcattgacttattttggaaaggagccagatatcattgtccagccttacagcgtgagtcaggacacttggctgaaacagcatagtacagattggttgcttgcacaattagggtttgaaggaactatagatagccactacccccaagataggttgataaaattcttaaatgtacatgatatgatatttcctaagatgactttcttacagcctttaaataatgctctattgatttttactgatggctcctctaaagggcgagctggatatcttattagtaatcaacaggttattgtagagactcctggtctctcggctcagctcgccgaattaacagcagtactgaaggtttttcagtctgtacatgaggcttttaatatttttactgacagtttatatgttgctcagtcagtacccttattggaaacctgtggtatgtttaacttcaatacgctgtcaggatctttattttcagaattacaaaacatcattctcgcccggaaaaatccgttttatattggccacatacagtctcactctggtcttcctggacctctggcagagggtaatgatcgcattgacagagctctaataggagaagccttagtttcagatcgggttgctttggcccaatgtgatcatgaaaggtttcatctctctagccataccctaaggctccgacataagatcacaaaggagcaagcgagaatgattgtaaaacaatgtcctaaatgtattactttatctccagtgccgcatctaggagttaatcctagaggccttatgcctaatcatatttggcaaatggatataacccattatgcagaatttggaaaactaaaatatatacatgtttgcattgatacttgttcaggatttctttttgcttctctgcatacaggagaagcttcaaaaaacgtaattggtcattgcctacaagcatttaatgccatgggattgcctaaacttattaagacagacaatgggccatcttattccagtaaaaactttatttcattctgtaaagaattcggtattaaacataaaactggaattccttacaaccccatgggacaaggaatagttgaac

SEQ ID NO: 27971 - DNA, 1237 bp, Mus musculus
gccaccgtaaggcgctgggcgagcccggagcttgggggctcttcctcccaggcggcgctgagcgtacgaggaagaggcagctacggcggcggcggcggctgtggcagcagcgcataaaggggccgccgccgggtgatgcggtgaccgctgcggcaggcccagaagctgagtggggcctcggccctcagctcgtctgatccgcgctcccgggagctcccggtcttctccggtcgactcgcgaccgctcgggcggcctcaggccccctcgccccttccccgtccctcccccgtccccgttcccgccccgggggccgtcgccaccgtttcccaccatggctctgaagagaatccacaaggaattgaatgacctggctcgagatcccccagcacagtgttcagcaggtcctgttggagatgatatgtttcattggcaggctacaataatggggccaaatgacagcccctatcagggtggagtatttttcttgacaattcatttcccaacagattaccccttcaaaccgcctaaggttgcatttacaacaagaatttatcacccaaatattaacagtaatggcagcatttgtcttgatattctacggtcacagtggtctccagcactaactatttcaaaagtacttttgtccatctgttctctgttgtgtgatcccaatccagatgatcctttagtgcctgagattgctcggatctacaaaacagatagagaaaagtacaacagaatagctcgggaatggactcagaagtatgcgatgtaattaaagaaattattggataacctctacaaataaagctaggggaactctgagagagagaaagtacttttgatttccatttgactgctttctatgagcccacgcctcatcttcccctgtgcacatgtttacctgacacagcagtgctgcgtgttgtacatacttggaacaacaaactagaaatactgtacttctgtaccaacattgcctcctagcagagaagtgtgtgtgtgagaagccagttctccgggcataacctaggtgtgagactaaaagctttccttattgacttaactttggataatggcaagatgtgaggggtagtaggtacacagtgtgtgcttggatgggaggaaaagctccagtgacccataggagattgtccttaagtggagtccatccaatctcaaacagtcataaaaagcaaggtgaagaacgtgaagctgtttctatattcatttcat

SEQ ID NO: 27972 - DNA, 1130 bp, Mus musculus
gagtggggtcaggcaccctcactccttaaaaccgaagtttctacagctcaactaactactgttttcattctatatgaatcagcccccttcaaaaataattcctaacaattcatgtactaaatagtttccataataaatgtttacatttgcatgatcgttgtattaacagatttactgttttaaaaactcaccacattcgggctggagagatggctcagaggttaagagcactgactgctcttccaacagtcctgagttcaaatcccagcagccataaccatctataatgagatctgatgccctcttcttgtgcttctgaagacagctacagtgtacttacatatgataataaataaaataaatctttaagccagagggagtggggctgaccagagtgtgcagaggtcctgaattcaaattcccagcaaccacatgatggctcacaaccatcagtacagctacagtatactcatatacataaaataaataaataaatttattaattaaaaaaaaaactcaccacattcgttcgacccgcagagaaagaacacagttgtgaacagtgtagctgggtttaatgaaacctatataaaatacccccattaagaaaagcaagtttcgtttcgtaaattgtcactatggtctcccagtatccttgcacatgcttttatatgcaattgtgttttctggcttctgtgagagaacggactttgaatgctctgtgagatgaaaagtagaatttactggtaggagcagaacatatggcaaagatatttatgtctttgtattatgtataatttcttttaaactcttattctggactcccccggaacagtttactagagtggggcatggtgcctttcaagcagagagtctttacccaagtctggcagttctgataggtcagcctataagtgctccagagagttgcaggcttgtttttcatcttccaggtccctgagtcagggcagtgcaaacgccacagtgctggatgttgctcagacaggcgggcataaaaagcgggtacgccgtagttccttcctcaatgccaaaaagctgtatgaagatgcccagatggctcggaaagtgaagcaatacctgtccaacctggagctggagatggatgagga

SEQ ID NO: 27973 - DNA, 1178 bp, Mus musculus
tattctacttttttaacattgtaactagaatttaaaagttttcacttcctcacacagcagaaggggtttgttttgttttgtttttctctgttgaatgttactaagtgtagatggctaagagatgaggtaaatagaacacaggtcagggcttctcacttctaggccacatagtttatctgtgctcatataaacctgtactataggattcttctaatctttggttcactttatttcacaattcgtacctgacataattgtgtcaacgtgtaagaaagtgtggctgataaacttccaagttgtcagtactgagtcttgaggtatgagtgttgtaggcatgaagccagaccctgaagctgtcacgccagtacagagaagcttccgtgcccgaggatgtgtgattttcttacttcatctctcaggtttcccgattaggttagtttccttcttgagagaagtgacacctatttccagagaaaggcagcagtaagtggcaaaccttgctgttatagggcaagacaccaccgatatgaggctactgaagtttgaaggattgttggcatatagatgtaaagggacatgggctaggagacagatgtggagtttgatggtttaggccttgagtcagtcacttctgtattgtgataaatgtatgtgacaattaagtttaccgttacgtatacacttcattgttattaccttcagaaccttttcatcttccaaactcagactaatcaataactaatcacccccccccacacacacacacccatgaacaatcctagcaaacacctagcctggctgtctctgaaacctgactagcttagaaacccagaatttagtggcttacagcatttgtttgttcataactggcttattccacttagcccactgtcttctagattgactctgctgtagtgtgcactccctttgaaggcctctgccttcatgtcctgttggatgtggtagataccactcaatttgtgcatttatgtgttgattttggttgaattacttgtttttcgtgccattggcttttgaattatatctgtttcagaacactgtttgaaatttcggcagaatgctgtctgaagaataaaatacggtcttgccagtgtctattcccactcaataaaactttgatgcatccattcagcgcacttgtgggcgagcatgctgtg

SEQ ID NO: 27974 - DNA, 3914 bp, Mus musculus
caggatcgaatccaatgacctgcctctgctgacggccatcgccagcactcactctccgtacgtggcacagatcctcttatagccgactacaggacagctctcattggaaaatgagacaggatggagggtgctctcagtgacggcagaggcgtgagaacacggagcaggcacccctcgttgttcctgtggctgctgcctagtggctcttacattgggaagcttgtgtctactccatgcagtgggagtttgtgattgttcaggaacagtcgacattgtctcccaggaatcaaaagaaagtaacctttctggcaggagggaagtgtaagcaacactgtcaaactagacagacgtgcccatgctgttgggtagaatactgagggctgactctgagtagtgggtaaccaatgtctagaacattccagaaggaaagtgtttcctgttcaagcgtgagagagcatgaagagttgctctaagaacgggttgtggcttctaggtcagagctcttctacgaacattgacctgaagaaagccatgttgtgccactgtcagcctggagctccagcagctactgttggacataggatgtggaagagggttgcctattgagaagagagtgctccagaaacccacggttgtcacttctcagagcttcctgtagactcagcacagccacctgcaggtctgcgagggactcagtgtagcaccctgtcctgccgggtattttggaggacgtagtctggcactgggaactcatctctggctttagtatctttagccttctccagaaagaccttttaccaaagttgtttccatgagctcaggcgatcttctgtggctgagctcgcccagcgcaagcctctttcttcctagccggctgtgcagatgtctgtttgtgctgtatggggccgctgccagctggggagtggacttgctctgataaggatagcaggcagcccgaacatttatgtgatccacaagcgatctaggtttttatatgatcagttctgcactttttaatccctctcatattctttaaaaaaaaatctttctagaaattaacttgaccatttgtaaaacttaccaaagtgacgaactgtaaaaacccaactgatcattgaacctacagaaccttagtttactgaccataagacagtccatgttcaaatactttaaaaacaaaacttctgctgtttaaaagacaggagccagtcaagtaaagtcaaaccctgtgggctcctcagtccttcccaccagtccctggtgcctgagaatgtgggacagcaaatcctgatccatgtgacatgtctgtctcctcattacaaatacaagttagtggagaccatgtgccccttacgctactggggacgaatgcctacatcatctcttagaagtgggccggagtgtggacgctctggaccccctccctccctttcctctcttcctccccctctcgccctgagcatctctcattttttgtgatatgtaaaaataggtggttcttccaggcccttaagatctttaatttgcatttttgtgtttcacaaagttgaagtgtcctattcttttacatctctttccactttctatcacctggcatttgtttgctgttttccatttcctggctccatggtaccattgtttgccagggagccccacatgtggcccgctgagctgtcaatgcagatttcctagacaccggtgccagcttagagctcgcccttctttctcctggcttctctcgtttacacatggactcggcctcaccagctcctgaggattgggagaaaatagctcagtacagaatcagtttggtcctcgtgcagatgtagtgacatgttgacagctagactcggggaattgagctgtcaccaggttaattctcagcttcatgaagaaagacttagcccagcacttcaaagcctgaaaaaaattaaacctgcctcttaatctagtgttccaaatttcagaagaaaagtgggaaaccctgggctcacgtgggttatctcagcgccccaccatcacttgcaagaaagatgcgctgctcttctcctggctcccccggtgcgggcgatgacgatgacgtgtcctttgtcttaaattcatcctcttctcagaggcggggaaaacagtaaacaaagcatctcatggacctgtgctgacgcggatgctgtcattctgtcatagccgaagagtccgaaaaggtgtcccacctaggcataactcaaggggaaaaatctttttttaatgtttaaagaaatctacctcagttgacaggattccacctgccctagggtttcttcagctcttcagtcttacctgttaggtgtcactgggcagcgctctgcttgtctgaccaagcaggctggcgaggcacagccgagcagaagtgtctcagtgtcctgtaatgacctcttctagcatgttgcagttttatatttgttaagttgataagtgatatgaatgtataggcaattgtgtatgttttcaaaaaggacaatgaaaatttaaaatgtagcttccacacttgtgcataattccaaagtatcttattttatcagtgttaaatagcttttgtacagcttcagcccattttccagacgtgtgctgttttatacgggaagtaactcatgatctcactcacggagctgtgtttacacatcgcaaatttttaacttaatgtgtttttcagaattaacttttttggagggaggaaattccccacttgctaaatgatactaaactgttgtctggactcttaagaatcaggtctttggattttataaactagtctgtagctttttaggttcttcattggttggatgtacatagagaatataaaacaactctcagattcttttaagcgtctgaagttttccttggatgcacactcggtcgggtattatgttcacgcagactttcagcattaaattgaaaaggtccaccgcttctcttagttaatgtgaaccgtttgtttttattgtgtttggtggagaagaataatacacttcttgcctaaatccagaagccccctttgaatgttaattttttaaaatgttagaatttggtgaacatctggaacatgtatttgcattatttttaaatttcagtgttttaaaaagcagaccattctggggtgtgtttttattgatctttcattaagagaaattgataggactggttttggtttttgtttttgtttttttttttttttttggttttctgagacagggtttctctgtgtagccctggctgtcctggaactcactttgtagaccaggctggcctcaaactcagaaatccccctgcctctgcctcccgagtgctgggattaaaggcgtgcgccaccacacctggtgataggactgtttttttaagtgagctgtgtggatacaactgagtgtgtggaaactttttcctaaaacaacattcatgtattatttcgatccatttttctgtgacatttggtgcaataaactttttgaatttatcttgcttattctcctagtgctgcatgatttctttgttgcatttaatcaaatacagaatctttcgatgactttcagtatctgtcggtgctctggaagtgcagggagattttgattagcaccctgctgagtgagaccactggccccagcacactggtgagctttgggaccggagatgtcaggagacacgtccccgagcccattgcagtgcctccgagccagtttgtgtgacctttaactgccctacctgacattcgctggcataataaatctctttttaatgatctaagctgagcgtttgtagttcctgcctgacattagcatgtgatgaattttccaggaatgtaactgctgtcaatcctagggttatggatttactttgtaaggattttaacaagtggtcacttgatctttactgcaaactgatgg

SEQ ID NO: 27975 - DNA, 1203 bp, Mus musculus
gcagtccgcagcctggccctgcccagacaggcattcccaggaggatcctcctgtcgaaaaggtcactttccacattgggagttccatctccccggagtctgactttgaaagccggaccaaaagaatggaggagcgattaaaggcctgtggacatttccatggggctagtgcctctgccagctctagcatggacactgggctgactcaagagcagcagggctctgggtgctccttcaaagctgactttgaaaaggacatcacgcctcaggaccactcttcagggggggaaggtgtctctgaggacagaggcctccgggccaacatgacacatgctgtgggacaacttagccaagttgatggcccccttgcacattccctttgtgccgcagaaagtgggcggagactgctggaacagactagagatgtgcaattaaaaggctacaaaggaccttcatcggagcctgttccaaacagatgtagacagcagggtggcctgctgattgctgcagatgtcccctatggggatgccagtggtaagggcaactacaggagcgaaggagacattcccaggaacgagagcttggatagtgctcttggagacagtgatgatgaagcgtgtgtcttagccctgctagaactaggtcacagttgtgacaggactgaagagtccttggaagtggagctgcctctgccaaggtaacactgtacagggaactggaatctgtccctagcctgacactgtgaccatgttagccactcatgatgactttatatgtaacacatgtttttctcttaaatattaggggtattaccacttcaagggttcccagcctgtctgatctccaaggatgctcaccatctcggtgcagctaagttcttggacagagacaggtggttggctgtctttgcagctcttgagacgtttgggggagtgaagagccacagtggccatgcttgcaaggaggagagggtcccctcatgtctatgtaatgagtatggctggctgtggatgtcttgtttctaaggtgataatcacactcactgaggcctccctcctgccgctcaggcctctttagcagctctccgtcaagttgctggttttttggtctgtgaagactgaaagttgcaattaaaagattccttctattcttcttcattgtggtgggcactactttctgcagataggttggattcataaagcca

SEQ ID NO: 27976 - DNA, 1179 bp, Mus musculus
cctaattttcctccaggtcaactgatgagacatttagcttggccgaagaaacgtgtagctctaatccagctatggttagaaggaagaagatcgccatcagcatcatcttttccctgtgtgagagagaggccgcccagcgggatttccaggacttctttttctcccacttccccctgtttgaatctcacatgaacaggctgaagggtgcaatcgaaaaggtaagggccccgggctccattccaggcaaacacttaaataaggaaatggaaggtgatatgattgtgacctacttagtggccaataggggagagatttgcagtttaaagtgacacgttatgtggagatggcctgcgtaaggcggtcaaagagtgtcctgtatgatgaccctaggatttttaaggctagagaccagggtgctgtagggaaggaagttactggttttgatgaggaagaatgtcattaccatcaatattttaaatgtattatagcatcgttgttcattagtgagtcagcaggccagtcatagaggaatatcttcttagagagtaacgtggctctctctcttccatgaaggccatgatctcctgtaggaagatctctgaatcaagtctccgagtccagttctatgtgagccgtctgatggaagcactgggagaattcaggtaaagttcaaggttggaaatccaacaggaagtgatgagcagtagtatgaccaactgtcatgagtctatgtcttaaaagagttgggggactggccatatttagtcatcttagtgtcgctacccatgagagcagggtacgtaaagccaaacattgagtaataactctctctgtgcctgacagttcttaatggggtcagtttttttgtttgttgtgttcttggggtggggttgttgttttgtgtttattttaaagtgggggtctcactatgtagtcctggctggcctggaactgcctattagactgagctggcttcaaactcacagagatcctcctgcttctgccacctgagtgctgggattaaagtgtgcattaccacgtctggcataatgggatcgttttcatcagaatgaactgaacactaattttaaagatgtcttgtaatcagtttcatgatcttatatctgttgtcccattaaactttgaaggcaaagcctttttatcctttgtacaaatgtt

SEQ ID NO: 27977 - DNA, 1099 bp, Mus musculus
cctacattcgctgcagttcatgccatacacagaagctttgaacataggtaaaaggtggtggtgttgggagcctggacagagcattgtccttttcgatgagagccagagaggagttatacattcttcttcttcgtctagaaacgtccttccccgagaggaggcagagttaagtgtgggtatagtacttgctaagaatattttttttttttttttttttttttttttttggtttttcgagacagggtttctctgtatagccctggctgtcctggaactcactctgtagaccaggctggcctcgaactcagaaatccgcctgcctctgcctcccaagtgctgggattaaaggcgtgcgccaccatgcccggcttgctaagaatatttacaactgccttctatatttcaggaactgtgctagagtctagcacgagactgtgaagtgagacatggcgtactttcagggagctagagttaacaaaccaacagaaaactcacactcctattaagtactgacagtgtgatccttgtcggttcacctgttctctgcagtgtgtttgtaaccctctggggtgatagcccatccctgtacacacaatgttcactgtataggtttatcatccatctcacggctaaatttttcagttcccttgtcatgtgattttcgttattatggcatgtaagtctggtgaataagaagatccagcaaataggggtaccgattcctctcagttctgtttgcgtaggggttggagagacaggcagcttcctcccaagtcactggtaactttggaccctgcgtttcagccatcaacatccgctactcaccaggcattggacctccttttcatttctctctggtcttggtgacggaagctggaagtggaaagcggcaaatcacttgccatcattgtggcttggaatctgtgcctcccagctcagtacaatggcaacacacagctggggctactccaaatgtgtctaatctgagtggagatgacctctaaaccactgaggtatggtgacatgctgtagtccctggacttcagaggctgaagtgggaggattgttgaggccagtctggtttaaagactaatcagtc

SEQ ID NO: 27978 - DNA, 1197 bp, Mus musculus
gatacagcttgcttacatactgagccacagattattaatatcttcaaagcacttttgtgctcgatgtgtgtatgtatgttccccagcatgtgtgtgtatgtatgttccccagcatgtgtgtgtatgtggagacgggttctctctgtccacctggatatgtgttccagggattgaatttaaggcatcaggctcaagattgttaatttttagatgcacctggtaaaaaaaaaatcaaacaaattcgataagctagacatgcaagtcttacttcatgtttatagtttcttttctcaggggctagtattattctatctatttcttttgtatccttctagaagtattctgtgcaaatacaaaaataatattcatatttcattgcatacggtgacattgcagtatgctgttctgctaacctgtcctgtgtttgtgtatgtgtgcgtcagtatgtgtccctgcttacacatgcacagcggagaatagccagtgctctgccgagttgctttccagcctgttcccttgagccaggacagctcattgaacccggaacctgccattttggctagactgacagccagctcaccccagcttcctcctgtctccaaccccaccacactggggtcagaggcacatgcagctatgccttgctctttcatatgtgttctgggcatcgagttcaggccccgatgcgtgagggacaggttctctttcccgtgagccaccagcccggcccactaacaagtatcttgatttactttgaattaatgtgtgcataccccttaagttagttgttctctgggctgctggacattgaagtcagatgacaagcccagattattctcttagagaccctgactttgtctgggcggaggctttcagtgtctatgaaaccctccccaagtaattcagtgcacagccaaccaatttgtctacagatggtttatttagattgaaatggtgaaattcatgcttaaagggtccttatgcataggtcaagtagattttcaggataatttccgccaacctgagagtttccacttgttgatactcttaccagtggtacatgctagaggctgtttagtggagatgacttaaatcacagtaaagaaattgtggggtgagagtgaatctggatactagctaactcagtagttgttgatcacgtgtgtagtccagtgttacttgcatcattataagact

SEQ ID NO: 27979 - DNA, 1205 bp, Mus musculus
aacctcagcagagtcaagattaaaatacaagcagctgtggagaataatagatagtttaatacatgtatgactatgatacaagttgagtatcccttataggaaatgctccatgctagaaatattccagtgtcatttgtattttgaaatatttgcatagattttattggttgaacattatctgaaatgtgaaagttgtggctcagaagtttcagattttgtaacgtgtctgaatttggtttttagattacggatgctcaacttttaggttggcactagctgtgtagaacaagctggccttgaattcacagagatcaccagtctctgcctcttgagtgttgggatttaaaagcacacggaaccacatgcagcccacgtgatagaaagatttagatcaagttagtagttaggagagacaatgaggaggtttgaacacttaagctaagcaaactgggccttcaggtgtctgaattcttgctaggctggactaaaaatacagatttccaaataaagtgatagcagcgatgggggaagaccgtggaaggccaaggaaagaaggcttagtctatgactagttaaagtcctcgggaggccgtcggggatggcgggctgttccaccagtgccctgattaaaagatgactggctgtggtgccacgcagagtcagtggccttgaaagcagaatcagatttagattggatagaggtacttaggtgggaaaagtagcgagagttatgaggtgcgcactagggtgtgccttcagaaagcctaaggtatgccgagcagaaaagtcactggcttgctctttagcagacggaatacaagctgttctttcgtattctgggaatcattgatttacctgaatgaaagtcatagattggaattattttccaaattagggaagttcttacctgaataacttgtctaaattcaatatgacattactattctcagtttggtgaaagaggagaatcatagtgtaggcctatttctgatggtgggaagattataggaattctcagaaaaatagtaactgtcacagaaaaagcaaagttagttaatattagatgtccttagtgtggcatcttcatctttaagatggaagtgtaagcatctcttgcagatagccagtttagaaatggcctgattcttgttaaactgacacttaaaaacctttgttcatttaaggtggagtgcttaaagtcaaac

SEQ ID NO: 27980 - DNA, 1150 bp, Mus musculus
ctccttaaatgcattttactggaattagaaattgacctgagtggaaagggagagacagtgggataactggcccaaactggcattttgctgttaaattcttgtgtgcttgggtcggtgtttatttgcaagttgaagctatacatggaaataatatcaagctgccctccgtgcctgtttctctgctcaggttagtgcagctgtcagacctcaccagggaggaggtttccttgtgcagtggattctcaaaactgatccaagtgcagagaacatgtgtcatggagcgttcggctaactgggacgtctctgccacagcccagtctaaggcccagggaccgttgtggaggaggaggtacaaagactgtaagagccggggctggcgagatggctcagtggttaagagcgtcgactgctcttccgaaggtcccgagttcaaatctcagcaaccacatggtcgagttcaaatctcagcaaccacatggtggctcacaaccatctgtaatgaaatctgatgccctcttctggagtgtcttgaagacagagtgtgctctgtacttgacagaaccactgctcatgagctcagggaagccaatgctctgaacaaaagcaagccagtcaatgttttagcattggggaggagaagtgagggggtcatgaacccctgcccttagctggtaaggtactggcaagagatggttcccaatgggagggaagatccagttttctttacaagtgtgggctctggtaggttaactctgctccagtggatgacccctcccccaccccaagtttacgggcaacacaaattagactcagtgggtcattaaaaaaaaacacagaaagaagtcacatagctgggagagatatggaggcaggggtggatctgtgggatgaatatgataaaaatatattgcatgaaattctcaattagtaaaacaactgcaaaactttgaagttgtaaagctacaccaataggagctaaagtggttatttagaattaattttctagacaagaactaatgcagagaaaagcacgcactgatcacatgggcctaaaatccaggcttttacattttcctgttacatattcagatttataagtgctcacatagaaacagacaaaaaagtatttgtgacatatgataccacaaat

SEQ ID NO: 27981 - DNA, 1124 bp, Mus musculus
tgttttctgtaggagctatagcacctggatcagagtacaggaaattctgttctcattaaatatttgtgaagtgttgtttttctagcaagactgtagcatcttctatagaagcaagtccttttgaaagatgccttccatgctgtttagtcttttcattggaagataaacttggaaatggtgggacagatcataataatacttgatgctattgatgaacctaccaaatctccaagtgttgtgtgtcaacagtgggcaggttttctagatatgctgatgttggcttctctcttaaaagtgctatttgtttatgtacctgtgttgtgtttgctgaggatggggaattgatatgaaccaagactcctgaaaatggtaagtagatgagaagccagcaaaactgggatgcttttcattttgaactttggctcatggacagcttggaccttaaagtcctagaaacatgcaagcagtgctatgctgatgaagtttgacctgagaagatcctagggaccactgataggaaaactgggtgaggccttagacggaagacatcccctgtaaatatatgaatagatcagtagccaattgctaatatgatttccttatattggaatcaattaggcccatggcattgtgctgtcagaatgaggcacattttaaagcatttttaaaaaatatatataagaaggtattgggctttgcattgtgctcagtttacaagaccattaaagaaacaacttcagaaccatcacattcagttcctagatcagcttgtctagctattacctatggtggtgattctatggtataaatatgggacagtttggcaaaggattaaaacagctgctttaaattttttttaccatttagtttcagagcttcacagcaagcatgtagactgctaggtgagttgtttttaatatttcaggttgtaattcagtatatattcagtttataattagtttataatatttcactgtttaatgtttcagttcagtaactgaccatgatgaatggctgtttgacattagcaagcttggttctacaaggagattgtgttttgttttgttttgttttgttttgttttgttttgttttgttttgttttgttttgttttaagtgtcaat

SEQ ID NO: 27982 - DNA, 1136 bp, Mus musculus
taaggtctcagtatattttccaaagtttgggtttttgatgtggatgacttgagctgtttcttaaattctgctacaagcattgcctagacggacgttctaaaagtgataagcacccactgtgttaagtttgttaaatctgatagaacgagacttaatagtatctggccatgcgtgtatatatcatggctcagtagatttgttttatgctccatgtatatgtgtgtgtatatgtatattttaatgactataccataaaacaaagtttatatcatgttggtgcatggcattctagaaaccattttgtacacgagtgaatctaagttttagggaaaaaaggcaatttatttgtagacttctgaagtaagaattagtatgctatattaggaaaaggagtgactattttgaagtatgtcaattcccttctgggactctattattgcaaaaattggttgctcattcaaattttatgccaattacattttatctaacatctacattgccctaatttgtactgaagtccttgtatattgtgtttggttgactactggtagctgtgatgggggctgcattgtttcacactgaagggttacatttgctttagcaagtgtttggggtcaaactatgtccaggaacaaggctgggaatacatagctaggacactgctgttggaggccccaccccagcccccgaacctgcccctggcctcgctccaggcttgagcttctttattagcttagaaggatgtcaacttatccaggatatcatattcagaatattcatcaaaatcattttaattctagcatagaatggactgaattcctgttggtatatttggcctatcatcctttaaatgtctctgataatttattgatatctatctttataaaatagaaaaaaagtacttttgtgtaaagatatttgtctttaaatttagtatttcatatcagcacatcaatgtatgtataaatgttacatgttaattgtgtaaaagattctacaataaattatttttaccacttgtctacagtgcgcattaatttaataaaatggtattgacactacttgcgatttttcttaatcttttatttaaaggcattttataaccttgttcgtgagctatcaactgattctgattt

SEQ ID NO: 27983 - DNA, 1518 bp, Mus musculus
atcagaaaccaccaggtgtgcacttccactcccggacaactttctacagtgttgtgtttgttaccgctgttagcgcctaactaaatcatgtcgaatggccgatttaagtcatctaaagtatttgggacataaggacttagtaaacattcattgttatcatttatttactacatctccccaccacggacatgtgggatgagtagaacagtagtcacttggcctacatttgtggcatacagaaaaactcagtctgctggtccatctctgacttacctgtcaccggcaagcactgcctgagacaggaccctctgagaagacaactccatactgctttcttgagatcgcctctgaagagaatgaagtgaccaatgaagatgagcccaatgggcccaaagccatttcctcaaacgtgatttaggatgggtctatttatagagcaagtaatagttttctcccctaaacttaacctgtactcaacctgtgcgggatttatggttaaatcagatttgaccctttctactgcagtgaatgtagagcagagctttggacagtgggtgcgcatccagttctggaatgtggcagtctgaattacagaggaaagaagcaagcctggtgagatggtcctaatatgtttgcctatttaagaaataagacttcttctgcatttccttcaaaagtaccaaatatcaatatagatttataaataataataaacaaaactctgacgtgaaagttagttccatagtagcaaaaagatagcacacacattacaaggaataaaacggttctttagaagagttcaagtttccttaaggaaatctgccaagaacagctcggataacagtattccagcagcctgcgcgtcacacttggaggtgccggttcactagttggtttaggctgtaaagatagcagcggggtttactgttttgctgctggttttactgacaaagcactaccttgtaggagcttgacagctacagctggatgttccttggcgtgatgtagcttgtactcaatctggactagatagactctatttctatgttgagtcacctgatgcccaacacttttgaatttgccaacctcaaatgcctagagttatcctcgaggctggcagtgggccctttgcccatcttcccacaggtgtggcccactcatgctcacaccaacttcgtttagctgtggttattgttcctggggctgcttgttactgtctcccattccccctttctccccagccttccaggggaagcagctgtttggcttctcacactgctctgagaaaacagtgcacttaaatcctaagtcatggcctaaaaaaaacccaacagagacaggaagtttctcagatcaggggaaaggaaaagtgcatgctagtcaaaattagtctcaaaaataagatagtacaggaaccaaaattgcctaatttcacttgactcttagttcaattgtactgtacaaaaaggcatttaaaaacccaggtgtgtccattctacacaaagcaaatctgttatt

SEQ ID NO: 27984 - DNA, 1191 bp, Mus musculus
caatcattaacacgctggcggtcaatgctgatggagtgcttgtgtctggaggtaacacaaggtttctatggtgtgttgagtgtgcccttctgttgatgtgagtgagttagtatctaaagcatcacactgttgtagtgacacacctactagggtgtatgtgcctgtttgtaatgtgcctgccgtcgtgctcagtggtgttccatgcagcatgttgcatagtttagacatctttgcattcccatgtgatgaaggtagggatttacgctaggaactgcctgatgtttggttggattttaaatgttatggtgtctataaattagagacttagagggaattagagagagagggagggagggagggaaagagatagtgtgtgtgtgtgagtgtgtgtgtgtgtgtgtgtgtgtgtgtgtgtgtgtgtgtgtgttgctggtgtaatgttcagctcctgggtcatctgagctgttgaggggatagaagtagagctgtgtgtttcccttgcagctgacaatggcaccatgcacctttgggactggagaactggctataattttcagcgcgtccatgcagctgtacagcctgggtctttggacagtgagtcaggaatatttgcttgtgctttcgatcggtcagaaagtcggttactaacggctgaagctgataaaaccattaaagtttacagagaggatgagactgcggtaagttcttagtgtccatctctgtctgtctgtctgtcttcctatcttccttcctttttagtttaatttaattttatattttatatttagagacaaggtatcacatggtacctctggctggcctggaactcactttgtagctcaagttgattttaaacttgaaactgtcttcctgcctctgcttctccgatgctgggattttgggcatgagccagcacacccagctttcacatgcattttaaagtaaaagaattgcatgtcaatttgacaaggactgctcatttgagtacaaaaagaaacagactcactatagtaccatcagtttcatcctctggatagtgatctgacctgctcagggcttctgtgtggtttcattgatgcagacacatcagtgataaagcattacgttttaagtacagttctgcctcagtacagttcctgggaaggaaatgatacattaatcgtggcaaacaggagactgctgagggaagga

SEQ ID NO: 27985 - DNA, 1191 bp, Mus musculus
cagcctttatccctcttccttggtgatccccttgaaagaggggtgttgctctcaagtatcaattgggcatcagtaatcagcaatattttgaagcctgaaataaacattttaataataaagggggcattataagtctctcatctattcagtagaatagactcaattttcttgatagaaatttttgtttgttatttctagagccatttgagtataattcagtctgttttgcagtttgaggctcagatcccatgctgggcaagtgctcctcttctgagctccacagagccctggagccagtcttagatgaaggttctacccggtcctgctgtctatcccaggcaaaccagacttagcttgtgccctgctgttctttcaagtctgtggtcatttttcactagctgagcagaggtggcgtctgagtgtaccctgcccttcttacccccttgtccacttgctcccacggcactagtgggaactgccttggtgcagcacagcccctcttctgcctctccagacagttactaccagaagtctgagaagaagtgtgcagacaagttttgctcggactctagctccgactgtggcagctcctccggcagtgtgcgggccagccggggcagctggggcagctggagcagtagcagctctgattgtgacaggaggccagtggtggacatacagcacttcctgccacctggtgagtcagaggccccctgtctgcctgcagccagtgcagggctaccgtgcaggggacagagcgcttgccttgcctcgggctgtctgcttagctctcctcctttctcctcctgatctccattgttactggtactatttctgtctttgaaacacttcgaagacctgaacaattgtatatcttttttattgtactaaagtatttcacggggctgactgttttgttttgttttttgaccattttaaatgtacagtgtggtggcctaaatcacgttcattcagactgtagagccatcgccaccagaacttcccatccttgcaaactgagactctgtgtccattagtagtcactgctgttcctctccaagcccctgcttacctgctcctgctctctgcccctaacgtcactgcttggatatctcaagtaactaagccatgaacgattgtagacatgcatggttgtcagatgtggagtgtatggttgtcctgtatggagat

SEQ ID NO: 27986 - DNA, 1222 bp, Mus musculus
cttagccgtggctcgcctggcatcaggtactcatacatagttaagcaagctttcccagtgctcagactctggctcctgggctgaatatgtttcttttgtaatgactgtgacagagaccttgtgcaggagaatctgccaaaggccatgtttctgagatttgtgtgctgtgctaacttcactgtctcctcttatgtatgcagccccaccccaacctggacgatggtatccctccttgattgggttgttctcgtcttctccttgaagttctatgaaagatggctgagatctttgaacttgacagagtcctgcattctttccttatacttctgtcttccatccatagccctttcatgtgttaaaaatggcaggcagttgacatttggacatctgtttttgaagtttctgtcagagtccacgtcatggcttctagtggtcattgaattgaaagaaggtatacattgaaaagcaaaacaagcaagcaaacaatccaggaagttgattgggtataatagtgcatacttgtaatcttagcatttaggcctatgaggcaggatgatcttatggacactcggctgtactgtgagacctggtttcaaaaatcaaaccaggctggggctggagtgttgtgaatgggcctggtgctgtttgtattttgatgctaattctgttctcctaggaggggttgcagacaaggagtgagtcatatactcaggtgacttcttgtgaaccaaccccctactgaataaaggagccaatcactgagcgagtaggagggacttctgggttggacagaggaagagagaaacaggagagagttagttctttttggatggggatagcttgaacaaaatgtagctacaagtgtctcctggtttcaatggcagatcagtcaggatttgacacctggatttggatttaaaacaaggcttatgagattaggatttcattgttgcacccagctattaagttacgattgttcctgaattaagtttgtatggtgttttgcttcacacagcagtttttcttggttcaagagagaaaggtatggctggcaaagtgtgggtttgcctgatgtgcaacacaaaggccgtgggggatttgaagcatggggctggcatgttagtgactggccagtgagaacctagcaagcagggtggagagattttggagctctgagtcagagcgtgactgctggggctaagagtagcagggtgtagcatag

SEQ ID NO: 27987 - DNA, 1196 bp, Mus musculus
agagctgagagactcacagtgtccacctcacgggggtttgctacttttaaagtgaaaactgtacataaatcccacattgtatcttctgacccacagcaagggctagcagtgtgtgtgtgtgtatgtacatgcatgtgtaagcatgtatgtgtgcctatatgtgcatgcatgtgtatgtatgtgagtgtgtacatgctcatatgtgtgtttgcatacatgtgtgtgcgcctatatgtgcatgcatgtgtatgtatgtgagtgtgtgcacgcacatatgtgtgtgtgcatgcatgtgtgtatgtgcctgtgtatttgctactggtattacaagtgctgcctttgctgtcactgttgctgctatggtgttgaggaagtgtgtcactgaggtttagggtcagcttcatgagacagaaagcacagtggcacacacactggagacgtttaccagtggactgcttactctgacagcagcagacaggcagcactcctgtgcttagcaagtctgcagctgattctgtcttgcagtctgaactagaatttagcccacgacttatgctcatgtgtcggtgagaggaaaagggctggagtaggatttaccccatacctttctccagagagtagccccaatgagtatgggtagggagagagagtcagaggcagggggtatccatatgaatgtgtgcacacatgcgtgctttccctaacagtcaacaggttgtgtctcacctccactgcaggctagaagaggggcttcctgtttgctatctgtctagttacaagtctcttcctaacactgggcatagtggctcatacctgtaatcctagtgctcaagaggctgtggcaggaggattgctgcaagtttgaggccagcctgggcagcactcagaaggctgaggcaggcaaaccttgagtttgaaggtcagcctgggtacatagtaagttccaggatagcctggactactgaggagtgaccccctctctgtctcaaaaaacaaaagcaagcaggcatctctttgtgatgtgaaaggaaaagcaacagggtgggcaggcacccctttactgtagtgagcctgtttatctactggcgttctctttgtcatagggagccttttctcacacacacgcctgagctacacttccagaatgctaactcattaggtctaacaccaaggaccactgacttagtacttatatt

SEQ ID NO: 27988 - DNA, 1203 bp, Mus musculus
aatttactgcatagaattctggtacaccattgtaagtcatttggaattctttctgtgtagatttgcctcttcttgtttatgtatcttgtacttcatgtgagtattcatgctctggggtacagcccagcactagggttcccttctgctttcatgccattattgttaatcttattatgaagtcattagaatctctttatgcctttcaatagccttttaaaaaaataatttaatgagctgcaccacaataccaacttttaatgatagatggacttgaagccaattaagctgtctttatcagttcaacaaaagcatgtgtttctgccttgatgttctagagcagctactactataacaacttgagactagagaaataatcttgactgtgaaacagtctgctttatgggaaagcatggttggtactgccctggagcactagagatgcaccgccaaggctgcttgaggtgaggcctgaccaggacatggctgttcagggtcgtgaggcctccagagcagcttgcctcttacctcactctccagtcgaggaagctgtcagtgtaattggccttggtgacaattttgtttgtgttatcttgacttcatcttctgtggaagctctgtaattgtatttggttgggagccaggaatgcactatttgaaaactctctaccttctctcctccccagccctcctcctcccctgggtgttctcagatagcagcagcaatctactttgccaagaaagaaagattgctttgggagattcgtgatgagagcgagtgaaccagagcgggtctagcccttgcttgagtgaaggcgcgctgggaagctggcctggctccctggtacacatctctttgatgagcttttttggagcacagtagtatttgataggatctgaaaagttttaagaattgctgaagaatgaataaagttgttattttacctttaaaaagaattatagagggttggcaagatggctcagtggttaagagcgccgactgctctttcgaaggtctggagttcaaatcccagcaaccacatggtggcttacaaccatccgtaatgagatctgacaccctcttctggtgtgtctgaaaacagctacagcgtactcatacacataaataaataaataaataaataaataaataaataaatattaaagaaaagaattatagaaatcacaaacactgcctggctaggg

SEQ ID NO: 27989 - DNA, 2115 bp, Mus musculus
cctcagagatattcagcaagagccctacagtcgggcagagcctgcagcccaaccctcagtatgaatgtcagtgtttctccctccaggcttccgaccaggggccaggaatgcatctaggcactgggaccagagggatgcttagaagagaaaggcatctctgcccttgtacagcttatactctggaaaggagacatcgttgtgctttaatagtctgcctgcaggactgtttctgtttctgggctacttaaaagaaagctttttttaaaaaaaaatgagtaaattaattgtagaaattaaaaatgtaaaagtagaaattttgtttttgttttttgttttccaagacggggtttctcaatgtagccctggctgtcttggaactcactctgtagaccaggttggcctcgaatgcagaaatccacctgcctctgactcccaagtgctgggattaatggcgtgtgccaccactgcccggccagaaaacattttttaaagaggctgccatgggctgtttttggttggttggttggttctttgttttgtggtgctggagatggaatcagggctctgcaactgagccacacctccacgttgcaactcttattttgaaaatgaatttaccaaatgagttctcattttgtacaatgttgagatatttgtgaactgagaaattaattcgtaaatgaatcagctgcacatataaaatatcatgtcaggcttgatagctcaataagaaataacacaaatttttttttcttaacacacaaatattggtatgaactggaatgaaagggtaatttaatttagacctgttccaccattggctactaaagcacctgctgtgggcactgcaagaaacactacattctacacctgggtacctgtgtgtgttcactgtatttctttgtggtaagcgaattgggggttgggggtggagtgctgctactaagatataaatagacaaggtctaaatggaattttgtctcatttggtcagaatggtttctggtaaactgagaaggattattacaataagtggctttttttgttctaggctactgttactgtccaattgatcttcgttgagtgtatagaacccgtcacacattcatgatacgtagcactgagaaagtaagcgttcagctttcccttgggcactaaggacaagcagttaggttttataggttaacgatagtgtgtcttctcccgccataaacctcccttgctggacacagggtggtagggagtcactttgactatccagaaacacacaattagaaagttgttatgactgtttgctggtgtttaaatgatgtgtaagattttgatgaaactttagtctctgtaaccaaataagcccccgagtttcctaaacttgacaaaatttgaggcaataagcacccctggtccatgcagctgttgcacatctgctcccactacatgtacagggtatgtatgtcctcacggggaatgaactggaatagcgggacgtaaccaggtatatggagcctcgctctaaagggttagcataaatgctttggtaatacctacggaggaaattggagagatcagatcaacatcaggccatctgtaggtcacatcaaatgggaaaagtctctctatgcatttgaactgtagatcaccctctctgttcaccagcttctgaacagggaagaggaatttctgtttttggtgaatgcttttaaaacaagacctttttccaagtaggatagcattgaagctgcctgatgcaaacctttctaatttcccttaaaatcaaaagtcctaatactgttactttatgtaaatgttgcagggtgtttaaaattttacaattattttaatatttttgataactaggaatctagtattgccataaaggaaactaagtgcccattaaatatttgtttggtataaataaatacttttttttttggttttgtttcaaatgacagtaagctacaaatcatgacgctaatcttcaaaaacactttctaatgaactgtgtggtagttgattgtgtggtctgtttgtggagaatgtatggatgcgattcattagtattctagaagagattaataatcagctatgttgttccaatgaatgtacagcacttcca

SEQ ID NO: 27990 - DNA, 1136 bp, Mus musculus
cttattttaaatgcatgtccttctgcatatgtaacttccctgatgctctggtcttatgtctatgcaggtttttgatgggagtggatcatttttgtcctatatcaacacatctgctgacccgctctatggcccccagggcctggctctcacttcagatggccatgttgtggttgcagactccggaaaccactgtttcaaggtctaccggtacttacagtaacagtggacagctctgtactgaggtcttgcactagaaactggaatggagttctcaaggtgggaccagactacgataggacttttcatactaggaagaatcttcggtgaacttcccaaggttatttctgaatgtaaccatttctttaaaaactgtctatccaatttccgtaattcacttttaggatttaaaaagaatcttcttctactgaatctatacaaactgcgaagttttacacccatgaactatggctcataggacagggatttctgtagttaaactaattttgcaaatcagacgttaaaaagaattagcgtatctgttgactggtgaatgaatgatagcctttgcatagagcttccaagaacaaaacttgtagttgcctattttatttaacttcgatcacaagacccaagggaccttctaacctcacttttacagtaggtgttattattctggtgacatgtttttgcttatcaacaaccacatataaattaccttagaaaaatccaaggctgtcttgcaagatcctttcagttcaactcaggccctgagttgagcccatcagaatcaatgcaaattccccaaatttcctgggtttgatcaaagatcgtttccatgtgttctcttcaccttctcatttctgctcaccttgcatcagaaaatgaaatatattttcaggaaaacctgaaattcccgatgctttggaaggcacgtagcaaaagcaaggggactctttggttactagcttcagatcaacacactggaatggaatcaagagaagtcacattcatgtgccatgcgttcatgtgtctttcctcttccacatcacgaaagcgaaagctttacctcctgcaaaacgtcagcacatgtagtcagacgccagtgtcctaggacagagagccataagcagcccttt

SEQ ID NO: 27991 - DNA, 1184 bp, Mus musculus
tcccatcgaacccctccaggagtaagatggatctgctgtctttagagagctgaaggatcaccaggcaatctcgagtctgtgaaacacaggagcgattggcccccaagaccttaagagtctcattaaccccacccatttgggcctcatgttttagtaatttggctttgagtaacagggttttctcttgtgcggtgttgtagcacaggtcacgtgctgcctcgttcatttttttttttaacctttcctgggatgagggctgttgttattcctgtcaggacccggaggctcgaggcagcctggggctaggcagataattggcacacagccaggagcacagccacagctccctgacgctataacttcgctgtcaggactggtaggcaaacctttgaaattgtagtctcacccagagatattatatagcactgcccctcgggagccccgcccctgactccctcatgagcaagggcttaaccactgagccatctccctggtcctgggtcttgaactgattaaagcactgtggtgcagtccatgatgactgaagtatctttaagtgacttcgtatattaaagtcttctttaatatacagtgttctgagcagcccattttacaggtaagaaagctgaagccaatggatggctgataagtgagtggcaggagaaagtaaggaaggaggtctttgactcagcagcagaagctacgtagaaagtgggggagcgctgtgctggagatgggcaccccctgaagccatagccagttattatgggttctggggatgctagagaagttttgagattatagcacttggacatggtggataaagacttcctaactgttcaactgtccacaaggagtcaggagagttgtgcgatgtcacggaggtgggagaccctggaggccactgcaccagttcaagggcacctgccctctgtagcgccacatgatgctggcctcttcatctataagaggtatacatctcttatggttgttatggggatgagtgagtcagctggcgtgaaggagagaactacaccagggctgggagttcagcactgtggcctggcgcttgccagaaatgtatgaaactccggctttaatcttcggcacctcaataaataaacaaaataaatgtgctgactggcggcccctggacactgtggaaacaagtgacagtggaagcc

SEQ ID NO: 27992 - DNA, 1448 bp, Mus musculus
ctggcccatagcttgttgcagatacactttaaaaattaatctgtaacactgtaattttgtttagatatttataaaggtccgggaatcacacagtcatattttatgacgtgtttaaacttatgaatttgacagttgtgctagcagttttgatttataatgaaatctgcttaagagggataggttttgttattttgttttgggtttttttttaacatgtggacatggaaattattagcagtttctagagcagaaatttatagattagaaagctagtttgggagtaaattccgttttgatagaagagaatttccagactgtgttcattggcttccatgcgtgactataccagttaagccttaaatcacagatacgtgccttctccgatgcagtaattcttgcccaaccattgtacatacatgaggaaacccctatggataacatttgattcatctgtaacgttgggatattttgtcctcataaaaccacacttgaggtggatggtgaaaacaacctttgaattttatattttgtttctcttgattcctcttgaagaagggggtgatgggaaagttttcccccttgggtaatgaaaaggttgtgtaaagtgtgtggaggtcgtaggacggaaaatccagtgctgggttacttgtgtagcactgtggtcttgtgtatgcggttggcttgtctactgtgtggttcctcagcgatgtaatcttgtttaaatgtaaagttcccttgattttgtcatacatataaatgagtattttcagagatcccacttcacctgttatttctattgtgttgaaatgaagtacttaaaattactgttctccgtgaactctgtagactgtatgatgtgttacatatggccaactgccttttagctggccttttttattaatatgcctgttttaagtgcttaatacagtataatgtgattgtaagtcatgagcctattttaaatcattccctcctgtgtatgtgtgctctgagagagcttcattttattctcccagcagagtaacttgtgatggttatttacattccccagagtgtgcctctggtgtgaattctgtcttcttattaaagtgtctgctgcagaatccagttgccctgtccttataaactttaaataagacgtaagtaactatttggaacttgagaggatgtacttttctgatctttagtgggagaaaaaggtgcttctgttcgctgccgaaccctgagttcttctcctcagcctgactctcaggacccgagcacattcagtctcaccgaagttcaacagcattgtacaagaggagctacaaattaatagactcctgggttaatgaatttttttcacaaaagtaaaaataacagtgatttctgaatagtgagcacataggcaaaagaagtgcaacctcgtgctatacagtggtttgttcagtttgtttcagaggcagttc

SEQ ID NO: 27993 - DNA, 1174 bp, Mus musculus
agttagcaagatcctgaagttgtttgttttttcctatttttctcttttgagggataggatcgtgcagtgcagtccaggttggcataaactcacagtcctctctctctcctggtaggatttcctctcctgggtcctaggaataagaggtgtgtgccgccatgtccagctgtaaaattttggatccccaataggtttttgtgggtattagtgagcacttttgatagctaaattcagttgggaaggctgatttaaactacgccagtcggaaggcttagagttcagaagataggaaaaaatggaaggtgactttgaaggcaaggcagacagctgaagtcccacccactttaacaccacagcatttgccattttagtatggaagctgtgtctctttctacatatattttacacgtcaggttgtgctgtgacatcattccttacagaccttatggactgtgacaaccagaacaacagagctctgttcctgaggtcatcagacatggagctgtagtcctggttccttacgtttactacttcctcatgggagccccgtgccttggataatagaaatatggtctttgtgtgatacggcttttaccctggatagcctctggaatgtctttcaactaaagacaagtaacttgtagatagtgacttgtatttaatttgataatggagatccaggtgcagattctgtactttcccatatgagactgtttcacctactgaggctcattgcccatagactttattgtaggtgttcggaccactttatatcagccagtctggttttaagttttgtagttcagaagtttaaagggacagagagtaatctctactttcaaaaatagtggcaatcaatttaggtctagcatatgcttgagttcagtgtaagtgggttttcatacttttacaactaaagcctatctttatcagaactttgtgtatgtgtatatgggatatgtacatttctaattatatattaagtagatattgattttttcctgtcatgaatgaattttatatatgattttttccagaaaatggcgggagactattattaaaatgatagtatattgtaggcattaggatcgtcccagctagagctagagaggtagcttactgagtaagagcgcgtgcttggtaaacgcgaggatttgaactggaatctcgagca

SEQ ID NO: 27994 - DNA, 1149 bp, Mus musculus
caggactccgtggtgttccttagtgtcttccttcttactgggataggctcccttcctctccacagccgggcatgctctgctgctctgcgtcattcttcactgttaagccaaagttaaagttattttcacttagctttttccttcaatttagttattaaaaaaattaaatttgcttgattcttggttctagactattctctcctgatttttttttttctctttccaggcattcgcaatatcatgactccatgcagctatcttagaagtagatcagacaaaacaagtctaaatctgagttagcagtcctcactcacataatttcacctttagcctactgtctcagcctattctcatggggcttcactgtctgtcttgtctgtctctctctctttcttataactattctggccttatgctctacatgtactatatttttaatgtagaaaaagatactcatgtcagtcattagggaggtgaaagtttagcctgcaagatagccatcaaaaaatagccagaagggctaaaattccaaggactcacaacagagatttccttgggaagataccccaggacccttttagatgacacctctggcagcctcttacaaattgaaacatgtactactactggacattgtcctcctatgtattccaaagagaaatgtaaacactcattcataggaagctctttgaaaggaaggcgtactagatttattcagaatatctgactactggaaacaacccaaatatctttcagtagctaatggctggagtttcctgcagtggaatgctactcattaataaaaaggaactcccagtgtaaaaagagacatagatgaatagcacagacacactcagcagaagaacctggatacagaattctataatttctcttatattaagttttagataagacagagctactctacgataaaaagtaaaaattatgaccactgactgcctttgagtttaactatgctagtggtggatagttgactggatatgtttgctaaagtgatacaaatgttcagtgtctgactggtatatgtgtgcgcgtgcatgcgttacagggtatatttatttgttggacagctaagatatgtgtgtattttctggtatggatgatttatctagtgattataaaaatagt

SEQ ID NO: 27995 - DNA, 1171 bp, Mus musculus
tacaggtgtcttcttataacatagattgagaatgacagactaagcaacatcctaggagtactgaaaacagttgtggtctcatagattccatgcaaggatcctgggaaccctccatgttgctggagtgaataatttctcactgggatactgtttatgaacaacatgctatgtttgtaaatggaagaatcattgtttaaagatatactagaaccggtttggtgaatttatatttgagacatttttcttaaagactgttgacagtaccttatgtttacttacacagataaaaatgggccaaagaatgtcctgccacaaagttgtgtttgtagttttctgaggatggatgaatggactgatggacagatgggtggatggagggagcaggggagggagctggagatctaaccaaggcccttgttcatgctaggcaaacactcaagacctctactacatacagtatttaacttctcaaaggaagaatttgacattgagttacttatagttaagaaggaaactagttactttattgaagtaatcatgagggctggggatgtggttatgatggcttgaatgagaatggcccccaatgattcatatatttgaaagtttggtccttagtaggtgaaactgcttaggaagggttaggtggtgtgggttttgttgaaggagctgtcactaggggttgggctctgaggtttcaaaagccaagactaggaccagtgtctctctctgcctcaaacctgttgacaagatataatctgtcagctccttttccagggccatgcctgcctgctgccatgcttcatgttgtagtagttatgagctcaccacctgaaactaagcaagcctccagttaagttcttctaaaaagttgttttggtccttatgtcctcagtgcagtagaacagtaactaagacaacggtatattccttgcttaccatgcttaaagccctgggttccatccttagcatcacacaggaaagaaaaatcatacttttaacttattattgataaattattaataaataatgttttctctactttttaaaagggcctgtaggtagacttgattaaatatgcactgtctttttccctccagaacagtattatgctcatttttctgatagttaataaatgtttacttctgttggttagtcttcaagttctgtc

SEQ ID NO: 27996 - DNA, 1206 bp, Mus musculus
gaatgatttatataggaattattttattggctaagttatatcttattgatccaagcaactaaaccaccaagcttttagagatttatgagaaaaggtagttaaaagtctttagtatgattttttttgaaaaaaattataacttacttaatttaaaacttatttattactaacgagcgcgtgaatctttaattatatacttagactataggcaaatgacacgaaaatagacagtaacaaagattgtacaaatcttgtttatcccccttttcctcctacagaatgtgaaaacctttgcatcttctgatagtctagccaaggtccaagaagtagcaagctggcttttggaaatgaatcaggaactgctctctgtgggcagcaaaagacgacgaactggaggctctctgagagggaatgcttcctcaagccaggttgatgagggacagatgaatcgcgtggttgaggaggatccacagcagcaagcgagacatcaagaggaggagcacactgcgcggaatggtgaacttgtgggtgcaaaccctaggcctggagaccagaacgatacccagcaaggacaagtggaggaaaataataaccgctttatttcagtagatgaggactcttcgggaaatcaggaagagcaagaggaagatgaagagcatgctggggaacaggaggaggaagaggaggaagaggaagaggaggaggagatggaccaggagagtgatgattttgatccgtctgatgacagtagcagagaagatgaacatacgcacaatagcaatgtcacaaactgcagtagtgtctcggacctgcccgctcaccagctctcctctccattctatacaaagacaacaaaagtgagtacctttagtccccttccagctggtatgctacctcgctagttcagttatagtgaagtcatccttgcaatcttcacatgcagaacaactttagtaagtcagttttagtttgttaaaggctttagtgttagaaatacagatactaataagaagtcaacttaattgcaaaactagggggtgcggattgatgttgtttaccaccaaaaaaaaaaaaatcaccagcttcacctttgctgccagagtggtttgggtgagtgtgcagggttggtgtgaaatatgatgtgtgtaaattaagtaatgaagaatcttatttgcagagtagctaatgtagtcactgtctgtcgtt

SEQ ID NO: 27997 - DNA, 1898 bp, Mus musculus
aacagactgaaaagacctacagactaagaaggcaagaagagacaagagaccgtaactgacaggaggcggcagctgtcgcatctcgcaaaggcctcacttgtgactgaggggcagcttggcaagacgactctctaaatccaaccaggtgcaattattctttgttttcttctccagtggtcattgagcagagctacatcagcgttgttaccgtcacctagaaaggagtggcagtaatatccaaacacgggctgcttatcttctaatcagagcatctgcaacaaaccgtcatttttctgaagtggaaaagcttaaaacaattactgtgaattgtttttgtacagttatcatgaagctttcttttttctctttttcctgtttctcttcttttcttttttcttttttttttttgccaaccattgccaatgtcaatcaatcacagtattagcctctgttaatctatctctttactgttgcttctactcttcaatgcatatgttgctcaaaggtggcaagttgtcctgggttgtgtgagtcctgagatggatataattcttgatgctggtgctagaagtaggtcttcaaatccggggtcgttgtcccacccctgtactgtactcccagtggccaaacttatttatgctgctaaatgaaagaaagaaaaagcaaattattttttttttattttttttctgctgtgacgttttagtcccagactgaattccaaatttgctctagtttggttacagaaaaaaaagacttttttgccactgaaacttgagccatctgtgcctctaagaggctgagaatggaaaagtttcagataataaagagtgaagtttgcctgcaaataaagaattgagagtgtgtgcaaagcttattttcttttatctgggcaaaaattaaaacacattccttgggacagagcctgaggtgcctgttctgtggagaaacttctttttgagggctgtggtgaatggaagaacatacatagcaaaactgacaagatattttaaagatatataaaacacaaaggaaaaggaggttgctggtcagtcgtagcatcttacagtattggggaaaacaactgttacagtttcattgctctgagtgactgacgtgagaggaattcgctctgcagtgacgctgtctgtcactcgcctaccagctcgacgagcaagagagcgggagtcagatggtccgcctcattcaccaggagccgtaactcaagctgaactgtgaaagtggttaacactgtatcctaggccgtcttttttttcctcctcctgtttattttttgtttgttttatttatagtctgatttaaaacaatcagattcaagttggttaattttagttatgtaacaacctgacgtgatggaggaaacaacctgtaaagggattgtgtctatggtttgattcacttagaaattttattttcttataacttaagtgcaataaaatgtgttttttcatgttattgcgcctgtttcttccactagataatactgtttcattataactatatagtatttgtgtcagatattttaaatagtcaagttttgggtttcttacatcccctgcattgtgacttagaaaccagcacttccgagctcagccaaagctgaggcactgcagatggcaccccgagctgtcagggaggccactcttctgtttgcattgtgtgtatgaacatgaaagctcgtttcttcagtcataaaacttggaattacaactagaagccttgtaataatgagttcaccttcaaatcccatataccaagtgttcaccaaagcactcgcaccattcttctctcaggctgagagaagtagcctctgtcacctttgactcagatggccctgagagcttcagctcagacagcttaggtggtgccttagatga

SEQ ID NO: 27998 - DNA, 1130 bp, Mus musculus
ttaagggcagtctagttcaactgctaattagtagctgtgtgtttgcaggattggctgtcaagtttgccatctttatgaagtgctttcttgtaggacagctattattgtacatgccacttcaagtcactggcccaggacagcctaatgtacagtttgctgcaaccctcaagccatctcagcagttagcatttcctgaggctgcggctcctcgggcagctgaggccacaacagctttaaaccattagggagccatcttagcccctttctgagtcagccaccagtctgtgtatcatatgacactaattccctatcatgtctcagcttggaacaacttgtcaagagtgagtagtccaccattaagtctgtcaagggaggagacattttaagagagcagagttggctgctgcttcttttaggatgcccatcataaacctaatgcctcacaagatgctcttagaggactcagaatggcttctgggaccattctgcctcagcaaagcccttctccatccaggcatttgttaatccagcacttgttttggaggacagattatctcggcagctcattaactggataaacagggctttcacaagagatgttctgtgaggctctttagggacgaggaccatgggggagggagaggaaggcacagtgggtagatctgtggattcttgctctcacaacccttagctaggactggtcactgggttcttgtctttgaaggtgtgagttagcccaggtcactgttgcccacacaaacctgaccataggattctgttcctgtgtacttggtgttcatttcatggctcttttatggagtttaaatgagctgtgtcttcacttcagaatctgcacagatgacggaagtactcaggccagattataaatttcactgagctgaggctgcacaatatcaagtgacattttactaggacaaggaccaccaaaagccagacctcttttgtcccttgcagacattttacagaagggatctggtgctgatcttgtttaaaagacttctgcctagctatggcctcagagtcagtgagagaggacttaaagcacatgccttctacctctgcccactgtggccacagccacactcttcctggcaatgggcagcttacat

SEQ ID NO: 27999 - DNA, 1164 bp, Mus musculus
tgctcttacccactgagccatctcaccagcccttgtttttgttttattttttttaaaccaaggtatgtaaacttttgtaagttacatacattgcaaatattttctactctgaagcttatctatttcattattgttttctttgtggtctctttgatgtcagtgtttctcattttaatatagatgactatgtaaagttttcctttataattgtctccacttcctcttcctggtgaataaatgctatccctacaataaatcctgagaacatgttttccctgtagcattttattagaatactcctagaatacggccaaacatgttgtaaatatttatagctattagtatttactttctatctgctttttgctactgctaaagtatctgaacttttgttccatctggagattggttgtgggttttgtttcagcagaagatacaacagggacacaatgtcaccactcagcaatcagatgtggtcgctgtgaaatgcactctgctcttggaaacgcctttgtcctactatactcctagagactgagcctggttctctatcttggcattctgtaagccatcagatgacgatgacagcgaccacaatgatgatgataatgataattgttgttgttattattattagcgtgtgggtgttttgcctgcatgttggtctgtgtaccacatgcctggtgcccatagaggtcagaagagggtctggagttccaggcggtgggatcccttgtgtggatgctgggaataaaacccagatcctctgcaagagctccaagtgctcttaactgctgagccatctctccggctccagtagtagtgcttaggtttcattattgtcaaaagttttctcttgtgacttaatttcaaccaatcagaagttgatagtttactttccttcctcagtcctggagatcacacccagggccttgagtgtgctcgggaaacacactggggaagcacctggggtgcaccccagcctcacattatctgtgctgtcttttgcttcctcttcttctttttaaaatttatttgtaagctaaatgctgaccattttattgtctcatttcccaatacacctgaaaaatgcacttttattccactttcccaacacacacacacacacacacacacacacacacgtataagtgtttgccttca

SEQ ID NO: 28000 - DNA, 1099 bp, Mus musculus
aagcctctccagccgtcacccgcagcctcagctggtaacctccccccaggtgtggcacctttaatcgtcttcgatatctgtgaagagcaaacttgtcctgaaaaccccagtgctacaagatgtccagtgccaaggccaagatcaaaaagcaacctcagaccagtagctagggatgctaacagtaaagagaaaaacagccagaaaagcccagtgacccccagagaagactggccaccccactgtctactggacagcacctgcaatttagatagccaggcaatgatgaacattatgaacacagaacaaagccaaaatactattgtttccaggatcaaagcatttgagggtcagacgaacacagaaatcccaggactgcccaagaaacccgagattattccccgcacgattcccccgaagcctgctgtttcctcagggaaacccttagtggcacccaagccagctgctaacagagcttctggggaatgggacacatgggccgaaaacaggctcaaggtgacttccagagaagggctcacgccatactcatcgccacaagaagccggaatcaccccagtaaccaaacctgaattgccaaagaaaccaactcctggccttacacgaagcgtgaaccatgagacttctggaggaagacccatggcggagagccccgatacggggaagaaaatcccaactcctgctccccggcctttgctgccgaaaaaatcagcctccacagatgccccaccgtacccttcgattccaccgaaactggtttctgccccgccccgactctcagtagcatcacaagccaaagcgttccggtcacttggagaagggctgccatccaatcccccagttccagcaccacagagcaaagccctgggggacatcgacctcatcagctttgacgatgacgtattgcccacctcggggagcccagctgaagaacccacaggttctgagacggttctaggtgagtaaaaatctgaagtggaagaaacctgagcttataatggtgtcttcagtttcactcgctgtttttggtattcagtccatatatatgtatagaggtatgtgcacatctttcaagatggtgtaa

SEQ ID NO: 28001 - DNA, 1271 bp, Mus musculus
aatcattcctttgacaattactggtacccaaaggaaaactcattttctttgcattaccccagtaatacataaaagctgtctcttgttatagtggtacattatgaagcttggatagtatcttagattacagagcaaatggtaagatgaagaacagtaccaagcccccatagctcatttctcctcaatataatcagatgttaacataacttaagaggactgaaggctggtgcagtgccccccgtcccatgcaacacatctctgcagttagtggagtaaatacaaggccactttcctgtcatccaggctcacatgttctgagtttcaaaagtggctcttgtgtgactgaatcaattacagtttacaaactaaagccaaatactttgaagacaatctaatgggccagtgggttaacatttcactggagatggaaagcgctctccagcagggtccgtggctttcttctgttttcaagaagagttccatatgctggaccacttctttgtagtcttccccgttatccaaaacctgggcggccagcggtttcctgaacgtgttgcttctataagggaatatttactttgttttctactaaagttcctatccttggcatatgattgcacttgattttggcatttagggtctggggtttctattgtatgttttcggttaagagtatttaaggaacatcgttgtaggttctcacccatgttagttttacgagaatgggatgacttgagtgttattcagactaaattctcattggcagcaagccatacaagagcaagaagggggcaggggtgtggagaggggtatgaagtgtgtctttgcctgtgagatttcaacatttaatagtgaagattctgagcaacctatctttattgaagaaaaaaaaatccctcttaaacattggctctctgtaagcaggataagtgcgatagttgtgtatctacttgacaccataataaactgaactcagcttttcgattcctcatctcagactacactgcattgttcagaatatatgtagatggtacctgtcttaaccctgtatctccagtcctttgcacgggtgggtggagtggttatttgctaggtgggtttggtagacagacggatggctttcacgggccattgagtttactcaataccgttgctatttgttgatgcagatatatattgaaacaaatttccttttctttcttttttttttttttccatctcactcttccatgctgttttcttgctatgtatttctctcccaactactagaa

SEQ ID NO: 28002 - DNA, 1711 bp, Mus musculus
cagatccggaagaagatgatggaaatcatgacccgagaggtgcagactaatgacttgaaggaagtagttaataaactgtaagtgcgtttcttttctctcctctaaaaatgttcagaatgcctgttaaatcatccttctgttaaagaagaggtggagttggacctcagcttaagcacttctaacattgaagttatcttacagtggacagtgaaaattagacttaatacacaatgaataacaactttaataatgcatgggaacatgtgatgagaaactgtttcggtcccagttgatggccactgataacattacatttttctgatgttcccatgcagtatacaggtggttaagcgtgttagacaaaaaagcataaggaagacttaaacgttgattttgttgctaggtgttaaatttagatactaagattgtttttttgccatttaaagaaaattgcttcttgtatgagagactttggtgggttttttgtttgcgtgtcttttaaaaaaagtttattgttcttgcaggattccagacagcattgggaaagacatagaaaaggcttgccagtccatttatcctctccatgacgtctttgttagaaaagtaaaaatgctgaagaaacccaagtttgaatgtaagtgggaaatcatgtttcatgagatagaagtttgtggaaccaagtacgtggttttagaaatgactggttaacattcttgatgggtgtatgtgtatgagtgatttgcctctgtgtgtgtgtgtgtgtgtgtgtgtgtgtgtgtgtgtgtacacacgttcctggagacgttggtgttgaggggctgcggctgcagatggttacgagccacctgtgggtgctgggtgctctgcaaggacaagtgccacctcttcaccactgagccagcctctgcatgaaggttttcagggcaaagtaacggtcgcttccttcgggctgtagtttaggttctgatacttgtttctaacaggatcctcttccttttcctttcagtgggcaagctcatggagctgcatggggaaggcggcagctctggcaaagcagctggagacgagacgggtgctaaggttgagcgagctgacggatatgaaccgccagtccaagaatcagtgtaaaatccagatttttaatagtgacaaataaaaagtcctatttgtgatcgtttgcttctgtccattgatttgaaacacgagagcctggtgaatcaggtgttgattttagtgggttttatccattaagttagaagccaggttagtaatgagacagggtggggctctgtctggcctccaacagatttgcatatatctggttttaaggcgtgtgccacaacaccctgaaaatagaaaccagcatactcccaaagttcttttctccctttaaataaccacactgctcagtagcagagttagttataaagtagcagcaacaaagatggttttatcatggcaaaaagggtcacagcattagggtggttaggaccactgggttagactatatatacttggtgaaccagaagactgaaaactgaaaatcataagattttatgaagcccagggatcatccagatctcgggccttacatgtgctaggtaagtgctttgccactgagcgtgtgtgtgagtgtgtgtgtgtgtgagagagagcgtgtgtaaatgtgtacatgtgctaggtaagtgctttgccgctgagcctgtgtgtg

SEQ ID NO: 28003 - DNA, 1711 bp, Mus musculus; identical to SEQ ID NO: 28002

SEQ ID NO: 28004 - DNA, 1192 bp, Mus musculus
acacaattaacattcataaaggatgagaaaatagcttgcaatgtctctgaggccatacagtagggactttagcttgtcaaacctcagcttaccctttgcatgaggcaaatactttacacatctgcggaccattcttttgagtaatgggaatgacgcatctggaatctgctctggcaagtgagccagctttgcagtgcacagggccaggacaagcacaactctgatgacatggaggagacccagtgcattttctggttctgttgtctttctcccacacttgagaacacagaagagcagattattccatgtcgtgttcgtcacagctagtaattcctgttgagggacagccaatatctactcattatagtagtaactgtacttatatctagatgtgaaaataaccttcctaagagacaagatgtctctactgctaatacatttgcccgtctcttcaaaattcaactgcttaatactgtacttctgctgtctgagcattttgttagcaactccagcatttccctacgcttctctgaatggtatggatgacttacaaacctctgtggagatatccactagaaggatggataaagggaaagtgaagaaggaataggaaggatgaggaagaagccagaacacaatcattttattgtgatccctttggcttttaccgttgatgtttttaatctgggatatagtacagtaaaacgacaaaattatttattgccctcaaggaagcaatgtagctacagtgtattgttcccatattaatggaagaaaacgtttgaatttaaataaggaagctttctggcttaaattttaatatgtatgtgctggatgacaaaagctacagtcatctgagaggaggggttcttaatttaaaaaatgcctccataagatgcagctgtaggcaagtctgtagggcattttttaagttagtgactgatggagtagggccctgctcattgtgggtgatgacacacttgggcagtggttctgggtcctatgagcaagccatggtgagcaaggcagtaagcagcacccctccatttcctctgcatcagtgcctgtctccaggatccagccctgcattaattcctgccctggttttcttgagtggtgggctatgatgtggaagtgtaagccaaataaatcccttactccctaacttagcaataacagtagtaagccccat

SEQ ID NO: 28005 - DNA, 1147 bp, Mus musculus
attatggacctcaacatatttacggtcattgtctttgatcaaagcctttcgcttgcctttttctgtgttctgaacattctttttgagttggagatggggatgaggacccaagtctttccgtttttgaaggaaaaaaaataaacctgcttagaaatcttcactagggaagtgtgtgagacgggatgtttatagtacctgtgggtttgggctgttttctctccatcctctgtggtcatctctccatcctctgtggacgtctaaggtatagtgctccacaaagccatcttcacatacacatcaggagggtattattttcttttgcctgactcaaatacaacccgctccctttcagctccagttcttgtttgtttcatcatgtaacccattgaacaggaactttttaaatgtaattttaagcaatttattttttgtacctcctgtattacttggcagggaaaaagagagcaactttctacttttagggaaattatcttagatatattactagtaattatcattcttatcatgactatgcaaatgtgagactacttttggcctaaactttatgaattctaaatcctgggttcaaactctacaggggaaggggtttagagtgtgtgtgtgtgtgtgtgtgtgtgtgtgtacacccatgtgtacaaatttacaagaagagatttggaaatgtatatttcaaagcagtacattttaacaattaaaattacaaagaatccagcggtaaagactctggagtggaaagcttctgccgcagacccaggacttggccagtgccatccacgctgcagggttacacttttagagatgatttatttaattacaaatcttttcttcttttttcttctcaaacaaccctttctagtcaggactggacaactagctttgataaaagagagtaagacacagacataggcagattctggccgtgtgtggagcctaggccactgtgggctgtggcagaggaccagctagtgtgtgctttctcaccttgcagcactcactacttttcttgtggaagtgcttttctctcctttactttttaaggaaagagggtgtcacttgatatgtgctcagaaatcaaaattgatttccttttgaaaataaatcccaactctatctgctaagatagata

SEQ ID NO: 28006 - DNA, 1156 bp, Mus musculus
attttgcttgttcaagcaaatttaagttacattcagatgtgatagctatttctatagagtggtgtttgaagtccttccttgcttgggctgaaacaggaccacggtgcattcgttcccctcagtagcgggtctggtactcatgatgccagcggttaaagtcattgtaaaacaggacaatgcttcccgaagccattccagaaatgatgcacctagaggaagatggagaaggcttggttatagggatgcatttgctgctgctggtgacagttttggtacactcaagtaagctcggttttgacagcacagagaccttccgtagtctgtgaaaggtttggatactgctagaacacacagcctgtcactgacctgtgaacagaatcatttctacagtgcaaacagtgcttacaggcatcagactcagaggagaaccccacaaagcggttgccactggaggtgagggagggagaggagagaatgctgcctgggccagcctatactctgagtagggccctgatccttgtaacagtgacctgatgtagtggtcactacagacaggagctgcctgctctcctgagaagatggtgcagggacagatggacaccagccacagggagctctgctacgtgaacccctcccctgcacagtttggttagggccagctcttagcaagttatgctgagtaccttcctgtacttctaacagtgcagaaggccaacacagaagaggaaaagaagatcgaactctcacagcacatggacccagcctgcaaatggcaagtccttcctcagccagtcatttacatgtaaagagattaaacctggtcaaatggattaaagaaataacccaagtacattgcagtatacagggtgttcatgttagaaaaacaagtggacggaacaaatgaaaaccaagttctggctaagtattaatagaacttaggtggacatgtcagagagcactgtggcaaaagacagtgacactaaatgttaccatgacacacatctgagccccaggatgattggggggtggggtggcaaattgcacagaaggaaagggagaaatagatggttctctagtcagctggagcctttaaagtcctactttgaaaaacatgtagaaaaccagccacatgtggacacaagctacacagactgaa

SEQ ID NO: 28007 - DNA, 1205 bp, Mus musculus
cccggtgacagtaactttctctagataagagtagtagcttagctagtgtagctggctgagactggtgatcaccagcacgcctgggtatgggtataagcaagacactcggaattcaggtgcagctcacagtggggaccttctcgggtcaccttgtgtaggccagctggcttgattctcgagcgctgtgacccatcactccctacccctagctcccagcacaggctgtggtgagggctgaggcaaagggcagctgctgggacgggagcaggtggggggctctgtctcccttaggcttctactagaagcctggcctatttctcctcttctgtttctgcgtcctgtgcatgccctgtcttgctttctggtcctggctgtgtgatggagcccggcctgggtaatgtgtgatctctgctgctctctctctctctctctccccagaacacggctctagataaagaggggcagattttctgcagcaagctctgtcaagacagcagcagaccatccagggagcagacctcgccagtccctccctcagcccaggaggcccctcccccactggagtctcccaggccccctggtcctccagccacctctggctgtgatctggcagggacctggcgccgccaccgagactgaaccctgtgtacacaggccaaagccgctcaccgtgccaggcaggccgctcttcagcgggcctcatcaactccttgctgaaagagcctctctctcctggctgctgctttgacagtttgttggcatgttctgtcactgcctgagaacagaactggggcatcctggagcccgtgtgcagcatggcctcatgcactttgggctctgccctctctagttcctggccatgtcaagcaagccatgtcagttgtggagacatatttggagtgactcattttaaatcatctgtgtttttagttcagtagacacttggccgctttccccagagaatgtgcaacttttatctggaattacatcgtttttacagaaatgcattggacgaattaggattctccttattgaaggacactccaagtgctcccttctcaggacacagctatggttcctttgttctgtgagaggcaacatggcctcttcgtcttcatagggcgctgaggcacctggcttctgactaggagtgtcattctgacttgagagggtcatttgcctcctgactttgggaagtgcattct

SEQ ID NO: 28008 - DNA, 1178 bp, Mus musculus
tcccttccttccttcttccttccttcctttttttccttttccccccgagacagggtttctctgtatagccctggctatcctggaactcactctgtagaccaggctgtcctcaaactcagaaattcgcctgcctctgcctcccaagtgctgggattaaaggcgtgcgccaccactgcccagcagaattttctttccttgaggctaggagagatctccggggcactcctctggttgactccacctcacacctcccctcctccctggtgggagttttgaaatgctcaggttagacatcacctctgcctggagatagtcatttatttaaactggcatttcaagatttgttgggtttattgatttttgtgggtttctgattctaaccagcaaggtcaaaaggaacgtggtgatttggcattctacttaggaaatatgctgagggctttcctttagttttgcttagacctataaatgatagccttgcctttgattattttccaagagcgcaggaatcagtaggaagtgctgatgtttgctcagagtttgcgtttgtcctcggctgcaggtgtgaatggaaaccggtgctccgagtcgttcccccttctggagaaatacagaatagggaaggtcatcggggacggcaacttcgcggtagttaaggagtgcgtggacaggtgagtggctcgtgatctggtccctgtacagttctccctctggaattagaagtgcctcttcccccacttttttgggcagaaaacagttacatacataaaattgttttgtatgcagaggacctatcagaaatcacatcccaacctagagatgggtaaggaggaaaacgagccactgaaagaagactgccgccttctgtggcctttcccacgccaggctctgcgtggtgcacgctgtgaaccttcagagcaatgctctctctcacccagtgccaagctgctagacccatagctctggatgcaggagccatgactgtgagatgagatcagaagaagtcaactctttaaacaatacgatagtcattatgattgcagataaacttttttttgtgtatagaacgctaccctacctcttacctcttctgaatagctggtttttatagtttgtggcaggttttctagaatgttctggtaattgcagtttatccattctgttgcatctccaatgag

SEQ ID NO: 28009 - DNA, 1551 bp, Mus musculus
caaaatacaaaaaaaaaatatctgcaatataaacacttctggtctcaaagggtgtgtgtagggtcaaaggtctgagcccactactaggtttgaaaaacctatcaaagccccatcagtcactaagcatgaaatcccaccaatccctgggcttggcttgaaatttcaccaatttccatcccagaaatctccaccctggaaaactcctcccccaagaaatcctatataagcttcttcttcgggaaaacaccaaatggtggagtgggagggcccggaggacccaggggcccaggattaggaggccgcggcagattccgcggagaattcggcagcggtcttaggggccgcggtagaggccgcggggcttgtggaggtaaagctgaagacaaggagtgagtggatccccgtcaccaagctgggccgcctggttaaggacatgaagatcaagtccttggaggagatctacctgttctccctgcctattaagaagtctgagatcattgacttcttcctgggtgcgtccctaaagggttaggttctgaaaatcatgccagtgcagaagcagactccggctggccagcggaccaggttcaaggctttcgtcgctattggggactataatggtcacgttggtcttggtgttaagtgctccaaggaggttgccactgtcatctggggggccatcatcttggccaagctttccatcgtccctgtgcggagaggctactgggggaacaagattggcaagccccacactgttccatgcaaggtgactggccgctatggctctgtgctggtgcgtctcatccctgcccccagaggcactggcattgtctctgctcctgtgcccaagaagctcctgatgatggctggtatagatgactgctacacttcagccaaaggctgcactgccaccctgggcaactttgctaaggccacctttgacgccatctccaagacttacagctacctgacccccaacctctggaaagagactgtcttcaccaagtctccttatcaggaattcactgatcatcttgtgaaaacccacaccagagtctctgttcagaggacccaggctccagctgtggctactatataaggattttatacaagaaaaatgaaagaattaagtctgctaaaagaaagaaagaaagaaagaaagaaagaaagaaagaaagaaagaaagaaatcctatataagcctgtcttctgctcagtcccccgatgcttcctgactgagcagaggtagccaccctctcgtgtctctcccaataaacctcatgtgaggtttgttgtgcattgtgactttgtggtattctttgattcccaactgctagaatacctttcacctcagaactgtaacacttccatcagggaaacataacctccggagatataacatatactatatattcaacctatatctatctatattctagaaagtatcattgtgctcaacatatattacgtattcaataagtgtatttttttgcaagctaacaaaggggcaagagcagtctcagttatcacaataactcctgtcccttgtcaa

SEQ ID NO: 28010 - DNA, 1209 bp, Mus musculus
agcagcctcccaggcttccagggaagagttgactctctagagcctggcacccactaccttgcttaccatcggctctcccagagacatctggtatcaggcctccctagtttttatcttgttcttttgttttgttttgttttcagcagacctttctataacatgaaaaaagcttcccaaaggagttgtttatccctatgggtctcacaaaactcccaaactatgtaggaggagggaaagcattgtgtacctcaattttacaaccttctttctgaaaaaggcaactcacagaaagaactcaacagaatgattcccaggcctgaggaggcatctgggtaaagttattttaagagcttcatgcttcacgtttgggtgacccaaagtgtagacctgtttgctgctttggaggccactgccttccctgtggtcctggcattcctttctacataaggactgttggatgaattcctttagaaatctaggagttagttagctttatttagttccccagcaaggttataatgtaaagtatgtctctaggtaagacttgaagagttctggttgggttttcctgtagtttctgtctctctgctgttgctagattagtattgaacttaagagctgaaggctcttcccgcctcagcatcccgtgtgcccactagggcccttgttaaaaatggacagatgatgagccactctgcataaactaaggctttgtaaaacagctccctcatttcacacattttgctgcagtttggacatatacaccaaattgttcactgaactatagaaaagtattcagatgaaagccaaggtttgttgactttgcaagaataagaggaaagccaggtgtggcggcacacacctttacctgtgcacaggagactgaggtgggggatctctgagatgaaggcacattttgtatgcacatatttgtggaaagccaagaatacatagctagagcctgttaaatcaacaactgtagtgaaaacaaagcaaaataaaaagccagcaagtacacacacacacacacacacacacacacaaacacacacacacatatacacgaattaagggggggacgcaaagaaaatagtgagaacagcagccacaaaatttgggttctatgaacctttgagatcataacttttaattaagaagtaaagaaggatgaaaaaaaaacatacttgtaaaatatttctttttaaaaag

SEQ ID NO: 28011 - DNA, 1196 bp, Mus musculus
ctgccattattcttaacccctgaggcacatctccagccctagaagtggagattctgttggtatttggtcattagaagccagagttgtggtaaaggtcccaagattcactggcagctgtagtacagttctttgggctccacatagtgctgagattttaaagtcctggtaatggtgttattcaaaaagaagtaagtctgtgagtattgactttgtcagtagaccacaagctgaactttagtttagaccttacatgctacaagaacatctgtgtcatctaatgggcacataagctttgatgtactggatatgtcagcttgtcttcattgtgtgagggtcgagtgtggttaggtagtacagctttacaaatccttaaggaaagatgtcctaaattcctttgtcgatatttcagtgccaagcatcacgatttaatcataagtatttagtacttaaaagcaaccatggtgtaatggtcaccggaagccgttagcttggttgtcagctgatggggtttttttggaagtgattggaaaacccatgggcttctatctcatcagtggatttattggttgatgggcccacaatttgattggctgcttcgaggtgctggaagctagcacaagcaataatttcttgggcacatttctgtgaggtcatgtcctgctctcactcttatctctctgtcaccttttgttggcagaggtgaacagtcttctctactgtgtgcctcagccatctgtcttggctcaggtccagtacagcgaggccagccgatcattcactgagacccccgaaatcatgagcaaaaccaacctgcattcctttacgttgttcttgggtatattttggtacagggagaaaaaccaaatatacatggttttcaacatcattaaagttgggtatagctcagtaatgggccccaggttccatgcccagcactgcaaaagggaaaaagaaaaagataaatgaaaattcttagtgtgcaacccatgtatttataaacaagttgactagaataaatgatctgcaaagaggaatactggtcgttttataattttatttaagcacatggtgaaatttggttagttagaaccaaagctttgaacttttaaacagttgtatagaaaacaaggcctttcaaatattcttacagatagaatgcctttcttgtgataagtcacagtgggaaagtttttttt

SEQ ID NO: 28012 - DNA, 1145 bp, Mus musculus
gtcttggtcactgccctcattcacacaagtttgctctctctcccccttccccctctcccactcttttcttcccttctccctcttagaattccttagagcaaaaaacaagagtggagcaggcagagtatggtggttcacatctatattcctggtaccctggaagcagaggatggggatggcattgcaagtttgagttcagccgagtttatagagggactcggcctccctccctagaccaggtgttgtgaccagatgaagtgcttagagttagatgttttgctttgagatgggggggtacactttagcccaggctagcctggaacttgtgatcttcctgcctcaggcttataacagattcttaccttgtgggaggatcttcccctcgcatcaccatcttgaaaataggaaagctcatcaaagccccacactggggccgcagtgtgacttatcctgcatagtcatactgggcctttgttgaactgctgttttgtgctgcataattttagttggtaggaattagtggctgtgttgttttgaaaagacctttcctggttaagatagcctactggatacttggccacactgttagaataaagatggtgaaaaaagcaagtgacccttgtcctcttctagttttaaatgtttttccagaaaaaaaaaagcagtatatatttatgtttaacaaattgtcaagttcttgggtgtctaatacccttgttctttgaatcagaaatattttaacacgaggatttagttaaatatactttcattccataagacataatttttattttctaacgcatggtctggtcagccatgcccccactagcctatggcaggatgctcattacattgtattttgtcagaagctattaattaactttatacaaagaaggactgggaagatgctggtttggtgagatccattacctgctttggcttacaggcttacaattattaacatttcgagaaaacacactaaaatagcctagttgtagctgatagtgttgtcttttgattatgtttgttacattgcagatgattttaatttatcaccgtgtacttttgtgcagtctttctttggcttagagctggtcgtatatacttggctggctgggagccccaaggatctgcctgtcctctag

SEQ ID NO: 28013 - DNA, 1671 bp, Mus musculus
gaaaaagaatctgacatgggaaactgtgggcatacgaaagctatgaaggaacttaacccgcctagtcctatcctctcaatgaaccactagaagaatcacatctattattatcattatcattattttaatgtgatatttatagatatctgggaggatccaaacttgtaaatggagcacctgcagacagcccctgctagctagaccaaaacgtcccttctatttttccccttgcatttttaataccatcggagttgtaaccgaaatacaattttgtcttgctttcgatattgagacgatagtctcaacctcattctttagtataacggaaagacatttttgttgttgttgttttgttttgttttgttttgtttaaaagtggtttgcgtagcggttctgagtaaagctgcactccaaccctcaactaccagggggtttggctttgtcaaagagtaatttaccaatcgtgcctgcgcgtccttccgggttttgctggctctgcaccaaaaaccccagagcctttgtgtaccagtccgggagcagagtaaagcgcagaagtcggagccgagggctgtgtagaactctggcgctatgcggtacctaccatggctgttgctgtgggcattcctacaggtctggggacaatctgaaggtgagtgagtaaaagcgcacacaatctagagaagggaggaagggagggagaaagaggctggctacaagctctgtgcagtagtgggcgggtggaggtgggcttcccggcttgcaacaacagtgggaggagcaatgtatggctgcggctcagggcttagctcagttcagaactacactgagcctgcctttccttccgcaagcgcagctaaagctgagctttttcctactgcagtctgtcctcagactgagcccactcgctaagttctttccttttcctttgtttccagcccagcaaaagaattacaccttccgctgcctgcagatgtcttcctttgcaaacagaagctggtcccgcacagacagcgtggtctggctgggggatctgcagactcaccgttggagtaatgactcagccaccatcagcttcacgaagccatggtcccagggcaagttgagtaaccagcagtgggagaagttgcagcatatgtttcaagtctatcgagtcagctttaccagggacatacaggaattagtcaaaatgatgtcacctaaagaagactgtgagtggaggggttggaaccctgaacccagtgggcaggagtgatccagaccccagctggataactgtgggcatcgggcatagcttctcttctctgtccacccttatggttttacttctgtctaaaagtaacccttgtcccttctaaaaatagcccatttctgctctagggcaccatgatcattttcctcaactggcacttaacgataatcttcataccaattcctttcttccaaatcccttaatcatgaactctttggtctctgcctactcctccttacagatcccattgagatccagctgtctgcgggctgtgaaatgtaccctgggaatgcttcggaaagctttttacacgtagcatttcaaggaaaatatgtcgtgagattctggggaacgtcctggcagacagtcccaggggccccatcttggttagacttgcccatcaaagtgctcaacgctgatca

SEQ ID NO: 28014 - DNA, 2347 bp, Mus musculus
agtggggcggtgggtttgcagtgtaggtccttgtgaatatggattcatacaggctttcatgttctctgacctctgaagccgtgggtgagccaaacacttctgaagtctaaatagagtggcattttatactccctaaagtcatcatcttgtgtggggtttggcttgattctcttgtttctctctgatttaagtagtaggtccctcctatggaaataagagcagcactaaggagaactctgagagtcaagcgcacagccatgcgagggacaggaaacagcaactgagacagactcctgccactcacactccgcaatcagaatcagagttgggccctgctgaatgaccagtgttgcttgtcgggggagttgaaagtcccttaatcacgaggctcttccgtctgaagctagcatcttccagcatgttggtactttgagtctaagcaccctgggtgctgttgctttagttgaaagaataagaaaccaagagtcgagagatccaggatcccattctgcggctgctgtttgctgagtaaccctggtctgacctccttattttccgtgcttccatcttctggtctttccctaaacctattctctgttggctgtgttcatctggggcaggagattgcccattcctcgggaacagtgagcagtctcggtgaggcttggggcagggaggcacagcctgctagaaggagctttaaccaccaacttcttgatcttgtctgtcaccctacccctgagtgaaatgaagttattggtgttgctctcatcttagattcagtaggctgctgtgatcacggtagggctcggtcatggatgcggtctgcggcagcacatacagactgggagaggcagagaaactgtcttctacttcagtcttcaggaacagtcatctggcctaaagactgctctccctgttcccccaacaaggtgaagcctacatcccccccgcccgtgcccccctccctgcagtcttgaatcagaaagcaggagagagagcagctgaccccgccctgtagactgaaaggggtgttcctagcaggaagaaggggttagtggtttttatataaatgctgcatatgttaaaggttcttgtggctctggataggccttgccctttgtagagaacccagcctgcttgctgaatcctggtccccaccccatccccaccactgccaaagtctaactacagactatgcatgaagcaggaaagagagaggaaagctcgcaggagcaggggcaatgctcagctttcacaaatgtctgggtcagaacgaaaaacatgagctcaactaatgtgattctgggtgagacaagacacagtgacccgtgtcttcccccttgtgctctgtcaggagccatagctcctgggatccttaagatagaagtgggtgacccgtgtacacttggccccctgcatagcaatgttaggcaattgggatttatagaaactcacgttaaagccaaagaccgtgtttgggcatgtaacgtctactggcttagtcactgcctcatcctgctgtgtgagcagctctgttcctctgggtgaattgcatgaactcccaaggccactgcaggctcaaaacacctgctttccctactattccatttctgtggaacccgaggccaggcgctacacccattgagccaagcgctgacggtaatacaatcctggggacacagacctcaagactccactgggggtgcattgactgttatggaaggactctaaagttgtcacctaaacaccacattcccttctcgctgcgatttttctttctcctctcctaaagacagtacattctgaccagtgctggctgaccttcctcagctgctgacaccacccgtgggccagtaaagaggactgaggtctgtggcttgttgtatggatttgagaggagggtgcaacattcagttttccagcatcactgtgagggaacctttcccaagggaatgtaattttttgcacagaagacagaggccacactaggaagtcctggtgcaaacctgctcttaacaaaagtaatgattctgtgtgcacagaactccccttaccagccctgtttgtaaaaccatcttaggcttttaatgttcacaaccactggcctttgcgaactggtggccagactgttccattggtttcaggagctgtccatcgcccctgggaataccaggatggaagggggcggggaaagaggggagcattcagtttgctgatacaatcaatacataggcttcttagcaaaagtgacccacaaggcctccacttttaacaaggtgcccaggtcagactgccaaccccagtcattcctcggattgttatctccatctgatgcctgttgaat

SEQ ID NO: 28015 - DNA, 1118 bp, Mus musculus
tatccatctgcctgagtggagagggcttcataaatccccaggaacacggtttcctttcttctcagctttgtgctggaccagccagatgtgtcctggatgtgagcaaggaggggtcagggccaggctctggttgataggccaaggaccatggtgtagtgcatggcagttcccagatccaccactagtgggagccacacaagcttctctccggtatctgtcccacttcttggtgttaactcttgagccttggagagttggggggaacagaggctaacttttcctggggctatttttcaaaagcaataaaacctcatttggaaagaaaagctgtaggggtttcccccactatacacaagtcccgtggaaaagagagggtcacctgccctctgccagactcctaagtccttgtattactatatccaagtctctaagcactttgaatctagcatatacatccaaatggtgagacctgcctgctggtggattctgataagagttaagcagtatcccgagtctcagactcagctatcctaccctgtctatcacagctagaaactaccttgcagatggcgtggtagatactttatccagacaaattttggttttgtctcctcctcactgccccccaccccacccctgaccaatcagattccttcttccattttcagtgccttgagtgtcaggtttgtgatgatgtccctgtgtggggagcagggaccttgtgagcttgagcttgtcccatgttagcatccaaggagagacaagtgagaggacatgaggggatgggggcctggaaatggtggcgaaggaaacgtcttactgacctagatggagatcttagtgtagaacaacacaaacggcactgaattccatgggccatgctatcttttcccacacagcatgcacacatgagcacacacacattccgtgccacatctcatctaccaccttctgaccaaagagaatctgtaactcgtagctcagcctcatcttcccaagaaaacaactgcccaacaggagcctactgtccatgtccccgctgagacctgcgcgatgggagggagtagtcccagaatgctccttgctttttctcattggtcaccattcgttagtcatgt

SEQ ID NO: 28016 - DNA, 1177 bp, Mus musculus
gattgagagggaagctctataatcagtgtctggatccagctagtaaccccagaaagagaaagccaaaggcagagtccttgggtgtcttctcagctaagggaagtgggggcacgagagaggagcgttgggcctcagtgggccgtgcacatagagcagacacagctttgcaggcaaggacacgggagtggaggctgaaacggagatcacagactggaggttggagacagccctgcttacgaaggagggacccagctcatgggaaggtatgccaagtagaggaagagagagctctgaggcaaactgagggcagggatggaacactggctgccctgacggcaactctggttaaactacagcacagattacaaaccagactcagcccagctcttctcaaatgtggcctagacgtagatgtcaacacggcccagcccaggcaaaacttacctttgtacacaatccagagttgccccagtaggttatggtcacatctttgggcccctatgtggctccatcctcattcctgttcctttccctcccttctatagaggtgttacctgtgggcatcattgccggggccaccatcggtgccggcatcctggtcgtcttctcttttgctgccttagtgttcttcctctaccgacgtcgcaaaggcagtgagtataggcgccgtagagtcacaacacacccttcatcccccaaccgtacccttcaaggtctcgtcagggggctggggctagaagtcaaccgtgcagaccagtagaaagcccccagcaacatctccctgtcctaggtcgaaaggatgtgacgttgaggaagctggacatcaaggtggagacggtgaatcgggagccacttacgatgcactctgaccgggaggatgatactgccagcatttccacggcaacgcgggtcatgaaggccatctactcggtgaggataatgctcctttcaacgtggcctaggctcttcattgtcctacggccagccccaccagcttttaatgatttccgttacctctaattcctctgtgcatttaacctgttcctgataccccagttcctatgtaccaacctgctctcaaataaacgcacccacactggtaccctagtgcacacttacttgtatagacgttcacacacatatgcataactactttctcccccctgcctacccacaa

SEQ ID NO: 28017 - DNA, 1165 bp, Mus musculus
agtggagtgtcagagcagctgctctacagtaagtgtacacacacacacacacacacacacacacacacacacacacacacacacacacaattgggaagaatagcaaccttgttgagttaacatccctgtcctggggggttagattatccatttgtcgagtctctgtaatgaatgttcagtacacagtctggtttgtcctccagctcagcaatttatgctgtcatgtaacatgtactctgagaagatgaaaaccgtgtatgtatgtatgtgtgtgtgtgtgtgtgtgtgtgtgtgtgtgtgtgtgtgtgctatcttccctataggataatagttgctgctaaaaattctccaccacgagttccagcgccaatcagaactgacctcagtgtggcccacacccctgctggtgtggcgtgatagacggtagatgactgagatccgtgtttcattacagctgatgatagggctgcctcgagagcggaggaattgtgggtctgaggaggaagaagcagcagcccatatccgctgtgattcttgctgtcgctacccattctgggacatgggctgagcctagaaggttgtggacccaacctcaacagcctaaaaatgaccagtgtgggctgccatctcaatcaaagcctcaatcattgggtcagaaacgctgtgtcccagagctgtccgttttgggaatgagaaatatgagatattttcattcttccaactgtgtccccattctcggtgaccacgacccagggttcactgagagagcagaagccacccgactggctccgtgctgtgcactttcctcttggctgcttcactcctctggttttgactctccaggtaccctgcatcttcgttttcttcctgagtctgctcttaactttgtaaaaactatctaacctcctcgggcctccaacagtcctaacatgacaaacttgggctgggcaaaacttttttctttacttttattttttcttttctttctttttttttgggggggggtgtggcaaggtcttactatgtggctttgactagcctggacctccatattgtggccaggctgcccttcgatctcacatagacctgactgcctctgcgtccctgctggatttaaaggtgatgagcagtagtcgctgaagctcctcttacctgtaacttgttt

SEQ ID NO: 28018 - DNA, 1147 bp, Mus musculus
gagccaaggactccccaggatcgaaccttccttctgcctgaggattttgatttgtaagaacaaaggcagtttgtggaaaacaccctttcctcaagtctcccaacctcttgtgtccactttcctctccccagcccccgctcctgcccagcagagctgatttctaaattaactttctcctaatcagctcagctgaggttttattattattccccctccccgaattctccatgcacagcctggggccctatgtgctccattacccaacattgccccaccatgaggcccttttaactgtttcttcccacattctgttcatttaactgggagcttattatagggaaggaagagatggccagagggactgaaaacagagtggagcaggagaaggcattttctaagcaatgaaaacccagagctgggcatgctggctgctcttagaaaaatggaagttttcttcttcttcatttttaagcaaccgaggacttcctgcctagaccatgggatgcttcctctatgacctccagccccaggatcttacccactgctctgtggatctgtcccacctcacctcccaactccttcaggaaatctgccacctggactgcattgtgggatggggtccccagtgtccccacaaaggcccctcccctccatgctcactgtggctatgctgacaaagtaggcaccattcagtgccagcactggctactttgtggatgatgctggccttgatgcgcctctctccctacaaacacctggggacatcactcatccctggtcagttagtggagtgagcgtgcaatctcattttaatgctagtatgagccagagataactagaagggaatactcacctctgcaaactattatgatgcctggcccaggcaagtgggaatgacttttggactgtctgtaccactcttgtgctctgtttatgcagcgcacggagaaattggtaatatttgcataagagggttttgcacacactttcaatttcactcctgggtcatgatgtaacacagcttactctgtaaaaacaggtaaccgagagtctcctaggataccaccacttaaccaggggactataggagtattaagccttttttgccagagttgggcactgtgtgccccttagagccttggcttgc

SEQ ID NO: 28019 - DNA, 1148 bp, Mus musculus
ggcgaaagggggctaaaagccgggcctacttcctctccctgggttttttcttccctctaaattttgttgtgccaaatgtgtaaaactttgtaggtgtaaatctattgcaatctcactaatcaagagcttgtttatttaaacagtttgcttttttagctgtaaagagtagcagactctcggggcatcagctctgctgtgctcgcgggtcttcctagacatcaggctgcacttctaaccccagctcgggaatgcagggaaccctagtgacccataggccaagaaacttccagaagcattaaaaaaaaaaaagttatattccactaccaagtggatagtcatttagctgtttgtcccttgtttttttatttattccataattatgtttgtgctttttcttgtgtgaacagtagtggtgaggcctatgtttttatgtggctttagagaaaacttcagtcttcaaagaactcttctaattagttccttcttagaaaaagttatgcgttaatttgtttcaaaatatttaggcattctttgaattataaacttgtgatgcagggatttatgaatgagacgttcacatgtgaagatgacttcactaagcatctgtgtaagcagaataagatgtgtatatgtacataaactataaggaacctgaacaccattgtgcagtgccttttagatgttctgctttctaaagtcttcaaattttttgcatatatattatatatatgatgtaatgttatagaaatatatgtataatatacatattttttccaggggtatctgatagctctgtattttgttatggaagtcgaaagaaaaaaagtattttacctcgaaaattaaagttaaatttaaaaacaaagagtacttaaatgtttgctgagtattgattttgttgtcccttgcacactgagccaaagtctgcaggcctgcaggggcccagcagagtgaggggtgggtctctcgacagtgtggaagtttccgtgagtgagagagagtgagtgagtgagagagtgagtgagagagtgagtgagagagtgagtgagtgagtgaagggtactgaaccccgaaacaggagtagggaggaatgcctgcatactgactgtcgtgaggattatttaagccacgtggtcgcctgtgtggaa

SEQ ID NO: 28020 - DNA, 1164 bp, Mus musculus
tcctcctgttagcccaagtctccgtggctttcgtctcctaagcatgctgaccacaatagaaaggcctccaccccacatagccagtgtggggtgtgctatgtgcacagtgcccttgaggaggcttatgtataaatgcactttcttcctcctcttcttcctaggccccgagacagctagatgcctggctctcctctttgccctttagtttcctataaatatgtctattgtatgtgtatctttgccattgtaaataacttagccttttattctgtccctggcatgttcaaccagtcacagagagccaggcagcagccccgcacagggccatgattgtttatgtcccactggcagggaggtctcccagattccagtgctgtcaagctccagggcctgcccacctctgaagcctaggccttctcagtgtcaggaaatgctcctgcagggagtgtcttacccagcccttccccacttgccccatagaaacaatacaccaggtacggatctcaacacagactctcaagagagatgtggagtggattgctggagtccctgagttaagtcagggcccttccttccccaggggccacagcaccgttggctcatcaccctgtcctcacgccactccctacaatgaacatacacactgtgctaggtgtatatatacatatatataaatatatataatatataaaatatagatatggaaatgactgttttactgttaaaataatgtatactcttattttcttcctttcatggttaagatttttttaaagaaaagttaaatattcttccattgtggttgtatgattcttagcctgatagagggtgtgaggctgccggtgtgaccggtcaaaaatgggtagagggagacaagaaagcccctgccacagccatcctgcaccaggtctttccacctgtcccaaagtgccggtgtgtagaccttctcagcagaggttggacaactggctctggcccagaaaaggacattgtggttacgtcacacgaaggaacagggctgctgtgacctactctcagatgcaaaccatgaagagggttaccacactgccctccttcccacagaccaggaagagccatggcagctgagccatgccttagaggacctgggacataactggaaaagccatggtgcaccttaacaca

SEQ ID NO: 28021 - DNA, 1134 bp, Mus musculus
gttcacccatcccactggctcaattttctgctggctcttgccatctatgccctgtgtttgacatatggttgggggggggtctatggggctcaggctgtatgtgtactgggttggggcagggctgttctagaggcagcagctacttgttggtggctgagctggtgtcaaacacagagcgtctgggggctcggctctgtcaggagcaggggagttgctttggtaccaggagccagatcaagagaggccctggcactttcctcccctcgcctaccgtcttgctctagcactactctgcccctcttgccagtgaggagcctggcactattgaagctagtctggacaaggatggagatgctgcccgggttatgatactccatgtaggtgtgtctcttccccaggccctgctgtattagctccagaggatgggctggccatgtccctacacttcatgacactgggtggcagttctctttcccctactgagggcaaaggctccggactccagggccacatcatggagaacccacagtacttcagtgatacctgtgaggaactgttatagtaggcgagtgtgagcatggggtgtgtgtgtgtgtgtgtgtgtgtgtgtgtgtgtgaagtccctgccccaggcctctccccatcctatctcaaagtctagcctgtctcctatcttcaatcctgtacctcccacgctggactctctctggtcagatgctccttcccacccccaccccatatcttgggtctgcactgcccttaccactgccccatcctgcccaagcgaggcctgccttctgactttgcaagcccctccctcccaggtgtccatcacatcaagcgccaggacatcattctcaagtgggagctaggggagggagcctttggaaaggtctttctcgctgagtgctacaaccttctgaatgatcaggacaagatgctcgtggctgtcaaggtgagactatggtcctggtagggactgctggcctctgtccctcagaccaccatcatgtcaggatggggatagttgaatggaacaaaatgagatggtgttggggtcccctccagttctgtccccatcctgacccccaggcactgaaggaggcatccgagaatgctcggcaggactttcag

SEQ ID NO: 28022 - DNA, 1173 bp, Mus musculus
cgtacacacacatatacatatacaatatatgtatacatatgtacatatatgtatatatgcatcatgtgtgcctgatggctgctgaggtcagaaaaaggtattggattccctggagctgtagttactagaggttgtgggctgcaatatatgtgctgggaactaaatcctgattgcctggaagatgaatagtgctcttgatcactgaataatttctctgaactcaagacttaggtttttaagaagggctaatgtgagattgagggcacgaactgtatttactgaagattcggagttcaggtaggatccgtgtcagataatcatggaacgagactgggcagagccgagccaagatggcctttcattgtggaaagaacatctatataagtcctggaataggagggcctaagtgcgtgatgtaacagagcatcaagggccgagggcctcagagaagtgtagaactatgatcttgtttgtcatattgctgctgtataacgtgaagtctcacttgtctttctttcctctcattccaaacttgggctcactagggatccggcgaggggactggtttgtctgccttgctcccccaacctaaaaacctgactgtgaaagagactaacaggttgctcctgccccatgccttctcccggaaaccttcagatatctcctcagatgctaagccctctagattggcttctaagaccaagcccgcctcacttgctcctgttttgggtaccacaaccaccactccatcaccctctgccatcaaggctgctgccaagagtgctgccctgcaggtgaccaagcagataacacaggaggatgacgacagtgacgaggaagttgctcctgagaactttttctccctccctgacaaggctgagccacctggagttgagccatacccttaccctgtccccactgtccctgaagagctgcctccaggcacagaaccagaaccagctttccaggacgatgcagccaatgccccccttgagtttaagatggcggcagggtcaagtggagctccctggatgccgaagcctggggatgactacagctacaatcagttttccacatatggcgatgccaatgctgctggtgcttattatcaggtaggtaaggacagagtgggcagcccaggaatattggaacatggtgctgaaggagagtttg

SEQ ID NO: 28023 - DNA, 2074 bp, Mus musculus
gagggagaggaagaggctgccaaggaagaggctgaagcccagggcgtcagagatcatgagaggtgagctagcttccctggcagtgggctgggagggcctagctactaacagagaggaggaggaggaggtggagaagaggacgtagagaatggcctgcagtggtcagccttattggaggctgggtgggctctccctaaagacctgcactggctggggtaaggccgggccaggatcacaccattaacccttctcccctcccaccctcccctgcagcctgtagccaccaatgtttcaagaggagcccctgccccgttcctgctgctgtctgggtgctactggggaaactggccatggcctgcaaactgggaaccctttcccaccctatttaccctactccctcactcactctctcctctaagcccactcctggagagtgtcttggccctcacctccagctcccttcctacatacaccctgtgccccaggatgagatgaggccttgtatctctttacacttgtttcccagggtttctgctggggtctaggctgctgtttccacctcttgacacctctgccctgctgcaggcattctagacctttggggtggatagtgggcaggagtggaggtgaaagaatataaaggagtgtgggttcatggatggcatcgtctacctgagctcctgtctccagcccccacacttattttcccatctgcctacattcaagaaacaggacactgtgggagagaggctaccatccatccataaatccttgttgatttttgggaacacttatccccctgaccccagggttcaaggaattgtagtttaacatctagactttggagtttccaagtttgggcctaggacctggagggagctaagagctgaagaatcaactgatttgcattgaggaaatgtctctttagatctcagggcagaaatgataacctggggagacctgctgccttcatctacttcccaatgcttgaggccagcctgtagtcagatatttcacccagacataaaggaaaagaccattttttttttaggaaatgtttttaataaaagaaaattaccaaaaaagaaaaaaaaaacccaacccacaaaagaagaaaaaaaggaaaaaagttgccccgcccctttgtgtgttcctctctctgctcctttctccccactgctgacccgttttttgaggtgcgctaggagggaggctcgcctctgaccgggttggctttctctttggacatggggctttgatgttcttccagagttggtctctggtgttttctcacatccagtttgtagcccactaagaatacagggaaaagtgtcctccagcctcttctagtggtttcttacatgcccctcttccttgtcttttactcccatctctcctctgggctctgaagaaaaattgctgactgtagctttggaagtgtagctctgagaataatagaaaattttgagttctaggaaaataaagccgctgattactatcctgattctgactaattcttttcaagtgtctgggttaactgaagaaagggaaagagacaatctctagatgtcttcctcagattgggggcagagacctcagcctccattccctcaccaggcctacaaagcccacatcatccagtctacccttgcaagcatcttggagattctaaaatatttttatacattttaagctatgttttataagtattttgtccacatatatgtgcaccacatgcaagcctggtacctgaggaggtcagaagaggccattaggacccctggaactggaggttttaagttcttgtatgggttttggcaagtcaagcccaagccatgcaagaacagcaactgatctgttgagccttttaaccagcaaatagtctaacatattttaagccaggtatggtagcactaatctctacttccagcaatgggaaggcagaggatcgcaagctcagtgcctgcttgggctattatacaaaatggccatgctgaacactttactcccactccagccatgcacgcacatgcgtgcacacacacacacacacacacacacacaccacttgcag

SEQ ID NO: 28024 - DNA, 1232 bp, Mus musculus
cagcaaactcaggaatgaaaggaaacatacttagtctaatcagagcaggaaggtgagtggagtcaaatagcgagctgataaaagagatctggtctctgctaaattttggtagggatgcctgccagtccacggatggtgagaggacaggtgaacatggtcgaaatcttccagtacatttcacacgagtgattgctaatataatatcactcttttctctgaaaaggcggggcatttttttttaatatgccgcgtcctggtccctcaagcagagaagagccaggacataaaggtgatctcatctggaaatggacaccctttgctttgaattaggaagccataactaccaagaaaatggagccatgttctctgtgaactacaactcccagtggtctccacgaagagcgcgaacgaacttacgcagcaaattagcatgtctttcgccttcaattcccgacatgcctttcccagtctggatttcctacggttggctaaatttcctgtttcctgtccattttgtagcaacggactagagttcccagacgctgggaggctcgcttcggttttgttttgttttgagccttcctttccgcaatttgactacatctcccaaaaatccggtgggtggggactgcggacgtagagaacgcacgtggaaagaaagttgcggggaggtgaggctactcagcgacggggaaggtcggaaggtggataagcgaagggacttcttttcctagttttaaactgagccttgggctcctcttttgctaggacgttggagctatccgcatatcggggtgagtctgacgagggaattacttgaggcggtgacctgaggacttgtactgagaagaaagccagccccaccacggaagtgacactagctagcatctaggttgtgtagggaaccaaagggaaagatggagtgggggcctgtccggggcctaaaggagtttttaaaacaaacaagcaagaccccccccccccacacacacacacatacacacttgtgatgctgcatgctaagagagggcaaggttttcctggatcttgctgttagcatcccttactgagttctcagttttcgacttgtcaggtagtagttagtgcttagtaatcgtgtatttgatctagatagaaatagtccccgtgtttctctagcatcatggtaacacttgactttgctcccatctcttatcctgaaatgtataaaaaaaggagtaatagttcactta

SEQ ID NO: 28025 - DNA, 1193 bp, Mus musculus
caaagtcatgaaccataactgtttacttctttagagtgctaaccacatgtcacagggtgcttgtgccagtcagccttgactttgaggaagcaaggcacaccagggaaaacagtgtcccacactaccttctctatgggacacatgtcatagatatgtctccttttggtggggagtagggtaaaggaattgagttgccagggctggcctcaaacacttgggctcagatgacttcttcctcaggcccgagagtagctgggactacaggtgtgtgttcaccactgtgcctagttcttttattttttttattttttttggtttttcgagacagggtttctctgtatggccctggctgtcctggaactcactctgtagaccacgctggcctcaaactcagaaatccccctgcctctgcctcccgagtgctgggatcaaaggtgttgcgccaccacgcccagcatggttcttttaattttatgggattttttgttctaaagtaaatagcagtatcttttcactttcagacaagtcctgattggagctcagcataatggtctgtaatctcaggactctggaggccaaggcagggagatcaaaagtttaagaccaatctgagtgcatagaaaaagctctgggtcagagaagtagaaacagagaaggaaagaattttgtggttgcttgctgaattttatagccacgttacatagcactgactaacagtgtttacttaatttaggttccacttagtttaaaaagaatttgtatagttttaatcgtctttcagccttttcagcctttcaccttgcaaatgcagcctcttagttcatacgattctttttatggatttttataatagaaaactggtgggtttgttttttgtttttttttacatataaagatctatttttattttacttatgtgtatgtgtgtgctttcagggtccaggagaggggtcagatcctgcagaactaaagcttcaggccgttgtgagtctgggaagtgggtgctggcggggaggcggagatcctctaggaggagccacctctccagctcacgtagtggattctttatggctttgtattaaataagatctcttcgtgtggaaggctgtgtagtcctgtggggatttctaggctctctggatgggtcactggagcccttgtttgctggatgatttgaagctctggtaagcctt

SEQ ID NO: 28026 - DNA, 1359 bp, Mus musculus
tctctagggtgactccctgtgcccttcactatgcagttgtcaatcagaaggtgcccaacacatgctctctccccaccagaaggttcctagcaaccatagtgaaggaaggcagtgtgagccaccgcagaccaccagcccctctctgtgtcaaggcttctcagctccctgaagcgcattccaaaggcctggggcaccctccccctcatattgcacagatgtgaccaacagctgagaaaacagcctcttgcctggcccagacagaagtcccgacgtgaccacctgcccactcttcttgggggagaaggattccagaacaagtgggaagtggaggaacccagcctgctatgaggagccgggggcagtggtggcccagctgctttccttccaagccttctcgaggcgactcttgataaattgctttttccttctgtttccactttgcctcctcttccgctgtgtaacccatctcctctcctttatcccatctcctcccgtgggagctaggttctcaatagcatgtgttaccatttaaccagcatcctaagaagaagcctggtctatctaggagaggcctggagtgtttcctgtgcttgtccgggggtccagcacagtgctccagacagggagaacgcaggtagaggaacaggactctgccctacaaagatgtgagcagtgaagagagtcatggcccagagcagaggcccctcccactcactctgccggcttgctttgcagctggctgtggaagccctggagcaggagaagcagggtctacagagtcagatcgctcagatcctggaaggtgggcagcaactggcacacctcaagatgtcccttagtctggaagtggctacatacaggtacacagtactgactgtctccttggctgaagggccccgaaacttgaccctgtaaaactgttctatttacgtgtatttgtgtataggccccatgtgtccaggtgtcttaagagcccagaagacactgggtcccttgcagctggagttataggctgtgagcagctccacactggtgctgtgagccacacccctgttctctgcaagggcagcaagcactcttaaccactgagccatctgtccagccctcagatccacttaaaactttttattacatgtatttatgtaatgtttttgtctgtgatggaggcttatgagtcccagagatcaaagaggttgtctggcttggcagcttggtaggcataaacttgagcccacctgctcccaggttcgggactagaagagatggttatgcttaaagagacaactcagtcttcagggaggagaccagagggtacagtcacctgctctcgagttctttgaaaggcaggcaatctccagt

SEQ ID NO: 28027 - DNA, 1148 bp, Mus musculus
acaggcctccctaggtgacagcagctcctgacatcctttccccttccctcacgctcccagcccatgatggtggacgagctgtatgagctggtggtggacgccatcttcggcttcagtttcaagggtgacgttcgggagccattccacagcatcctgagtgtcttgagtggactcactgtgcccattgctagcatcgacattccctcaggtgctgagactcaggtggctgggagactcgtgctcaaacctggctaaggctggtacccaggggactgtcccacattagggctggggagcaaagttcatgctgcctggccctgtggaaaaccagagcccgatagtacatgggactgagggctttccctcttccttaggaccaggccacctgtatgtccttatactactttctctcttcaggatgggatgtagagaagggaaaccctagcggaatccaaccagacttactcatctcactgacggcacccaagaagtctgcaactcactttactggccgatatcattaccttgggggtcgctttgtaccacctgctctagagaagaagtaccagctgaacctgccatcttaccctgacacagagtgtgtctaccgtctacagtaagggaggtgggtaggcaggattctcaataaagacttggtactttctgtcttgaaattggagtcttctggccttaataattatcagtgggttgtgctgtctctggggaaacagaccagcatttgtaagcaatgggaaataggtgtttcacccaggaatgattcttacttatttgtaatagacagggaggtagatgatgcctctaaactaattcagtgtatcattgtagcaagacccccagagggtaacaggattccttcaagtctccaaatgccatctactttgtgttcagaccttctcatgctgggaatgctgacatcaactgggaaggacctagaagcttggggtccaagctctcatttcatcatgatcagaacagtctgggagggtaacccaacccatacatataaatgtatgtttttcttaaccttcatggtatttaaaatgaaaacattttgtagggtatgatagtgtatgcttctgatctgagcactcttgaggcaaagatgcctggatttctgtgagttctag

SEQ ID NO: 28028 - DNA, 1230 bp, Mus musculus
actgagcagttttgggtatttacgttcataagcgtgctcgtgagcacgtgtgtgtgtgtgtgtgtgtgtgtgtgtgtgtgtgtgtgccttgcaaatgaaggaacagcaggatgaagccatgacttggacgtgaatgagtcagaacaagggcccatcaggagcagctcgtgcaagccacttagtgccagcatgggaggctacttggttctattcacaggcaggcattacagttggccgaatcatagaatgggcctggccagatcccgggtcctcagtgtcacctcttcacgccctctcttcccggacccttctttgcctccatttctggcctctgtggctgtgtttgctgtaatcttcctcttgtctccactgtgacttccgctgcagcgtgccctctgtggagctgccacagctatagagacttgtatggtattttattccttctgtggctcttggctggctattcccatgcactggagtgactggagggcaactgctaagtgctctccacctctgggtctccatcgtcattttacacacctgtggtcaaggtgtggaggttagtacatcccaatgtcctaataccttctgtccttcccagtctcttcctcttccggctgggattggctccacagatccatgacctgtatgggaaagtgaaattcacaggtaagccagctcctttcctttgtccatagactaagcaggggcttgggggttctaggcctaatgaagagcatccctggcgtcattgcagctgaggaactcggcaacatcgcctctgaactggccaaatatggcctccagttaccggccttcagcaagatcgggggcatcctggccaatgagttttcagccgatgaggctgcaggtagggctggactctgcccctgggtaggatgtgggagcatggggcagcatggaggggagggggcgccactgcaagcttcatagcccttgggagggatctggcacctcatccacaggcaagggggtcaagctccctggtgcttcggccaactgtgctctggtctgggtcccttctggcttcttgaccttgctgtgttacccctccaagtccatgcagctattctggccatcaatgatgccgtggagcgaggggtggtagaggacactctggtcaccttgcagaatcccaatgctctcctggggaatcttcgagaacctctggcagctgtctaccaagagctgctggccctagccaagatg

SEQ ID NO: 28029 - DNA, 1760 bp, Mus musculus
catctctccagccctacctgttgtttgtttctttatttttgagaaagggtcttattttatagcccaggccggcctggaattcataactatcctgccacgttctccccatgtgtgccggagttccaggtgtgtgccaccatggcttgatctggagccgtgatttttcagtacagattctccggtgtttgccttgagtaagaaacccgctttcaagtcctggctccacttggcctgacattggctcaaatccctgggcctgtttttctcatttgcaaagtgggctttgaacgccccgcttcagtgcccggtgctctggcaggtgtaaggctgtgtgacactagcatctcacgggctggccgagccactcccagaagctcttaactccccctccctgtctcttccctcctaggacctcttgcagctgcagtatgagggtgtggctgtcatgaaactctttaacaaagccaaagtcaacgtcaatctcctcatcttcctgctcaacaagaagttccttcggaagtgacggatgcaggcggaactgaggcctctcagctgactggctgctgcgcttctccattacccagctcttttctccgaagaccagagctcgggccacaatgcttgaccctcccgcccaagaggaattgtcctacttggctgaagtgggccatgctccaggtccggccgggtggcttttaccacatccccgggaaccaggagcctgcactcagtcctgcaaagaaccatggttttgtgtcgctactgctctcgtgtggtcaccacggtgtccgccagtcgtcctagcactgcccagcagccttatctcccttcctttccacgggcttccaaagcccgggccaggctgtctgcccaactccgcttcataagccatgggtgtcgctgtcccctacagcccaggtccctctgtgctgtgcccctcagccacctctatcatcctgtcctagccttgacttggtgcagcacttgctgatgtccatgacagctgagtgcacacctcaaatctcctttccccacttgtggtggttcttatgtgggtcactggggtatttattctaacctgattgttgtgtggccttaatcatggttttaattctcactttctgaactcagagttcttgtcttgccatcttctcgtcacctcagagctgacttccaggtggttctcatagacctgtaggccagccttggccatctctgtcctccccacatctcccatcttcctgcctcactgccctctagatttcctcttaataaaatgttatttcctatgttaacccctgcgttgttgctatagtacagccatcaggttctggggtgcagcttgtgagaattcggagatgcatccttcagcagcctctccccgccatgggcacaggcccactatgtctgcctgcccaggcttgcacacattggggaagtggcgtctctttctctctttccaccacaggggacagagggacagagagggagaggaggaaggcatgctcaggattgattcagttagccggccactctaacagctaaggctgagaagagcccagtaccggctcctcctcccccccaccccacctcccacatacacattgtacacagctccagtctgtgccgtgcctaagcctggacattccacatgagccacagctccttctgtcccctttccatggagaaagtttccctgctttcgggaatctaccggggcctgtgggggatgggacgatgatggacacctggctgaccct

SEQ ID NO: 28030 - DNA, 2085 bp, Mus musculus
ccttgggagagggttgggtgcatcctataggccacattgcccctcacaccaccttctccatctcctttcttcacagacattaaagtgatggttcccactccctcctttcagcctccctgatgaagagttgacaatctcaccgcccaccccctccttatcctgggctcctcccgctcgaccccacttcctttcttctgctccatgtcctgttgatggttacatttgtgtataattatattattattattgttattattattattatatttttaaattcgaattctcgctttagagagagggatgctcttgcccctttcttgcccccaccattttcactgatggggactctctttattgcgggaaaggggggacactttgcacgttgtacacatatgctgcaggaaggagggaggcggtaggccttggagaaggacaggtgccgagccctgcatgtggagccctcccatcccattcccagatagacgtaaagaaccaaaaactacccaacaacaaaacccagatagtggactgaaacccaaagctggcttgacgatgggcttgtgtctcaggggataggaggaggcagtttctgcttctgggctgttcacggctaatacccatcctggtccctccagcttcctgcatacgtatcacactctctgatcctgtgtgttacaccccaagatctgggtgatagaaaggctgcctaggaatctgaggccagggaaggggcttgaggttggaatctctagagataacatggagagagacagctgtagaaagagggctgatgaggacagaaggactgggtgtggtgaattgggaccctacccccagcttttcctttgagatgtacagtgcaatagctccccgtcctttagcctaccccaatcctaaagaaagctggccatgtactgggagatttgggagaggaccttcattgaagtggctccaggatgggccagagtcgtcctttggttccctggggcactgagagcaggaggcttgtcaggggcagggtgaggagggcacctcttggctttgtgcacctgtgtccagaagagtacttactgggcacatggaggctcctgtagatgaggcccgggcccttccccaggcctctgagctcctgcccctgacccacctcccagctctctgcgtgctccttgtctcgctacctcctgtccctccacctccaggccacatcccaaacctgccctcttgctactgtaattgtaaatagagacctttcaaatgttagtggtgtaaccgtccaggaaactgttgtgtttgttgttgttgtattgatatgaaatgagattctatttttgtcaaagtatattgtaataataatgactcaaatggcccgtactgtacagatgagattcttctgctgtgttcttgccttcctctccagactaatgctttgttgcctcctcagtggggctgcagcaagcaccaggggcagtggaagaagcattgggtccttggacctcttgctggatctgaggtcagactggagggaatagtttgccccctccccagcctgctgtcaccacccctgcccttcctctgcttccccacctggggaaaggggatgggagacagcacacactcccttggagttcctcccagctggagggtagagttagacaaggctcagtgttgtagtacgatggtctttgcccacctgtgacccagccttttgtagtattttgacacttgatgcagggaaggagccagaagcagaggggtgtgagcatgctcgtggaggcgtatctgggttcaccctgtatttatgtgtttgtgtgcagctgtgcggatgtacctttgagtgactcaagctccaagggcctctgtgtgagctgggtgtgtttacaagggatcagcgccttccaactctgtggcttcaccccctccccgggctgctctcagtcccaaaacattttactaaagtcatgggggacgggtgctagttggccttcctgtttctccccacagcctacctccaccagggcttcacatttggagctctgcctccatatggctgtccactagccccacccaggcatggttcatccctgg

SEQ ID NO: 28031 - DNA, 1365 bp, Mus musculus
ggccaccattacagttgtgggtgaagcccctatagttcacagtgtgctactcaacagtttgccatctgcttcccgaaagcaaacctggcttgtgattgccatgtacggatgcgtgcatgcactgtgtgtgtgtgtgcgtgcgtgtgcgtgtctgtgtctgcacacacacgtatgagttcttgtgtgtctctgtccctgactgaaggggcagtctgtgaatgagtatgtgacatttctgcagtttagtatccccaggtttctcctggggctatgcaggggcttctggctggccaggtaaatggatccctgggaacctagacctcaaatggggacttattttcttcctctcacaagccaaatttgcctactctccactccctatacagaactgggtatttgccaaagtagcctctggcgtcatccagtgcccttcccacccaggttcccctctgctttcagggatagtgggaccgagggccacccccacatgcctcagtttagcacatttcctccatccccagcagtgcatccacccaccctccccaactccaacaggaaggaagaaagaaatgcaccttctcttgctcgttatttatttgtttggagagacagaaatgatggaaaagtatctaaatctatctctctctctatttttacctaactctctggaacccctgtgggggaatgtaggctctcctaagaggctgggagctccttgttctaccctgtctgcctctacataagcagaaggggtgggatgtaatggggcaggagggctgagattcccaaggagaatctgaattctctacccccattcaagtcccagaaagagggaagaagggagggatgggccagccaagagctgacccgtccccaaacttgacaatcacccacactcctggctcctgggtctgggtgagtccaagtgtgtggctgttggtttgttttcattatttctttccgtgctgtacggtgatgctttctagtattctgcacattaagaaaagtcctcgagattcttacgagtttggtttgaaaactctttcactatatttgttgtaaagaggtttactattaaaagaaaaaaaaaaaaacatgtttctgatacctcagtttgggttttgatttctttggtgcggcgaggaaggggaggaagacctggtgtgcctggcagagtgagtgatgatttggagggcaggctgtgagatgccaggtctctcaggcactcttaaggcagaactgtgggcagttgctccaggtagaagccttgaaagggatcctgcaacatgggaagaacaaatgttcctagggtcagatctagccttcctactacagacagccattcttagcagatttcccttggcc

SEQ ID NO: 28032 - DNA, 1110 bp, Mus musculus
tatgagtgcactgtaattgtcttcagacacacaaggagagggcattagataccattacaaatagttgtgagccactatgtggttgctgggaatttaactcaggacctctagaatagcagttagtgctcttaactgctgagccatctctccagccccctagaacacttaccttagatgatgcttttggaagctgttgcctcttccctaaaatctgtttggccatgtaaaatgttttaggaattttagcagtatttgaaagtttagcaagatgtcttgtcactttaaccacctcattctgcctcttggcgtgttcttggcatgctcttatgctctttgaggcttacatgagtgactgtgttaaatgttttatgttcactgttttctggctttctttttccagtactcctgttgatgtcaataaccgtgagatgatgttgagcatcatcaatagctctattactacaaaagtcatcagtcggtggtcctccttggcatgcaacattgcactggatgctgttaagactgtgcagtttgaagagaatggcagaaaggaaattgacatcaaaaaatatgcaagggtagaaaaggtaagcttgtccagtatgtgcttgagagttaggtgtctggcatggtcattcctattcagagtagggtgtccttatttacttagaactagacagaagaactggactaccttagagcctggaaacaataacctaagagtatcaaggagaattcctgataccatttttggttgcctttactaccttccatacacaaggtttacaagggtaaggaaagacactgatgtgtccatatctatgcctgtgggtactagccactggtgagtatatcagttttataagtgctgaggttggtgaaatggcctagcggctaagagtgcctactgttcatgtagagggcccacatttgattaccagcacccttgtggtgtcttacagccatccataactccagttccagaaaacctgattccctcttttgacctctgaggtcaccaggtacacatgtattacacatacatgtaggcaaaccaccttgttggtcagggttctctagagaacagaactggtgaatattaaagagagc

SEQ ID NO: 28033 - DNA, 1173 bp, Mus musculus
aaacaaacaaaaaaagaatacagctattccaacaaggacacacaccactaatactatcactcccttcaggccaaggattcagacacatgagtatggaggccaaacctgttcaaaccactacatacgtattgaactcagtacttcaggcttgtgtggcaagcatggtacttactacctgctgaaccatcccatggccctgtttggtataattcgacttattggtgttcagactcaactgagttatgtgtgggaattcgttatccagattttattatctaaaaattacacttgaattcagctatgactggttgctgtgtgcctgtgcatgtgtttcattactaaagccaaatttcagaaacttggcctgtatgcatttataactttcctaccagtcagttcagacctctcagtgattctaataatgtattttagtctactctaaccacagactgtggaccactagatgagtaaaagcatctgaagtcacatcctccatctttccactcaatagagcctgtggggcacggatagtcagccgacctgaggaactgagagaagatgatgttggtacaggggcaggcttattggaaatcaagaagattggagatgagtactttacattcatcactgactgcaaagacccaaaggcctgcaccattcttcttagaggagccagcaaagagatactctcggtgagtgagccttggcagtgtgaccaaggggaggacattgttccatcctagaattgtcagcttaagaaatttaatgtgtcgactttaaaaggaaaagatgtagtttagcagttttattttcagtccatgctcattggcctgtagctgcatgtctacacagacgtgtgaaggagcagaatcagtcatggtgaagaggccaatgggagcaatgagtgccaggttctgcccctagtgccatttcatcaaggcctggtggtggaccagaaggatgggttattctacatacagagtatgaggccagactcagcttaaaggaaggaggcgtggaagacaggcacaatctagaaacagctggatgttggaagcatggtatggcagctcattcttgtgatcccatctgaggcagaaacatcatacaagtttgaaagtgtgaagggacaagggcaggcttattggaaatcaatacgccagtctttaaaaa

SEQ ID NO: 28034 - DNA, 2314 bp, Mus musculus
caaacttaggtgatccagcttgttagttaacaagagccttgaaccactaagccattgttgtagcctgcttaaattgaaattataaccctatccctattcccaaggggagtgacttatcctggatatgtagctgttaagcagaggacagtttgcagtacacatacagtctgctgggtggcacaactaggaaggaagggaaagataaaatttgtttctctttggtgtaatacataaagacctaactcataattgaggtatgacatcccctaaccctcttgcagggcccctcctgtgctcacattcctgaggtagaatgtgaacatcacttctgcccctctccaggagaggtcacaaggatcttcctagttgccctctttttgtggtttgctaaaagcttgacagtcaggaaatcctttgcctctgatttctctctgaatcactgagctgactatacaccatttctctgcttccccaaggaagtagaacgcaacctccaggatgccatgcaagtgtgccgcaatgttctactggaccctcagctggtgcctggtggtggagcctctgagatggctgtggctcatgccttgacagaaaaatctaaggccatgactggtgtggaacaatggccatatagagctgtggcccaggcgttagaggtcatccctcggaccttgatccagaattgtggggccagtaccattcgtctgcttacctcccttcgggtgagttcttttctacactcatgccttgccgaggtaaggcaagctggttttatcctaaggaaaaaactgtgtttctgacagtttgtgattattcgcacatatgcttctgttcatgcacacatttgcatgggtgtgggttggagtgtaggccagaggtcagccttcagtgttcttcctcagcagctcgtttcttcaaaagtcttgtagtctgccttgttggctgtcagtttttagtggtttggttttgtccattctctgacacaagcaagctttattgtactccctacttgtgtatgttccacctgcaggccaagcacacacaggagagttgtgagacctggggtgtgaatggtgagactggtaccttggtggacatgaaagagctgggtatttgggagccattggctgtgaagctacaaacgtacaaaacagcagtagaggtaagacaccatatgttgtttctgtccagataaccagcttctgagctttgtctaaaaggaagggccaagtattccccaaagatgtcccaaggaattccatttccctacttagctttggcttatacaaaagcagtgtaacgggatgagttatatcccttgcttaggtagaacttcattgttcattcaagactctggaaaggaagattccagataaaatggtaattctgtgggaggagctaggagaaggctaaaagaaaacagtgtctttcccttctctgctgacctgtttttctcttagactgcagttctgcttctgcggattgatgacattgtctctggccacaagaagaagggtgatgaccagaaccggcaaactggtgctccagatgctggccaggagtgagtgctgagcacggtgacttccatgcacagaaccagcagtctcccctttcctgagccagagttccaggaacactgtggacatctttgtttgcgaaggatcaggttgaggggcagcccccagtctgtcccatctcagtttgcaaaaagcactgacacgtatctcttctattgtaagctttccatttagtttgcttccaatgattaaatctaagtcatttgagaccgttgtcatgtgtttttcaaccttgggtcacatctctgcctcctagcaatgcaagaggaggtagaaaaccgtactgggagcaaaggagagaagtcactatttgctgacacacaccctccctctcctaccccccaccccctttaagacaaggtctcaactgtgtgtgtagatctgagcgtggtgtttctactgcctctgcctccagggtgctctgagtgctggtatcagatttaaaatggagtgctccaccacaccttgcttggataagttttaaattaagctaatccttcataggtgtgccttgaaacacactccccacagctcattctgcccacactaaccgtcacagctaaatagccagtaggacactagcctgtgctgtgcttgtctcaaaagacaaaatatatagagttggtgaggttgctcagtgggcaaaaatgcttgcaattaaagccaatggcattcattcagtcctcagttcccattgtggatggagaaagaaaagaggttcccaaaagttgtccaca

SEQ ID NO: 28035 - DNA, 1860 bp, Mus musculus
agaccaggctcagtaaacaggaaagaattcagaggaaagagacaacaaagcagagggcagcagcggagatgggaacgtagagcagatttgaggctttccagccaagactgaagcttaggaggtcaccccttgggagcggtgttgccaggcttgctgccatagggactgcgtgaggcctgcgccaccttgggatcagaggcttgctcttgagcttgctgtaggcttgcgctcagcgttagagtcttaatctgtgaaaggccttgtttccttcctgtgagtttctgttagagaggagaagctagcccctggctctcattttcacagtccagaaaaccgctcctggggccttgctgggtcccattttcccagtcatccatgagtgctttctgttgttaatctgcctatcaggtccctgtgggcctcataacacaagtcctcaggtatgatgcttgacctcttgctgctcttctgcattgtctttggctggaggactcctcctttttctccccagagctctcaaagtttgtggaaccgcctgtctgtgttgctgaatctgttgccagcatctgctgagctccaggattctggtgagtgtggccctaagactatccttccctctcactggccccatcaaacctggtggggcctggtcctgtaacagcatttgggataaggagcgcctccctctcacatagcagtcagcatatggtccaggcctctccagtttccacactactgctcctagtgagctggtggtctcatgtgaataggtgtgctccctggggaagaagtgggaacagggaggagtctgggagccagggttgtcatggtcatctctgctgcttgaaagagtgacatccagagttgatcaccagttcatccccttttccagctcccgagtagaaagcccctgctgttctgcctcccaagagcctgccactcttcaggaacccttctctccttgtcatcaagggtcctcccaggctggctgtccttgttctccagccctactttctcctccagtttcccagctttggtgtctgtccttcccctttcaaccatctgtcctagagctgtgtcctttctctggtaattccctacaggaggtttgtatctcctatgtggtcattccccagggcactgctctgattttctcctcctgcctaggcctggctctgtgttccgaagtccaaggtctccttgaaggctgcgagctgcctgacctccctgccagcctgctgctcccagaggacatggcactgcgtaacctacctcctctgcgggctgctcatagacgctttaactttgacgcagatcggcccctgctcagtgctttagaggaggtaagagacttgcttcatgccacaggcccaggctttcatcacacagggcagcaaggcagggattatcaaggccacagacttatctggacaggtgtctccttttccgttctcctccttctactgagggcagagcaagttaatcagggcttggaatcttcagcctctctcaccagcccagaactgaccatcagtctgaatagctgagccagaaagcacacactttggtcaccagctttttcccttgagtctctcaccacataggccatctgggggcagcaaagggaagtccagccaagcaggcaggctactgagttttcttggccctcctcctggttgctttctccacagccagagaagcctggctgtacttggctttatattttagggttctgggtcagatttatatcttgcagagaggaagcagggttttactgaccaaaaaaaaaaaattgagaaatgtgatcctggataagtttctcttgtttacatttgcgaagctaagagcctgaggagaggg

SEQ ID NO: 28036 - DNA, 1667 bp, Mus musculus
ggacgtcaagaacgttctagacttctacaggcagtggaaggagattggttgagactggtctccaggccctgccgtggggctgactccagatttctcctgttctccctggcgaccaggaccaccacctgtagtcaccccaccacatgcagactcaagcaggcaaacaggaaggaaggccagctgcactgaggctgcagggagggcccaggagccagcggggaggatgggggcccctgttgccaaggcgaaatcaggaaagtgaggaagtgcttggcgtaggagtggccatggacccccggccagccttccaccttaaacctgcagtccccaggggcatgggcaggggcaggcatgggggtctgcatttcattggagcagttcctggacttctgagaggaaaagatgacagaagggccctgtcctcacccaagattcagggtgggtggggctgggagtttggagcccctagctcttagggaagagtggggagatactgagtgtctgcatggttctctgcagaccccacccatcctcaaggaccccctcatcccttgtctcccatggggaacagggcagctctagagccagctgtgggggctcttagggaagcagggtctgcacacttggaggccccacttctcctctgctgctgcccagcttccaggcccacttagggtgtgggctggatggctgtacaccagcagtcatcccttccccaccagcagtcactgtgctttgtgctcttggctgctgtactggataaggggtgccaatgagggagcgaaggccaaggccacccctctgaccatccagggagagctggaggaagggtggcagaggggcaaggtccctgggagctgcttacttagggccctcctccatcctagactaccctccttttgcccacccccagaactagagccctggtaggctgagcacaggctggttttggagtgtcaaatgacacaggagcagagatcatgaatactcaggggcagagtagcaccctgagagcagagctataggagaggctctggccaggacgaccccagttctacccctcaggctggaagcagagcatagctggggctgggttcttttctgcttccccctccttgccccaactggcctagctgctttggctgtgcttaagaggagctggcttccagccttccactaagaaagaaggtctgggaaaaccagggaacagttggggttaccacatttccaattctggcagacttgagactcaagcttaataaagacccccttcccaagtgcactctgcctgctgtgtcttctgttgaggagctttgctggggtggatttggtgtgctgggcaagtgccacactgtgagaaatacacaccaccttagtgagactcagacattacacttggaagagagtcaaccttgatggggctggagagatgacttagtggctaaaagcacttgttgctcttgcagaggacggatttcaattcccagcacgacatggtggctcacagtcatccacagtcccgtttctagggaatctggtgccatctcccacttctgacttccatttgcaccagacatatacattgtaaggatttatccaggcaaaacacaaacgacgttgaccttgaacaggaaatactcacactttatgcttatgcatgccgcaaa

SEQ ID NO: 28037 - DNA, 1349 bp, Mus musculus
tcagctctcatcctggcctggtctgaagcacagcaggggcctcgggtgctcgctgtgggaccagtgtgggagctcagagccccttttcactgtctctgttctcagtgagtgagcacttacccagcatgcctagaccctgggttggagtttgagcactagggggctgtttctccagtgagggcaaaggatctgcagccactttagggagccattgttgaatgtggagaggcccaggagaggtggctagggcatctagactgccataaatacctatggatggtcgggacttccacttggcctttcctggcacatcccaccaagaccagtgacaggaaacacagagcattggcactgttctagaggtacctgggctggagccgtgcctgtcgtctcacctcacacggctattcccttcccttggttccaggctctacacagagagcagagggagctgctgtcagtgctgagggcgcctgagtgaacagctgctgggctcagccctctagagcgcctgtggaggcagtttccaggcagtaatggagtccccaccaccgcttaggttctgctggggtcacactgccttcagattcctgccgccatcttctgcctgcaggattgggactcccaccctggcatcagacaccaggctttgtcttctggagttgcagccagcgctgccccatgcccttctgatcctccccctctcccaccgccctccctggataggatttgggcagggtttcagtctccactgattgccgccttgttctccctgactgattgctgccttgctggctagcccaagggccctgccatgttctccccacatccgtaaataaacttcctttcccacactgtcatctgtgaggaggtttccttgccaggtgtctgagggctctggaagcctacagccaagagcgggttgttcagatgtcacccgtgcagaggcccggggcttcctgaggtgaactgtcaccatggccagtgctaccctgtgctgctctctggggcacaggagagtgatgaggcctgcaggtagctgagcagaaggacttaccttgtctctcccaccccactcttcccccaaggcccgtgagtgggagagccagtcagtccttcctagggtggggcagacattcctctctcctgcctgagagcctcaccttaaccaggggccgattggttagatctgtctgtgtgaccctaaggacagaaaagataccatagtggtctctcctctgtctccataaacagcctgggcccttctagctgctcttcagaaagccccagggtttgtttatccctctgggcactctgcctacctggcccgtgtcatttgaattcaggtt

SEQ ID NO: 28038 - DNA, 1173 bp, Mus musculus
ggggaaggtacaaactcctttgtcctgtaaaatttttccccactctgtccaggctgcaagattaaggctctgagggccaaaaccaacacctacatcaagacacctgtgcgaggtgaggagccagtgttcatggtgactgggaggcgggaagacgtggccacagcccggcgggagatcatctctgcagctgagcacttctccatgataagagcctcacgcaacaagtctggcgccgcctttggcgtggcccctgctctgccaggccaagtgaccatccgtgtacgagtaccctaccgcgtggtgggactggtggtgggccccaagggagcgaccatcaaacgcatccagcagcagaccaacacgtacatcatcactcccagccgggaccgcgaccccgtgtttgagataaccggcgcaccgggcaacgtggagcgtgcgcgggaggagatcgagacgcacatcgctgtgcgcaccggcaagattcttgaatacaacagcgacggcgacttcctggctggcagccctgacgctgccttggacagccgctactcagacgcctggcgggtgcatgctccaggctgtaagccgctctccaccttcaggcagaacagcctgggctgcataggcgaatgcggcgtggactcggcctttgaggccccgcgcctaagcgagcagggcggggactttggctacagcggatatctgtttccgggctacggtgtgggcaagcaggacgtgtactatggcgtggcagagacaagccccccgctgtgggcgggtcaggagaatgccacgcccacctcggtgctcttctcctctgcctcctcctcctcctcttcagccaaggcacgcgcgggccccccaggcgcgcatcgctctcctgccacctctgcggggccagagcagctgaccgggctccctcggaggccacccggagagccactgcagggtttctctaaactggggacaggcgggctgcggagccccggcagcgggcgggactgcatggtgtgctttgagagtgaagtgacagcagccctggtgccctgtggacacaaccttttctgcatggagtgtgcagtacgcatctgcgagaggacggacccagagtgtcctgtctgccacatcaccgccacacaagccatccgaatattttcctaagctccatgtccc

SEQ ID NO: 28039 - DNA, 1151 bp, Mus musculus
ggtggggacaaggaggcctgagtggctgggggcggggccattttcagagcctctggttaccctttgggaggggccataagttttactagagttacaactctgatacctcaacacacccttaaatctggaagcagctaagagaagcttttgtttagccagaagtggccaccaggacacacatcctgacctttcccttctccctatccacatgtcattttgccccttctctggaggggtaagaacagggagacttgccatctgtagttagaggtgctcttcctgattcgctagccctctggtcctgacctcccatctcctaacatgaccctttagcccacacacacacacacacacacacacacacacacactcactcactcactcatatcctgagttcccaacagtatagggagatgggggcctattaaagatctgcatagatcttccagggtgatggaggatgtcgataaagggctcacaacttacccatcttacaaagctgggctagagatctggaaaggggcttctcttcccccttcaattgtttgcttggcttttcccccaatttttttttgtttgtttgtttctggatctgccctttggtttctgttgttgttgttgttgttttccctattctgtccccctctccctcagcccccagccacatgtttctttccatcctcttacctcttctagcccagctttggggatatcattttcttgggagagaagtctggagagtgttttgatagcccccacctccagttcctcttcatgtagaggacagcccttttcccccactcctccaaagaatcagtttgagacgggaaactagtaatggggtacatgaaaggttggaaccctgcctttatcatctatgggcattatacttagggagcatcttatcctgggtcttctgcccaaggcaagggaaagccaaaagtaggaaaagtcctggggcaagagagatgtgtctggacgggctcccctccccctcacctgcagtggcctacccccgacctctctctgcacctagctgaaccattattgagtccttattagccacaaatcatgaattctctgtcttacccactggctgaggagagaggccagatctttggtgaggggtcaggccagggcaaagcaggatt

SEQ ID NO: 28040 - DNA, 2322 bp, Mus musculus
ccctgggttgcccaggggcaggggatgggaggggggtgggaagaagggatgtctgtctgtcagtcccctccccctctccactccttacccacaaaggcaaaagactgttacactaggggctccacagatccaatcccacccttgctgagtgagcctttcctagaaacaagcgcaaaagtgagcgagcagcaaaacaaagcaatgggggagtgagatgggcgaccaacagaggagaggaaacaaaaatagcaaaaaaagaaaaaaaagcagttctttataatttaatattctattttaataaaggcatttattaccgtataaatgtagcaaagaacctgggctaatatgaaaaaaagactttttattaggtaatttattatatgaaaaggatattttattttatgataaagtgatccttaaaaaaaaaaactttagaaggtttagaatatatgtagggagagaagaaaaaaaatacatttgtattcagagttaaatcttaaaaaaagtttttaatatatgttcgggtttatgttcttttttttcccccacttctttttggggagaaatgtcatttgcttttcttgggggagcatcctggggtggatggtggagaggggatagggagttggtcccttctggggcccccaccagtagattggatttcattctgtgggctcccctccccctccccctcaggggagccggcagagccaaacaaaggaagggattaaccagaaaggaagcagctttgggactaaggactgagggtcctggagtgtccctccttcccctaccctgtgccaggggcagtcaggagggaaaaccagaactgaggcctagttggccgactgaaaccctcagaggtgtgagatttaagagaaatagattttttttaaccaaaaaattaaaaaaaaaaatgagaaagaaaaaccgaggggtttaaaagaagagaatactacaaaataattcaaatttatttcatataatcctagagaaagaaaaagaattactagttacttagtagacgatactcaagatagcttaaagtttagtagcattgtgggcccctgagcccggtagaatgtataaaagtatgggggaagaaaaagaatagaggccagtggctgagctgccctatccctggggacagggctagagcaggctgctagctgagattgggagcttccagtctgctggggttgattctgagaatccttgggtttaagtgtgggataagtacaggagaggctctgtcccagggtctttgcaagggtacacactggtcatccgaagctcagtgcagctcggctgagcctggccatctgttaggaagcccctactcctaatgtccaaccctcccaggccaccctgaggaagtccttgaagtcacctcggtccatcttgctaccagtgggttcaagagccaggtggagctattctgtgaatgagccagcaactgctgatcagcttagcctccagcacccatgcagtatgagagcggcattgcagtttctagcgctgtttcccttcacatctgtagtggggattttgttcatttgttgttttttgacacagggtctgtagctcagtctggccttaaactagcagccatcttgctgcctttagttgctgggcctacaaggttcgcaccactactcctggcttcatggagtctcaaagaagttaacattccacgaaagacttccgactcaggaagtagagtgcaagtattgtccttatgagcctgggagaactcccccaccccatcccacccccaagaacagataaaagtgcaggaacttgggtggcctctgtgcaacccttgtgtcacagctcccagctgtgttcagataagaatcacccattagggccacatcacatcatcttccccacagaaatccggaagcctggctttgcatgtgagaaataggcatttttaagcacttgccttctttccatcagccccagctagcaatcagatcgggaatgggagaggcctcttggctttagcttaagcaagcgggacaccagtgattgacattgccacttcttgaccctagagcccaaacacttctccctctccgcagtttactcttctcaccccatctagagactagaagtccccctgccctttttgccctaggaccctcagtagttggagatggtagcatctgggaatggggaggatttccctagcatgctcgagggtgagtgctcagagggtcgagtggttgggtggagacagccctggggcagggaagatggtctctccactgtagaaagtagagtaggatcgtggtcagacttaatttgaggcatcca

SEQ ID NO: 28041 - DNA, 2168 bp, Mus musculus
aaggtagatggagtgaggtgtctggtttccatttggacccctttcttcctgttttgtctctgcctctttgttccagggatgttcaacagcccagaaatgcaggcgctcctccagcagatttctgaaaacccccagctgatgcagaatgtcatctcagccccttacatgcgcaccatgatgcagacgcttgcccagaaccctgactttgctgctcaggtatgaaactgctgaagaaagtgcttgcttctggggaaagggctgctacggggggcagttccgcactggtgctgaagcactcaggggccaggctgcctaagctcctacccccagttctgctccttcacagctatgtgaactaagcaagttgtttaacctccccctctctgcaaacggtggcagccacagcacctttcctgctgggatggaggattgcaggagcatggcatggcacatgggacaccctgtagacttgaagtggtagctcgggtgactgtcagacgcaggctgactcctgctgcgttttctggccctgcacacgggcccatttttttttctgtcactgacccacacgggcttctgtggagcactttgagatttctcgaagtgctggtcatattcgctgcagtagtgggagtgctgaggagggtctgcggctgtcggggggcttcccagtgtcggatgacccaggcctccctaccccttcacgtttgcagatgatggtgaatgtgccgctgttcgcagggaatccacagcttcaggagcagctccgcctgcagctccccgtgtttctgcagcaggtgagtgaggttcacagagggggaagcctggcggccagagttatggtgaccaacaggcgccagctgtacttactggctctttcctgcttctcctgttgccttctctgcttgtttcccaacagatgcaaaacccagagtctctctccatcctcaccaatccccgggccatgcaggccctgctgcagatccagcagggactacagaccctccagactgaagcccctgggctggtacccaggtaaggagtgttggtggctattaaggttttctttttctttcttacatccgcgcacaaagatggggacacacacacacacacgccgttgtacgttgggctgggtctgcttttccattttgttctgactttcattgtggatctcacatttccattccttttcctttttttctttttctttcttttcttttttctttttttctttcagacccagtctcccttttatagcccaggctagcctcaatcttgtggtcctcttatctcaacctcccaaatgcccagattacaagcactgccctccacatccatttcccaccatgttctgcactgccatcttctaactcttgttcttttcctgcctccagccttggctcctttgggacaccccggacctcggtacctctggcaggcagcaactctggatcttcggcagaggcccccacttcttccccgggcgtgccagccacatctcctcccagtgcgggttccaatgcccagcaacaactcatgcagcagatgatccaacttttgtccggaagtgggaactcacaggtacccagggcagtagcatcctgagcagcatcaggagcaggggcagtacaggcagcagcacaggcctcacgggaggcagactgggctggagggcctggtccgccacgcattagctttgggcaagtgtcctcaagtgaggtttctgcagattctttttgcttaaaattttttttcaagacatagtttctctgtgtagccctggctgtcctggaactccctctgctggctttgaactcacagatcctcctgcctctttctcctgcgtgctgggattgaagacatgtgccaccacagctaagtggtctgtatagctttaaagtagggtaagagtagtggcagtgctcagcacatgcctggcaccatgcagtcacagtatcagtatggcactgatggggaaagccaagggcaaagaggtcaggtaactggcggctcactcacacagctagtggatggtgaaaaggaaaggccaggactttaggcaggcacagaggtggcttggcatctctgacctctgcctctgtgactcttctggaaacttctggactattctacaaacacttgtgtaaattctgggagggctgagc

SEQ ID NO: 28042 - DNA, 2280 bp, Mus musculus
agtattcatgcctgtaattccagcactcaggaggctgaggcaggagaattgcaaattctagcccagcttgggctacataacaaaacattctcaaagaaggaaggaagggaagaaggaagggagggaggggctagcccgagaatgggtctatgcccacttgccaagtcctgcctcctctaggtgccgatgccagaagtgagatttcaacagcagctggaacaactcaactccatgggctttattaaccgtgaggccaacctacaggccctgatcgccacaggaggggacatcaatgccgctattgagagactcctgggctcccagctctcctgatcccttggctggtgcctcctgccttccccacctctcagcgccagcctctggctcctctgtgaagccctatcttccatggcctgtcttctttgacccctacgaacagagcagcaagaaccgcagggtgacttccaacttccaaggcctctgcccaacccaaagctctccaaggattttgattcgtttactgtctcatgaaatctctcccggtcctcttggagcagagctatctagtgtgcacagtgtgccagtttggccacatctccttgcccacaagtaccttggcaacatacattcttctccaggggactgagaggaggaccccgcctggcgtaccggaagtcttccgttggtaccactagagtttagctagccttacattactcctaccctcctctccctccctcacctcagcccaaccagtttgaatctcactctttggccaggtcctggtgaaactgttttttttttctctacccctatactgtttcatatagcctgtccttctgtccaaaggcagcagtgagtcagcagtctgggtagggttatcaagatcaaaccagaccagtggacactggtgctctagagccacagctgagagctctcggaagcagggacccggggagacagcctgggcaggaggcttggaagttggagttgacagagtctagaaagaccaatagatttcatggtggagaagccaggctcaggcctgacagaagaaagtctgatggacttggaactgaagatagaagttcagcaaagctgaacagtgtgacccatgagaaatcaaattggctccattgtttccagacatatttgcgctcacgttccaatgaacccagtcttcaggctccagtattttgagccccactctccagaagatctggtggggtttctcagcattgtagaaaatctatatgtgtgcgtacatgcaagttggggaggtgtgtgttctttgttgatttctggttcacaactttgtcaacagagataagtgggtacaagggccaatcttgtggaagactatagcattgagggagccgggtccctgggcctctgggtattgggtaaccagaaagcagattgagtaattctctgagcaataatggctctgactggtaccctggccaccattgcttccttggtgaaagaatagtgaggtttctcttccagagctcctgcctttcagttatttgctggttccctctaggccagaaacttgtatttgaggagaggtgggatggcagatgcctttggtatggaactgggctttgcttaacgagtaccagaggaagctctcgccacattttctctgctgtgtggtccaggtacttggaggacccctggctgagagacaggtaaggaaaggcatcctgccgtaggtgggggacagtcccagacagttcagacatgccttcccttccccccttatacccaacacccactctggcctttgtaaataaataatgtgatttttgttgtgagattatattggtggtttgtttgttgttttttcctgagggaggaaccgtgctgaagacagaccactgtctgtcttgagttaggttcggtgttctgagagggtgtcactgaagaccaagctggcctagaacttgcacaaccctcagcctcagtggctgagtgatgggattgaaggctgaatgccaagcttgcctcatctttttggcagtggagctatccgtggtgtctggtgatgtaagaatgaaccatgcttgggagaatgagagactggtccaggccggtcctccatgcaaatcccagtgccagagaaaagagaagaaaatggaaacatgaaggagcgggaagtctggcttaaaacttagcacttaaaggctgctggtagccataaaatttttgcagcctactttaataaaccttcaacctcctctagctccccacccagcagaggtagtagaagagaaa

SEQ ID NO: 28043 - DNA, 1320 bp, Mus musculus
aagaaaaaagaaaagaaaagaattttgccttattgtggattacaaattactcctgaaaaaatacaaagaagagattctatttttttttgttttgttttttgttttgttttgttttgttttgttttgtttttgagatatggtttctctgtgcagtcctggctgtcctggaactcactctatagaccaggctggcctcgaactcagaattccacctgctgcctcaccttgcttctcctgtcccagcggtggcccgggcggccagcgcgagcagcggggaccatgttccgacgcaagctcacggccctggattaccacaacccctcaggcttcaaatgcaaagatgaaacagaatttagaaactttaacgtttggcttgaagaccagaaaatcagacactacaagattgaagacagaggtaacttgagaaacatccacagcagtgactggcccaagttctttgaaaagtatctcaaagatgttaactgtcctttcaagattcaggatcagcaagaagcaattgactggcttcttggtttagctgttagacttgaatatggagataacgctgaaaaatacaaggacttagtacctgataacaggaaaaatactgacaatgcagctaaaaatgcagagccactgatcaacttggatgtaaataatcctgattttaaggcgggtgtcatggctctggctaacctccttcagattcagcatcatgatgactacttggtaatgcttaaggcaattcgcattttggttcaggaacgtctaacacaggatgcagttgctaaagcaaatcaaacaaaagagggcttacctgttgctttagggaaacatattcttggctttgacacaggcgatgcagttcttaatgaagctgctcagatcctgcggttgctgcacatagaagagctcagagagctacagacaaaaattaatgaagccatagtagccgtccaggccatcattgctgatccaaagacagaccacagactggggaaagttgggagatgagcacatgaggatgtcagcttctcacctgcctagtgatgggaaccattacaccagcatgtgcttggaaatcagatgtcacacttggaagggagaaccccaggagattgaccatgttctagagatttaccaccgctgctttttctttaataaagttggggaagtaaaaggctaaaaaaaaaaaaaaaaaaaagaattccacctgcttctgcctcccaagcgctgggattaaaagcgtgcgccaccactgcccagccaaacctttatatttaagataagcctttaaagcactagagctgggcagagatc

SEQ ID NO: 28044 - DNA, 3057 bp, Mus musculus
ctccactctttctttccatgagctgatggccagcctctacttctccctctctctctctctctcctaactctcagctcctcttcccatgccctgaataaactattctatactatactgtcctgtggctagtccctgggggtggggggaagggatgcctcagcatgagcccgcggtggcattccctaaccccacaccttaccacacatccaccaaacacatttcctctccttatctttttataaacacaacaggcatggtgacacatgcctttaatcctagtttcacttagacaatagaagccaagggatctcttgtgagttctaggccagtctcaaaaaaagaagaaaaaaaagaagcatagggtgtctgtcccaggagagccaggcgcagtgggagaaggttctctcatcaccccaccagcatctatagtagtgccagagcacagagcaggtgcagagtaaacccatcctggatgtaagagtgctacagaagggatgtggaagaactctcctgcacatgtgctataagcatgtttacatgttcatgtgtttatgcacatgtgtgtgtgcacatgtagagttcagaggagaacttgtcggtgccctattaaatgggtccaaggattcaaactcaggtgggcaggcatggtggcaagtgcctttacctgccgaggggtctctctggccctgtttactagttgtctgaagtctctataaagtgctaattacataaggcagtgactagcagcttggaaatctaagaattcaaggaaaggctatatcagctacttcagccttaaaacaaagtcggcgactctttgaactttgaaattgtgcctatgcagcttatttcgttttagtttaaacagaggggttttccatggggtaagcattaatgagaagaaattggaggacacacaggaaagagtcaaggactctaggtaactcaactcctttggggtatcagccgccataaaggggaaggtggggcttgtttcagaactacaacatccataaggcacaggaagggacatcagggtttccggtcagatccgtttccggtctttcggaggctgacgttgttttccggttgtctgtggcccagggaggcgtttggggtgctcacggtgagtctgggagacgcaagagcgctggggtccccgctgaccccgcctggccggcagcgcggtacacactgctgtggcttgggctcgcggctgcggacctggcggcggggctggagtgtggcgccgcacaggctgcctggctggcagtgtttcccatgcttgggtcgattgctcactttgcttttttccaaagatgaggctgctggcggttgtggtgttggctctgttagccgtcagtcaagcagaagaaggagccaggcttttggcctccaaatcattgctcaacagatacgctgtggaagggagggacctgaccctgcagtataacatctacaacgtcggctccaggtaacggcctagagttcgccagcttccttctgaattccgagtttccacgtgggcatagagaacgttttgttggggagtgaattctcttttggagtcctccagtatcgagtgcagtgtgtgagtgagtgaatgaatgaatgaatgaatatactagagggcttacctttgtcgggtgctttttgaaggtgaagacatccttaggtgaattacaagaaaccactttggggtctcagaaggctttcaaaggcagggataaattcagcttgtgaaaaaggaaatgcagacacagagtgtacatctgtcctcttacctcgggtgcggactcccagctttcttctttcacttacaatcactttttttgttgtttgttgtttttcaaggccgagtttcttaactggctgtcgaagagtccactcttagaccaggctggcctcaaactcacagacatctgtctgtctctcacactgcttcccgagtgctgggattaaaggcatgggccaccactgctggctcctatgagcacttttttgttgttctttccttttatatatttttccatttatatcttacttcccctgtctagaattagagcaagattacctttggcaattcacttctgagcaacagaatccaggccttgatctggattcttcaaaacaggcccaacttactatgggggtttcttttgaccagcaggtggattttccagtcagttcccttagttttatgtccctcactcttatttactatatgtaagtacactatagctgtcttcagacactccagaagagggcatcagatttcattacagatggttgtgagctaccatgtggttgctgggatttgaactcaggaccttcggcagagcagtcggagctcttaactgctgagccatctcgccagccctgtccctcactctttatttcctctgctttccagcgctgcattagatgtggaattatctgacgattccttccctccagaagacttcggcattgtctccggtatgctcaatgtcaaatgggaccggattgccccgtatccttttttttaatgggtggtgagggctgggggaggaacattgcctggaaaacatcaagggggctgcaaacagactggatgtgtggtctgtttcttgtcatatatctggggaggatgaagtatcagctgagtgagtgtgccttcttccttcaggctgtaaggctgtctgtatctcccaagctccattagggagatgcaggcatataaaggtatctgtggctatgaatggatattgaatgtgctttttttctttgcactgctggagacagacctgggtattcacacacattgggtaagaagtgctctatacctcaggtgctctcaaagcagattcagtggggtgtcaccatggagaccccgggtaacacgttagcatcttctcttagtgtctgctttctgacttgaaagttattattatttattcttattttatttttattattattactattattgttgttgttttggtttttcaaggcaggattttcctgcataatccaggctgtcctgaaacttgctgtgtagaccaggctgtcctcaaa

SEQ ID NO: 28045 - DNA, 1448 bp, Mus musculus
gcaccgcctgtccagactgtaagtccagagaggattagccaggcaaagaggagctgagggaggagagactgagaacagctcagattgactcaaggcctggtgtgagccaggaatgacaagtgtttaacaaagatggaaggtgaagtatgaagccaaggtggagacatccccccttagggcatcccccttctcaaacactatctagaatttgggtgaaatgaggcttggctgcacagcttgaaaaggagactagtcgtagagagccattttgtctgagggagaggctggcaaagtcctgcttacatcctgggccctgctgctcccttctcttccagaccattcccttcttccttttccctcctgcatctgtacccagactcctaagcaagaccttgttttcctccacagctggactgggcagcctttggggtcatgaccttgccctccataggcatccccctgctcctgtggtattccagcaagaggaagtacgatactcccaaacccaagaagaactgaatgcagtttcctcggcccttctctcccaagaaaccaggttttttctagactccagagggtgtcaaaagtgttctcttggcccttggcccgtggctattttgtcctgaatcttaccccgaactcaaccagaatgcgaggggcaggcctggaagttggagagggcctccccgttgtcactgaagccatatagacaggacagcccttagccacagcttcagggcttgagggtcccaccaaggtgctgttggtatattattagcaatgtgaactctttggggtccaggaggggccctttggatactgtctgacacccccatcccctggcagctcctctcaagagggtagaggattatgggggctacacaggccctgcctggattaggggcacttaccaaatgaattttctaataaaaacaaatgccataccgatgtgtttgtcttgcgtcaacagacaagtaagtttgcagcccaggtttggaagctccagctccagggcagccagggggctttcttggcattgaagtatgggctattcccagaggtgtgcctgattcctttttttgttttttgtttttttttttgagacagggtttctctgtatagctctggctgtcctggaactcactttgtagaccgggctggcctcgaactcagaaatctgcctgcctctgcctcccgagtgctgggattaaaggtgtgcgccaccatacccggcctgattccttttaacccctgtgctcatggctctccatggctggagatggtcctgatcaatttactggcctttctagcccactagtctaactcagtggttctccacctgggggccgaaggaccctttcacaggggtcaaatatcagatatttacaattcataacagtggcaaaattgcagttaggaagtagcaatgaaaataacctatggttggg

SEQ ID NO: 28046 - DNA, 1188 bp, Mus musculus
cctccaacagccacaccgcagatgccaacttttcatgccttctccccctacttaggaaaaattatttatttattgtttaatggttacagggggcgggcagggagtaatttaaagggccagggacatgggaaccaagccataagtattggagagcctctcctctaataccactgggatatgtttggccttagccacacagcctaacacccaccccagtgacacccatctgtggccacagcctactgcccctttaaggagggctgtgggtaggaccatgtcccttcccccactccccctagcctctttctgctcttcgttctcatcatcctccatggaaatctggctccttggagttgatggagcagaggctagggcggccataatgtatgggggaggggaaggaagaacctacagggaccagaatgtttggtttttagtttttgtttttttgtttttgtaccaaagccaaccacacctgttttatatttttaaaagaagattgtaggcacttctagctccatatctttgaacttgaggaattagggagacagtgacttatttcattgaccgtcagggggctcctattcagaactcttcctcagccatttggaagaagctctaaggtgggttgggaaacctctacgaaccctcacctcatctcccacagcggcaacgtttgaaacgtaagcaagaattgagggagggggatttttttttcaatgcaaccctaatgtccaccagcgatagccatttgtctgcaaatttaattgttaaaaaacaaaacaaagcaaacagtaacaacaaagaaaagagaaagagagagagagagagagagagagagagagagctcaagcagggaaaagacctaaagcgcatgaggtgctgactcagtgcccgatccaaggactgcggtgcatgcagccaggcagtgaccacggtttctgaaaaggggctgtcactacctcactgaagagggcatgaatggatgcagctgctcaaactcttattaaaaatcttaaaattgcaaggctggaaatgaagcgccgttcagcctccagcggctgttaatgatgcacacattagaaaactcgtttgcatcttattcatctgccatgcttggatagcacatctggttcttgccacccctctgttcccctccctgcccctcccattttcatgcccaccctg

SEQ ID NO: 28047 - DNA, 1129 bp, Mus musculus
ttggtgggggatggggtcggggttgtggttgttctctcttctagattatccagccaagaagatgaaaacggcagagaagggatttggcttagtagcttacgctgcagactcctctgatgaagaggaagaacatggaggtcataaaaatgcaagtagctttccacagggctggagtttgggctatcagtatccttcatcacagccacgagctaagcagcagatgccattttggatggccccatagaaaatagtggacagagctttgaccctcagtgactcttcttagcaataatgcatgcacttgattaaacaagactctgggacctgttctgggggccatcttggatcttcgaagatgttagggacacagtgtcccctgtcataaagggacgccattctttttaaaaccctatttctgcagtggcataacatccgttaaaattcacttagaatcacaaatttgcatcaagctttttaacagttgatgaaatgtgcttgtccagtgagataccaggacagagtcattgctacatatgtttgacctgatctagccttttccaaatgaatagcctcaactctgttgtaaagaaagttttatttgtattttactactattgggtcaattttgataactggttacaaacaaaaagccttactatttattagtgggaaatggttttaagacccttccttccatacttacatgtaattctaagagctcctcatccctctttccatttggagtctttgtttggaaaatgctgttttactaatttagaatggtcaaatacaactggatcctgaacaggaaaatgcagttatttttgcattctttctttactgggatgatccaaagctggcacctttaggcacacttgtttcagatagccattgctgttggcactgcccttctaagctcccggtttccaactgggtcaaagaaaacgcgaaacactcatctgtctctctcagaactggctgcagcgagaagagggatgtggtgccaccgacaggacggtgactgactggaattgcaacttgtccttttttcttggcattgcgggttttgccaaaagaacttttttgtatcaaatattcatgtgtggaagtgaaggaattggtggtgagc

SEQ ID NO: 28048 - DNA, 1584 bp, Mus musculus
gggatcacaccactagtccctgtcctttaacccatggaatgtaaatattgtatcatacgtagaagaaaatactttttgttttctaaaaaggcattttgacatagtttaatgaaaacccggcaggagcattctaagccccattagggaaaaaaaaaaaaaaaaaaaaaaaaggaaatggttcctcttcgtcgccttaatgtgtaaagatcagaagtcactgagcagctcctcggagaagatgcgaagtgacaggtggagcctggcctctgtcccgctgtgtgtgcctctgttgctccccctgagaagtctgggaaacagcgctcctcccttccccatcccgctgcagctcaatcccttgcatcctctgggtctgcagagcagagggtgctggtggaggagccagtacttctacaggctcggggctgcctcggtgtctgtcggggtgggcagtacaggattcctccctcctacctcaggcctgatccatcatgccctggacgcggtaccctagagcttcttagctgactctggctgtcacatctgttcttcacagagctcgctgatgtgggtagaggcagaatgcctctccctgtccaatgaaagacaagagagtcgcttcctagcttttgcacaaggctcttgtggttaggaataggttagggaaaggtcactcctgatttcccagcagccaatctgtctatggagatttcttgactctttgggaactctgagagctattcacaatatcagaagttccctcttgagttcttccttcttttggttctcagcacggccacagtgtacatgtttatggacaatgctgtgctggagagcagacagaaggctgtgtgggaccagggggccctacttaggagggggataggaagacaaaattttaacactggtcatagtgacattgccctcaccacgatccctctccaaagtggtcgtctttctttaccttgtgtcttctcttgtaaaaataaaactcaagaaaaaaaaaatacaagtgtcaaactaaaaagaaaaaaaaatggaaaaagctaacatgaactgtgtgaaattgcatactgctgtgacgctaacctgcaatatgtaatgctatcttgtatgtggaccttgttaatgcgccacacacgtgcagaataaagactgattctgattaaataggcacagtgctacagcctgggtttctttttgtttgtttgttttgtttttttgtttttttgagacagggtttctctgaatagctctggctgaaagaacctagtggggaaagccccactcaattcccgtttggcgcgcacccaagaatcacgaacagacaaccatcttgatgaaaaagcatgaggtagtttaatgacggagctccggcccgcaggagacagaggtgtcgaccacatggtggagccataattgcggagctccggttcgaaatgtatctcacacaggagacagtggtttcgaccccgaggcttggaagctagggacttttatagaaaaggggtggggctggggaggaattggcacggtttcacatgattggtccatttaaacatcaacagactgtctgaagggcgagag

SEQ ID NO: 28049 - DNA, 1148 bp, Mus musculus
tgccttcctccctccttccctttctttcattctttttctttgttttcgagacagggtttctgtgtgtggccatggccgtcctatagctcgtcctgtagactagcctggcttcgaaatcagggctacgtctgcctcctcctcatccatctatttgtcatgtgttgggttactttttccatgaactgacttaccagggctgtggcttcaccaggccctaaaacatgatggcgccgatcatctggcgcatgctccttgacgcggaggtcccgcgcatcgggggcgcgcacgtcagccggtgccgttgcgttacttccgctggtgcaggagctgagtttccgcgggatcagagcgggcctctgagggtatttggtagtgtgtggtggggcgggaagcagcacgttagacgtggggctcccgggcggagggtgcccaggatgaggggcgtctgctccgaggctgggtgcccggtgcgggagggtaatcgggtagcaggggtgtgcgtgctggtgcggacctgggctaacgttgagcgctgaggtgtcgagagcggagctaggagtcctgtgaaatgcttgttcaggggggatctggggactgcttgctcggtgcgttcactcactcttggtaagcctttcctggccttcaaggagcagactcttgcggggcggtggtggttgcacgcctttaatcccggcactcgggatgcagaggcaggcggatttctagagtgagttccagggctccacagagaaaccctgtctcgacaaaacaaaaacacaaacaaacaaacaacaacaaaaaaggagcagactcttggaggtatggtagtttgaagcgcttggagcgatcctctcacagttctgactgaatggcccctggctgcccctctctccccgcttcccctctgcttccttctctgtgaaccttaggaagtcatctgtgaaataaggaatcacctaggttatccccactcccctccgtactcttttactctcctccccgacaggatcagcgaatcttctcttggttattgagctttacgatgataaggacctgggctcttagggcgaggggcctcccttaatgccctagagaatgtgcgtttcggaggcttaagattagctttatagatcaaactctgagtaagt

SEQ ID NO: 28050 - DNA, 1173 bp, Mus musculus
gcagaagagattaccacatggagagtcaggcaggggtcagcttgctttatcagatagctctccatgtgtatgtctgttcgtcttgtttgcttttgagacagaatctcatttatgtagccagccagagtttgttactgactaatgcagcagcccagtatgcttgtgaattatgaacaactgttttacatcaacctcctgagaactgggattatacttccatttttattataaaaccagtgaacattttctttgtcttcctgctagactttaaacctgatggaaatagactccttcctatcttgttctttcacgtgtctcaggcatcttgagcaggacttgagttgctgcatggtggatggatagagccttggtcagatgctttgtagaaacagcatttgttatctccttagagttctttcttactacaaaatggacctaagttctgctaacaaactcctttccttctttacagaaaaagaagtgaatgggctgatggaagagctgtttgagactgtgagtagtgattttggagtcagtaggttagtggaattctgtagttaagctctgtcctttgctctttgaaattgtcttttcagcagaatgatctgcccgggttagggccacctaggagttgattggccagaaaattctgagtagtagactcttgatcacctacatgctttttcccacgggctacctttgcaggttatcattaggatgctgatcacagacttttttttttttttttataaatttttctcttgattttaggtaatttttcacttgaagcagtaatttgtttagcccaggaaagtttactctccaaagagagattcggctgggtggttgtaaaggcaattggcaggtaaatctgtctctttgaagattttttggttgtgtgcagaaactggagagacggctcagcatttgagagcatctgctgcttttccagaggacctaggttcagatgttgggtcataggtgccttagcggatagaagctcaccaagatgctaagccttcatttctcaagggagcagagtggtttagtcttcttggaaaagatttgacagccaggtagcttactccagttactttagtccaacatcatacaaggttaattggggctggaaaaggttccaaataacaaagttatcttgcccttgcccttgcc

SEQ ID NO: 28051 - DNA, 1106 bp, Mus musculus
ctccacccccctcaaccccacctgacctctgaactccctggggtttccagtctcttgacttacttaggtcaagagttaggttaggtgcatcttctctgactgaacccagacccagcagccctctgctatatatgtgttggcctcataccagctggtatactgcctggttgatgttacagtgtctaagagatcttgggtgtccaggttaattgagactgctggtcctcctacaaggctgccgtcctcctcagcatctttttttttttttttaatttttttttatttatttattgtgtgttaagtacacggtagctgtcctcagaagagggcatcagattttgttatggatagttgtgagccaccatgtggttgctgggatttgaacttgggaccttcggaagagcagttggcactcttaaccactgagccatctcgccagtcctcctcaacatcttttagcttttccctaattcagccacaggggtcagcagcttctgtccattggttgggagcaaatctctgcatctgactctttcagctgcttgttgggactttcagaggatagtcctgataggcctctttttgtgagcactccttagcctccgtaatagtgtcaggccttggggcctccccttgagctgggtcccactttgggcctgtcgctggaccttcttttcctcaggcttcacttccatccctgcagttcttcagtcaggaacaattatgggtcagagtttagactgtgggatggcaaccctatttctcacttgatgccctgtctttctgctggaggtgtgctctacaagttccctcaccccatggtaggatatttcatctaaggtccctccctttgagtcctgggagtttctcacctttcaaggtctctggtacattcttcagggtccccccacctcctacctcctgaggttgcctgtttccataaggcatttttttctgttatcccctgcctttcagttgctgttgttcctgttttattagcttttaaaacttttaaagttgataaggcattgttcaatctatctttgggggttcttattgtttcacctttttgttttaaaagcatctcttttaatgtatgattagat

SEQ ID NO: 28052 - DNA, 1092 bp, Mus musculus
gtgcgccaccaccacctggctgtaaagaaactgtgagtctagcagcgtgtgtgggttctcttttttttctttttctttttttttttttttttttccgagacggggtttctctgtgtagcctttgctatcctggaactcactttgtagaccaggctggcctcgaactcagaaatccacctgcctctgcctcccgagtgctgggattaaaggcatgcgccaccacgcccggctgcgtgtgtgggttctcttagtgccttgtgtgtctgtgtcagtggagaaagtgtaccttataggaacagacaagagaatcagcttggcagacctcctgttagcaagtgttacgttggagtgactggaaacttgaggggtcaagtacgaggaagagcctgtgtgagtgctgtgtggacttaggccttggtgaaactctttggtccttgcatcatatttatctcagatgttctttcttacagccagtgaatttccctgtttgccaaagcaagtggcttggatcctggccacaaacaaggttttcatgtatccagagctcctcccaatatgttccctgaaggccaataatcctcgggataagaccatcttcaccaaggctgaggacaagtacgtatagtgaagctgacattagtgcagtagcgaaagtagagacagtggtttgagaagcttggggcaaataagaattgtgtaacaaggacatagaccaaagaaaagccatgtagagacaggagtttatcagtttcagtcctgtctttcccaggggatgccatacatactgttaaaactttattctgattttatttttgagtatgggtgtcttgcctgcttgtatgtctgtgcagcttgtgcgtgacagtgctggcagaggccagcaaaggcctaggagccaccatgtgggtgctaactgaagctgggtcctctgcaagagcaggctgtgctcctaagcactgagccctccaacacacacacacacacacgcacacacactcacacacacacacccacacacacacactgttggtcttttttatttttatttttttgttcttagcctttagttttctgatgctcccacttctaatt

SEQ ID NO: 28053 - DNA, 1204 bp, Mus musculus
actcccccctcagcctctcaagtgttgagattgcaggagtgtgccaccatgcctgggatgactttttctgaggtgtaatgctcttttgcttgtttgtgaattgtatgctgtctcatttgtgcttgttcagtgctgtttctcaggtcttctattctcttgaaaccagtctagggcatgagagagttcaatcccagggtcttccatatgttaggcaagcactgtaaccaatgagttagcttgtgccagggagccaggctggtcttgaccttggcatctcctgcctcagccacctcggtgttcagagtatgcagttgcttgaattttttttttttctgtcaccaagaatgttagtgctttaagcatatttattttcagtagtgctggtgattaatccagggtcattgagcttttcatgtttggttattaaaatacgcagtgatctgtaactctctaagggtgtgggaggaggctgtgaagcatgcaggttgaagagctccttgcagaaccatatgtgactttggttctctctcagtctgttggctttaggactgaagcatttcgaagggaccgattttcctaagcctctgatcagcaagtaccttgtaacttgtaagactgctcaccagctgacggtgagaatcaagaacctcaacctgaacagagctcctaacaacgtgattaaagtgagtgagtgagtgtgtgtgaaaactccctctgcctcctttccctctcagctgtcagtgatgggaggcttttgttataaaagtgttttatcccttttcctggtagcccaggtgtttgggaaggtggtaggcttactgtggtgttactcagcagggttggaactgacttcttggtttttggaattaggcctaaattactaactttcagtcatggactcctgtctgtcttcctctccctgcttttctgcctccttccttcagtgttagacactgatgtctcactgaaccctgtccctagaacccttccttattcattcactatttcacaaatagatcggggttgttgttgttttggttttttgagacagagtttctctgtgtagaactggctgtcctataagtcactctatagaccatgctggcctcgaactcagaaatttgcctgcctctgcctcctgagtgctgggattaaaggcgtggaccaccactgccgggctcatttttaaaggctttgtcaattt

SEQ ID NO: 28054 - DNA, 1195 bp, Mus musculus
cctgccactacagtaaaggttgtgagccttggtggtggctgtaacatgatccagcctgttactgcagctgtggcaccaagtccccagaccattcctatcaccactttccttgttaaccccactactttcccctgttcattaaaccagccccttgtggcctcctccatctcccccctaattgtttccagcaatcctctgactcttcctgtgacatctattcctgaagataaggcccaagtgaagttggatgttgctgaagggaaaaatgctcctcagaaccctgagtccaaattaaaaccccaggagctaactcctctctgtaccactgtcttctccaaagaggagcccaagtcctggcattcttcagcagatacgggaagccaggaagcattctctgaatccagtacctgcagctgggctgttgtcaaaacagaaagccaggaaggctcttctgaaaagagtgcctgtggctggacggttgtgaaaacagaagatggtgggcatgctgtggagccattgcctcagaatctccaggactctctgagctctccatcgaaggatttattaaatatggtcaagatggaagctgaagattgcatggtggaaatctccagcaaccttcccaagcaggacattggggaggaagtgaaagaggaacgctctatggaattagacagtgagtccccacaggagaagccgagtagtgccagtgagatgagcaaacagacagtcctgcagagggaagacacgcaggccgccaaatccccttctgtgccccaagacgctgctgctgagggacgaacaagtagtcatgcaagcagaggactgccaaaaagcactctgtcctccatgggccagggcggggggctgagcggtcctccagggaagcttgaggactcggccaatgctgacggccagtctgtgggaaccccagcaggaccagacactggaggggagaaggacgggcctgaggaagaggaggaggaggactttgatgacctcacccaagatgaagaagatgaactgtcatcagcttctgaggagtctgtgctctctgtcccagagctccaggtaagggccagcgcggctccaagtagaatggggacttggtacaatgcttactctattacattatagccataaacccttacttgacttttgagtatctgtggaacatagttttgacctctgtgtg

SEQ ID NO: 28055 - DNA, 1134 bp, Mus musculus
gtaggcttaagtctcagcacccacatggctgctcacgacccatagtaactccgttgaagggaatttgatgccttttgcaggcatgtggtgcacagatctacacacaggcaaaactttaaaattatacagtaataattaaaaataattttaaatagtcataagaattgaggaatagctaaacagtagagctagtgtactgtcgggtatggtgttgcacatcaagtcccagcacttgtgaggcaaaggcaggcagatctctgttccaggccagcctggtctttagagtgagttccaggacagccaaagtaatcttgtcttgaaaaaccaaaccaaaccaaaccaaaccaaaccaaaccaaaccaaagagtgagttccaggacagccaaagtaatcttgtcttgaaaaaccaaaccaaaccgaagcgaaccgaaccgaaccgaaccaaagcaaagcaatgtagcacgtgtacttaaaaaagttgctaagcaaagctgtcctcaggacctcaggcttctctggttctcagtgttggccctgctctgcctctgtgccttatgctgctgctgctgtacttcagcttctgggagctgcaaggagcccttggaaacattttcggtgtagtacaaccagtttaatccaatcctgacttccttacaaaagagtgagacccagactttgtttagtgtatttggctttgataattactggggtcccccccaatctactttcctacctgctggcctggctgcctgccccgcggtgttccccaaagacttgctgtttctcttggccgtgtgctcatggttccgctcctctctcctcttcctcattttctttgtcttggcttttctgccatgcaccagcaggtaactaaaaagcctgcccatgtctaatccctctgctaatggttgtagccatttttattcaaccagtatctttaaattaaggaacaaggtttgcacaacaaaagatggcatgcaggagaaatcactcataagtagaccttctggtacacattttatcattccatgcatagcagcagacaaaacctcaacaaaatggtgcttttaggaaacaatggagaaactgacttggctggcatctgaaaggaggatgagtcaggagggtgagtct

SEQ ID NO: 28056 - DNA, 1149 bp, Mus musculus
tgtccaaactgcaaggtgtcagaaaaatattttataggactgtcgtcaaactgcacaagcgctgtacgagaggttaatgaattacaggtttaagcttagatcccatctctaataaatctcacgaatacacatgtttttattggacccaagcacctgtaatgcacagacaggtaacctgtgtgtcacttagttgtgttgttttgatgtttttttgagacgggttctctgtgtagctctggctgtgttagaactctctatggaccagcctggccctgtactcacagagttctgcctgcctgcgcctcctgaatcctgggactaaaggcgtgggccactatcacctggctcgtcttctctttctgtgttgcctttccggtgaaatgtatctgtaaagggaaattgctgtggtttgggcttggaattgtgaaccttacaagtgggttgagaatttcttttcctctccaattctctatattctctttgacctatcccctccccattaaaaaaaatgtatttatatgggtatttcacttgcatgtgtatatgtgcactatgtgtgtacctggtgactgtggagccagagcagagtgtcagaacccctggctctgacattacaagtggttatgagccaccatgtatggtgctgggaaccaaacctgggttctctgcaagagcaatgattgttgtcaagttttgagttgtctctctagccttttcttccccttttacttttagactttatcctgtatatctggggaggtgaactgtgcacttcattagtcttgtattcatgaagtgggtctcatgggatgagggcagtagtttaaaggaagactttgaacattgagaaagggtttccagagatggagaacgctttggactgagggcactgaaggttgcagtttgacagaatggagccttggacacctggagtaggaacaacttgaatcggtggtgatgtagtagcttggaagaagtagggaaaggtgacttgtgaatggcaggttaggtttcagttgtagaagaatttcaacttccatacttagacattgtagtttttccagtaggtaaacagagatagcactatttctagcttctgtttgtttgctcagaggtacatggatctatggacgtgtacatactagacat

SEQ ID NO: 28057 - DNA, 1991 bp, Mus musculus
gtgtgaccacagccactgagagcagcaccgatcagcacttacagaaagccagccctgccctgggagatgaacctcagtacccactgctgctacccaagggtgtggtgctcaaactgaagccgggttccaagcgtttctccagaaaggcttggcgacagaagcggccattggtccagaagcccctccttatccaacccagcccctctgttcagcctgtgttcaaccctgggaaaatggcaacgtggccaactcagtcagaagttcctccaagcaacacagtggtccagattcctcatctgattcagccagccgctgtcttacagacacttccagggttcccttcagtgggggttcgtggagaagatggttttgagtctccaacagcactgcctgctatgccttgtgggtctgaagccaggaccaccttccccttgtctgagactcagtcagcacctccttcttgctctgcacccaaattaatgctgccctctctggccccttctaaatttcgaaagccatatgtgaggcggaagcccacaagaagaaaaggagccaaggtgtccccctgtgtgaagcctgctcccatcatccacccgacacccgtcatcttcacagttcctgccactacagtaaaggttgtgagcattggtggtggctgtaacatgatccagcctgttagtgcagctgtggcaccaagtccccagaccattcctatcaccactctccttgtcaaccccactactttcccctgttcattaaaccagccccttgtggcctcctccatctcccccctaattgtttccagcaatcctctgactcttcctgtgacatctattcctgaagataaggcccaagtgaagttggatgttgctgaagggaaaaatgctcctcagaaccctgagtccaaattaaaaccccaggagctaactcctctctgtaccactgtcttctccaaagaggagcccaagtcctggcattcttcagcagatacgggaagccaggaagcattctctgaatccagtgcctgcagctgggctgttgtcaaaacagaaagccaggaaggctcttctgaaaagagtgcctgtggctggacggttgtgaaaacagaagatggtgggcatgctgtggagccattgcctcagaatctccaggactctctgagctcttcatcgaaggatttattaaatatggtcaagatggaagctcaagattgcatggtggaaatctccagcaactttcccaagcaggacattggggaggaagtgaaagaggaatgctctatggaattagacagtgagtccccacaggagaagccgagtagtgccagtgagatgagcaaacagacagtcctgcagagggaagacatgcaggctgccaaatccccttctgtgccccaagacgctgctgctgagggacgaacaagtagtcatgcaagcagaggactgccaaaaagcactctgtcctccatgggccagggcggggggctgagcggtcctccagggaagcttgaggactcggccaatgctgacggccagtctgtgggaaccccagcaggaccagacactggaggggagaaggacgggcctgaggaagaggaggaggaggactttgatgacctcacccaagatgaagaagatgaactgtcatcagcttctgaggagtctgtgctctctgtcccagagctccaggtaagggccagcgcggctccaagtagaatggggacttggtacaatgcttactctattacattatagccataaacccttacttgacttttgagtatctgtggaacatagttttgacctctgtgtgaattgctgtgtataggggacatgttctttgaattgaactcattgaagtgttaatttgagttacttgagcacacttaatttttttttaaatgttttacgctattcattaatttgtatggtgagtctatgtgatgacatgtgcagaggtcaaaggaccaggtcacgtggctatctccttcc

SEQ ID NO: 28058 - DNA, 1146 bp, Mus musculus
gcaagcaagcagggaaaagcttgaaaattcttatttatcaaagataggatgcatgggccgaggagatggcttacctggtaaacttgttagctgcctggtgtcttaaattaaacccctgagacctgaatgagtttgtgttaattaattactttccaaggcacacagtggcctgtgcgcactcactgccaagcctgaatacctgagtttgctccctggaatccacatggtagaaggggagaactgactcctagaagttgttgtcatttgagttccacaggtgtgctgtggtttacacacacacacacacacacacacacacacacacacacacacacacacacacacacttaatttaaaaataaaataatttaaaaatcaaaaaagttagttaggctctgtcgaaggcagaatgtgggcttcatggggacgggtttagcgcagtctaggggtgttctgctgatgtcttcttagccttcacaactttccccagctcaagacacagatgtggcagctcctcagaggccacgaccacctacaggatgagttctccatcttttttgatcatctgcgcccagcagctagcaggatgggtgactttgaagagatcaattggactgaagagaaagagtatgaggtataggttgtcaaggggaaagactgcctggggcaggggttggatccccaagtctactcactgccaccaactctcatttagtttgatggctttgaagaagtgatactccctgatgtggaagaggatgaagagcccgccaaggtgtccacagcctccaagagcaagaggcgaaaagagattggggtccagcatcaagataaggtatgcatgctgtgggggaaatagctgcttctttctcgctgtgaattctactttgtacttatcagtggtgtgtataggatagctgcaagtcttaagcttggagatgcttatggggcacacaccacaggtgaggctgccgtggaggatccatgagtagttgggaggagcacccatcaagcctcgttagaaggaatcacagccaggcatgatggcattcctacccctcgaggctgaggcaggcatattgtgctgcttcaaaggtagcttaggctacatagtgaaaccctccctcaagaaagaaagggaacaaa

SEQ ID NO: 28059 - DNA, 1151 bp, Mus musculus
aactcaaaagatacagacagaaggatggtgagtttggggtcaagctgggttatgtaacaagtcactgtctcaagaccaaacaacaagacaaaccatgacaacaaaaggaaaaatccgcccatgtcctttggctttgagagagggtgttaccatcccaggctgccctcacaattgtgatgtagctgagtatgacctagaacttctgatcttcctgcttttacctccttctcatgcggagtttacaggccaggcatctggctccattttagattttgtagaagggtccatttattttatgtatgtgcacatctgtgtattgcatataatctgatgtatatgatcactttataaattcaaaaagacaccaacctgtagtagcagaacagcacctatgaggagtgttggcacacaccttcactcccagctggcagagcagaggtaggagggtgtgagcccccagccccatgccaacaaagccccagcatctgcagtgacatcgaggcctgggcagtccccacatcaagcgcctttctcaccttgctgctgcagtgacaatttctccttttgctcttcttcagcttagattcgggacctccctcatggcaggaacaggaacagtccttggctgcttcaggccattcggtgtcctacaacaaaccccggcttccttagccgcccactactttcagaactgagagaaacagctgagttgagaggcctcccactcctctttgagaatgtaccatcttatcactgaggggacactggttacagtcccttaagaatccctgaagagtccacaatgatccaaagaaagaggcatgccataggcccaggacaaacttaagtcaaacagattttaaagaagaaatgcactggggaactccagagtagatccaggtcagactttctgactcctggtgtattctctaaactcttagaaatggctttgtacagtgactctactcaataaagccaaaacccgagaactgtaattaactcgatgcacaagttctcaaggccatttatttactcaaaagctttgcagacagacactaaagaaatgtggctttaagaggctagagaggctagctagctagagggctggagagatggctcaggggttaagagtgctgccagttcttccagag

SEQ ID NO: 28060 - DNA, 1175 bp, Mus musculus
ggtcttgagacagtgacttgttacataacccagcttgaccccaaactcaccatccttctgtctgtatcttttgagttttaggactatggacataaatcccacactcaatttatgtgtagctgagatcaaacccagggctccttttatggtaggcaagcactccaccgattgagctacatcttcagctttagatttttttgcctttttttctgaggtgatgttggttgcttttaaatttttaagataaagcctcatgtagcccttgctgtattgaccatgtagtgagccttggactcctgcctccactgcttaagtgctgggattacagttgggtgtctctgtatatccttgactgtcctggaatttactctatagaccaggctagtgtctaactcacagagatccatctgcttctgcctcccaggtcttggaattaaaggtatgctccccaacttcctatctggattttcctttttaaacaatctatgacctacggccataccaccctgaatgcactcgatcttgtctggtcttggaagctaagcagggcgaggcctggttagtatttgaatgggagaccacctgggaatactgggtgctgtaggctttttttttttttttttttaaggaaaaaaaaaacagtctttgatttgaatatggtgttcacatcttgggagacagagaccaggggctgggaaacaaacactgtatagcatggagcgaacataaagcctcagtctcagaacactggtggttggagggatagtgcagcagttaagaacactggctggccttccaaaggccgttgcttcttttccctgcacctacacggcagctcacaactgtctataactccagttctaggggatccagtgctttcctctggactcagcaccataggcacatggtgcacagacatgaatatgcataaaaatatgcataaaatgaatatgcacagccatgatatgcataaaatgaataaaactaatgcttctagaaatggagagtaaaactgtagttaaagtacttccttatagacttgttattgtctggggacatcctctatgaagtctgcttctgtgtgatatcattgtgggtaggccctacaattgtctccttaggtttccctttcttttcatcaaataaacctgtgagcaaaacggagtaaagataac

SEQ ID NO: 28061 - DNA, 1809 bp, Mus musculus
catttctcagcagctgggaaataagacccctgttgaggtaaggtgggaggggcaggtgatgatggggacagaggtgagcggatgggaccagccggggtcacggtcaatcatggcagcaactttaaagagtgctctgaaaaaggctcgacctgccaggtgctagggtttctttggagacagcattttcactgtgtctggaaagcctagaacaatgtaggtcaggtggtctcaacttgaactcagagatccatctggctcagcctccttattgctggaattaaaggtacacacatactgtatatgtgtgtgtgtgtgtgtgtgtgtgtgtgtgtgtgtgtgtgtgtgtgtgtgcatgcgtgtgcgcggttctctttcctatacataagactcagccctggtctccctccccctgcacccccccccccccccccccggctgcccacctgcctgtccactgtaagagcatggccctcttcctgtcctaggtttcccaccgcttccgagagctcatgcagctctttcacacggcctgcgaggccagctctgaggacgaggacgatgctaccagcaccagcaacgcagaccagctctctgaccacggggacctgctgtcagaagaggagctagacgagtgacatctgccaggacccaccctacagccatcagcactggagatagggcgcgcctcactcgtggagaccttgaggacagagcaagaatggagatggctctacagctcatctctcaggggcgttggtgaagaccctacaagcccaatctatctgtacatagcactgagggagctcggggcttgcctcggagtctggtggtctcagtgtttttaaatgtacaaatgcgtatgtcatgtaacaggtccctacacactgggttcctgcacggcagcttttattataaattctctcccactaccctcccctggacttcagttcgagagactgtcaccctcctggtaacactgggccaacctgtgtaactcgtgcagcatctcttccatgtcatcctgctccacgccagcgtccatgaagctagcccagcgccgcaggtcaagtctgctgagctcttcagccaagtctcccagcgtacggtgcaaggatgaagttgaacgcaaggccccaaacacagggatgctctgtactgctgcggagggaaagaagagggacgctgagtgggaggtacagcggtgactcgtgtgctgtcccttctgtgtgctccccaggggctcgtagtcaaggagaggaacactgaactgtgaactttgttttctttgcacttttaatcctcctggaaaaaactgtaaaaagaaaagagtaaaactgttcctatgtagctcaagtgttcgttttcttcatgtcctacctgcgcccttgggggtactgtccatggccagccctttctgactgaagcttgagaagaagtgtgggtatggaggagccactttgcagggagtcagcagcagatgtgacgaactgcagacagagaggtgatgagcaggggccagggctgcaagggctgggggaagggcaggtgcatatggaccgacctcaagactctaggatgctgctgctgtaagtactgggccaagacttcttctccagaggcgcatgcgtggagagcagagggcagaggtgtccctgggttgagcttactgcaaggaaaaaaccgcatttacctttggctgcacgaatgtaagctaagattcatacattcttggaccatcaagtgaactggtccagagctttttttttctgggtaaggtgtccatggtagcaggaaaagggtgtcagaaag

SEQ ID NO: 28062 - DNA, 1166 bp, Mus musculus
gactgttccctatcgcctgcgctcctcaatggttaccatggctcacttggctgatgtgctaagtttctctgggaaaaaggtaaggagctgtgtgaggggctaacccaaagctcagaaaaccctttgtaacctgctccctcccggtgtttaggtggtgacagcagaagcaatcatccccttcccactggttcgaggccagtcccttcctgacatcctgacgcagcttggagaagccaccccatggacctccctgtcggcatgcggggattctgctggacatcggtgctttgcccagtctgtggtgctcagaggcatagacagagctagccacaccaggtaaagactgctgggtcttccaggcccctgtaagtactgggcatgtctttgtttccctagcacgctttctgacacccttttcctgctaccatggacaccttacccagaaaaaaaaagctctggaccagttcacttgatggtccaagaatgtatgaatcttagcttacattcgtgcagccaaaggtaaatgcggttttttccttgcagtaagctcaacccagggacacctctgccctctgctctccacgcatgcgcctctggagaagaagtcttggcccagtacttacagcagcagcatcctagagtcttgaggtcggtccatatgcacctgcccttcccccagcccttgcagccctggcccctgctcatcacctctctgtctgcagttcgtcacatctgctgctgactccctgcaaagtggctcctccatacccacacttcttctcaagcttcagtcagaaagggctggccatggacagtacccccaagggcgcaggtaggacatgaagaaaacgaacacttgagctacataggaacagttttactcttttctttttacagttttttccaggaggattaaaagtgcaaagaaaacaaagttcacagttcagtgttcctctccttgactacgagcccctggggagcacacagaagggacagcacacgagtcaccgctgtacctcccactcagcgtccctcttctttccctccgcagcagtacagagcatccctgtgtttggggccttgcgttcaacttcatccttgcaccgtacgctgggagacttggctgaagagctcagcagacttgacctgcggcgctgggctagctt

SEQ ID NO: 28063 - DNA, 1169 bp, Mus musculus
atatttaaaataaagaaatgctggagagatggctcattggttaagagcactcactgtctgttcttcagaggaaccaggttcaattcccaccacccacatagcactgtctgtaattccagttgcatgggatctgcaacctcacacagataaatatgaaagcaaaacaccagtacatacaaattaaagaagatttgtcaccctataacaggattagtacaagaatgagaaactcaaatttctctttgcttgcatagtcctttaaagctagcaggcatatgagcagaagcaagaatgttccctaaataccctagctatttcaatagttacagctcacattcttcatgagaaactatttttatttactatcactgtgttatattttaaatatgcactatatccgtcataatcctcaatttttaaattattgtttgttattgggggttaggtttttgactgtcaagcctcagaatagttacttttccccactccaagtttcagtgtggagttttctagtttttttagttcaaagacctttaggatctagaacaatggcttagtattattaagagtactgtgtgttcctatagagaatacaggttgaatccccagcctgtatgatggctcacagctgccagtgattggcattcagttatctggtcctctctggtctctagaggcaccatgcacacgtgtggtacacaaacgtacatacagctaaaacacccatacacataaaatgttatttttcaagtacactgtgctgctggggaggtgactgaatggtgcagaacactggctgtctttgacaagactcaggttcaattcccagcacccacatggcattgcatcacacatgtggagcaccgcatatatgtgcggacatgaagctaggcaaacactcatttacataaaaataattagtatctccacaaagaaaagagagggtgttcataggctggagccgcccactgcatgtacaggctctcagttctatccccagcacccctttaaaaaaggattttttttttcttctttgaaacagtgtaagccagccaaactgtcaacatcgtcagcctctggagttctgggattacaggcagggaccatcacggttagccaagaaaaataaaagtttaataaaagaatgcaagcaagctgtgctggtagac

SEQ ID NO: 28064 - DNA, 1099 bp, Mus musculus
atgccatgttcatcggtcacgccaccgccctcatccagtccctggactcttcccggcgacagtaccaggagaaggtcagcagggacaagggaggggaggggtgggcttggagaagggctggagatatgttctgatgggctcctatgtcctttcctgcctcatatccatttgtcccagctacctgtgtgaaacacatctgtgactgtccctatgcctctgtccttggaccctccctctcctctgtccacatttggggttttctgtaactgcgcagtcttacttgtatccaccattttccgtatatcccttgcggctctgtgtgtaccacgtttatcgcctctgggtccaacttgttctgcacaccccgagccccactgttttggccccacgtctccacatccttttcccactggcaactggtgttacctctccagtacaagcaggtggagcagtacatgtccttccacaagctgcccgctgacacccggcagcgcatccacgagtactacgagcatcgctaccagggcaagatgtttgatgaagagagcatcctgggggagctgagcgagccacttcgggaggtggggccgggctggaccttgtgggaagggctcttctaggatctgggcttctggatgtgccgcctgggttacaagggagtgagtgcttgggagggggggacaagcatttgaggggaggtggctttctgtgcaaggtcttatggaactgtctcagggaggtccccacacgggttgtagcatccccatccagtaaccgatcttgacaggtggacgggttttctggagacagatgagcttggggacagggcatcttccggcagggggcggagcctgtctgataggccccgcccatgtccaggagattattaacttcacctgccggggcctggtggcccacatgccgctgtttgctcatgctgaccccagcttcgtcaccgcagtgctcaccaagctccgttttgaggtcttccaaccaggggacctggtggtgcgtgagggctccgtgggcaggaagatgtacttcatccagcacgggctgctgagtgtgctggcacgtggcgcccgcgacacccgcctca

SEQ ID NO: 28065 - DNA, 1152 bp, Mus musculus
agtggtgttgctcatctgggtggtttgagttgctgttgagaactgacctgttgtccactcccagatctcatggcccctgggttaaaggtggtgggaatcacacaggggtttcttcccctgcagccatctatatctgttccccttccttcatctcctcaccccaggttgctgtgccctgttttcttccagttcacctcattccccccttttctccctccctctccccgaccctactttctttcgtttcagatgaaattgtaagcaccttaggagaagggaccttcggccgagttgtgcagtgtgtggaccatcgcaggtaacaaatgtcctgccgcttactccacatctgttaggcagagacgattgtcagggcatcgaatatgtttagagattagacagtcagaagttcttagtctgatccattaatcactcactgatcattcaatctgagatgttcttgaacccaacaaaagcctcccctattaccttacaggggcggaacacaagttgccctgaagatcattaagaatgtggagaagtacaaggaagcagcccgactagaaatcaacgtgctggagaaaatcaatgagaaagatcctgacaacaagaagtaagcaaccaaaggaacatgtgaggaggccgaggggctctgtccagaaggaaggctccaggctgaggctaggcgggcaggggatacatccagtcttgtcttttctttctctctctctctctctctctctctctctctctctctctctctctctttctttttttggcatgcttttctctgtgtagctcttgctggccagaacctggttgtagaacaggcattcctcaagctcacagagacccttctgcctctgcctcctgagagctgagagtataggcatgtgccgcacccattaaacttgatcctgtgcttgtggcagagcatcaggatagcctgtgagagtctcttatccatcagcttgtgttacaacacctgcagtcagggaatgaataggcctggcattggtgggcatcactgtaggtggtgcaggcctgtgatcccagccacttgggagaggaggaaagacagatagaagcttaagacagcctgggcaattttaataagaaagatcttttttcataaatggaaatggagctagagat

SEQ ID NO: 28066 - DNA, 1116 bp, Mus musculus
ctttgagtactacgttggcttcaccctcttccaggtaaatggtggataatcccaggctgctgggtttcttggtctgcagaggacattcctgctcagtcctctgtctatatggcatattgtctatatggcaactagtctccagcgctccttgctgtgtcctatgctctgctctctttgtttctcagacccatgacaacagagagcatctagccatgatggaaaggatcctgggtcctgtcccttctcggatgatcagaaagacaaggtgactctcacgcgggaggcactagagcgtctctcctcgtggaatttgtctgttaggcatcattttcttgttttcattgacatctccctagcccccacttacttgggtaaacaagggaaagggttttatagaaatggagccttctgatgcacaaacctccccttcccctccagaaaacagaaatatttttatcggggtcgcctggattgggatgagaacacctcagccgggcgctacgttcgtgagaactgcaaacctctgcgggtgagcctggccagggagaagtactgtccaccatctaaaggttgcttctttcttcgggtggttggtccctggagtgcattttctaagtggaggttagggcaggagggggaggaacattgaaagaagataatttggtcaacggtggacagaggagatcgagggttcacagataacctcatctatagacaaccagaggaaagcagacagaaaagaataaactacctttgaaaagcttacactttacactttaatgtggagctaaggaagagtcatgaggttgacaagtatatacaagtaaaacagaatattaaggattaattgtgctagtgggaaggtaggttgagctgtaatatcagaaatattatgaccacataatgttgtgataaggtagctttcaaattccatgcaagccgaactttggttctttttctaaagagcaaaagtggggctttagaggaagcagggagtcgtaggtgacacaggcctgcaatcccagcactcgagaggctcttgtgaggccgaggcaggtgttccaagtcagctgcagtgcgtagctccagaacagcctcgactgcacagtgagaccc

SEQ ID NO: 28067 - DNA, 1151 bp, Mus musculus
gtgatgctgaagcgggtgagggccggtcgggagaaggtggggctggggagtgagatcattgggtccctaggggctgctgagtggaacattaaggaaatggggcagggcgggtgggttatcaactaatggactttcttgggtgggtgagtttgtgtgtttggagggagtgccaacgcagaaggaacggtacaaagcaggagactagtgagtggtgccatcctcctgggatgggaggggcctgcctcccttataatctcttccctcttgcagatccactccctgtaccgccaaacgggtgccagctttcagaaggcccagcaagaatttgctgctggtgtcttctccaaccctgcggttcgaactgctgctgccaatgcagctgccggagctgctgaaaatgccttcagggccccttgacccctgctgcacccgctgggatgccctgggcctgtcacctgtgggaaccaagatagtccctatccctgaagtctctgggattcagggagccatcaccacttggtgacttctatggggctcttcattccacagccatgactttaatcctgacttgaggtgtggagagcccgctgtgactcagtcattatttgccttttatctcccatctggccacactgctgccgccacctctcacacaaccccaaccccagtttccttctgctgtgccaaggatgtcttcttccgttatttaaattaaagaaaaaaaagtgtaactggaactcacccatttcctgtatctttactggagattgggccattgtatggagtggggaactggggtggaaacactctgcaaggagagggttgcacttggcaaagtgggcaggctgataggcgggagatgggggagccccagctcggtttaccatgcctctgttaatgatgaatgagcagtcagtcccttttggtgtgaacacctcatcccgggaacctgtggggcagaaaatggacccagaaatgatccttaactgctcaggcttcagggcgaggctagggatggaggagggcctctccctatctcctcccttccccagggttgctttcagactacagctcccgggatgcattgcaccacccaccacacccctcctccgcaccacgcaccatccaccatcccccacctccacaggctg

SEQ ID NO: 28068 - DNA, 1200 bp, Mus musculus
ctacgtgctcgctcagccgagaaacgccgcccagtgcccaccttccagaaggttcccctgccttcaggtcctacacctgcccactctctaggggacctgaaaggaagctggccaggccggggcctagtcactcgtttcctccagctgtctaggaggtctccagaccctacaggaactggagcccatggatataagcaagtaagcgttagggggaccaggagcatccctagaaaagcctggcgctttaggttggcctataccatcgccctctctctgtcctcttccaggtgcgcaggagcccatgggggcgaccaggtcgagagagcctccaccttcgcagctgtggtgatttgagctctggctcctccctaaggcgactcttgtctgcccgcaggctagagcatggcatccgcccacacagcctcagcctcaatggaggcagccgggagactgggctctgatttgggcatgttacactgaacagatcagagcaatgctggagcccataagcattagctggttaggaccagcagccttcagcagccctgtgcaccactggctggctcaaaaagaaatccgctctatactctcccaaggtgttcctttcctgcctgcctttgagggctcctgttgcttgcctctgcctctctgaagggcagagcttctgtcctgtgctgcatgggtgtgggaggaaatgccccctgcttacagcattgacagaggaaaattagtaacctcccccccgcatgagagtgcctctttctgatattccagggcactgtatgggggcaaaagcctgagtgtttaagaacacggcgatttgtgccttgccaagcggtggtagggcaggcaaaaagagacatgaatctaggtggcttttcagctttgccacctctagctgcatgacctcaggcaagttatttaaccttaattgcctgacctgtaaaacattgtgaacatgaatgtttgtaacactgagtaagccttcaataaatttccttttctcccttctctctttggagtattctgttattgttaaagtagtgttgggatttattaaagatgtttgaaatggactggagagatggctcagtggttaagagcagtgactgctcttccagaggtcctgagttcaatttccagcaaccacatggtggctcacaaccatctgtaatgagatccgatgccctcttcttgtgt

SEQ ID NO: 28069 - DNA, 1838 bp, Mus musculus
tccaacatccatttattcccccttggagtcagactcacgcatccccaaagaagaacttctgagagcccagacgctgagagagaagggttaggcactcccgagcctcttggtatagctggaggaagggacacgaagcatgtggttgtgggagctgtgacacttcccactgtagattctcattcctagccccaagttacctctttttctagttcctcctcgttctctgatttgtgctcgccacacagcagctgtagccgctccatgtactggcgctgcatgcggccgggcaggaagaagttgaggggaaagggcatagcctctgcataccactttcgggtcacttccacatagttcttggcgtctatccaaaaagtatggatctggattgggcagacaggaagagaaagcctgagcccgtgcacctgcctgtcacggggtgggcttctaagtctcatggctctgtagctctgctcccttctgtgcgggctgggactgctaggtctgagcgtactcactagcacaggcagtagtttctcctccagcagagacatgaaggctagggtatctgctccttggcgagctgacagatcgtagtcggcattatacttctgtggaagaaatgttcatggggtgaatattgaaggattgcagggacacttattttttcagtagagaaggaacagtaaccccacactagcctcaagcatagtagaggtagaagaaggagtctttcctgctgaggtctccttgcctcagctcagtgagtagcctgttgctgttggcagaaagcctgggctttggagcccactggctgtcaaggtcctgcacccactgcggggagggaagaaggcctggccacaaagtgggagcagctcccggactttccacggaaagctggcggggtgcctgccgacagcagctctctaacagtaacttcctgatctagacaccacaccacagagctagcaacgaggcactcggctgcaggctgggcctcagaagtcagggggcaccatccttacccttcttgaacccagtcaatttacatccagccaccccaaccccagcttgtcccccacagcaagctcttggctatgtcttgcacttcactccaaacccttgtgcaccactactgtaccttcatcgcaccggtatttccgtcttgtcttagtgtggcccacctttccaggcttcaggctgttccttagtaccccctccacagactaagaaagctttgaacctgcagagcctcttgaagatgactcttaaatttccctgaatctcagtttctcctttatggaaggagacagtaatgtttttctctcgatgtggctgggtttggaaataatttaggaaaaaaccctttggaaactgaaaaggctgtgtttatatgcaagtaacccgggtcctgccaggaacgctggcttatatctggatccggtttctccaggccgctaagcttccattacttccccagctccctggaaagtagaaatgagaaaggggattctatttctgactgtgtgttccctcttggaacaacgctatgaatgccaggcctctgagagcatcctgcctaagcaccctagtttacaagtaaggaactgtagttggtgagctgccttagcaggtaactgtccttgctgtcaggctcaatgacaagagttgcattgcaggaggccacatagcagaaggaaaggacttagtctaccaagctgtccaaggacctccccaagtgtgccacggcatgtgctcacacacacacacacaccccaaagcaagagaaataaatgcttacaaaacaaatagttcattactttgagaagttaaatcacctg

SEQ ID NO: 28070 - DNA, 1208 bp, Mus musculus
ggtctggtggggggatggcccatgggtggtgtaggagaggtggtaggagcagatgacacaagcaaagattctttactggctggaagggaaaccacagattggccaggacacaggaggaagagatgctggctgggtcctacattcccaggggggaaagactaaacagcgatgggagggtcagagcgctttgtggacggctgtaagatgtgtgtgatgagcccctgggatgggaggaccggccccagggtttggagtgtgctaaacccagcaatggagagatggtactcctggttcctgagttgtgggcaccaggtgccactccagactctagtcagcaatgtctcccttgcgccacctggtgggacataggaagtttgcgagtggctttggtatttgtaagtgggctctaagcctataggttcccaaggctttggaagcaatagaaggtgctgggagggaagcattgccttgataacaaaaaaagggccaatggttttgtttttagagatagggtcttgtagcctggtctaaagtagcggaggctgcctgattgcttgaggcagtcctctcagcctgaggctacaggcatgtaccagcatccctaaagagtttgagttttgaggatgcagttcagaggtaggaagatgataattagggatgcctcagccgggcgtggtggggcacgcctttaatcccagcactcaggaggcagaggcaggcggatttctgagttcgaggccagcctggtctacagagtgtgttccaggacagccagggctacagaaaatccttgtctcaaaaaaaaaaaaaaaaaaaaaaaaaaaaaaaaaaaaaacaaacataaaaaaaagggatgcctcacctctgagagctcaggagagagggcaggcctacctcagactccaaccacttcctctaatttttaaatccctatctggccagtaattgacctgctgacagtgggcgaatccaggcagatggtagctgtggcagagaagattcggacagctttactcactgctggggatatctacctcttgtccactttccgcctccctccaaagcaaggtggtgtcctctttggcctctactctcgccaagacaacacacgatggctggaggcctctgttgtgggcaagatcaacaaaggtgactggtgggcacccctttccagcatcaatgaccccttgagcagtctccctcatgcc

SEQ ID NO: 28071 - DNA, 1135 bp, Mus musculus
atgcttgcgacagctgccctgaaatgagcaatcctacccaggtacagaggagtgtcagggtgagggagggtggggattggaggatgaggcccagtcctttaccctgtcagttatcaggaaatggtgacatcagacccgcctctctcagacagatgcagacagcgacctggtgggggatgtctgtgacaccaacgaagacaggtagggtctgggccgagacatccagggtctcccagggatattttttttcctctcctcattttcagttgtctctgtaatgtaagcttaactcaccacccctgctaagcaggaagtcattctcactgtctaccctccattcccactgctggatggccatctcccctgaatgatggcaagggaaccaagttagagggtaggcaggccccagagagcacacagaaggaaaagatggagcccgccctctcagctgggatctgttcattttcttctgagcagcgacggagacgggcaccaggacaccaaggacaactgtcctcagctgccaaatagctctcagctggactcagacaatgacgggcttggagatgagtgtgacggggacgatgacaatgacggtgtcccagattacattcctcccgggcctgataactgtcgcctggtacccaatcctaatcagaaggactcagatggtaagactggagtcccggagatgcttaagctgatcaggttttgctcaggagacaggcctactggagggagtggaggatggaagggtagggaggactcaggaagaaccgggcggtgacagtcgctctttgcaggcaacggtgtgggtgatgtctgtgaagatgactttgacaatgacgcagtggttgaccctctggatgtgtgcccggagagtgcagaagttaccctcacagacttccgggcctatcagactgtgatcctggatcccgagggtgacgcccagatcgatccaaactgggtagtgctcaaccaggtatgcggggcagtaggctgggcaggcgctgtcagacctggctgcctgttgggacctggggtgtcactgtgcacctggatcagggctttttctcttcctttatcaaccccagggcatggaaattgttcagactatgaacagtgacccgggtct

SEQ ID NO: 28072 - DNA, 1179 bp, Mus musculus
gtgcagcttgtccagagagacagcagatgccttggctacagaaggctggagaccaagcagggcggtggcctagaatgctcttagaagcattatttcctccttgccacaagagggcgctgcacccaaggcgcgtagaggaagaagtaaagcaagtccacgttggccccgacgcctgcgtacagacaaccgcgccggctttggctcccctctttctccagggacacggattggaccacggacggggcgtgatgggtaaccgcaccggcgggatgcccgggctgctctagcgggagtgggcgttggggtggtcctcttttctccgtagcctcggtaaagctgacgtgtcctgggaactagcatttcctccggacaggcgggaacttgggtgtgcagggccgggtggttcctggaggtcgctgtggggtgggggctgggtcacttggaagtggttggtgagccaagctccggagtgaatctgcctgaatcttagcctgactctttttctcatttatagtagtcggtaccgggacctccttggcgctgtcctccctcctgtccctgctgctcttcgctggcatgcagatctacagccgccagctggcctccaccgagtggctcaccattcaggggggcctgctgggctccggccttttcgtcttctccctgactgtatcttcctcgcgctggaaggggaggcgggggtgtatgaacagaacatgggcgggagtgggtggcaagggctttgcagtccctctacttcctatcttgttgcgtgagtttctccttaattacatcacccaggccttcaataatctggagaatctggtctttggtaaaggcttccaagcaaaaatcttccctgagagtaagtgaaactcaatagttaactggactcttttttttttaaacctctcccaaacatgatgccgaatttccctgtgcttagatgataaaggagaaatacatttgcttaacacaatcttgaagacagaagatgctttcagattaagcattttattggagctggaagagaagcacaaaaaggggggaggggaggggaggggagggagaggaaaagaaagaaaaaggccaacctggtctgctctcaggacaggtttcaagtgaacagtcaagcctgggctgatgtctgataggcatccaggagaaggtgttctttgt

SEQ ID NO: 28073 - DNA, 1106 bp, Mus musculus
ctgagcgcggccgaaattgtcctaagaactacagttcccagaaggcagcccggaaaaagggcggtagtagaaagggacttccggatgctgatgcgggccttgtcagcgcggcacacggaggtacgcttaggtggcgggcagagtggaaagacggaaatgggtggcggagactgggaataaatgtcagatgcagagcggggatcggtagaaagaacccttagctttgatttttctccctgcagccaacatgacgaagttaacacagtggctttggggactggctctcctgggctctgcctgggctgccctgaccatgggagcactgggcttggagttgcctttcccctgccgagaggtcctgtggccactgcctgcctacctgttggtctccgctggctgctatgccctgggcacggtgggctatcgcgtagctacatttcacgactgcgaggacgctgcccgagagctgcagagccagatcgtggaggcccgagctgatttagcacgcagggggctgcgcttctgacacctaaacccattccagtctggacatctttcctcattccgcattaaaatgcagttttattttctaatcttgtgtagttttgagtatggaggatagcggtggggtggggggtgggatggggattctatatactagaggtcaagaggtgagggggcaggagaaccaccttaccaggccttacttagctttgcattttgatggtgttctgttcccttctcaagattttttttctgtttgaaataggatgccatgtaccctagactggccttgaccccagccatatggctgtggattatctcgattctaacgtctctaattacaggctaaacccaccatgactagactagtttatgtcatgctgggcttcaaacttggaagtccacaactgaactatatccccaaaacaggtttgtttacttgtgtatatggttttaatatatatggttttaataagtagttcaacctggcttacaaccaaccctgtcgtgctacccaggctgccctcaacctgtggtcctcccgcttcagcttcaaccttggaagtgctgcgaggcttcccatacaaggctgcgcaggaagc

SEQ ID NO: 28074 - DNA, 1193 bp, Mus musculus
tgcaaaaggaccttccgtgtgctaagatctgataaggcccaggacatcatgtgtgaaaggatgccaagtgcccagggcctaagccctctacctttaatggcaagagggtgtgtatggagtcagcctgcatgtcccctccagcacatgccactccccgcatgcagctcagtgacctcactgcctctggggccctgctgccctctctgaacactaacccctttctgcccacatctgtctgtttcctcttgcctactctgcctgtctgctcctcctgccttctcagcaagctagtgtggtcagctttccagtgcccccctccaggccgctgccacctaaccccgtgcccaagaaactccaggtaaatctgggctgggccttgccctggctcaggacaggtgggaggtgtggtgcccaatcgcagttctcatccctgcttccccccagtggtgttcttcattaggagaccagggtgccccctcagccttcaaagtcccagatgcagcaaagggtgagcctcccgccatggtctctactaccacctggtggtctatagtaggactgcagccatccagggactccgtgatcgatctgcaccttccttccccggggctctgcgcatgctcccgttttcctctggacactcccacccccaccctcggctgagtttgcatgtcgacccctgggtagtgtctgcacgctcactaccttggaccatgctttccaagccactgctcctctctttgttcaggctgcgctggctgaccgatccaatccccccactcgccctctgcccgctgaccctgtggtgaggcgcccaaaggtaacagtgagggggaacaggacattgcctctcctacctagagcaatggtggcaatgggagacaggttgcctccctctgtgcctgacggcatgtatcccagtggcacctttggtagtgacaggtttgtttggagacaaaagtgaccactagcacggctcttagaacccctacattgtgggtgagaaacatgacctctttccaaactggccttctttctcagtctcaggggcctaccaaacccccacccccaagaaagccactgcctgccaacccacagggccagcacccaccaggtgacctgcctggcccaggagatggaagcttgccgctggtggtgccctccaggtaggtgaagagggtgttgctgaggtt

SEQ ID NO: 28075 - DNA, 1673 bp, Mus musculus
aggagggcagggtggcctgattggctcgcccgcccctgggggtagcagaaggtctccgcccagctaagggagctctccacctcttccctcccgcgtcccggggcagggaatgtcttgttcctggcgctccctccctggggccagagggcagggcgggccgggcgtcttaccctcttctcctccctacctccccgcccaggtgcaagcgggagccgcctctgctgcttgctgcccctgactcacgccgcccccgggctggcgggcgctgggtgtgggatggggtgaggggttgaggtagccttgtagggagcggacaagctagcgccatctggtggccatgccctgtaagggcgagcgctaccccccaaccccaccccccagcgaccacttttcatgagctagggtcacacccagccatctaggcctgtgaacgggtgcccccttgccaacatggtggctaggcaaggcaactcacttgcccctgggaaaagtgagctgcggagcagacccagaggtaagggaacctttcctcagaccttgcctggcactcttaggactgagtccacccccgttctgtacatagcctcttctgatggtcttgttgaaatccaatttcacatttttaactatcagttttcctggggtggggaagagtcttcaccccaccccttcctcgctgggtgctggacccccattgcggcctgggctctgccttgcactatttacccctttggcctagtggcccttccccctcctggaaaggggcaggttcaggggcccggtgctctcctctccccatgcacctccatgcccatttgcacagctgcccaggtacccccaacagtggggaagggccacacagggaggggtggcgggaccagtccctgtatctatttaaaaagtgatgatgtaatatattaggagggaggtcaggtaccctgggcctcatcttagcatttcaggtgataggggagcccagggctggagaaacctggggcttagtcccagagagtggagacagtggcctccactctctctccttgtggcttccccactcagtgccttagtgggggaacgcattcccctcccccattcccttcatctacccctgcccctgcctcgggtgtaagtgacaggaagaaataataataatttaagattcatatttgtgtccacttttggttcctttattgggggaggggggcggcagtgggaggggtcgggagggtctgaggctggggaggggtcttgtttggggacagggatttccgaagtggtgcctggggttctgggagaaaggggaggcccacaaagccagatgagcttctgggagatgctgtggacgcttcctctgaagtcactgctttctgtcctggttcctgggaggagaggaaggaccagtaaactcaaagtcactggtgggtaacctctgccaccgtcccagctcgggccctaactgccgcccttctggcatccatcccagttcttcctttcctctcttctttgtttttataactctgtctctgttttgttgagacggggtttctctgtgtagccctgtccctgtagaccagactggtctcaaactcacagatccgcctgcctctgcctcccaagtgctgggattaaaggcgtgcactaccacctagtgctctgaggacctggcaactgga

SEQ ID NO: 28076 - DNA, 1101 bp, Mus musculus
ggactccagtacctagcctcccagaccagagcatcttctaaagggatcaggggatgggaacaatgaaatgcaagtctgcctaggatcacaggaagggggggcctgcagaagcagggtagagccatgtgagaaccaggaaggtggtctggatctgctgactccgagtgaccctattcacttggcactgcacccggaaagccagttgcttcgtctgtctgaaccgcagttcccttgtgcatgacatgaaaggtggtttgggagggtatgggccagaataagcactcgcgctcttttaaagatttatttaatttacatatatgagtacatcaccattggtctcgtcagacacaccagaagagggcaccagaccccattacagatggttgtgagccaccatgtggttgctgggaattgaactcagggcctctggaagagcagtcagtgccatctctcttaacctcaccctctacttgaccctgcaggagaagatggggagccccgaggatgacctgattggaatcccattcccagaccacagcagcgagctcctgagctgcctgaacgagcagcgccagctgggccatctgtgcgacctcaccatcaggacgcagggtcttgagtaccgcacccacagggctgtgctggctgcctgtagccactacttcaagaagctctttacggagggaggagggggaaccgtgatgggaacagggggtggtgggacggcttctgggggagcaggggccggtgtgtgtgagctggactttgtagggccagaggccctaggtgccctgctcgagtttgcttacacagccacactgaccaccagcagcgccaatatgccggctgtactccaagctgctcggctactggaaatcccgtgtgtcatcgctgcttgcatggagattctacaaggcagtgggctggaagcccccagccccgatgaggatgactgtgagcgagcccgacagtacctggaggcttttgccactgccaccaccacagcctcaacctcaggaatgcccaacggtgaagacagccctccacaggtgcccctcctaccgccgccgccaccgccacctcgacctgttgcccgtcgca

SEQ ID NO: 28077 - DNA, 1115 bp, Mus musculus
gcctccaggtgcctgtcattaaaatgggcacaggttgggagggcatgtatcgaaccctgaaggaagtcgcctacatccttctttgttgctggtgtatcaaggaactgctggattaatggtggcagggaacacctcctgtcacccctgacaccaagacctgcatccctcaggtggggaggggagggcagactctcaggaggtgtggctgcagcttctggggtggaacctgcagcccagctctcccatcttttctatagccctaagactcctggagccagctggccttcaccaaggatgggtcacaaagaactgaagaaagaaccacgaaccttgctctgagctgtccatccatctgacctgcctcaccctggggaatctctcctcagctcccatctctgctgtgctcctggtacgcatgagcttggctcagactccattgagactacggcaggatctaatattcctccaaaaattggcacagtgagcccaccaacccacgtacttgaagaactaggaatggactgcccctgaaatgcctggtaatcactccactataaatataataaataggcctcgaggccaaaaattctgaacattcaaaggggaatgagggcatgtgtgcttggaaagggcttagagccagagagcaggaagaaggacagatctcgggagtagtgagaccaagaaccagctttgctgaatctctgttgccaggagggaagagcaaaacagaaaagccatgttcctcccaacttttgtgcagagaggacagaatggagcaagccctattctatgaggcctgggatgctaggatgaggacccaaagactcagccttttcccagaagatgtgacctaggcagctccctgtcctaaggaacacgggaagtgtactcagctagtcccagttcagatacactaagacaccctaagagaaagcacccatgaggtcataccaccccttcaagcctgtcacagcacacgtgtgacagcacataatctgcgtgagtgaatggcctcctgacttgccgttggcagccaccagcacttgctttctttgaactgttagcagcctgtgcacatgcgtatacatcaacttgttcatgcgccatcccca

SEQ ID NO: 28078 - DNA, 1201 bp, Mus musculus
gaggggactctttttaaagccacatatatcctggtgatggcccctgcaaatcactggatctgttccagataagcaaagacagttaattctattgtaacacttctgtgcgtggcagaaagggcaggctctcgggctgtgtgcacctgcatgctgtgaagagtccgtagcactgcactgcgcagtagcatgcactgtcgactgctcagaatgctgggagtttctttcttagatttcactgtttcttccagaacctcacatcttactgttccgacggccactgcccaagaagccaaagaaatgaagccggcgaaccgccttccggcctcgagcggtccacagctgtcctcactccctgccatctttctgatcgcgtgaccatgttgctttcttatttctcactttgatatgtaaaggatacactgtttgaatgtgctggtacctgctttgcttctggagttgagccaccagtgccacagccctgtcagatgagtgtgacctcaaagccctcgtgtgcgcgggacccagcaggccatattagtcatttggcagaagcatgtgaaatctagatcatggctgttacaaggatggtgtgaatttgctgacgtgttttttactattgggtattgtatttatgatgacttatggatttatgtttcaatgtattggaaattttgcattttatctgacagatctcttccatgttacaagccttgattaaaggaagttttttataatcttaacgctgtggttataagactgtcccatcctgtaccctcactccttcatttcctctgagccatctcctctcctgcacccaagtgatacacgatggaatcattctgactctatacccttcaggtggataatggaaacttggctcattgcaggaaagaggtttagttgaatgttgcaataactaatttataatgttctaattggactcactgtaaaagcattcactgaaatgtatttcacagattattagcctaagataatgattttattggtacagccttgtcccatcaaagcagatgaaccgatttacatagtccagtcgtattgtcgtttatgcagtcccaacatgtgaacacctgaagagcatgcaaagacatgggagtgggattaagtgctacataggactccagcctctgtgagtaatggctggggctgaatttcaagtactgagacctccaaagtcatt

SEQ ID NO: 28079 - DNA, 1682 bp, Mus musculus
ccgcataacatatcccactccctctgcttccccttaaactttgtgcctttgactatcataggtctgcagatacttaatgcagagttctcaggcccttcacgtgtggacaggggttactgccaccttggcttctggagccctgtcctattcagcaccccttcctgtgtctagggagaatagggacaggagtggccgctatctgctctgcctttcggatgtgcagcccttaagagattgccccaagcctgaatatggtggcgcacgcctttaatcacagcactcaggaggcagagacaggaggaattgtgaggccatccgatctacaacagagtgagttccaggacagccagggctatggagagagaacctgtctccaaaaaccaaaaagagcgattaccccagagccttcttcctgatggtagcggggaggggcaggactggacccatcttgctcagtgcctcctgacctcaatgcctttcctccaaggggtctgtatacatttctcaagcctgctcctcccatgtttgcatgtgtgttatagtctacagccaaagtatagccctcactgtaaccccatcctgcctccctcctttgggataggtgtgtgcgtctgacttgggcctccagggtgtgtacagtcagtgtgggttttgtggaggcaataagactgaagcagtagacaatccccaataccatttgcaggtctggaactgcactctcttttttaaaaaacatgtatacattttagggctgtagatttattttcctggttttgtttttcattgctgacttttgagcacagaattatgataatcaattacatttatacatcacctcgatgacttttccaaacttttatttttttttttaaacaactgttgggattttactccctggccttaactaggacaggattgtaccccactcctcccccccccctttttctttttcgccaagacaactgagcagaaatttggctgagcagtgttgtgggactatgatgtgatagttttagatcctaccttctgctttcgggcagctgcagccagcacagaaaccttgcaagctcactctgtgtgtaggctttctggacaaggaatggtcgccaaatttttggtttggatgtcttataccaaagggaaatagtcttcattaaagttcgtatttcttttacctcggcctctcaactcctctggaaagtctgattgatgggggctgtctgtgggaggtggtgacggaccccatctgggctaggtccagtgggctccaagccagcgccagcccgcaggcaccagtttgcagagatttggggagctgcgaggctgtgcggtagggacgtatctgcaaggcgactggctcgcggcgggaaggggcgtgtccggaccgcccccaggcccacccgcagctcgcacggcccctgtcgagtggtgcgttccactctgctaccgggctagctgggcggcgacaggcgcacttcggaggagtggcgtggcgaggcccagccttcctgggtgcggcgtctgggcccttccctgctttccctccccaccgcgttccgtggtggtgacccattggagttccggttccggttgctgtggctgcgggcgggcggtgagtctggagcaggcgcgcagttggtgcaacggctctgtgctttccccctcggcgtggctagggcttg

SEQ ID NO: 28080 - DNA, 1621 bp, Mus musculus
ctgcagagtggctctctttctttccttgtcttccaccactggcatcccatctccatggagcagaaacatgtttcctggaagcagaaaaggaactgaggcggacaggcagaaaagcctgggttgcttgtcttctgttgttgttggttttgtttttgtttttttctgggaacttgtgcactgagtaccttcagagatccaggaagctaaagcctggttgagcagagccattcctagagtctaaccagaggctgcaagagaaaatgggctggaggaagttttagagagcaaggatgtcctgtgcgcagatgaccccaacacccgtgcctacaatacctgtatagccccatggctgctgctgtagctcttggagtcgaatgttcaaggttccttggctccctgaggtagagcccctttccttgggttcaggagacaaatggggatttctttctttttctctgtgtccctttgcttcccctgcacctgacttactccattcccctcggagcaccaaataccttgaggaaataggagagttcctgactagggcagttgtctgggcttcaagactgtaggtaagagatgctgagaggacgtcttcctcataccaaagtcattgtcctctctcagcttctcttgtggttgtttctctcagtgaccatgttttgccaaaaattggtatatgtggtctgagtgaccagagtatttgaagttggggctcccctagaagtctggactgcaggtgtaaccccccccaatctggtgcacagtgggacagtgctacttttcagctcttggtgccctcatatcctctgtctccagaaaacatttgggaaggcacgaagcccttatacctcactccttcccctgatgaaaggatccaagggaggccctgccatggctttggggacatggggccgagcagcaggaccctcaaagccatggtaccgcaagctggaagaacctgaagtggtctgcttagtcttttttatcctgcgatgtcatcgtgggcctggcgatccagcaattaggctaggtttatttttggttttgtagcactccctgccagagatgggatcgaggcctgatcaggagcctctctcagctgctcttctttccagctaacccaaaagtccattcctcaaatgggtggggaaggcaggcttgggtgtggccctcctgagagtcggaggtgcccagcttgaccgcgaaggctgccctctgggatgtcccgtctcagccctcacgctccctgcatggggagagagaagactcaagagttggcagccttggaagctgaggagggcgagggtggacctgcttcttactctgccccccaattcctaaactacacgaggcagcccctctacttagctttgtgttgtgctatggttttgttcgcccatgttacctgccgctacttttgtgttgtctccatggtttgtaaaatgctcccggggagggcccatccccttgttcttctctgctaccttttggaagaaagtgggttggcagggatgtggttacaggatctttttgtacggttggattaataaaatgacttgaaaatccaaacaaggactcctttgttcatccgcagaaccgttaggctgagcccctgcta

SEQ ID NO: 28081 - DNA, 1194 bp, Mus musculus
caggtggggtggcctcaagccaggtcattctccgcagtgtggtgtggtgttcttatcctcagaaagagagctgaagggaatggagtcagtgaagcaaggaagcagacattctgtttctgccacacaagaatcgatcccttttttggagcgtgctgtggaggacagggaacacgctaacctgggtctgcagaggtgagggagccactaggtggcgctctggcttcacatttctctagacttctccctcctgcccctggtcaccaccccacaccccagacaccctacccattgactagctctcaagaattcccagaatccccctggttattcttcaggaacgccccgccccctcagttcaaacctctacgccattggtagcacactgggcttctagctctggaactctcccagggactctagggggcagtgaccacacaggtcaggtcaattaaggaggggattaaggactgtaagcttactgggcaatggtgatgcacgcctttaatcccagcccttgggaggcagaggcaggctgatttctgagtttgaggccagcctgatctacaaagtgagttccaggatagccagggaaacaaaacaggactgtaggctctagaaagtgctggaatcgattttgaattatttagcaatgcttttatgtcactgttaaaaggcttttaagtgcagtggcttgtttaatttccgtgctagacaagacaggtagaaagggtggctcattccacaaatgtttaaacagtctgctgtgtggtgctggagggatggctcagccgctgagggcacaggctgctcttccagaagccccaggtttgattcccagcacccacatggtagctcacaaatgtctgcaacttcagtctccagggatctgatgttctcttctggccctgtaggcaccaggcacacacacacacggtacacaaacatacacgcaaaaacaaaaaaagatcacccatcaccacatttcttgaaaataaaagtctattgtgtatgagaaccaggtagtgaggccctaggcctgtagaccctttaatatgcatggaatctgcagcagcaggagctctggttagacttaaggcacattaccttacacaggtcagtgttgtaggctgggggctccaggaaggagccgtctggtttagaaagacaattatattccctgtctctctggaccag

SEQ ID NO: 28082 - DNA, 1225 bp, Mus musculus
agactcatgctttacaactcccgtgtgaatgctgctcttcccatactcatggcccatgagggccttggcccagacaagtcaaatctctttctcaaggccctgtttccagccctgaggacacagcctcccagcaggctccagcctgggctaacagtgtcaagccctttcgggttgtctgcagttgttgatccagtcttctctcagtaggcgatggtcagagcagagtgatttcatcaggggctgcctgggagctcagcccctggtgggaggccacacctacttcccagaggttctcagaggagaggcacagggtggagggctggagtctgactcctctgttcttcctcccaggggtggacgatgctgagtcagagtgtggtctggacaactttgggaactttgactgggtcattgagaaccacggagatgagcagtgcctggaggatcagctggagcacctgctgggatttattcaagccaaactttagtgatgaggcttgaggggacgagcagagactgatgggcctggcgaacagtggttctgccagatgtgggtccccagtcccagccgaggtcagcaaacagacagacagtctggcttgccagaggtctgggcaggatgctcgtgagtagtgggcaaataaagaaacctctggtgttgtgttttccctggagaggacactctgcctctttagggcacttatagggcaaaggcaggcgcatgagttttgcctgaggcaggaacattgccacacccatgatgggcaggctgcagagctgtgatggtggtgtttccctgtgtgtacgctctcagccctggagtcctaataaacttacttggatcacagctcagagctggagactgatgatttccctgacatcttggaaaacctgggggtggaacaaggccatggtggcgcacgcctttaatcctcatgcagagaaggcagaggtgggcagatctctgagttcgaggccagcatggtctacagagtgagtttgagggcagccaggactacgcagagaaaaccctgtctcaaaacatgatacaaaacaaagaaagaaaggaaggaagaaagaaagaacataaatctggggtattggggtaggtatgggtcccactctgccttgtacttggctggaatgaatcctgcagaggttggcctgagcctaaagcctgggacaggtctctgtgttacaagtgggattggggtctgtagttctt

SEQ ID NO: 28083 - DNA, 1190 bp, Mus musculus
acggtgaggacctcgcttgcgccacgctgggggtcccttgtctggtgatcgaaatcacaccatacaacctcctgctctcgaaggacccggaggccagagcccccctcttggtgcttggctccttctctccaggctacacttgtttcttcagcttgaggttctgtggtgcagtcacagtctctactgttgacccctgagagcaagggacatcgggacatgtggcccctcaaccacctcctcctatgaatccacccacacctcaggttttatgattttggctccttctgcttactcctccacaactttaccatgtcacctagaaatgacccattcttctccccaccccaactctaataagattccaggcctgtgctggaaggacgtagcctggaactcagcccggttccataatgacccttctcagtagttctttccacttatatgtacccacctgtaggctccctgcctaggcatccctcgtacaacccctctttgctccctgaatttcactaaagaatagtgccgttcattgaccccacgttggatctcctcttactaactctggtgtaactaacctttaattcctctttttgccttggctcgtagcagctttgccacttcctccccactcctggggtcacatctgcttatcctaggtgactgtcaccttttctggtggtgacagcaatgtgtgttttgagcggcagcagtgccatcgctccccagtaggcatcgttccatcctacctatccttggtcaggaggcatcttccatgcgtcctgccttattttattccctagtgtcccttgaggaaattgttgggtgcaattttataacagctggtactgcgcgatacagtgctcacgttgttggataacgcccactgtaatggtcttgtccctcctggagcacctttatccacactggaaacgggagttgcctggggggaagacagacgtgaattttgtggttcttggaggctttgattcattttttttttcatggtgttttctagccctttctgccaccaaaccaggtcgtggtttggtgaggtaactttgggagtggagtaataatgagatacttgagttttgatggggcctcatctatcccagctgaggcttacctcaccaagctaggaccaccaggagtggctcagtcaagtaaagattgtagcatctttggtactg

SEQ ID NO: 28084 - DNA, 1128 bp, Mus musculus
agaagacagtccctttcttggtcctctttgtagctctgctgctgtggtttaggaatttagaaaggaaagaaaattaccttggaaggccagacttgacataggcctttaattcagtactcaggggtctgaagcagtataatccctgcaagtttgaagctagcctggtctacgtagtgagttccaggacagcaaaggctacacagcaagaccctgtctaaaataaaagccaggtgcacacctgcatccataacacttggcaggtggaagcaggaaaattgggattatccttgctttataatgagtgtaagactagtctgggctatttgaaactttgtttccaaaaactaaaaacaaacttgccttaatagggctgagctgttttctagaactgggaaattactgctaagaccatggggggagggggggtggcttggggctctgggacaagtggactgaggaaaagtctatccactacttttgtggtaacattcctttgcactcctgcctcaggatacagaagacctagatcactatgaaatgaaagaggaagagccagccgagggcaagaagtctgaagatgatggcatcggaaaagagaacctggccatcctagagaaaattaaaaagaaccagaggcaagattacttaaatgtacgtgccttgtagagaggcaaggcaaagggttgttgggtcccggctggggagtggcaggccactgcccatcagtatagagagccgtctcctttattggatctttccagtcctatccctagtccagactgccttaaggtctacccaccagactaaggagtaatggtgtttcccctcgttcccagggtgcagtgtctggctcggtgcaggccactgaccggctgatgaaggagctcagggatatataccgatcacagagtttcaaaggcggtgagttcgcacaggggctgcacaggataccctcaaaaaggacacagtatgaagatggagcagtgggtaaaaacacttgccaccaagtttcaggacctgaattcagtttccagtcccacatgacagagcctctacttcatacccatacacgtgtaataagcatattaatgtaattatttttaaaaggatacagtatgctggtaagga

SEQ ID NO: 28085 - DNA, 1241 bp, Mus musculus
tctgctttattagattatctaagaaaagacttgaactttggattctttctagccattcccaagttgtgggtctactggaaacagtagctcaatgtggttgcattgtgtagtgggacctcggctcagctccaggaactgcacagccggggagaagtctgcagagccacagctaccagtgttggacctgctgttgtgagactgcacgcagtacatggagcctgcatctccctctttgagcttgctgtgggaccacctgcctgcagactggaggaagactgaagtgacagaggcaagggacagccaagccaagtcctggagcttaggaaacccagccctggaacagttgcctggatgtttgctaatgcttctgagatgggcattcgagtttggccatcttcccccactccccatctcttctagggatttgaatgtcttgctgctttagggggatggagagttcaccagtcctacttgatgctgctctaattctgcctacacccaccaggttaggggtgctaatacatggtgaggttgagacacagaggatacaaggggaataagtcattccatagaactgaaatctatctcatagcctgtaaggcttccttctgaacttaacaccagccagggctggcatgtagattgtgtttttagtaacgtgtactgtgagctgtcctctgtataatgtattttgtaatgtatttttctcatctaccaaaggatgaatcaaataaagttatttaaatagtttggctctaataaacttatttaaagaaaccatgggttcatgtccacttgctatgatggaaaatgccaggttctgggaactgtgacaccagctcttgacaatcctccattttccttaccaacccttttctaacaaaattttaagtttaggcttcttataaagttacatgcatttaaaggggcagatttcttctctgcagtcggaaaagcaaggaatttgtatctctgacccaggtaactttgcctgggttgtagcccacagcctaggggctgcttttcggtttccatgccacagtttagagggcaggacagggcagcaagcagtagccaggagaaggtatccgtcaccccaagcttgagccatgacaacctttatttgctggagtgatggctcactgactctacatgcaataccaaaaaacctaggcaagggcccttccagcctccccaagtctgccccggcatccaaagatgaggaaaatttgctcagctgc

SEQ ID NO: 28086 - DNA, 1147 bp, Mus musculus
cgcggcggcctccagcgtccagccccggggaatgcggcggcccccggcccctggcgccccacggtgtctcagctgggcctcctcactcttctgctccgcggcctcgacgctcccgggccccctgatggcggcgaaatggttcaaggagttcccgcttactctgaagaccgcgtcggagcgcgcccggcccgggggcgccggcggcaagccgcgcaagaactcggagactggcggcgcggcgcccaccccgggcaagggccggaagaactcagcggccgagctgggggccagcaaggcgagcagcggacccccaaaggacagtcggctgtcccgggacagcctgcagggtctgatccaggccgctgctggcaaaggccgtaagaactcccgggtcaccgccaccgccaccgaggaggagccccaccgtggcgcggtgaccaagagcgcgggctgcagcacctacatcagtaggctcatcaaggtggacacgcaggagaagaatgggaagagcgcctacccgggcggtggcagcaccagcagctccagcagctcctcttcctctgcgtcctcttccccgtcctccctgggccctgagctggacaaggccaagataatgagacagcaagacacggtaagaacacagcatctctatcctcctctcagttgtggaattggaagggcttggggggggggggcggggaaggacgcatgggaacctgatgaaccccaatattcattaggcataagtgaagttgaagatgttttctaaggccttcctctgtattcattctgactcccaagtgactcttcaaaactcactggagaccttgacagcaaggtttgttgtggttggtttttgttagttgtttcaaagagcagtcgaagggaagggaaaggaactggccttccaatgggtgtggtgtactgtggttcttgttttcatgtttgacatcgaggggtctatcaagctagacttctgtaaggcttacgccgcctgagtatgcaaaacatcggtagcccgtgaactgtgaagcgcaggttgcccatcttccagccactcagtttcagctgctgtgcaagcggcaaaggcttccattcattctgtggctgtactgtacattcattctgtttattgtactgtagccat

SEQ ID NO: 28087 - DNA, 2131 bp, Mus musculus
cacgaaggctgttctcacagcactgacaatcattttggcttctatgtgtagtgcagggctctcggtttaagttttcagtagccacaattccgcccagcaaatgtcagtcatcatgtattaccttgtatctgtgcattgttcactgtgttgaacctagtttagctcagcattctagccatgaagccttatttttttgcttagccctccctattcagcaaatggagccgttgtctttaatggtaagaatatcataaaatgtttctgggtggggaaggatttgggcacacgcctcatgactctgatgaacaccggcctggcaggtcggtgtcacctggcctctgccacacgcctgagcgtgctccctccatatttgctttacatgagtgaaagtggaggagacagagtttatatatagtccagtcttcatggtagggcatggggctataaaaagcaaaaatactgtagactagtggaaggccagtgagggagatgttaaagctgctattttcttcttaggttgtgacacaagctgacaggagccaggggactcacagctgggtggtagcataaagtaccctatcctaccgtgctaaaaacaattaagcgcagcagggtgtcctaaccactcactggtgagcctgccagctggggcttgtcctccgagctccaaaagattgagctttttgtccttttcttcctgataaaggtattttcttgttatctttattcctttgaattgattctgtctggggggggggtgtttcttctggtgaaccctcaagatgctgtgaacatctatagcatctagagagctgtccactttttctcctttagcaaaacttatttgtaaaaaaactgctttctttgttccagagtatggacttagacagggacccctgagaacggaaggcatctgtaatccatccagctgtccaggaggtccaagagtccaaaactaaccttggcaatagagcaagggtgtctccaaaaagaatacaggaaggcaaagggcatttctacttcctgtaatagcatagcagattctgtccagatgtattctaatcactgtctgagggggcgctggccagtaggatgtgctgaggaggcagagacaggaggagttgaattagaggttactcttgggttacaccttgggccaaagaaatggctcagaggtggaaaatgctgcacttgtagaagaccctggttagttccagtatccacatgctgtccaggtctaggggatctggcgccctcttctggcttctgagggtactgggcaggaacatggtacacatacaagcaaaacattcatgcacataaactttttaaaaacctgaatgaaggaatagaaacaatggaggaagtctagtgagtatgcacaaaagcaagtggtggtaaagaaacaggtgtcccttccggttactgagaatgctttaataggcatctgtaagaacagcctgtattgttggccgtttagagtctgcgtctgtggtgctggagttcagtcactggtctctgccacaggaaggggagctgggcagagaaccagtagggaaagctggctcttctcaacacaggtcctaccttaatagtccttgtttggtgtttagattatttaccagtgttgcccctgttggataggtcttaatgtttaattcaagaacaactgtaagtcattctttgcttactagatgagtctgttaacattttcgttaggagctaatgacttatttttcctggcctcagtcaagaagccagtgcatctagattcatgccccctgtacatgcttctgaaacttaggatttcattgctcccttcctgggaccagacagccattggtcgtctttctgtcttctgtagccagcacccatttaaccgtaaactcccttgggatcaatcttttgtcttctctttgccacctacatcccactaacttggccttgaagaaacttgacctgtaagagccttccctgtaatttagcttcccggcttcatggaccctatgcaatgaaagatggtgttctactgccatctactgggacaagaaaaaaactgcagttgagaaacaagggtgcatttagggtagtttgtctcaaggatttttgatacagtccataaatcaaaata

SEQ ID NO: 28088 - DNA, 1114 bp, Mus musculus
cagatcgtgatcttcaggggatcggcgactgtgctcactcacagttcttcagtccctcacagggctctgctgttacccaagccaggcagagcaggcagacggaagactgaaatccagatagctcattatctctgtgagttaaatggctttgatctccaagttgttttcactattgttgtaaggggatagcctccccccaacccgtatcaaaaggatgctttttccttttgactttttataagctaagtcaacaaagtctgtttcgtccggtttcgttcacttcacacaggtgtatgccctcagctgcttctggtctcaattctgtgcaagctgaataggtgttccatcctcgggtcattcttactggagtttctgcagcccacaggctgccttgtcaacagtaccacttaacaccagcattcagcgaccaggcagccaaatgcctggtctagacagagatgatttaaacatgatctttgttgcatggtagaaagagggaacacatactggttctagttctaaggttcttagatgtttggtccttctggcattagtgaaatagctttaaactatttcaagggagaagccttggccacacccacgacatttggccgacagtcctttctctccatgagccttgccttcccacctggctgaaagctcacactgaatctttcctgtgtccttggtgtcttgggagaaagggaaccccggtgtgggctttactgccggcattggcttggagccagcgtggagcagagcccaacagggtgggccaggcttagttatggtgtgccggtttaaggaatgcctggtttgcctggttgcctgggctccgagctagagtttcctagtagttctttatggctgacctagttgggaaagactcccatactcagcttcaggtagaggtggtgagaaaccttttcctttgtagaggcagcatcatcccaagagcctacagtgaggtgaggtgggaggggcaggcgctggggagggtctgccaaagtgggagggggcaggccagctggggagggtctgccaaagtgggagggggcaggccagctggggagggtctgccaaagtgggagggggcaggccagctggggagggt

SEQ ID NO: 28089 - DNA, 2033 bp, Mus musculus
ggactgctctgtgagcctcaccagcttgtagaggtagagggagtagaccccagggacagcgccggttcaagccttggatggggccacagtgagggacaagatgtggaaccaaaaacacatgaaaaaagaactatgagattgggtccagccctgtcctgcttggagtccacagggagactataatctccatatttttttactcctattccccagaggggcccttgcgcccttgttcctgaattacacaagaatgtatcacgccgggaagccagagacctgctggggccgccaagccccctcatatcatcgtgtgtcctcttggtttatatttgtgttgtttggttttgtctttttttatttggtaagtggaggaggccttcgtgtgactttgtgttgtggttagtgtcttaactctcctgggaagaggagactggcacacactgggatgccctacctggtggagtagcttgggagggaccaaactacttaagggtgccagtgtcctgatgggatgcagaagctacagatagggatgaactgtcagcaagaggttgttgggagaacagaaaggaagcatagtcctggctccctcctcacctgtgctgtggcctccccagggcacacatacgggttcttggatctccaaagtcctgctagtgctggactagagcccagatagtggctgcatcattctcagtaagccgtagctgataggaagtgtagtcctgagacgggaaatagggtttttggattctgaattgagtccccaattccttagcgtactcacttccaacttcccttccttcctacccctcattatccggtgctttttctacctatccctgaggtgagactgaaaagggaagctgacctctgctgctttggcccagtaacctagggctctgtcctcaggctcagcctccagcaagagtgctaggagttagataaaacctgttcgcccggagaccacttgcccggtctggacagagcatctttggacccctttcacagcccagctctccaagtcaggtacatattgagcttgttgttacctgtcgcttccagaggaatctcttcctcttgtttgctagcagcagagtaaggaggaagactggcgtggagctgggactggtggacacagaatctagatgtcccatgcagttgccccaaaggagctgggggtgaggtgcagggaagtggggtgcaggaaggaagggaagacaagactggggaatctcttttggtcatacagtttacaagcccagtatcatgtctgtttgtctgtctcttaaaaggaaagtctgatttttataccaaagaggaaatgatttttttttgtatttggtttgtctatattatataaatacatattatatatatatagctatatatatatattatttttttgttctctctcattttttagggagggaggaaagtaccatattgcattgagctgtaattaaggaacattctgtataatttatgacatttctataattgcaaaaattatatcattttatggatataaaagaaaaatgcctttttataaaattccaatttctgagaggtgagtaatttgtctcttttctttgatgtttaaacaagactgtgggtaaaagcacaggcagaaaccctccaggggttttgtgggtggatctgagtggaatcagagtcttcagggcaactctccccagtcctgtggcctgagttccaacagctccgggcagcgagagctggcatgggccaacttactctgtgtgcatgctcggtgcacatgcgatgagtgtgtgcatgtaccctaggctggcctccagctcccagcacagctacagatgaagtctgtcctgcctctgcttccccagtgctccagtgcaggctggaccactgtgacaggttaacgtggttaggatttgaacccagggctcggtacattctaggcaatcgagctgtatccacagccttcaactttccttttaaattttaaagccttttcattttgacgtaaatagaaacttaccaggttgcccagg

SEQ ID NO: 28090 - DNA, 1215 bp, Mus musculus
agcaggatggccaggtaacagcccttccctcctctctcctttcccttcctcttccttcctatcccttaaaactacctcccttttccttttcttaaccttccttaccaccaccttcacccagccctcaccagtgccagccaggggcacacagcacatacacaagcgcacataacatgaacagttagcaaaggaaacatgaaagaatgggccagattgaaacccttttatccggttcctttggtacctttctcctccacctcccatggcacagttgtccttatcctgtcagacctgggtcacaccttccctctaacctctcccagccttctcccttccctgacattatagctttcccttctaacagtggagttctattgtcaaaagtttgtccctttattttccatatatcctggttctgcctcagctaccatatttgcagatgattctctgttgccagcgccagcaggaggagcaggtaatgaaactgaataatatgcttgaaccaacctttttagtccccatttcacctccacagcctcagataacttgaaaagcctacccaatcacaaatcgggatacacaaacagaaacactgtgctaagctctctggcctccccatcctctctcttccttacccccctcaacaccctctttatctttctaccctcctcaactctggaaagcacttggttactagaattgaaaagattcttggggcagcatctggagcctgatgcctcaggtctttgtggctttgaattggtttcacattaattaatgtgtggtggtgggagaatctgaagggtggtaaaagagacctcttaagattcccaatgtaggtggctgggcaactaaaatagggcttttttgctctcaaagatagctttctacgtttcagcattcacagagatgagtgagaatgtaatcaccttgtcatcactcactttgaaaaggtcagaattctcatagttgctttgtttgttttttagacaagggcagtgggtagtggggaagtcaactgaacaagaatagaaccaactcaccattttatctccaaagttttcttgtccatttttcattttcttctactttaaggtttaaaaaaaaaaagtcaccttgtaaaagaggctatgtagaccaaattttctgtgcttgaaaagtaagcttcatagtaggttctaagtaaaaaaaaaaaatgagagagcatgactattt

SEQ ID NO: 28091 - DNA, 1180 bp, Mus musculus
aagctctagtactgaactatactcccaactttaatgggtgtttttggtttttagctagtccatcttttcgctagaaatataattggttgttttggttttggcttttgtttttttggtttttcaagacagggtttctctgtatagccctggctatcctagaactgactctgttgtagacctggaactcagagattcaattgcctctgtctcctgaatactgggtttaaaggtgtgtaaagtcacctctacctggctgatttttgtttgtttttacatgactgaccaatcattatcttttcaatttccctcaactattgttatccttcaagctttggagaaacaagggtgcattggagatgatagaaaacaagatggcaaatgaacattgggaggtatcattctggaagcctctttgcacattatagagtgtacagctgcccttcttttcataggcgacctcaccaaattcggccgcggggatgcctcctccccagccccagccacaaccttggcccaaccccaacagaaccagacgcagactcaccacaccacgcagcagacattcctgaacccggcgctgcctcctggctatagttacaccagcctgccatactacacaggggtcccgggcctccccagcaccttccagtatgggcctgctgtgttccctgtgagtaactgagtggttgtggtctccttgtaagggatccagtcctgagcaccatcctagatgctttcacagctacatgactccttagaaatacatgaggataacttgtacctttggcccatttctggcctgggaataaagggtatgaaatttttaattagaacaagaattgcctgatagtagaattatccaaaagaggactatgatactgtgtgtctttgctgcccctcctttccctgtaaccattgtctctatctctaaaccactctaccttttgatttcttgggtcaattctaaacattagtgtatcagttacttttttgttaatttataataccatgattaagagcaactcacagtagaaagttgatgtttggcttacagtttgaaggagagagtccataatggtgaggtcccaggagcaggaagtagagatcaagaatgcagggcagggcacaaaccctcaaatcctatcccagtgatgtacttcctccagcaaggctccacctc

SEQ ID NO: 28092 - DNA, 1160 bp, Mus musculus
ctagtattagtataggacatttccttggaatgtatcaatgtcactggctcataacttgtgtttcttcttgcagatctgaagagtgcaaatgattcaacagtgcacagtccttttacaaagcgccaggcattcaccccatcttcaaccatgatggaggtattccttcaggagaagccacctgcagtggctacctcgacagctgcaccacctcccccgtcttctcctctgccaagcaaatccacctcggctccacagatgtctccggggtcttcagacaaccagtcctccagccctcagccggctcagcagaaactgaaacagcaaaagaagaaaacctccttgacgtctaaggtacttgagcttcttagggagatgctgttttaaggcagggaggttatggtatttcaggatgagatagtctaagggtttatttggaaatttaaacttgaaaggaataattttatttctacaaaaagattgtattaaacgtttacatatttttttcctacctttttcatagattcctgctctggctgtggagatgcctggctcagcagatatctcagggctaaatctacagtttggggcattgcagtttgggtcagagcctgtcctttctgattatgagtccacccccaccacgagcgcctcctcaagccaggctcctagtagcctgtataccagcacggccaggtagaggaatcatcacccagaagacctcttttggtagcttagttttgtgcttacttcttctcctctggagaggccatatttctgactggataaaagtagtcaatcatagcattttgttgtgtgcttttaaagaaatacgttgttactaggattatctatgatttaaaacatttagataaatgccatttagatacttctagaatgtcttaagctcagtttgtttgtttgttttgttttgtttgtatgtgcagacatacacgtgcatctggaggcccggggtcaatatcaggtgtctttctcaaaaatcactctctacttcattttctgaatcagcatctctcactgaacctggagctcactagaccaatttggatagccaataagctccacgaaacttattgtctccatttccccagtgtactaagatcataaatgtcttcttcccagattttatgtaggtgttcagt

SEQ ID NO: 28093 - DNA, 1144 bp, Mus musculus
atatggtgttttgttttttgaaacagaattttgctctttaggccatgttgtccttaagctttaaagtagtcctcttgcattagctctaagtttactggtgtttgcaccaccatgctcagctgagtatatggtctcatattttagaaatactaatataatataatactaattatgtattaaaatcatagctaaacagttttaaattatttattagattttgatattcagagtagagtgtcaagcgtggtgcacaactttaatcttagtaattggagagaaaggcaggtggatctctgttcgaagctagttagagctacatagtgaaaccttacctcagaaaaattttctgagtatgttatggcccatggttattataattcaagtacttgggaggctgaggcaagagaaacatataaggcaaatcttggctacatagtaagactctgtattagagagacagctccctccttaaaaaaaaacccaaaaaccccacaaacccttgaagatttagtatttcattaaatcagtgctatctttaaattaaatgtttaactattttgtcagtttaacactcagttactttgattaatggaacacattaggactttacaagactgtagcatcggaatataaccttcatgttcatttaaccatgatctaagtttgcagggtatgttagaatgttcattcataaagatccttttctttcccaaactagaattgaccttgctgttctgttggggaagacaccatcttcaatggagaatgattcatctaatctggatccatctcaggctccttccctggctcagcctctggtgtttagtaattcgaagcagaatgccatatcacagcctgcttcagggagtacattttctcaccatagcatggtaaatatgaaaccattacactaaccccagaatcacatacacaggaccattcctttttcaatgattgtaagatagagcctcactgtgtataggctagtcctctgagagtacaaacatgagcatcattcccagctgctctgtagtgacaagtttgtagttttgtaagaatgtttttgttttaaacccaggtatggaatatggtgttgcttcagattatccacaatagctatgatttgcctcctggtctggtgggg

SEQ ID NO: 28094 - DNA, 1216 bp, Mus musculus
gggagggtccatttttaataacagagaggtccttttgtctgttttctttgttcagcttccacacctacttattctcctttcattaaacatgtgccaagtttttgtagttttctactactggtgttgtttctcttcatatcatcttgagtttggttttgtttatctttatacaaaataaatagatgttacttgcatgttctgttttaaattagttgctaccatctcattaaatgactgctaagacaaagctgaggtttttaaagatactgcatggcatggtaaatatggtggggaagagggtaggaaaggatcttaaatggatggatgtgtttatacgtatgtccttttgtgtatctcatccattcctgttacagctctgtaatccaattggctatgaaatcataatcttattaaaaactatactttggtgtttctaaagagtttttccctatctctgaagtcaacaacttctttctgtttgctaaattctaataatcatactattgcttgtcaaaatgttaatgcagtattgttgtctgaacatgttttatgacactaaatttattttacctttttttcccctcctaggtgcatggaggactgcaacagaagagtggggaactgaagactggaatgaagatgtaggtattcttgagctagtccttacctaatgcattctatccctaagttgtgtttagggatagaaaatggatatatttctgcctttcaaaatcactgctaagattctgacctaaaacttttacatccaaaatagtgttctgaaccagaacatttcacatatgttatatgaaggagactgggcatggacaggactctgtggaaccacactatggaaagggcaagtgcaggtgtgtaagtccaatacctgattgtcagattgacccaggaagatagactggttgggtagggtaccaacaatgaaattaggactgggaagaagctaaatggtagaacacttgtctagtatgtgtgagaatcttgcattcaaatcctagcactgcagaaaaattgtttttagttaagcatatggtaggttgtacattgagtcacagctgctaatgtcatacagctgtacttggagctgttgcattatttggtgttaagtcctataatggattggcagtggatagttatggtacctaagccttgagtttaaaatccagttgtttgtgaaacttctaactacccaatgccc

SEQ ID NO: 28095 - DNA, 1234 bp, Mus musculus
atgcatatgaataaaaatgtaataacagtcatatttattacactataacaaaaaaaatgtttttttcagtggcacacacctgtagtcacaatactcaggaagtagaggaaagatgattaggttttctttctttttttttttttttttttttaattacgtattttcctcaattacatttccaatgctatcccaaaagtcccccacaccctcctccccctgattaggttttcaaagtcagttttgctatagtatgtttgaggccagctcacactaaaacccaaaatatatattaaaagatggatcttgagttgaaaatatagctaagttgtagagagcttgcctagcatatataaaggcctgagtttgatccccagcaccactagaaaaaagaataaaagtaggtgaattaaaaataaaaataggtgagttaaaaaaaaatagatgaacttccttggtttgttgagaatagcaaagtaattggtggtaaagtactgataaaatggaatttaaactttttacctatgtttaaccatctgttttttcctcttcagtattcttccttgtaaatactgttatttgtatatactgtaaatgatgacgtcggtgggcactaaccgagcccggggaaactgggaacaacctcaaaaccaaaaccagacacagcacaagcagcggccacaggtaatgaatccaaggatgtgaatcaatgagtaactataccacctgatagtggtttccatgcagtgtagcatcattctgtgctttggggtgttgatttaggttccttattgttagctattccatggtctgataactattagcaacattctgtgtaaatgtgtttacttttttattgtttaatgttgtgaggcttacgacttcattttgaatactgtgctgtgtccagtattagagctagttgagcagtacgttacttattctctttaaccaatatttatcaaatataacccttttcgtgaaagattttgacttctgctcttattttcccctaaggttttgaggccttccttacctgagtttttccttccccatgagaaactagcatattcactattcttgtacgttaacaaatgagaccatagagcaatcattctcaacctccctaatactgtgaccctataatacagtttgagttatggtgactcattcatttatatataaagaaataattttttttgctttttcataactcattttgacactgtaactatga

SEQ ID NO: 28096 - DNA, 1841 bp, Mus musculus
atgctggaccagaccctgctggacctgaacgagatgtagacctccccatccctgccccgcggccattcctccctctgaccttgactccgccagaggccagcctccctgaagctgaccttgaaactgagggctgatctttttaactgaaggctgctttccctcctgccacccccttttactacccctcttgtctttttcacaaaactgtgtcagccttttcccagagttccagttggaggggctgaacacctttgggaacaatatttaagggaatgtgagcacaacgcagtgtcttcaatgcagttgtgatacgcacattgtgattactttctgtcttagcaaccatttttaacattccaagcacttctgccgcttggagcagcacattttagcctaatggatactgtctcgccatggaggagaaacccaggattgggcctgccttcctgagagccagcagagcccaggcaggctccactgtgggagacctcagtgctctgcaccaactcttagccaaacaacagggggattctaggaagttagccaaaaacaaaaactgttctgggctgtgaaggttttcagctttggtgtctttgaacaattttacacttatttttattttttactttttccatcagatgtgaccaaataagacaatgagacgtctgagacagccccacctcccagggcctcatgcatgttagttaggcaagcgtgctaccgttcagccccagccctgagcccaaacttatcgcagctctacccctttcctaactgctcaaagatggatcatgccgccccttagtgttgtggagacctcttagaggtcacctgcccccaagggagacagagaaaggaaaattatgtttgtgccactgatttagccacatgaacatcatctcatcgccctctcctgaagctgcggtctctaaagtgccatctcattgtgctttgtatcagtcagtgctggagaaatcttgaatagcttatgtgtaaaaaaacaaaaaacaaaaaaaaaactttttaaattttatattattttgaagttttgtttttggggggttgggttagcttggccaagccattgactgtgagaattctttgcagtctgtgagctagtggtgtgctgatctttcaagtgtccccacccaattgccatgttcaggtggtttcttctcggcctgttaggtgggcaccctgcagattcctggcttgtttgtactctcctccgaccgaccgaccggagaaagagaaccccgcagtgcaactgttttgatactgaatatcgataagtgacattttgaaataaagaaccagtccctccacgatcagaccggcttgactttgttaaacgaggtgcgctttctccacggtttacggaccctgttggcagtctttgtggctgacagcggacagacttaacatagagcacacaaaaatagcatgggttcagaatctgcctgtggggtttaggaggtagcacccttggtaaagtgatcacccaagcaccaagactgagttaggtttccagcacccatataaagactaagcacagcacacggtctgtagtcccagcccactagactagacaggagcatcccccgagcttactcaccagccagttagccactcaataaacttcaagttcagttcagaccctcaaacgcttggacatggcactgtacaccttgagtcccagcactcaggaggcagaggccagcctggtttatgtagtagtttcaggacagccagggctacacagagaaaccatgtcttggggaaaaaaaaaaagagacctgtctccaaaaatgatggagtcctggagaggtgccttggggatt

SEQ ID NO: 28097 - DNA, 1275 bp, Mus musculus
atataatatacatatttatcatttgaagacatgggaaatttcctttttttatttttgtttgtcttactatgtagcccaggctggccttgaatgcactgagtagcccaggctacccaagagcttaagatactcctatatccatgtccacttcctgaatgctagaattaggcctggattactaggcctacttaaatatacctaaaagactgctttttttctcttcaatgctgaagactgacaaggtctttataagaacagtttatattccacagctactggtctacagctgtttttatggtagcagttgtagcattcctctgtgggaaagaaactgttacacaatttaatgcctctttcttagccacacagaaggaggattacgtgtgacagacacaaggcaaattgtgtgtgtgtttgacaaaaagatggtctgttttaaaacaaatttgagatttgacttaatggtgaaaatgttgagtgtttaggtgcacttcttaaatcttatttagagcctgcagttgttgcgaagtcttccatcctactagatgtgaagccttgggatgatgagacggacatgacaaaactagaggagtgtgtccgaagcattcaagcagatggcctggtgtggagctcctctaaattggttccagtgggatatggaattaaaaagcttcaaatacagtgtgtagttgaagatgataaggttggaacggatatgctggaagagcaaattactgcttttgaggactacatacagtccatggatgtggctgcttttaacaagatttaaatcattctcaagtcagtgcacttaaataaaagcttgaaagataaaaaaaaaaaaaagaacagtttatagctgagttacatcaatccttccaacttttacttaccattttatttatttttctttttttactttttttttctttttttcttttttgttttttccagacagggtttctctgtgtagccctggctgtcctggaactcactctgtagaccaggctgtccttgaactcggaaatctgcctccctctgcctcccgagtgctgggatgctgggattaaaggcagtgctgggcatggaaccaggcacagtgaatgctgggaaagctctctaccaaaagagctttaggagtcattttttttatttatttatgtatttatttatgtatttatttaaaataatatgtaagtacactgttgctgtaccagaagagggcaacaggtgtcattacggatggttgtgagccaccgtgtgattgctgggatt

SEQ ID NO: 28098 - DNA, 1155 bp, Mus musculus
aataaaataaataaataaatcttaaaaaaaaaacaaaaaagaatcccctgagcacagtggcttacacctgccatcccagccttgggaggtggagacaggagtgtgagttcaaggccatcctggattctatgagattctgtctgctcgggaatttggtcctcgcaatgctgtcgctgttcttatcacacttaatcctttctgcctggaagaaaggttctgctccccaggaatttgttgtcatcgcaggaaattagtcttgactctggagattcattttctggaaggttcatttagcaagaattaaaatacattaagcatcttagaaagatgaattactgatccttctcaaaacctgacctcagcagggcttagtggcatttttaattaatcctttaatcccagcaccaggaggcagaggaaggcagatctctgtaagttccatgacagccagatctgcatagagggatgctgtctgaaacagacagacaactgccagatctttctcactggtaccacatggatctttgcagattaatggaagatcaggatgagtactctgaaaactacatgctccgtgctgtcactgttggacaaaccacacttgtagccattgccacagacagaatggggaagaaattcacatcagcgcctcggcatatcgaggtgggtaaagtccctcatgtcctcacgtcacagcattggccttccctggttttgtttttggtttttttggtgtttttgtttttgttttttgggacagggtttctctgtgtagccctggctgtcctgtaactcatgctgtagaccaggctggcctcgaactcagaaatctacctgcctctgcctcctgagtgctgggattaaaggcctgcgccaccactgccaggctatacattaatatcttttgctggggaatttcctgtgtataattaactattttcttccctccaagattaataaacacatgggacatagttcttgtagaaagtttagaaagcacacacaaaaatttaatatgtatatatgcgtgtacatatatctgcatgagctggtgagtgcctgatctgagggctgacggcacttgagttcatggaaaacacagtagagagagaaccgactcctggaagtttcctctgcctccacacatatgacatg

SEQ ID NO: 28099 - DNA, 2212 bp, Mus musculus
cggaactccagcagctccctcagccctgcgtgcttgtgtcctggtcttctccttagccttgcactcagtatttgagggcctggctgtagggttgcagcgagacagggctcgggcaatggagctgtgcctagctctgctgcttcacaaaggcattctggcagtcagcctgtccctgcggctgctacagagccacctacgtgtgcaggtggtggctggctgcgggatcctcttctcatgtatgacacctctgggcatcgggttgggtgcagctctggcagagtcagctgggcctctgcaccagctggcccaatctgttctagagggcatggcagctggcaccttcctctatatcaccttcctggaaattctaccccaggaactggccacttctgagcagaggatcctcaaggtcattctgctcctagcaggctttgccctgctcactggccttctctttgtccaaatctaaggtgcttcaagagaaagggcaggggaggttggctatcaggtgcccctgtcctccctccctacccttctcaattggtgggaaatagaaagaagtggagaagggaagtagtgaggaccaaagagttctcttagatatagggatgggacatttggactatgaataatgagatggaagtgggcagagaagaggctagccccagacccaaagaataagagatagcgaagttactacagacgtggtcagggacattagaaggaggcagactgctacagtcagaggccaggcagtacatctcagagacaagctgacagaagaactgagagttaggcatccagcctctttgcgataaagatacagaggctgtaagtcaaagccagtatcctgttggttctagcccatctcaccactctgatggctgaaatggttcctcctcctttcttccctcctactcttatatttctctcttgtcttccactaagggactagtgccaaatggtctctctgccagttttcgtaatttatctggcctctcctgtcctcacctttttgggttgctctgtgtagccttggctgtcctggaactcactcttgtaaaccaggctgggcttgagtttacagagctccacctgtctctgcctctgcctccttaatgctgggactaaaggggtgccatgccaccactgcctagctcactagtctgttgttaaagtgccaaatacccacccacccaccctttaggtttgtttgcttttttttttttttttttttttttttttttttgacagggtttctctgtataaccctggttgtcctggcctcaaactcagagctcagtctgcctctgcctcctgagcactgggattaaaggtgtgtagcacatgtattgctcacctgccccctttttgaaagcacagtgctgaggtgctggggcctgcctagcacctcagtggagacctatttgctcttttatttaggccccatagtttggggtggggaagaaatatttgctgaactggtctggagtgagagaaaagtaggtactgacaccagacactacagaaagtggacatggtggtccatacctagaaaaaaaccaataacctgccaaaactttatatctgaggagtccggggtggagggagacagactccctcccccaggattatttttggggagggagggctgtgcataggtctgtactctgtagaatctattttactaactgacctgttttgggatatgttacccaaataaaagatgtttctatacacttctatggtatctgattctgtgtgtgtgtgtgtgtgtgtgtgtgtgtgtgtgtgtgagagagagagagagagaagagatggtctgtgtgtgtgtgtgtgtgtgagagagagagagagagagagatggtctgtgtgtgtgtgtgtgtgtgtgtgtgtgtgtgtgtgtgtgtgagagagagagagagagatggccagtcgtgtgtgtgtatgtgtgatggccagtcgtgtgtgtgtgtgtgtgtgtgtgtgtgtgtgtgtgtgatggccagtcgtagaggatatgaatctcagttgcatacagttgatttaagatccttgttttcactcaccccacttctcacctttcctgaggatgaccaaatttctcttttttctcttcctttctgtctccaccccttcccttcctcgttttttcttcagcttccttggggaatccctctccctttcccgttcgtaggctcgggactgttgt

SEQ ID NO: 28100 - DNA, 1149 bp, Mus musculus
agggcccagggtcagttagatgaattttgccgggaagaggtgaacacactggagaagtcgtgggagtagtaaagactgggttggagttatttacatatgaaacaggggtcgcaggaggagatggaccgccgaaagtccatcggcaggggaatggcccttgtctatccccagccgagtcctttcaggtactccaccgaagcatcctcaatcttggattatgtgttgggagcatagtttgttttatccctaatctgaccctttctgaatctgtgatcacagtgcctgtgctcttatgggacaactaggttccaaggggaaagggcccctcgagtggtttgatcgggctgtgctgggtatattgggacaggaagtcccctcctgtgtcccttccctttgcttcctttttcaaatatttcgtgtggtttcctgacttgagtcaaggtgaagaccattgcgcacagtatgggtcttggtgtatggctctgggcgactgtgaggaaaggtagagctttgaatcgcctaattgggctaaagaatcaccctttcctttgactggggatgtgctgaactctctaggcaggtggtgctacctgtggctcagtgtctggaatgctttctagagtcctgtatgtgtgggaaatactccttcctaggaagttacacaaagaagcatcgggcctcagacaagttgtttttggaagcacacccctgacccctgccttggtttcttgcttcccagggcaggttgtgagggaattagggtaaacactcaagagtttgcaggtaagcagccccaacttagggacacaattatttttaaaacagcaggtgagggatattgcagtatctttcataataaagagcttgaaggaaactaaggggagatgatggagcataaataccatatttcaaagctctttagttctatatatgactgactgactgtatttatgtgtgtatctccctctactctttgagtcctgtgtgtgtttcccctttgatttttctagagaccacatgttctagtttatgagagttcaagatagataaatagagatgcaaatctggtgtgtgtgtgtgtgtgtgtgtgtgtgtgtgtgtgtgtgtgtttataacctcctcttaaccaccatgaggattatgaactat

SEQ ID NO: 28101 - DNA, 1197 bp, Mus musculus
aagtagcctcccttcccctctgaagcactctctcagcctctagccccttgcaagctacccgccaggcttcttcccaccttcagcaccctggggcacctcaggactcttggggcttccactccccagggtcaggccatggaggcaggtgagataagttaccaataggctgttgtggccccgattctgtcttgggctgggtggcgcgggcatggcatgactggagctgactcctacagtccctttgtgcctaactacagacacctaaggatcctggagatgggaaagtcctggttgcttggccaactaggtaaagttaagctagggaaaaaaaaggatacttgaaatctgatgagcagaagctaaatcttgggttttgtaagccttcctaggcatctgtaaagtcttctagaaatgaaaggatgggtgctttaagaacattagctgcatcggaaggttcttgtggtgttgctacaagagcagagacctttgacaaagcaaaagttggtgtaatgtggtagccagagtgaatgatgtcattgcaggccattacagaaaatactgtgttctctgagacgtaattgtagcgggcaaggagaggcaggcctttaaaggaataggtgaggaatatgtcagttgtgtgttgtagagtggagtttgggttctttgggaaaaaagggctgatgtcactaagaaggaaggacctagtggtctctaaggagctgtggtggaatatgagagtttggtgatgtcacaggtggaagaattcaagattggctgatcatttatcctttccttagaagaactaggaagaagaagggggggtgtccactatcgttgccatgggaacattatcctctcttgctccatctcttcctcgattgaccattccagatgcagtgagtgaagcagaggccatggcagaggagcggcctccccggttggtggattactttgtggtggctgggcttgcaggaaatggagcgcctatacctgaggagaagtgggttcccgagcctaccgggcccctgcgccctccccggccagctgaacctattacagatgtggcagtcatcgctagggcactgggcgaggaggtgccccagggctatacatgcattcagacttctgcgggtggccaccccttggagctcagtgctgggctcctgggtggaactcaaccagtcatctgctaccgca

SEQ ID NO: 28102 - DNA, 1164 bp, Mus musculus
tacagagtgagttccaagactgccagagctacgtagtgagtccctgtctcaaaaacaaaaaacaaaaaaacaaaaaaaacaaaaacaaaaaagacaaacaacaacaaaatgctgtacaaacattagcctctgttagcatgtcatttgccctcctcctcatcttcatccctgagcattctggggacatggaagctggctacatcttgcaaggtgttcactcatgctccagggccaggctgcttgccctactgacgttcccgggagggttgtagcttcggctgtgcctcagttctcctgcctccttagaacacagaccctctctcgggaaaagcgttacttcccacactgaccggtaatcaggaggctgaggcaagatgtagtgtttgagttcagcctagggtatatgacaagaccctatctcagaaaaatatcaaaataagaaaagatctgcctcggcattatacttatcttggtgtgtttctaaccccacctaggagatgaaggttgcacagcgaatggcacagaagtcagccactgtgcctgagctgtgggcccggtgcctgctgggtcactgctacggactgtggttcttatgcctgcccgcctacgtgcgttccgtaccctcccgggtgcgtgcattacatacggcctaccacgtgttacgggaaatggagaaccgcaaggtggtgctccctgatgaggtaggcgcccactccctgcgtgttcatacccgcctgcgatcccagccaggatatgcgactggagggactgtgagaagggagaggtggagaccagttaaagtgggtgggtagcccagggttaagtagcttcaccatcaacaatcgcaaagtgcatgggcacgtgcaggagaaaacagtggagacttccgggagcgggcgagtcctgggagaattggaaggctggaagaagatgcttgctgagatttggtctcctccatcctgtgcctctcttggcctaggtgtgttaccgcgtgctgatgcagctctgctcacactatgggcagcccgttctgtctgtgcgagtcatgctagagatgcgacgggcaggcattgtgcccaacaccatcacttacggttactacaacaaggtacttaactggggattagaggtagaatggcagtgtatactccggcctgtgtgggg

SEQ ID NO: 28103 - DNA, 1149 bp, Mus musculus
tttctgagttcgaggccagcctggtctacagagtgagttccaggacagccagggctacacagagaaaccctgtctcggggaaaaaaaaaatgccactgttcctggtctgtgtgttttgagataggttctgtagcctaggatggatatgtgtgggagaataacctacttcttcctttacttccaactgctggaattatagttgtgtgcccaggttctggttcactagctgttttgagacttaatctcattatttagaccagattggctgagaacttaccgtgtgtcagactttgagcaaattgtttgactgtttcctgagtgctagcattactgacatgcactaccagactgggcaccatgatcttttataatcctttttagtcttggtgcattcccctttttctttttggaggtagagtctcactgtggtcaaggctggctcagaggtctatattcccttggccatcttttaacttttaacaaagttctcttgctttgatctcctaagtgctgaggttgcattcatggaccactgtagttgagttcttcttttttttttttttctaaatgttttttttttttttaatattgattgattgattatatgtaagtacactgtagctttcttcggaagagagcatcagattttgttaacagatggttgtgagccaccatgtggttgctgggatttgaactcaggacctttggaagagcagtcagcgctcttaaccgctgagccatctcaccagccctctaaatgttttaatattcatttatttaatgtatgtgagtacactgttgctgtcttcaccagaagagggcattgaatcccattacagatggttgtgagccatcaagtggttgctgggaattgaactcaggacttctggaggagcagtcagtgctcttaaccactgagcttaggctgacttactctgttctcttttaaactgatcatatctagtctttgaggtgttctcctaaataccttgaacagtctacttatttttgttaaaaatattcagtaatgtccactcattgaaaagataaaatttaaacttgcttagcattcaagaccatttatgatcttgacctttgcctttttatccagtatgtcttttcttcattacagttaatatgtgaataaat

SEQ ID NO: 28104 - DNA, 1312 bp, Mus musculus
acctcagtcttctacaagagtagcaagtactttgaatcacttctccagtccagtttgtttaattatatacgggatctggcattatagctcaggctatcattaaattctagatcttcctgactcagacaccaaagttctggaattttaggcaagctctattatctctatcgtgaatgtttttgttgttgttgattgtttttagagaaccattcacaagagtttagtgtttgattttgggcactttttataattaaaggcctttggagactatggcatatttgaagtttgtttttattgctgaagttgactggagaaatacttaatatagatgtcgttggacagtaatagcattgggagttagctctgttatctgtaagtttaaatgtatgttacataaattattttttctttacctcagcatttctttcacttcacattcctacatgaggaactttattctgatatttcattccataggatggatagaatgacagaagatgctctgcgcctgaatcttttgaagaggagtttggacccagcagatgagcgagatgatgttctggcaaaacgactgaaaatggaggggcatgaggccatggaacggctgaaaatgttagcactgctcaaaaggaaagatttggcaaatcttgaggtgccgcatgagttacctactaagcaagatggcagtggtgtcaagggttatgaagagaaacttaatggaaatctcaggcctcatggagacaacaacaggactgctggaaggcccggcaaagaaaacatcaatgatgagcctgtggatatgagtgctagacggaggtatggaacagtttagctgcctttagggattgggtcgtcttaaaataagcttgtaaaaatgggatgaatctcagtgagaggatggtgctttttatcctaaaactgccctttttgtattttgctgttttgcaacagggtctcattctattgtagtcatgctggtcttgaacttatagcagtcctcttgtctcagcatatcagtgctgggattacatatattagctaccacatcatggcatcctaaagcttctagaaagatctgtgtcctctggcttgaactgagcaagagtttctcttttttccagatgaagctagtagctcataatgaaagtcattattcttacctaagataaaatatttatttctagggaccagagaggtgacaaaataactcatagtgtttgctgcccagtcttgaggactggacttcaaatcctagttcccacatcaaatggttctcaaccgcctgtaattccaactcttaagtggtccagca

SEQ ID NO: 28105 - DNA, 2852 bp, Mus musculus
gcaaaaccgaaaaaaaacagaagacaaaaatagacatcaacaagaaaacacatgccctgccctgccctgccacctcccctttattcacactgctgcgatctgctctcctgctgctctgtcttctctcttcgatttcctttaacagtgagctggatctttgcctctgatagaggtcagaatgaggtcctgggagaattcaagtcctttgatgtgtgtttctaaagtatgttttatgctataattattatcatttttaattatattgtgtgttttccctttgttctgtagacggttaaccccaatcttctgttttctttacttccctaccaccctctgctaaccctcctccttattgaaaaaaagtatatatatatatatatatatataaatgatatacaattcaatgatcacatgcagattgcagtggatcctcagctgccaataggaaataactgagaatgttagggacagagatgttgagtgcacttaacctgagttgtggagtgggtatcatcagacaaagaggaataacatcccacctatggttggttaggatctggagagtttaggaggcagtgttatagtaatgaagttgagctctgtgacaatgagtaaaagagcctagagggaaaagcttaaaaacaaaaactacctgttgtttaaccatgggctaaggggaagaggggttacataagctcactagtgtcccaaagagggctgcagccacgtcctgaccccagtgaggacacagaagtctgttccaggccaaccatcttgagattgtttatcttattttctttgtaaaattgtctctcatcacaccttcataccctttaacaagtgttcatcttccttctaaccatagtcccagaggaatgggtgtttccaggctgcaggtggctgggtatcctagaagttggaatcggtatatgtggatcatgtgacagaaagggaaactaaacatagaggaggaggaagaggtttctccccgaagttgagattctagcatgtttctatacctgtaccctctgagtgctgagagataacgggtgtagacccccccaatcaggttggtattccactctgactctgctatgctggctgtagatccaactccttagagccaagcagtttgtcaaaccagttttggaccttagttatacaagtattgtcctctcccaaaattttgttcattttgccttttttttttcttgcctttttttttttttttttggcactattaatgtagagaataaattgaattgtgcaatgtcgctgttctgaggttagggaggttattaacatcctgtttgcccacactgtggcaaggaggaagggaggggaccaagctgtttttgaggtaagggaaacctgaaaatgaagggtctttgctttcctcagattgtacatgtagtaaaacctgcctctacagccctagaagctgtcagagtgtactagggacactttgaacaaagatgtatgaggagttttataatattttgcccttgataaccacctggggaaattccctcatttttatttttaaaaactaaatttttttaaagtaagaaggcacttttaaaattacacacacacacacacacacacacacacacacaaatacacaaactatacacctttcccataaaatttgggggtagggtgggaaaagaagctaaatcaagctcaatccccccactctggtctcttctttcccaataccccagtgccactgtgggtgattatactggccctacgggtcttcctgggttttttctttcttccctttccctcaaatgtattgagcacttaataaaggagcagagatacaactgtgtctgggctctccaagtggtgaaatgacctggaagctagatgctagtaacaagtagtttgagcaggtcatttcaagtatttttctggggaatgtggtgcccctgactgtaagtggtgggggaggggggctaatggagctggggttgggattattttaaaattatatatatatataaaaagatatattcttacatcttttccttgccctctgtgctttgaaagcactgaataaattgatctgtttttctcttccacaaaattggaagatttttttttcttccattttttaaatgttcttaccagtcatcttgcctcgtggcatgtctgtctaacctctccctaccccgtgatgaagtgccatttctgttaagtctccctgacccccaactcagaggtgctcagaggtacaaggtgcccaagtttgtcagttgagattaaaaggaacagagaatgtgcaataccgtccagctggggcctgtccttgccctgagctaggtcctctccctgggagccaggccactttgactagggtttggaggtaagatgtatggaaatggggagtggtggcaaggagagcctatagttcagtgcctgtttaggtgctgaggccatagggaagagggtagggtcttccctgtttttatcccttcagggtcaattacatagaagctgcttataatactagtatagctctgtggccctttgctcagtcactgaggtttgatttctcatcctctttccctatcatcatactcttcccaggaattagcaagaggggtgaaatctttcttaatcatggtaaagtattagccttccatctcctcccttaggttctgccctgtccccctttcttaaagcctctacattttacatcactgattgccttgtgtccttccaagacttttttttgtttttgttttttgttttaattaactcccatcctccagctgtgggcccttgtagacactagccctcacgccctaaggataggaggaaagaccctgagttcagtgttc

SEQ ID NO: 28106 - DNA, 2068 bp, Mus musculus
ttcctctagaccttgaggcactacaagcagtcattcatggatggtgtcttattccacagcaacctgaaacgggtggattagtggcaaggctggggtaaaattaggagacagaagtccttatttgtcggttttattttgtcagtagaccacaacatctgaactccctccattgctgaataagtatttttcctgcattatgagatatatgtatggtagacatttctttttaaagaccccgagataaatgttttcctgccttggttacctttcctttcccctttaagaggaattagctatagaaccgctttgtaaagatgcttcttgatattttacttttgttcctttccccaaccattcccacttccccttctctccacagccccgatcccactcatcctaggctcccttcctttccatcaagatcttcattagcttatgatatttgctgccgagatgttataacaaggactcattcatgtatataagctatttcttgatccatttaaaaggaattgtacattgtgtagaaaaaaaaaaaacatgaaaaagagaaaaaaaaaaaaagccctagccatggatattgtgaaactgtgttatgtcattttgtaatgtgcccgtttgtgtatgatccgtgcaaaagggtttctggggaaggggagggtggagggaggcaggactgtggagggtggggagaggagtgggccgggcccagcacactgagactggcagctgctccaaccccatccctcccttaaagatgccacctcccccaccacccacccctattttgtgccttgccctccccaccctggagtaatctctccaggtcaccagcactgccttggcagagcccactccctaccccagcctgcccactcttcctaccccagcattaggttgataatgtgggaaagtgctggaggttgggaggtagccgaggaatggggcagttcctgggggcattgaaaccaagtattattatgaattgtaattgtatttgcactgttttccccctctgattgcatcagcatatatacaatatacctatataacaaaacccagtgtcaaagctttcttatgcaagggattttcccaacccttcagaaaaagaacctcatggacttctaaaagggtaggttgtcaggagatagtagaatagtagaaagaaagaattttaattgtcctaaggaagttctgtccgaaccatttaaggatatgtgattgagttgaggctgtctcctgtaaattatagggctccaggtccaggacagtacaaagaatccaggacacaaggaggcacagtgtggatacctggggcctactgacttgctgggtgagctttggtgaaactggtatcttcaaccagtgaatcgagggagaaaaccactgacctccatgctctaaattccacaattcttcccccatctgccaaaaagcaaaaagcaccttgagatgagggaagtgctgggctgagagaccagggaggaaacaaaagtggcgtgctagtgttacttgtgtgactgtaaagtttggaaagttgccagtcccttggttcaggattggtatgggagaagtagtgatacagggtgctgggctgatggcatcttggcccttgtgtttctagccatgttgtgaccagcctccaagcctcacctcacaatcacaatccttaagggtggttaaccagcaaacaccccccaggttggtaatctagttgtgagctataggatgtggaaatttccctcatcttggtaacaagtagggctcagatgtagcccatatctttccttccctcagatctcatctgaacccccaaaggcaactgttccacagtctgtctccttcaaaggcccagtttatccctccccccagccccccaccccaccccacccccaatttcctgagctgagtatttctattctctagttattgccattaaagcctggaaaaaacataggttgatgggtgaggccttggtgaaggtggaggatagattggggtgggtggtggggagcagggaggtggggtggcaatggccttccctgaatagggtgggtgggagggaaca

SEQ ID NO: 28107 - DNA, 1390 bp, Mus musculus
aggcagctctgtccagccctcgaagtcgaaagaatgctacccagccccccaatgctgaagaggagtcaggctccagcagtgcctcggtgagcctctcagccagtgcacaggagggagtaatgggtgcgggtggggtgtggtcagctgctgtccaggttagtgatggccttctgctcccctcatttcttccaggaggaagaagatacaaagcctaagcctaccaaacgaaaacgaaaaggctcctctgctgtgggttctgacagtgactgaggcctggatccccaccctgccccagcctgagaaaggtccatgcagccccacctctcctctcctcccagggcctccagctcttttcaccccctcttcactgctgctcccactggtaggttctcacagcaaccagaagctgtgcagaagcagatcatggtggaagtcctttgccgccggctcctccccaagtctccgaagagccatttggacagagaaaggagtgatgaagaggctgctgggcagaggagctggggtgacagcagatgctgtgtgagtgggcatttccccctgcttcctgtcagtctgcatttgtagtctgtggacggtggtcattacaccagtgtgaagtgggcatctgacctggtgtgggcggtgcccatctgggcagatgccacagccttcagaaaagaacccaatggcagcgtgagaggctcttgctgcacctgggatgcttgggttggcccggcattggcacttcaagctgagccagagcccaggggagtcctggaggcaagttcctcagaactgtcagatggcctgattttctgtggttctgtttttgctttttcttttggcaaagataatcgagttttaaattgtttttaagtgataatgaaacaagccagaacatcttttgtgcctgagttgacatctctgttcgtcctgtgtatataggcgcctctgtttaacttgtacccctctccccactacacaatgtctccaggagggacttggctttgatctgagatccttcccactagagtgagtcagacatctaacctttccacttagaagctgatgctggcaccatctccctgcaggctggctggccttgcccattgcttctcgggaacttcatctttaggaggtggggtggggtgggaaggggaggggaggggttacttagtagataaaaaacttgccacacacgaatgaggaccagagttctatggtggcttgcctatgatcccagagctcagaaggcagagactgggtccctggagtcagatggctggctagctatcagtgagctcagggttcagctgagagagcctaccttgacgaatgaggtggagagtgatctaggattcctgacttgtaccttgggcctccaccccat

SEQ ID NO: 28108 - DNA, 1195 bp, Mus musculus
gttcttggtggctctgggtcccaaccacccaccagatgttgaggcacttgggccttgctcccttggccattctttcttccatgtccatagctgtctgccttctctaccctcagaggggggaggtggggacggaacatcaaacgcgaagggtcagggccagggaccacagctgccttcatcaccctgacagaagagccagctactaagaccctagagaaagtgagaggttgaggaggggacttgtggggactgtagcattgcacctaccaccacagaaatggaggaatctcatttctcaggctcctacagagaatggaaccaggcattccttggcccaaagagaaggggaaagggatgtgagagcaggaagccaccagggccaagaggcgggggtttgggaaatcagtaagcgacactgtagccattcccaaggtaagccatccatgtatgcacggctccagcatgctctgattcctaggccgagtgaggagatggtgaagatggtgctgagcaggccctgccatcctgatgaccagttcaccaccagcatcctgaggcactggtgcatgaagcacgacgagctgctggcagagcacatcaaggcgctgctcatcaagaacaacagcctgccccgcaagaggcagaggtgggctgcagtggctgctgcccggggatgctggcttgccagtcctacagaggattggtttgtgggcgacgtctgatagtctgagtcccacagctgaataccctcttgagtcctcaccagcactgtgccacttaggactgcctctgacctaaggagggacgctggaggagtggacagtatctgactctctgccttctcatgtagcctaagaagctctagcagcaagctggcccagctgaccctggaacagatcctggaacacttggacaacctaaggctcaacctagccaacaccaagcagaactgtatgctgcctttcttcttgcctcttcctcttggaccagtttgggggaggtgctgccctggttcagatctcctacagctatttggggcagggatgacattaccaggaccactgctcaaacccatagaagaaataattttctgtgctatgtataatcttcctgacatattaactgtgcttcccttccatagtctttagccagacaccaatcctccaggcgctgcagcatgtccaggcaagctgtg

SEQ ID NO: 28109 - DNA, 1156 bp, Mus musculus
ttctctgcatgaggacctgcctctatctatctgtctgtctgtctctctgtctgtctgtctgtatctctgtctgtctgtctatctatctatctatctatctgcctgtctgtctgtctgtctctctgtctgtctacacacacacactctctcttgaaccttttctgtggctaagagtctgctcagattggatctctcctttgccaggcataatacaaagatttgtgtacttacacttcccacagaactggtcattatgtccaatctctgtcagctctggctttatctctcggcacactccccccaacactcctacacacacacacacacgccattcctcttttcaaacacagtctgctcatggtggacatacacagatactgaaacctggggtttacaagacatagattcccagatttgtagctgtttggttcagtgcaggaccagaaccctagtttgtgataaagagtggggcaggctaggtgaaagccatgggtccagcccatgatcctgccccttctctttctctccagtttccagatgaaactttgaggagtggggagctgctgaacatgattgtggctgttattgactctgcacaggtaaacattgagccttgacatttccaacaaggcctggagggcaggacttgggaaatgagggtatgttttctctctctaggcctgtacacgaaagcccacatcctcaggcactctgcctcccattacatgtgggtgccatttaggccattagggctaggaagggcaagcagagctcaagaggctggggtcaaacctgtcctctctgatatttctccatgttctcaggaagttcctgtttgtgcagggaaagctgagggtgggcaggtgtgtatgtgtatgtgtgcatgcatgcttagtcatgggttttcaggtaggggtatgtgtgtgtgtatgcatccttagtcatgggttttcaggtgtgcgtatgtgcatgcatgcatgcatgcttagtcatgtgtgttgctcttaccctggtcttctcttcagttcataataaaaatgtttgggccatttctacttaacctttcccatacacaggacccctacagattgtagctttgcataagtccatatctgaatggggtgggtctcatttctactcatggccactcagctcc

SEQ ID NO: 28110 - DNA, 1569 bp, Mus musculus
ctgttttgtttgctttctaagtgtctttgtgtttcaggcgctgcttgcagattctggctgcaggactgttcttgcctgggtcagtgggcatcactgacccgtgtgagagtggcaacttcagggtacacacagttatgaccctagaacaacaggtattaagacaaccacgaaatgagtggggttctggccagaaggccaaggaccaggggacctgtttcacacggatgttagtcatgtatagtctatttattttggctcatttccctctccttgttcttcaggatatggtctgctacacagctcagactctggttcgaattctctcccatggaggctttaggaagatccttggccaggagggggatgccagctgtaagttatctctgtggtgtggttcaggggttctgaactatagagaagccgtatctaaaggtggtctaatattaatgaatatagcttatcttgtttactgggatatttgtatgaagtgggttttatccctgtttcttctagatcttgcttctgaaatatctacctgggatggagtgattgtgacaccctcagaaaaggcttatgagaagccacctgagaagaaggagggggaggaagaggaggagaacacagaagaaccacctcaaggagaagaagaagaaagcatggagactcaggagtgaccttccctttactgtttctccccaagggaagagaggctaagccagccaccatggggctttagatggcggcatttctgtggcatagggagacagcaggaagggaaacaaactgaaaagaaaaaaacgctactgtttcgatagtggccaagcagctagaagtctcccatttgtgactgcgtatgccctctgtccgtctgtgaggaagcagaatgccacacattcccaatatttaaacctaaccactcccaaccaagtactttgtgttgaaatgctgtaaacggtcattgagtatctgggaatttttttttttttttctaagaaaaatgattaaagtacttcctactagggcttttggttttatttttcttcaatatgtagcaactacatttggcttctataacctcagtagaattcaagttgagtcttttattataaacattgagattgctgttttaaattatataaattgaaagtaatagattcctaggataccattgtgatggctaatttcttcagcttggcctaaaataacctgaaatttctgcaaaggattaaccctaaatgtggggtgaaagcatcttatgagctcagtgcatggacagaataaagggataaatggcagagtccagcattcccttctcttggaagcttgatcacctcacattctcatgtctcaaaataggccccaaaatatgcatcagtgtgaccatgtcctgaaccctttgaaaccataataaaataaatttttttgttaaaataaccagtacaagcatttatttaataatgttgagcaatacttaatattaacatagtcaagccagggtggccaagaggataaattatttaccttgactttacctaagtcctcagttgtaaacaaagtggagttacaggt

SEQ ID NO: 28111 - DNA, 1158 bp, Mus musculus
aagagccaaagccagctggacatataagcaggcaaatttctgagtttgaggccatcctggtctacagagcaagttccagggctacacagagaaaaaacagtctggggacaggggcagaggggactcagttaaaaccttttacagcagtcattagattccccatcttcctgtcttacaggaacgactaaggcggttaaaccacagcgtggccaaggaaacagctcgcaggagagctatgctggattcaggagtttaccctcctggttctccaagcaaataagcacgggcccgtgacctgagtatacaagtacaattctccaacggctttgtctggtagacacgagaagattccaggaaagtctctgtagacctttgattttttttgcactatgtactcattcatgtagccgcctcaagaaacatgcgtacggcaggactatttcctaaagaacctccatcacagcttgtccatccaagaaagagcctctaccttttgggttttgttaatcttgagacaagatctcagtatgtagtcccggctggcctcaaacatgtcctcttgccttagcctcctgaatgctgggattataataggcatgtgtcagagtgccgggctcaagcctctatatatttcccccaaagaatactaagtaaattaggcatcgtgtggtagaaaattgagaaaacaccagatttagtgagaaagtatactcctatttctccccctctgcttcaccacagttcctctcagaaggtaataacctttccaggatcatcttacactctataatgtttaggttaactcctattaacaagtttcgcaactgttgccttcattgctacccaaggagagcatgccagatagcgaggatccaaggtcaaggcagagccttgacagctaagagtcctaagcttttgcgatttttttttttgtttagactacatattttaagggctagagggatggctcaatggttaagaacactggtgattcttccagatggcgtccagtgcttagcgcccacatggtgactcacagcagcctctaactccagctccaggggaacccaatgcccttgtctggccttttggcccagcacacacacacatatgatgcagatatatatgcaggcaaaacaaccatcctcataaaataaa

SEQ ID NO: 28112 - DNA, 1456 bp, Mus musculus
atacttaagaggactcattgtgtgtgcttttcatgtgctgctttctgcccagtgtgtttcttgttttttcagatctctcctctttgccctgtctttgagcttgtctcagctaggccccacaactataaaggggcatttttttttttaggacccatcaaactaatgtgtaactgtctttttcttctctctctttctctcgtttggccaggtcggggtatgataggtcggggaagagggggctttggaggcagaggccgaggtcgtggccgagggagaggtgccctcactcgccctgtattgaccaaggagcagctggacaaccaattggatgcatacatgtcgaaaactaaaggacacctggatgctgaattggatgcctacatggcacagacagatcctgaaaccaatgattgaagcctgcctgcctgcccgcctgcctgttagactcttgttaaagtcaccacatctataaaacaaccttgagaaaacatgagaagaaatctgatcgatgctggaaggacctgtcacaataggctgtggacttacctgccaccagttggtgcatttagtctgttctgtctactttttgatactgtgttatatgaaaccctattttcctttaaatttggttgagtttgttttgttgtttatccagtcacccagatatctgtttgaacaggaatgcgttggccttgtgagtagaacagttttctagcctctgcctgtcatatactcttgacatttttaaatatttcctctgttgatttttatgatcccagaaggagctagagttttcactattgggtggtctttgggatagagttctacatctttctttaaaagcttcttgttaatagctggagctaaaggtgtgtttgctatgttgatagtgaaggtagtaaattggaaatgttggtattgctactgggccacagaatgggtaacacgtggtaccaactttgatttggtcaaagttgatgttgcctacattgaaaccacatagatggtagctgacaagctaagttggaatttccaccctaagaaaagatttttaagcttataaatctctccttttggctttctgtctcatgcccaagaggcttctgcacctctcacagagaagaagcagctgttggtgtagcacaagtggcagaagagacaagagtgggaaactggtaacaaactgactgctgggaagggctcatgtgctgctcgtgctgaagtgcagttaccttccacttaactggctttatttgaccctcttgaaggtttaagttcaaccatattttgtcagctgttcagtttcagtggaatcttgtatttctgattcattataacaaattgttctctcaaaatttaacccaggctttctgtttatttgggggggtcttaaaatgctatataaccatttttgtggtgtgttaatatgtcccttgtatagttgaaaattcctggg

SEQ ID NO: 28113 - DNA, 1099 bp, Mus musculus
gctgcaagaggcttgctgcctagtccgaggccagcagtgttgtgtctggcctgtaagaggcaggtagcaagccgagactatgtccaaaggcccctgaatggcattcttgggccttgtaagaggcacttgctttgctccatttcactttcttcccattctgctttttagtttgttttgttttgaaatctttcatcagctgtgtgtttacttctattaaacttaatcataacaggaatgatagaataatgtcctcttaggctcttaagcgacttaactaatttaactttctcagaagtcctgagtcagaaagagtggttatttgtatttaaaggcagtttttgtttctgagaatttcatttatttggtgtctttcaccattttattatgttgttgctagaactcccaaggcatttaatttagtgcctgtgtttgcttcagaagcacatgtgcttctctgttcatcttttaagatgtgatacattaatttcctgtattcatgtgttactaagtaacatgttagaatgtaataaactcccataactcatgagtctgttatttcagtggactttgaaggtgctctgatccttcctcctgtttgtcctttgaatgaactttcactctccaaaagtgtcggcatttctgtttgtctttgtaactgcatctctgtttcttgtcatcatatttgcttactgcgtgtatttcatgctttccacttctcttaagagctgttacctgagcccttgttatcgcttctaattgtgctgcccttggctgcatttctgagtttctggttcttgcaagtttgtggaaacagaggagtctttaacccacatcagccttgatccaaatgtgccactttaaagttcgtgggatctggagctcctggtctagcaagccatgagaatgccaataagtgttttataataaagctttatttaaacacccgttttgttcgaccttgaagctttactaatatgctgaagaacaaacagccgatgccagtgaatattcgggcttcgatgcagcagcagcagcagctagccagtgccagaaacagaagactggcccagcagatggagaatagaccctctgtccaggc

SEQ ID NO: 28114 - DNA, 1226 bp, Mus musculus
tggcttgagactgactgcctcaggcaggggggtggtgagagaactctctgctatcagcagcactgactagcccctctgtcaaacagcttcttctagcccagtgatcagtcatggcatgccctctggatcaggccattggccttctcgtggccatcttccacaagtactctggcaaggaaggtgacaagcacaccctgagcaagaaggagctgaaggagttgatccagaaggagctcaccattggctccgtgagtagcccctgtcccggttccccctcctgcctctcatctgagtggcatttaatcacagttcctgatcttacttcctgtggagggatgctcgtatgcctccatgctgccctgtcccctgagggaggagcaggggctgaggagagtaaatcaaggtaaacccaagctgaaggcccatctttggtcccaacgagcacttgtttgagagaggacttccagggaaggggtaaggaatctagggtgttggccaccactgagtgtggacttctccttcttaatgtattagaagctgcaggatgctgaaattgcaaggctgatggatgatctggaccgtaacaaggatcaggaagtaaacttccaggagtatgtcgccttcctgggggccttggctttgatctacaatgaagctctgaaataaaatgggaccgttgagatgacttccgggggcctctctcggtcaaatccagtggtgggtagttatacaataaatatttcgtttttgttatgcctactcatgtgttctggcttcccactgatttccagttgcttcctgccttgctgctggacccaccatccagtggtcttagtcacagttaaactctgggagtagtagctcattggcccaccaggccaggtctgccagctgaccaggaatctttatgggtattagaagaggaggcccctctaggcaaagccactctaaacaaaggctcaatcaagtgaccttcaggagaaagtggcctttagaggcaggtctgcagtagtcccagcagtctcctggcagacacactttggtctgggtgtggtgaaacagggagtactaggtgggccctgacgttgggcaatccaccttttcactgtgtgtttgtgtgttatatgagggaggcgtggggagaggcacatctgaggtgagcagggagggacacaggatgactgagttttccgtagctgcctgtgttccagttggaggtggaggag

SEQ ID NO: 28115 - DNA, 1184 bp, Mus musculus
gattcagacaccaggttatgctacctgcacttccttcctggccccatcctctaagatcgcacacgcttaaggctgctttcagggaccaccacctgcttctggcccctttccctactctggaactcaccatataccagccccagggactccccaggcactatgtgtgtatatatacacatagtgcctatatatggagagagagagagagagagagagagagagagagagagagagagagagagagagagagagatttggagaacaccatagaaaaatctcacctctgaggcatagaaggagattgccatagcaaagacatagaaaatatgttcagtaaatcataaaagaaggacttctaatcgcgttcttccagtcctggcctttctcttctccattcctccgccatcgtgtgcgctattcttgattcggtttctcgccatgtcttctcacaagactttctgaatcaaacgattcctggccaagaaacaaaaacaaaatcgccctattcctcagtagatccagatgaaaactggtaacaaaatcaggtacaactctaagagaagacactggaggagaacggagctgggtctgtaaggattcacacaatggcaagactgaggatttatactgaattgtcatcaatcagtcctacctagagacttttcgtgtcttaaattaggatgtttgtccagtaataaaatatagaccctttcaaaatgaaaaaaaaaatcataaaagttcccaaacctggagtgagagctgtctattcaggagaagtctatagaacaccaaatagataagaccaaaaaaataaaattttcatgctgtattatattttaaacattagaaacacagaatgagagagggtattggagctgcaatataaaaagtctaatatcttaaaattgaagaaaagtaaaaataattcacgataaaaacaaattaaaggaacctatgactcctaaaccagttctacagaggcttccagaaggaatacttcagtatggagagaagaataaacacaaataaacaatgctaggatagaaaagaccataaaattaacaaaacgacagaaattaatacacacatttgtttgtttgtttgtttgtttgtttttcaagatagggtttctctgtatagccctggctgtcctggaactcactctgtagaccaggctggcctgg

SEQ ID NO: 28116 - DNA, 1185 bp, Mus musculus
tctaaagtatcaccttgaggactaaaattcctcttttgcttaaaagtcagcttgaggactcaggctccgaaaaaagctactctctgagccagctcccgacaggaggccggagactagcctcagctttacaatttgcatttaaataaagtacctagagttccccaaaagaagttctgctttcctactttctcactgtccgagattttgtctttcaagcaggtaaatcaacattctcgaggcgaccagcggatgtgcatccccacgcccctagagcacacatgtggctgctgttatctccttcccaaggacatttccagcatgtggctttcagtctgagttaaaaattaggtttaccaagagggctagaaaagtagatatttctatattaataaagattggtttttattttgatagacaggcttagtcccttagctgacctctggcttttcacccttgctgttactgcaaggtgtccttaggctgtggaaaaagcagggatgaggagaaacgacttccagctcctattttagccacaaatcgtggtgttactaacgacataattcttgcttaggctctgctaattctgaggttgataattctcctttaggagctgcacagcactcagaactgtgcatactggtttgtgattgtacaaattcagtatgggcatcgcttggtgcagaggtactgcaagggaaggtccggcttgaccatttctgagtttcctgtgagataaacccggtttaaaagaggttggtatcatattttggttaaaaatcaaaaatattttccggctctgcctcgcctccccaaaagatacccagagccacatgtgtgggtcttaccagtacccacggggggaatcgggtccatgtccacccaagccaaggttaaaagcccactcatctatggatgagaaaatcatttgatcacctcagttaagcgttgccttatttaacttaattaataggggggagagagattggagacgtactattgaaagggcaagcccttcactgcctcccacccaaataaaaaagccaattggccttgtactacaagagccggtcgaactccttctccctgcttcccacctatcatccaaaaatgcggaggaatatcaacttagtgttattttcacattgttcagtcaaacatagccagagttccaacgccctacttaaa

SEQ ID NO: 28117 - DNA, 1169 bp, Mus musculus
ttagcctggtcagcatgacaaggtaaacaatacaactgaattttttttttttttttgtaaagatgtgtgtaaagaggaatcccctttcactgttgttgggattgaaaactgttccaggcccctaggccgagtgtgagcaccgccaggatgacgacttcaggcgctctgttcccaagcctggtgcccggctctcgggggtcttctaccaaatatttggtggagttccgggcaggaaaaatgtcattaaaaggaactacggtcaccccagataaacggaaaggtctcgtgtacatccagcagacggacgactcccttattcacttctgttggaaagacaggacctctgggaccgtggaggatgacttgattatctttcctgatgactgtgagttcaagcgggtacctcagtgccccagtgggagggtctacgtgctcaagtttaaggcagggtccaagcggctcttcttctggatgcaggagcccaagactgaccaagatgaggagcactgccggaaagtcaacgagtgtctgaacaacccccccatgcctgggtcactgggagcaagtgggagtagtggccatgagctttcagcactgggcggtgagggtggcctgcagagcctgttggggaacatgagtcacagccagcttatgcagctcatcggaccagccggcctgggaggactgggtggacttggggccctcactgggccaggcctggccagcttgctggggagcagtggacctccagccagcagctcttcatccagctcccggagccagtcggcagccgtcaccccatcctcctccacctcttccgctcgcgccaccccagccccttctgccccagcagctgcctcggcaaccagcccaagccccgcacccagctcaggtaatggaaccagcacagcagccagcccgacccagcccatccagctgagcgacctccagagcattctggccactatgaacgtgccggcatggccaggaggcagccagcaagtggatctggcgagtgtgctgaccccagagatcatggctcccatccttgccaatgcagacgttcaggagcgcctgctgccctacctgccctctggggagtctctgccccagactgcagatgagagccagaacacattaacctcgccccagttccagcaggccctggg

SEQ ID NO: 28118 - DNA, 1166 bp, Mus musculus
cgagatcctgaactccccagagaaagcctgctctcttgcaaaaacagctttcgatgaagccattgctgaacttgatacattaagtgaagagtcgtacaaagacagcacgctaataatgcagttactgagagacaacttaacattgtggacatcggatacccaaggagatgaagcagaagcaggagaaggaggggaaaattaaccggccttccaacctttgtctgcctcattctaaaatttacacagtagaccatttgtcatccatgctgtcccacagatagtttttttgtttacgatttatgacaggtttatgttacttctatttgaatttctatatttcccatgtggttttatgttttaatattaggggagtagagccagttaactttagggagttactcattttcatcttgaggtggccaatatgggatgtggaatttttacatgagttacacatgtttggcatagtacttttggtacattgtggcttcagaagggccagtgttaaaactgcttccatgtctaagcaaagaaaactgcctacatattggtgtgtgctggcggggaataatcaggataatgggttccagtcatgagtgtagtctttgtgggtactgtaaggcctggagcacttgtgaggctgtgacacaaacaccctgtggatgcacgctaggatcgtgtgtgtctgcgtgcacactcttgaccacagctccagaagatgtctctagacaaagtcgtgacccaatttactctggtaagggcagaaacggttcacattccattatttgtaaagttacctgctgtttgctttcattatttttgctacacattttatttgtatttaaatgttttaggcaatctaagaacaaatgtaaaagtaaagatgcagtaaaaacgagttgcttggtgtgcccggctccatacgtatcaagcacagcggtaaacaaaatcccatgtatttaactttttctttctttcttttttttttttttaagttttttgttttgttttgtttttgcttttgtgattttttttttctttttgatacttgcctaacatgcatgtgctgtaaaaatagttaacagggaaataacttgagatgacggctagctttgttttaatgtcttaagaaattttcatgaacaatccaagcataattgttaaga

SEQ ID NO: 28119 - DNA, 1305 bp, Mus musculus
ccaaccagaattatcacagttttccccaaaatcaagattagtagagtatactttgaaaacaaatgaatcatgaaaagaataaaattctgacacatgaaataaaaaagaagagtagcttgccaggcgtcctcgttggagtgacatcgtctttaaaccccgggtggcaatccctgatgcaccgccgtgatgcccagggaagacagggcgacctggaagtccaactacttcctcaagatcatccaacttttggatgattacccaaaatgcttcattgtgggagcagacaacgtgggctccaagcagatgcagcagatccgcatgtccctccgagggaaggccgtggtgctgatgggcaagaaaaccatgatgcgcaaggccatcaggggccacttggagaacaacccagctctggagaaactgctgcctcacatccgggggaacgtgggcttcgtgttcaccaaggaggacctcactgagattcgggctatgctgttggccaataaggtgccagctgctgctcgggttggtgccatcgccccatgtgaggtcactatgccagctcagaacactggtctggggcccgagaagatctctttcttccaggctttgggcatcaccacgagaatctccagaggcaccattgaaattctgagtgatgtgcagctgataaagactggagacaaggtgggagtcagcgaagccacactgctgaacatgctaaacatctccccctcctccttcgggctgatcatccagcaggtgtttgacaatggcagcatttataacccggaagtgctcgacatcacagagcaggccctgcactctcgcttcctggagggtgtccacaacgtggccagtgtgtgtctgcagattgggtacctgactgttgactcggtgctgcactccttcatcaatgggtacaagcgcgtcctggctttgtctgtggagactgagtacaccttcccacttgctgaaaaggtcaaggccttcctggctaatccatctgcatttgcgactgctgccatcactgctgcccctgcggctgctacagcacctgccaaacctgaagcaaaggaagagtctaaggaatcagatgagaatatgggattctgtctcttcaaagaataatcccctcaaagcaaccaagtcagcctgcttaatttgagaaagatggaaatgaaggcttatttctctttaaaaaaaaaaaaagtaactgacttagtaaaaagtgatgtttaatagctgatatttaaacattaattcagatactattaacactaacagacaagaagggaaaagcataaa

SEQ ID NO: 28120 - DNA, 1170 bp, Mus musculus
aaaatggtgaggatagttcttaggcacaatctaaatatgaagttactgaaaaggcactctaaagaaaaaattaaaaaaacatgctgatgacttaacaaaggtcacttaggacctaagactagaacaggaggacttgagagattatccttatgcacgtggctgtcagaagtttgaatcagagaagataatagtcgcctatgttttaacatcattaactgacattgtttgcctttgttctaattatttactttttttttttttttttttagaatcaaaaggaccctctggctgtggacaaaataatgaaggacctggaccagtgccgagatggcaaagtgggcttccagagctttctatcactagtggcagggctcaccattgcatgcaatgactattttgtagtaaacatgaagcagaaggggaagaagtaggccaactggagcactggtacccccaccctggtgcgtgttcacccacggggtcacttgaggaatctgccccactgcttcttgtgagcagatcaggacccttaggaaatgtgcaaatgagatccaactccaattcaacaatctgagagagaaaacttaatccaatggcagagaagcttctgagttttatattgtttgcatcccattgccctcaataaagaaagtcctttttttaagttctgaatttgacgtagagtgtttcttgctccttctgaaatgcttgctccctgcttctttgagtcaggaagagtcagcatgaccttgggcaatcagcataccacaggactgtctctccataggaccagtgaaatgggaaagcattctcctctcaggcttggatctgacttttctatttgtttttcaaactatgtctaagtgaagaaccaaacctcaaagcgttccaagagggctcttcaagaatgtaatctaattctgtaactcctcagcatagtcttacccagttaaatgagtgccatggtagctagcaccttggatacccatgatgtatgaatccattttctcactgcaaaaactacaacaaaatctagagtcaaaataagcctatcagaaaacgagccaaagttcatgtggtggtggcacatatctttaatcccaggaagcaggggcaggcagatctccaaggttgaggctagctggtctacagagtaagtctcaggacagc

SEQ ID NO: 28121 - DNA, 1102 bp, Mus musculus
ggactgctaagctattttgtatttgctttgcattttctaaagtttctaaaatatgcaagaattaagtagtctttatataaatatatggtattttttgcatgtagccaattttttttaactcaaagataatcttatattctttatactccccacttttctgtctcctaatgtctcctaacccaggttatttttgcaacaaatagtggatagcactcactgtaaatatttcagtatgtatttctaaggaacaaagtgtcttctttctagatagaaccacagttctattattatacactccaaaaaaatcaatgtgttagtagattttaaaaaatgaactaattatatctttcttagatacttgatcatctaaggaagataattagtgcttggtgattgtgttaatcagagtgcagccaggagacagaaagaatgtggtcattttaacagggaaagtctaatatgaaaaacaactggttagtaacatgaatttagctaagagataaaatgaactctgaaaatatagtagccaggtatgttggcttaagcctgtactcccagcacttgaaaggttgaggcaggaggattgttatagattcaaggccagattgagctacaaggggaaattctgtctcaagaaaaatatatagagagatcagatacagagagctacatctgggattaaggcagacaagaacaaatcaaatgggttttcttgctgttgagtctttttatttctctcactcaccagtcaacatataattcagtgatctttggtcactctaccgtgtggatttctttctaccaccaacaagccatctattcttcaacaggcagcatgagtgtcttttactttagttgagtttgaacattgtcctcctgaaggcggcatcatactccacagcgtgagagctagaaacacatgccaacctcctcccaaactcagatgccttctgagatcccaggctgcctctggcccactgtctctatttagagttataaaatgctagagcatctctgagttcaagaaagcacattacttgtgctgactcttatcaaagggagggcaagatatgacctgccctttcagtgttatgcaacctcc

SEQ ID NO: 28122 - DNA, 1150 bp, Mus musculus
tctgaggtctctgagaactcagagtggaagtcaatgatggagtcccatccccacttggtggctgaaacattccactccctggcttctgcacagtgtttcttggaaccctcaatcaaacacctaaaataagtttaggggatggaaatctatgaccaacatctgtcttccaacaggtataaccagtgttgttaccactgatttctggttagagtacagtattgctggaacatttatagtgaacctgtgaaaaagaagcatggtggctcaggatttaaaacagctgttatatgttaaaatggtgggtgggggatgggcagcactggagtctgggacagtctccttgacttctactctgttaatgttctagtatgatttttgtctgatatttaggaaactgggatttaatttaggtgctgtccctaaggacagacaaacctgagtttcttctgagaaaactgtctgcactggactatgtagaagagatgagtggggcccagagcgaaggataaatcaagcacaaatgttaactcattgggatggaaaagacaatgaagacttttcatttttaatgattcatttatgggaactcagcagtagaaacagttaaagctcactcagagaactctggttcagttctcagcacacaggagagtttttcagccacctgtaacttgtgatccagaggatctgaggccctcctcgtgtctccattgctacaaacagctctgtagacaaaaccttaaccaaataaaatataatatgaataaaacttttgaaaacagtttgtgggttctagagatgtttatgttcagagaagtcacatgtagttcagttatcctgctcagctctggatgtttgtgcagacctctcactgtcctaccagtattagaagccctctaactttttcttggcatttagtgttgacaaatgagaactctaccatcatgctcttatgactactgggaagagtagaccagagtggagggagtctactccttctgggatagatgtgtttgtttttcaaggtaggcaaaaatcttttgtatgttttgaaaacattagaagggattagttcattacagattcatactcccgaggccagtaatcttccaaaagttgtgtccccttaatacagttctgcatgttgttg

SEQ ID NO: 28123 - DNA, 1111 bp, Mus musculus
agacgtgtgacaagtgtagttcctaataaatgcatggtgtgtgtgtgtgtgtgtgtgtgtgtgtgtgtgtgtgtgtgtgagagagagagagagagagagagagagagagagagagagaaagagaaagaaggggggcgccaaaggtccaccttatttgatacagggcatgagttgagcccccagggatgtaggtattacctcccctcagtgctaaggttatggacaatatccaaactcagatcctctatgcagctggcactttaacgactggaccttataacctgccctagtaaattgacggtggtggtggtggtggtgtttgtaaggaagaataaaaactgtgagaaagtaagggctgtctcttttctatgcccctcccttttggtgatgctggagatgtaccccaaggcctgagtacactaaggcacagcctttacctgtggctgatcccatgatcatcttttccatagcctgcagagatttcatctgccattcccgttctcattgacagaaattggagtccggggtgatctggtctcagtgaagaaatctgtgggtcgtaacaagctcctttctcagggactggcagtgtatgcttctcctgaaaataggaagctgtttgaagaggagaaatcggtgagctcaaaggaccaaggggtttggaaaaataaaactttaaggtacctgctaggaagtccttccttttgttgtttaattcaaagatgaagtaacagctagaacccagaagcccaccagttcccagcacagctgggctgtaattactcagtgtggcgcattgcttctactcagtttcatctctttcagctgagacgcgaaggaaaactggagaagatccagacaaaggcaggagaggcggtgagtaggaagtttttattgattcctcatggaggtcatcgccctcctgagtccctgatggccttcacgtctgcttattgttacacacaaggatgagctaaagtagtattgtggctgatgctctgtgtagctggtatggagtcctctggaactgctgtgttgggtacagtgtactggaactagctctgtacatctgcctgcctctgcctcccaagtgctgggattaagggcgttg

SEQ ID NO: 28124 - DNA, 1148 bp, Mus musculus
gattaagaggccgcggaggattcggcagcagtcttaggggggccacggtcgtggtcgaggctgtggcagtggtcgatgctgtggggctcatggaggtaaagctgaagacaaggagtggatccctgtcaccaagctgggccatctggttaaggacatgaagatcaagtccttggaggagatctacctgttctccctgcccattaagaagtctgagatcattgactttttcctgggtgcatccctaaaggttatgaaaatcatgccagtgcagaagcagacttcagctggccagcggaccaggttcaaggcattggtcactattggggactaacgtggtcacgttaatcttggtgttaagtgctctaaggaggttgccactgccatccgaggggccatcatcttggtcaagctttccatcgtctctgtgtggagaggctactgggggaacaagattggcaagccccacactgttccatacaagccgtgacaggccactgtggctctgtgctagtgcgtctcatccctgcccccagaggcactggcattgtctctgctcccgtgcccaagaagctcctgatgatgaccggtatagatgactgttacacttcaaccagaggctgcactgccaccttgggcaactttgccaaggccacctttgatgccatctccaagacttacagctacctgacccccgacctctggaaagaaactgtcttcaccaagtctccttatcaggaattcactgatcatcttgtgaaaacccacaccagagtgttcagaggacccaggctccagctgtggctaccacactagggtttttatacaagataaatacatgaactaagtctgatagatagatagatagatagatagatagatagatagatagatagatagatagatagatagacagatgattaaggaagacaactgatgttgccctctggcctctatgtacatatgcacacatgtgcacatgcatccacatacatgtatataaccacacaaaaagggggagagagaagggaagggaaggagggctatcttgaggagaagcagtggtaggtaccattaacaagtggttaccattaacaagtggtaccattaacaagtaatcacttttgcaggcccgaaggatgagaggagat

SEQ ID NO: 28125 - DNA, 4221 bp, Mus musculus
ttttgttgttgttgctgctgctgctgttgttgtttgtttgatttttaatcaataactctccatgctgttcctgacccaggagagcacctgtccagagttttagccatttgactggataagtcacagtagtgtctttcttcactaaccaagaaaataaatgtgggggaaattttttgctactgttgtttataggtgtcagtgctggagcagaatttagaaaactctgtctaaatacttggttacttactctgaaagaaaaatcagaaaatgaagaagtatagtcagtcacttggaagttggtgttcttgctctagtagaaagaacactgggctctggaagtcatctgggatttctcctgcttcttttgtctgtgattttgggcatagcaaccacctttttagatctgaattatctcttttgtaaaagagaaagactgagccaggtggtaaatattcagagtcctctgtgatgtgagcggctgtgttggcttgggattgttgaatccggttgtcagcgcgtgtgctgctcccatcgtgtcggagggttgtctccagatcggaggccctgctgctcctcagtaactcttttttttttttttttcctttcagaatattttccagatggcgaggtcacagcagagggatgtggccacctagcctttcctcatccctttatcttctctttgccctcagcctcttagccttttcgtctcccatgtcagacagtaaccattaacacaaaagaagaaaaaaaggaaaaaaaagtcactatgtcccaaagtcctaagctaaatattattaataacttcctgagaatttcccgtctctggaactgagctggtagagagcaggttgatagtaccagaagtccactgagatcagacacacaagcccagccaacacgccaaagtcatctttgtcgtttgacccgggcctcataccaacagactctccttgtactatatttttaaaactggaactatgaactccatccatttgcactgttcaagcatatatatgtatgtatgtatgtaaaaattatatatacacaaattagctgcacgtatatacatatatatatttctttttaaatttcatattgatggcagtaccttttttagcttgtgtttttacacacctttcacagaattcatgacctctctcttgctctctttattttgaaacaaactttaaaaaggaaaaaaaaatacagggaaaatacctctcctcatgaaggactcgaaaagtttacaacctgcttgggttttcttcccttttttgtattgagtacagtttctggctgttggtttgccatagagtctgaggatcgaggagtgtagtgtctttatcttcaagagggtgctgaggaggagaaaggccgtttctcaagagcagttgaggctgcagggagtctaaagacctagagtctcgattccaagtcattttccaagccatggtccatcgatcgacgttgagtccgtcctccatctccttcctgtttctttagggtcttttattatgctcccttttaactgacccaaaacagttcagggtaatctgaggaagctgttatagtaggaaactttttcttctgcaacaggggttgtatcaggactaaccctgacatcagaggttggacagatggaggaaagggaggatggaagctgtgcctcagatttataagggccttacctcttccattcctgtccagtaaccatctattttacatcctctgtgagttctttaaacagctgtacgtggaaggagtgtcttgggtaaacttagagtctgggttgctgccaaccaaatcagagccctgttcatgacagctgagggcccaagaagtgggagtatggtcaattttagttcaccaccaccatttacttcaaaggagactgaagagaaatctcttaaagagttctttacctggagctggggctggtcccgaggctgaggctggggccgggagtgtttgcctagcctgcataaagccctcaattccatccccagcaccacataaaatttgggtgttggggtattgtagcacacacctgtaatctcagcacgtgggaggggaatgcaggaaactcagaattttcaagtccacctctgctaactaatgagttcaaggctatcctggatcacatatctcaaaagtagaagagttccttacctgcccctgcacttagacctcctaggacctaaaagcaacatttgggacagaggccaggctggcactagagtaatagtctcaaaccttgagtgtaaagaactctgaggttaggtacaactaaaacacgtctttgaaactctttatctacttttccttcgatattgaagcctccacaggcttcgtctttggctttatgtagctgaaaggcagccagaattggatgtagttggcagtgttggatttggtttaaagtttctttcatgccttggttttgcagagcattcattatgaggctacttttctgtctccattattctggcagccacttgtcgcaggaaggtgtaaacacaccttttaggatagtctttccctcccctgtccaaacccgtgggaccacaaagtacaaaatatagtagtgtttaaagttgaaaagggcaatacctgatttggaggctttaatcaggatcaactctccctcttggctttactaatgagtctgagtaccttaagagggggcgagttgatttcctctccaagatgctctggaggccagctgtgttcaaactgtaaaaagagcaacattgcagctaattccctcaggaagagagccttccagaatagggacagggctttggaagtcctgaagagtcagccccactgtgttggggttaacagaatctgtaggaacaccctgctttaggtagtcttcctaccagaacacccagctgcagcagggagctgggaagaagcagctcccagggtctcccagtggagctgcagtcctggaagaggaggtcacggtggcctagaggcccacagaggcccacaggatcaagttcttttgcatgaagcagtgttagatgtaactactccctcccccaaacccctacccttcctttctctaatcccttctatgtttcttagacctggcttctgcccaggaaggcatctacaggttttttgggcagtttgtctctggggaagggacttcccctcccagcttcactccagcagaatcttcctggtctccaactgttctttcctccacgaggagtttctgttctctgatactaaaactcaagagatctttacggagcaggaaactacttagtccctgagaagccaggtgctctaggaagctttgcttgggcagtgctttgagcttgccgctctttgtacttttattccggtcttcgtctctccgccttccccttgcccttgcggaggcctcagctcagcacagctacagtcagtgttcagggcagttcccaggccttgacagagctctcagggaggaacaaggtaaatgctctagcatcctcttgcctggcccatttaattttatcctttagttacctgggccagtagctttgaattatcccttcattgctccaaacccgatgcctgaagcagcaaaatagggcactgataagagggagcacctctctcatctcagagtttccagcttaagggccagctcctagaaagcagtcttcttaaagggacctacatgcatttgcgtttagctgaagtctccaggaatggaggtcctttctgccctcctttccattctgctggcttcagcacactgctgctccttcaccagttggatgggttgctttaacttctttttggaggagcagcagtgtggctgaatacttagcgccagcgggagggagaacgcttctttagtcctccgtcttggattcttcttcctctaaccctcagcatatctgccagggctcctttccctggatagcagcagcttctttctcagcagtaactgagggtgcatggaaatcgggctctggggaggagcgacaccagagggactgatcctggtaggagcacttggttagctgctgaccatgggtgccaacttgttattatgcccccttgtaagctgctgagctgggcttcagtttttcccaggccatgcacacttataatttatttgagagaaactaattgtattttcactgcagtatcttgtacttttatttgtgatttacaaaatgtgaagagaaagtgcagagacccactggctcc

SEQ ID NO: 28126 - DNA, 1105 bp, Mus musculus
cagcctgattgacccagttttatgtttcttctaccttacttaacacccttaaaatccatttcaattcatagtcttaagattcctgtttgaatgcattagcaaactcattaagccctttagtgatatggtgtactccttcatgaccacacctttgatctcccagcctagccttaggtctagttatgggactagaggcaactattggtggttcctaagagacatcaggattggcttgcctggtgtctccttcagagaaaatcacagctgcttcagcatacaatgaacaattaattcctcttggcaaaggtggagagggcaatacttcaggggttaagggtccatcctctgctaagggtccatcctctgctaaggttacttcctcatatgcgttaaaccccccgaggatctgagggttcaaagttctcagctttgggtcctcccacaaatcttcatcctaagtgagaagatcccattcctgccaatcagtgtttttacacactggtgccctctcgggctgggacttgagtagactactgtaagttagccagccttaaaatgacgcttgggtttgattatctgccgcttgagctcagtggctgctgaaaagaagattctcatccagggcacacttaaaaacctttagaccagtgggtctcatctttcctaatgctccgaccctttagtataattctcagccataaaattattccactgctacctcataactgtaattttggtactgttgtaatgtagattatctgtgttttcacagcccacaggttgagaaccactgctttagacagtttatgtgaacctagaactggctacatttttcattgagctcatgcttttccattgtcagtttatcaagagctcctaggagaaagtagccagcactgttattttctttattaatccataaattgtcaaaagtatacagtcattagattccttgtggccatcacatgtttctagctttcagtgttcttcacctaccaggggtgtttttagtaactgagtgtcagtgaattgtaaagccttcaccagaagcttcaaaaattcatccctatctgggtgacggtggcatacacttttaatcccaaca

SEQ ID NO: 28127 - DNA, 1189 bp, Mus musculus
cctctgcctcccgagtgctgggattaaaggcatgcgccaccacacctggcttaagtgtttatttttaattaaatagagtaagaattgtatagtcttagctagaatattggtaatgacacaatttacatctcaaagtctattgcacattttgaagatggtctgattatatcaaggttcagaaaggacatcagcatgtgcctttagcccatgtaagctgccgacttattcaaccagtgttgagacatctcctgtctcctgtttcttactcctttgtaagttctaaatggagtgacaagagtgaactgaaatctcatctgggcttcacctagactgtttcacctaggcaggattctattttgaagtggcaacgtatctgttcatcttagaggataacttctacaacctaaagccagctttatgagttgtaaatatataaacttttaagacttaattttttctcaatttaatagaatttactttctgtctcatgttaaatattatttagctagcatgtagcaaggagaatgaagatttaatacaaattctttctcttcctttagaattacaatggtgtgtctgatgtagaactgagagtagcactaccggatggaacaacggttactgtcagagttaagaagaacagtactacagaccaagtgtaccaggtaaagccaacttacattggatgatgcgaaactaagaaacaaattaaatgagttagtacatacaaaatgtgcagagtacacttattaattcatgttactactatgaagttaactttgtccttcttaaaagaaaggtgtatgagaactgagtatatggcatgtgcttgtaatctcagtgcctaggaggctaaggcaagaattctgcaagtactagaatattcaggagtataaaacaaaaccttgtatttttttttaaaagtgcagtaaataccccagagtgcaatggttataattaactgttcttcctcttttgttgttgttgttattaaaaaaaaaatacaactttttttaaaaaagtgtgtttgtgtgtgcatttgtggaagctgggggtcacattgatgtcttcctaaacattgattgtcctctatcactttctggcttactcttgagacagaatctctagactggtggtcagcacactccagcagtccccctggtttcaccccagtagtgctggggttacg

SEQ ID NO: 28128 - DNA, 1201 bp, Mus musculus
cataggtccttgcatctcttcagttgcaatatttttgttttcccccagtcactgggtccaggagatcgtgtgtctttcttttccatccctgccttgctgctttactctcagtgccttaccagtgtgagatggatgaggatgctgttcttgccttttataaacctgcacattcatacctctccaaagaccagcctttcctcattgggggccctcagcctgtcctcctaccccagtgactgagcagctacaggctgctctgccaagcagcccctgggagaagggctttgatacgcctggtaaggtggtggggactggttctgctcagggtttccatcttccttgccctctgtgactgaggatgctgccataaggtggttgtacctgggaaccatggcaactgttgatacaggttctaaagtccaaacatctagtccctgtggcctccttatggcttctcagatgtgcccagttctgtgggaaccaacagatccttgcttttctcaagaagtgggccctgattcagagcctcgcctggggttggaagctgactctcagtagagatgggaaggggtcctggagaatgtattcctcctttgagttttggggtgtgccaagctcttgtgggtgaaggtaatggggatggttcgcctcttatctccaaagtaagttctggtctcatcaatgacttgtaatttcatgatttaaaagaagatattctgcaaatcagatattttctcccaatccagccttggtttattttaaattaaatattaaaaatggcatatctatatgaaattcttgtcttcatttttctggttaatttgaaggcctactccaaaaagttttttttttcttttctctctcttttttttttaacgtgtggtgtgtgtgtgtgtacacatgtgaagactacatttgtagaggtcagaaaacaacttttgagagagaacaacttttctcattttccacagtgtgaatcctgggattgaactcaagtcgtcaggagtcttggccacaggcacctttccctgccaagtagatcctattccaagagtcctttaaagtgtacattaaaatgaggctttagctcattttttagaggtctcttgtggctgatcagggatctaggaaacagactacttgtagtagaaccatcctgtcctaagaagctctgggaatagcttatacagagtgctgtatg

SEQ ID NO: 28129 - DNA, 1767 bp, Mus musculus
tgcgatggccaagcatttagtgttcaacccctcccacagatctagcaacatcttaccacggggtaagagggggaaactggtactgcgggtaagatgtcatactgtatgagccaggaggagcatcttcctctggcctcacccattcactgtttagatgcacactatagcagactataagcattctaacctgggaaggctggctatagtaagagccgattaagggggtaacatgttgaaattccaagatatgtctatggaatgcttttcatttctccccagtgagctaaccatttcttcccaatctcattttcccagggctcagttggatgtctcacttgaggtaatgctcatttcatggacactttgcacaatgtctgttctttctgatactgtgatttaactcctgaagtgtaactgacatttctgctctctgttcccatgcccattcctttaggcctggccaggcttctgaacgagtgttcgactggagcatgaagaatacatatcttccacctcccctcgtccctaacaaagctgccactgtgaagcctgtaggagtcaccccagcggagccccaagagctggcaggtcctgtgctccaggcacttccatccccagcctcaactgcaaccccaccagcaacccccactcacccacagccctccgccctgccaccctcggccacagaggggactgagtgtctgaatgtcagtgaacaggaagaaggaagccctgtcacccaggatcctgagccagcatcaggtggtggaggtggcagtggggttggcaagaaagagcagctgtctgtgaagaagcttcgggtagtactgtttgccctgtgctgcaacactgaacaggcggctgaacactttcgaaacccccagcggcgaatccgtcgttggcttcgacgcttccaggcctctcagggagagaacttagagggcaaatatctcagctttgaggcagaagaaaaactggctgaatgggtgctgatccagagagagcagcagctccctgtaaatgaggagaccttgtttcagaaggccaccaaaattggacgctctttggaaggggggtttaagatctcctatgagtgggctgtgcgcttcatgcttcggcaccacctcactccccatgcccggcgagctgtcgcccacacgttaccgaagcatgtagcagaaaatgctggactcttcattgagtttgtgcagcggcagattcacaatcaggacttacctttgtctatgattgtggctattgatgagatctctttgttcctggacacagaggtgctgagcagtgatgaccgaaaggagaacgctctgcagacagtgggcacaggggagccttggtgtgacgtcgtgctggctatcctagcagatggcactgtcctccccacccttgttttcttccgaggacaagcgaatcggttcgctaatgtgccagactctatattactagaggccaaagacagtggctacagcgacgacgaaatcatggagctttggtcaacccgtgtatggaagaagcacacagcttgtcagcacagcaaaagcatgttggtgatggactgtcatcgcactcacttgtcagaagaagtactggccctgctcagtgcctctagcactttgcctgcggtagtccccgccggttgtagctccaaaatccagccactagatgtatgcatcaaacgaactgttaagaacttcctgcacaaaaagtggaaggaacaggctcgggaaatggctgacgctgcttgtgattctg

SEQ ID NO: 28130 - DNA, 1182 bp, Mus musculus
tcagactgaggctcgggagcttgtggagcgctgcatgagagtgctgtactacagagatgcccgttcgtataaccgggtgagaaatgggctggaaggtacaaattctggagccaggcatggtggcacatgcctttaatcccagtagggaaacaggggtgggtgggactctgcatttgaggcgagcttggtttacatagtgagacgctatcattgcacgctttgccttctttcagtttcaaattgccactgtgactgaaaagggtgtcgagatagaaggaccgctgtccgcacagaccaactgggacatcgctcacatgatcaggtgagcaagctacagtagggatcggtgacacagggaagctcttgacttttacagaatggctcttctggagggttcaagcagaaactctgtgtgggtggttttggagggaacctctccaggttgggggcgggggaactctccaggtgggtggtcttggaaatggggagctccttcagaagttgatgcctttatccgccttcattttccctaaatgtttcttctttctttagtggctttgaatgaaatccagttgaatgtccagagtgttgaagctttgctcttctaaacgtgactgtagctggctcaaaggcagacttttgtaaaataaatcagtcgtttgaagtgttcgctgagttggattttgtgttttgaaacaggatttatgtagcccaggcttgcctggaacgcagaaatctgcctcccaaaagctagaggtaaaagcttctggcatagctggcaattcagtgtttattctaacatggtcacattgagacctcagctaccaagtactgctttgtaccatgtccgtgctgtttcctttcctggagagaaccatttaagtcttaatgtgtgtgcccagaggttgtctttctcaattattttcctttttttttttttttttttggtttttcaagacagggtttctctgtatagtcttggctgtcctggaactcactttgtagaccaggctggcctcaaactcagaaatccgcctgcctcccaagtgctgggattaaaggccctggctttgacatggttttcatgaacctgagcttatcagttcagctagactgactggccgccgggccacaggggttctgtctctgctgccctaagcactgggattgtaagtatgcatg

SEQ ID NO: 28131 - DNA, 1145 bp, Mus musculus
aagcccaaagatttaccatgattaaccagccaaggtcagttccacccttggccagctagtatggccaggaagatgtttatgcaaatgtgtctctacacatcgtggaccacccttgggaaagggtggagtccgccgtctcacagtcccaggttccccagatggaggcttgggtggaggatggaattgttgctggggagcagctaacgaccgctgggtgcggtttagcttgctaggctgggatgagctggactgctgcctgtcccctgaaccttgcatctccctcagtgcagctctaacttttatctcattgtagcctcggaaggacagagaaggaagccattctcgttagtctcttcattcttacaggacagctttcgcacctctgtctcccagaacaagctccttttagggtctgaatcttaaactttctccgcagccgtgtttcctacctcccaacctagtgtcaccttctcagaggatatgaatgcccctcccaagccatttcattacattaccttcattctgcagccaccagatgtcatgcacttgtcacatgtgtcaggacctagccaggactgtgggcttaggctggattaacagatgctgcgagtcagggagcacctgcaggaaggatgcagacgctccagctgtgtccttgggaacagcaggaaaccagcccatattaatcaaggacctactccgtcctccccacaggacagcttcttgtcagggaatcttggttttattcccaagaaatagattttctttcagggagataccacccatttgtccatttatttccatgagaacagattttttaaaaattataagtaatctttgatatctataaagaaatatgtactataaattatgaaatgcaatgaatacctatgacccatcattcaatttatacattgaaagtagttttttcccccttgcccggcctcttcctagaggtaatcactgtctttaatttttggttattaatcatttgtttatatatattggccatgtgtatatatattctttaggaatgtataattttgtattgcttgtatttttagctttaaaaaatgttgtcctgtgttccttgaggtttgcttttttgcacttacccattgtttctccgactcctctgttgtaat

SEQ ID NO: 28132 - DNA, 1195 bp, Mus musculus
atgagtcgcagtgtaagtatttttggagacagaggtttgccaaagaggttgagacccccaggttgagaactgccatcctataggaagggaaagatttacctttgcattctaagtatccaacgtttttataccacagggaaaaaaattcacacatgttgatacagcagtcagcttgagttcagagcagatatgagaatttagtgggacataaggaagatttacgaagttgtaaaacaatgtgattatttcactgatgtcttatttgggaaagtgtactttttaaaagtgaatacatttaaaattttaaattcataggtttaactaatttttctacattcctatttgccttttttaaaagtcttagtccttttgttttatttggaaaaaacaaaactaaaaccaaacaaacaaacaaaaaaaatcaccaggagtttggctgggcatggtggcctcccagcaaaggcaggcagatctttgtgagttcaagaccagcctggtctacataggtagttccaggataggcagagttccataaagagaccctgtctcaaaaacagaatctcactctgtaacctagcctggcctcaaatctgagctcttcctccctcagcctcgggagtgtgggacttacaggaaggctgcttggcttctccttggtatccttaagtgtcagatcataaagccattaaaagcatagggaattatattccaatccgattcccaaataactcaaccatggcaagaatattcaactctgaagcatattatttgtactattctttaaattcttcaccaccgaccctttttgtgtgtgtgtgtaccagtgcatgtgtttgctggtatgtacacacatgtgctgtggagaccagaggacaagttttggtagtgttccctcaggtgccatccactttaggctttgttattgtttttttcggtttgtttttctctcactgacctggaattcactaaataggccatgctggctgtccagcaaaccttgggactcttcttgtctttgcttcctcactgttggggttgtaagcaacaccaccgcacctggctttttaactgcggattttggaactggagagatagttcagtgattaagagtgctcaatgctcttgtgaaggacccaggttcaattcccagtatccacatagtagcacacaaccacctatgaccctagcggcaggg

SEQ ID NO: 28133 - DNA, 1192 bp, Mus musculus
gatgttgaaggaaaaattgcttgaacaggcttcatggtaaagggaagacctgaagatgataccactaaccagtgtgtgtatgtgtccctttctgttcttttctcccttcctcctctagcttggaagctcgaagtctggctgtagccatgggagacatggtagtggagcctgccaccctgaagccaacttctgagcctactcctagcccatcagggaataatgggggctccctactaagcgtcatcacggagggggtcggggaactgtcagtgattgaccctgaggtggcccagaaggcctgccaggaggtactggagaaagtcaagcttttgcatggaggtgtagccatctctagcaaaggcaccccgctggagttggttaatggggatggtgtggacaatgaaatccgttgcctagatgatccacctgcccagatcagggaggaagaagatgagatgggggctggtgtggcctctggcacagccaaaggagcaagacgacgacgacagaacaactcagccaaacagtcttggctcctgaggctgtttgagtcaaaactatttgacatctctatggctatttcatacttgtataactccaaggagcctggagtgcaagcctacattggcaaccggctcttctactttcgcaatgaggatgtggacttctatttgccccagttgcttaacatgtatatccacatggatgaggatgtgggcgatgccattaagccctacatagtccaccgctgtcgccagagcatcaacttttccctccagtgtgccctgttgcttggggcctactcttcagacatgcacatttccactcagcgacactcgcgagggaccaagttacggaagctaatcctctcagatgagctgaagccagctcaccgaaagagggagctgccgacattaagcccagcccctgacacagggctgtctccctctaaaaggactcaccagcgttctaagtcagatgctacggccagcataagtctcagcagcaacctgaaacgaacagccagcaaccctaaagtggagaatgaggatgaggtaaagctgggggagggacagatgggcaaggtgtctgagcgttgcatggagacaggatgtcttatatgggggttactctactttctgtcctttcctctgttcatttcacttatagaaacatggaatgttagaatgga

SEQ ID NO: 28134 - DNA, 1148 bp, Mus musculus
tactcccaattcttactatgttgtctgtgtactggagtgatgtgattgtcctcatggttcatattctctcagaggaagtattgaaaaagaggattttccttgacatacatctcactttatccagtttgtgtgtctgctttcctgggccctgaccttagcatgaacccacagagcttctaggcctctctgtaagactgtcattgatagtgggaacagtttttcccagttgcacctgtgccttctgaagccctgatgataagctcagaggcatgtacaccctttacccagatggaatacaagctcctacctgtgcatgttttccatggtcatagtggactgctgatgaaggttggaacagagagaactgtcagtagaacttagatagggaggtagtggcaaatgctctctcttctcacccaggctccctacctgatctacgtggaagttctcgaatgtgaaaactttgacacaactagtgttcctgcccggattcctgaaaaccgaattcggagtacacggtctgtagagaacctgcctgaatgtggtatcactcatgagcagcgagctggcagcttcagcactgtgcccaattatgacaatgatgatgaagcctggtcagtggatgatataggcgagctgcaagtggaggtgagggatctccaaggagataatcctaggggcacagcccctgttctctaggagcttttaatacatgtgaactaacacacctgttaacagagcgaggcacaaatttgcatgaatattgtacatagtaaggggtatgagaaggaaaagctctgagtagctggttggaataggttcaagctcctcttacagcaggagttcaggttgaatgtaaggaggacctaggggaaactaataaaatattcaaggaacacctgctatataaagttgattgaggacagtagagactgacaagccacacattcatatatttagtcaaatatataaagggctggagacatgacccagggttaagagcactggctgctcttaacagagaactgtgttcctttcccagcacctctgcagtagctcaccactgtcagaaactccagtttcagggtactgagtactatatgctaatgaatgagacttggcttatacttgtaagagtttatgtgcta

SEQ ID NO: 28135 - DNA, 1192 bp, Mus musculus
atccctgagggacaggcttttgaggattctagtgacttgcacccccttccctctagggtttggcccctaggttctacttaagtgggccttctttttcctttctgaatccaacactaatgctcctgctgcagactcccagtaactgtggggggaggggggaggggaccttggcaagcctgctagacaggcatagggatggactgaaggatgtacagggtctagcttctacccctctactagagttcttcaggcacagaccagtatttcttcttctgggctgggttctgtcctagtatcccctcctccaacactcattggcactaacacccccaccccaatccctgcagtgccttccatttgtcttttcccccagaaatttaggggtggggggttggtggggatgagtcctgtcaagtaggttccagggagaggagaggacaggctctcaggaatcctttattcttgtagtagtagtaatactaacagtgggagaaacaggagggagaaaaccagaccattaaaactgcttgtggtttaatccccattcaggcttttctttttatgtgagttggataatgtgtactcatagggaggggcgagtcagaactggggaagcccttctcagggaagaggcagtattgacgaagacagatggaaaaagcaatcttccttcatcttgtgtgtttggtgccttttgtatgctggacttaaccctttccaagcactcctcccccagaagcaacaagacagatggctaactaaggattttatttcaaacaaaaattaaaaaaaaaaaaaaaaaaaaaaaaaagctgtttccctggatgtgaggaaaggatcagggtaagaaatttccccatggctaagccagtaccctcaatacatcagagggttttgtcagttctcccttccttacccccatgatggggacctcagcaagtgcaggacccacttgtcgggaatgtgggccaggggtcagcccccaggaggggactgagttaggcagcagcatggccaaacataggattaagtcctaagtaccaagaacctactcctcccagtttactgggacccagggaaaataaaagatggtttgtagaaaacctctgagacccctgaggggaagaagactccagtcctcctcatgttcatcacctctgttctctggagggcagtgagtcctgggatctgt

SEQ ID NO: 28136 - DNA, 1207 bp, Mus musculus
tttggagactcccaatgatttgtataaaggtgtttgggggaaagtaaggatcatccttactcccaaccttcttttccttaaaaaaggaaaaaaaaaaaaaaaaaaaacacaaagagcacacaatgtaaatttgagccagtctcagataaaagttctctaagtgttgtagaagagccctagtgtttgtgaagcagaaaggctggggctgccccaccagcagctgctctctgactccctcacttagggttgagggaatagagagggcctggcccttttttaagacaaaggggcagccatgttaggagagtggaccttagcaggaccctactcactgccaggtcttcggttattactattctgcaatttggaatgtatcctcatagttttttctagatataaagaattatcaaatgattttagaccattctccaaaggagatttctttgttcttcctatattttccaacagtattctgctctttgtggagctacggtggagggagatgtttgtgtctgtttaacaggcagtctgtatctatgaggctagagaatattttcttaaactcctagggagccacagacttccctctgtacggttgtcgccatgtcacctggcctgcccttactctgcagagaagctggaaatggggccacggagccctctccttcctctcagttgtggcccatctggtcctggctggtggggcagtgcatggtgtttcaggctggctgttgaaatcccacattagttccttccctgtcccgtcccaccttgatagcaggttagccaacccccacgtaactgtctatattagacacccccagccaccttctggctgcctgtctttgctgccatgttcttttttacaagaaggaaacaaacaatttcttgctatttttttttcataatttactatttatgatgtatttaagtgttttattcaggacagggttctgtaaggggtgggagggagtatttgagggagggctgggacttagggaaaggacatgggattcaacatttttatggagtgttactatttgcctctactttgtattgttgaaaaatgacagatgcaatataaaagtaataaatatctggttttaatgtattaaagttctagcaatcatttagacctatttttaaatgcttttattagtgtagtagtcataattgcattgcgttttcatacatgcacataatgtac

SEQ ID NO: 28137 - DNA, 1101 bp, Mus musculus
tatactttcccagctttttccgcctgttcctccagctgccttttctctcttggtttgtggtttgtcctggttttgtttttgttttttagacaaggtctcccattgtagctctggcagagctggagctcatggtgtgcttggtgacaggcgtgtgtccctgtgcttactcagccttctctagcagttgaacccagggcctcagacatttgctagttttccctgactcgtcagggaattagaagctgcccttccccctggcagaatcattgacttagctagaagcagcattggtctctgtggactaagtactaccttgccagttctcttgaaagcctatatatacagtggatgtgtttatctgttgaaggttttctgttatcatggtctttttaaggtctctaaaataaataattattatagtctttcacataaaaaaccagtgtgtgatacacatttttcttggcaggtttgttaagaagttggagcactcttggaaagcactggtccatgatggggtgagtgtaatgtcagctgaaggccttcttcccacttctccattttttgccatttgtcccctcagcagtttcttcctttttttttttttttttttttcatttatgggttttacccctctggtagggtttcaatctaagagaacaagctttttaacaacacagccttctgctgggcctctttttctctgtagttgtgtctcctattcaaaagacatggcctctttcctgctgggcctctatttaaccctgtagccgtatctttgctgggcctctgttaagcctgtagctatgtctcctcttcaacaggatacggtgtcagtgcatcgtccaggcttctatgctgagcggttccagcgtttcatgtgcaacacagtgttcaagaagattccctgtaagtggcttctaccagatgatcccccagtggctcccttcccccaagacatggggggcaagacacctctgtcagggagctgccaaggccagaggcctctcctgctctgcctacatcctgtgagcgctgcttctcgtccttgtgtcagtcactgtctgtcccagtgtttccgcgttgctgctcccccctggctct

SEQ ID NO: 28138 - DNA, 1196 bp, Mus musculus
catctggcctccatgggcacaaggcatacacatggtatacaaacatacattccagtcaaaacacccatatatatatatatgtatatatatatatatatataaataaataacataaaaataagtcaatcttaagctgggtgatagtggtgtaaaatacctacttttaatcccagcattttggaggcagtcaggccactctctgtatctgaggccagagggagttctaggacagccagggttacacagagaaaccctgtctgagaaaatcaacagcaacaacaacaaaaatcaatctttaaaaaacaaaaatatggggggctggtgagatggctcagtgggtaagagtacccgactgctcttccaaaggtccagtgttcaagtcccagcaaccacatggtggcttacaaccatccgtaacaagatctgacgccctcttctggtgtgtctgaagacagctacagtgtacttacatataataaataaataaatctttaaaaaaaccaaaaaaaaaaaaaaaaaaccaaaaatatggtctcagtgatgtgtttccaatagatccttctgaccctccactgtggactcaaaacagggagatgaagaggacagtgactgagagaccgagaaaaaaaaacaaaaaaaccccaaaaatatggggctggaaagatggttcagcagttaagggcactaattgctcaggccctgggttcaaatcccagtatccacatggcagcttgtaactgtaaagccaagatctgacactcttacatagatatatatgcaaacaaaacatcagtgtatataaaaaaaagtaaggggctggtgagatggctcagtgggtaagagcacccgactgctcttccgaaggtccgaagttcaaatcctagcaaccacatggtggctcacaaccacccgtaatgagatctgatgccctcttctggagtgtctgaagacagctacagtgtacttaattataataaataaataaatcttaaaaaaaaaaaaaaaagtaaaattttaaaagatttaaaaataattaaaataaaaaccatgagacttataaaaagtttgtgcttcaggaaaaacagaaactaatcgagtcaacctgatatcagcaaatatacatgattatttttgaggctcttttatatatataaataagtaaatttataattgcttaagtatatcatactttttca

SEQ ID NO: 28139 - DNA, 1102 bp, Mus musculus
tttgcctgcctctgagtgttgggattaaaagtatgtgctaccacctcctggccttccttctgctttaaaaattatatttaaaaaaactttgagagtatatgaatatacacctgtgcatgtatatgcctgtaagtggaagcaagaggacaccttacaggcattagttttttttcttccatcttgtgggtcctcagacttcctgtgttaattagtggcaaacgcttttatccaccgagctgcctgccagcctaatcccccacctctttctaaaccacaacaaagaacatcaggtcttcctgagctgctcctggactcctaagacttcagtgctttaccttagactacagtagtagctgtgcactactgtatgtgcactagacacataccatacttgacttttcatactgtcaatgtttttgaaatatttatttctgctgtggctgtttaagcccagtgtcatgtataattatagtttattttataagtgtctagtatctgagattagttggtatgtatacttaaaagttagctttgtcaaaatagtatgttttacttgtggactcctgggttgatattaactcttctgattaatacctttgctgaaatatgtgctacctaaaagctattaaatattttattagcttgtttttctttgataatataatggagactgtggacctatagtatgaacagtgatatctgacaaccagagctggatatgggggagaggggagagggtgtctttttttgcttgcttgcttgcttttttatgagccagatttcattgatatttcattgatgtgatccttttgcgttagcctttcaggagatgagatcctggagtgagcaaccaactcgggcttttttttttttttcttttgagatagagccttcctgcattacccaggctggtttctttataattttcctgcttcagccttctgagcttagagtacaggtcaatgccactatgcctagtgtggtttttatcctttaaagttcaaccgttttctccttttgagacggagtctcactgtgtagccattgatggtttgtaacttgctatgtagaccagggcttccttctagtaaataagtaaatc

SEQ ID NO: 28140 - DNA, 1178 bp, Mus musculus
gaggcaggtggatttctgagttcgaggccagcctggtctacagagtgagttccaggacagccagggctacacagagaaaccctgtctcggaaaaaaaaaaaaaaaaaagaaagaaaaaggtgtgcgcctccttttgactcttacaggcctagagaagcatccactgttagaaggaggctgtgacggagctagagcagtcagctagcaggcgtcttttaaatgtttgccatctttttacagcggagggtttatgtgccacacctacatgtaaaagtcaagggacaacttgaaggaggtgttctctctcccaggcgggccctggaatcaggtgtcaagtttctttacatgctgagctgtctcactggccctaacatggcttcttggcaggaacaagctctctgcttgtgtctaaatccttattctatgaatgtgctgtgcgtacctgtctgccttttcacctacctgtaattcactcttccgtcttggctgttttgaacaatacgtgtgtattaaatcaaggcttttctcctttttgtccctcagagtgatgcagcaggttcagcaagctgcactttgtttagatccggcccactacctgtgttaatagagcagtatatagtttccctgctgggtatggtagcaggcctataatcccagcccttgggaaagagacacatgaggatcaagagatcaaggtcatcctgggctccatagagtttgaagatagcttgggtaaaatctgtttttattaaaacaaaacaaggggctagagacatggctcaatggttaagagcatgtactctctttcagaggacctgagttcagtccccagtccccatgtcagttagctcacaatagcctttaattccagtgttgggagctgatgctctcttctgaactccagagggatctacacttagcacgtgtgcacacttgcatgtgcccgcgcgcacacacacacacacacacacacataagcacatgcatgcatgcacgtacatataagtaaaataaaaattctaaagaaaagagtttctgttcctttggctttttttttttttttttttttaagatttatttattattatatctaagtacactagctgtcttttagatacaccagaagagggcgtcagatctcattacggatggttgcgagccatcatgtggttgctggg

SEQ ID NO: 28141 - DNA, 1233 bp, Mus musculus
ataatccatcattgaaggaagtcagggcaggaattggtgcaaaggtcatagaagacaatgtttatcacattactttctcagcttcttttcatatggcacccaggaccaccagcccacgtgcccacagtgatctggtccctcccatattagccatcaaccaaaataaaataaagcaccgcacctgtatgtgggggtgcacacttttagacccagcattggggaggtagaggaaggcaggtctctgtgaattcaaggtcagttttagtacttagtaagtaatgagccattgagagaacctatctcctggaactcgctctgtagaccaagctagcctctgcctcctgagtgctaggattaaaggtgtgtgccatcatcttcctgctaaactttttttcttaaaagtccatggaaatgagaactcggagggggctctgcgttctggagtggcactgcttggtccggtggctgggtgagggctgctggtgtcacgtttgaggagaactgcgagtgtgtttggcatatccccgtcgggatcccagctacgatgagtgctgcccgggagtctcacccacatggggtgatacgtttagcctcccctgacgatgatcttggatctagcaattgggaggcagcagacttaggcaatgaagaaagaaaacaaaagttcttgagacttatgggtgcaggaaagaaagaacacactggtcgtcttgttataggagatcacaaatcaacatctcacttctgaacaggggaagaagacaagaaaattaatgaagagctggagtctcagtaccagcagagcatcgacagcaaactgacggtatcggcggcactgcggactcggcttcagtgaggtagaagatcattatggagaagatgatgtggctagagatgacgatgaagacgactcccctgatgctgagagtccagatgactcggacagtgactctgagtctgagaaggaggagtctgcagaagagcttcatgctgctgagcatcctgacgacacagaagacccgaagagcaaaaaagatgcgaagagcaattataagatgatgtttgtcaagtccagtggctcctaactaccaaacacctagtctttgtattaaaagtaaaccttattgttataatgcacagtggaggactgcttatagagcacagacctctgtattataatttttttaaaaaggcccttttaaataactacaaagagtgtttgctttcaaatgc

SEQ ID NO: 28142 - DNA, 1170 bp, Mus musculus
ctccgccccgttcacctcccggccgcccgcctcggagcccggcgcctcgctgttcgtggactccagcccgatgccgcgggatggcgttccgccgctcaggctcgacgtgccacccgaaggcaagcgcgctgccccgagcgggcggcctgctctctcggccccagccccgcgcctgggtgtcggcggcagccgccgattgccctttcccacacaccgggcgcccccgggcctgctcacgcgagtgccctcgggaggcccggccaggtactccggggggcccgggaggcacctcctgtacctgggccggcccgaaggccatcgcggccgctccctgaagagggtggacgtgaagtctccgctgtcgcccaagccgcccctcgcctccccgccgcagcccgccccgcacggtggtcatttcaacttctgacggaagctgctcgcgcccgcccgtcgaggcgctggaggccgctggccttcccggactccgagactctcccggggccccccctctcgcctcggtttatttattgacttgtctttcccctgtcctttggcgaggaactcgcccctcggagcgccagcatttcaggggacctggccgactcccactccccgctcccttccagccacgctgccttaagtcgccgctccggactcccgcggactgagccccgggcgggccggccggggctggagccgcgcgctgtgtagagtcctcgggcctcccggggccgggacgtgcctcctcctactgtgtaggagccccctgcttcccaatacagccgtgtccccaagccgctgcctgactttcctcgcggtgcgggaggggaaggagggcgcggcgcccggccctctgggtaaccgtgctcctgaaagtcggcctccactgcagctcggcccccaagtctctccggagcaattggcttggcgggtgtcccaccggggttaatcaggaaaggtttcctgaaggaggcaatcaaagacctggtgtgtgtgggctgagccggggcccaggagagcagtgggtactgattgggggtgccggggaaggcgctcagcacgtttctggatagaggtcaggcacctttccacggcctacactctggggtgggagagggaacttttggagaaataaaacgaagctgctgcgtgatttgaatttcacatcag

SEQ ID NO: 28143 - DNA, 1811 bp, Mus musculus
aagttacatagggtttctttgaattcccttaatccaagtgtggggggcggggtatacatgcgttgctgtgggtgggggaaggctgtagagggagcattaaggaagttgaggcccgaggagatggtccatgttcgtggggaagcaagaaaataaatgcaaaggctccttgtcagtgcacagtgatagggaccaaagtgagccaccatcatggctggctgcctttatacctgttgaagaaaacccctcagagccaggcgtggggcacacacctttaatattgcactcaggaggcagagacaggtggatctctgagttccaggcagcctagggctgtacagtgagaccctggctgggtaggaaatgaaaaaccctttagcttccagacaggaaagcccagatgaggggctgtggatggacagatggcctaggctctgcattcccagctcagaatctcatgttgagagagaactcattctaagaatgccaaggtggacatcccctaacatcagccacttccaatgctgtaagaactgaggcacgtggtgaactctggtcactttctgtcctgatgtttcagagagtagcttgcagttctctacttgagcagatgaatttacaccaaggctgccagcatgcactttaagctcttacctctattttgttttttgtttttctttgaattggggtctcactctagccccgactagcccaggactcacagcaatccttatgccttcatctcccatgtactaagattacagactgagccaccatgccagatcggctctagctccatttaccgaagtgcctctaccctttttggagtttgtgctccatttcttgtgactatccttaccaggagaccaaaagcaagaaggatgtgaattagaattaaatagctttgagcctctggtgctgccctttcaaaggttttaacctctctagggttaggggaaggaagataattcctaaactctacacaagtaattaggcttgttaatagcaggaaattgtgatcctctctgtcttccctgtttccaatcccctactgtttctgccatcccatggctcttgtctttggaaggctttgccaggcactggaacataattagttggtcatctctagtctgtgggactcacctttcctttctctcttttctccttcccaaccacatattttgttctgatgtgatttgtttctgagaattaagtaggttatactctatatttccacttagtttctgacatcttgctatgtcaactgttacagtagcaactctgctccctggccttgctcaatgtgtccttctgccaaggccatgtaggggtgggtagcccaggattcttttcacagtgtcctcttgtttttcaagttgtctggcagctttatgtacaataaacgttcaggaaaacaaaagtttcttttttaggataaaatagttcaattctgatgagcaagcttatatgtacatgtgtgtggatatgcatttgtgtatatatacctatacagatctatattatatatacaattttgtactatcatttaaaataaagacatttcttaataaaatgtcagtattgttgaattctttacagcatggttaaaaaaatgtttttactgtgtgctacagtttctactgagccagtccaactgggtgtgtggtgtgtgcctgcaagtcccagtgccctaactcttgccttggtttttttttttttttttttcttttgagacagggtttctctgtgtagctctagttgttctggaactcactctacagaccacactggccttgaactcagagattcaccta

SEQ ID NO: 28144 - DNA, 1170 bp, Mus musculus
aaagagggtccagtgaccctccaagtggggattacagcatgaggcacaatgatcagctgtcttgttgctatatacaaatttgaaggtccaaattcagatcttagcacccactctaacaaaccatgcatggtctcaggtgcacctgtatccctagtcctctagaaggatgaggcaggaggatcactggggcttgctggctgccagccttgccacaaaggtgaatttcaggttcagggagagacgctgtctcaagtgaacaggcagaaagtaatggaggacccgatgttctcttctaccctgaacctagacacacatgcatgtacaccacactcacatatagacagcacacacaaacgcccaaataagtagaaattaaatattgaatacattaatatcattttatgacttcacataaccttccaagtcagctttttttgtttgtagctcttctaaaaactgggctctactctgtagctcagacttgcctcagactcagggcaatctttctgccttggcctcttgagtgctaggactgtaggagtgaaccgcctcatctggcttgggttggtggagaagatgactcttagatcttctgagttaagacatgttagcggattagtggagctgggttagtgggaatcacgtagcagaggaagtgttcagagctgggcctccagcagggagaaggccaggcttaggcctctacagtaaagctgctttcaggaatacagtgttaagtcagggctgtagattaatacagggaattatagaccctacatttgcattttggttataagagaaagaactgtagctgggcagtgttagcgcacgcctttaatcccagcacttgggaggcagaggcaggcagatttctgagttcgaggccagcctggtctacagagtgagttccaggacagccaaggctacacagagaaaccctgtctcaaaaaaaaaaaagagagagagagagagatgtgttacaatatctgttcttcctggctttgggaaattgtgccttccctccatgttcctgcctctgggggggtctcattattgcaaggtcagagcagagaccacatggctgacataggagaaagcagctttatggggttttgctctgaactctgtgccttaaaagacacctttctgtcagatgtatatttacttttc

SEQ ID NO: 28145 - DNA, 2745 bp, Mus musculus
cacatgccttgagttccagcactcgggaagtagacacaggcagatctctgttgagttcaaggccatgtggtctacgtaccaagttccaggccaggcaaggctacacagtgggaccctgtcttcacatatagcagagcacagctggggtggagaagtggtgcttgctcttccagagaacctgggttccattcctagcacccgagtcaagctgctcacaattacatgtccatccagctcccagggatcatgcccttttctggcatgtgtgtatatccacacacatacatttatatatacatatcaatgaaagagttttaaattaataacaaaaaaattaaactagttgaatgcagtggttcacactttgggaacctgaaacagaaagattacgagtttaaagccagcttgaactccattgtgagttacaggtcagcctaggctacagtgtgggatcttagtgcaagagaaaaatcaagtgtcatggtgtgcacctctaattgtagcactcaggaggtagaggcaggaggatctctaagtttgaggccagcctagtctacaaagagttctggtatagccagggctatacagagacactgcctcaaaaatagagaaaaattagcaaagaagggctgacttaggaatacctgataaattgtgtccattgcttagatacagtataaaaaaaaaaataggcatagtggcacagcctataatcccagcacttgggaggtgagacggaagaccactgtaagttaaagatcagctttggcttcagtgagatctttctcaaaataacagcaaaaacccggaaatgaccagatggagcagtgacgggctctcatccctgcacttggggagcagaggcaagcaggtccttgggattctaactagcctggcccacagggtcagttccagcctagcaggattactcagaccctaacaaggactccctgaggacatagttcagtggtagaacgtggtgcttagcttgcaaggaagccctgggttcgtcctttgacactgtatgtacacagcgagaggagggcagaagtgcagggaagaaaaccgttgacagcagacttaaactcaggagagaagctgtgctgctgatgggtagaagctatgtgcagagcagcaccctccaggctgtgcttccagagagaggcttctgggctctgagtctctggtcttgagatggaaactatatattggctggactttataaacctgcaagcaggaggatcactttcaaaagtttttaaattaatttttatttgtcattgtaacaacatctttcatccaaacatctatttatataaagtcaagcctaaaactctttaaattatataaaatttggccaaattttctgtgtcatgtgggacactggtgctttctgtagcactgagcactctgtcaaacacaaagcagtgtggcagactgaccaggctggggaggtttgcccctgttgatttagtgtgagtgcattgctgcttctgttagtgtggccatggagtctgtgccctgtagtgctcaggtgacaaagggagcaggtatcactgccacagcaaggagccaccccaggcccattgctgacctcccctctcccttactccacattccccttgctcagacacttgaaacattttcagtgctaggcttttgaggaagggttggggcaggtctctctagcatgaagtgtgtgtttgtgtttgtatagctgggcacggtactcatgcctgttagcagtcaagagctataggaggagggttgacatgagtgcaaggccagcctgaactacattgtgtgaacctgtctcaaaaaccacaaaaattagacacctgagcattgtgcctcgtgcctgtaatccccactcagaggatcactgggggtctcagatgagacttctaggcaatacagtgagatgtactctagggcaacatggaccacagagactatatagtccaggatgtcttgtactgtagtcccttgtatgtctttttatgaggtcctgggttcaatccccaggactgcaaaaaacaatatttaaacgtcttatagacaggatgtgatagtacatgtctacagtcccagaactgggcgagggaggcaagaggtcagacggcgagagtcatccttggcaatttctcaagtttgaggcctgcttacaccaaagtgggagaggaataagcactcagagagggattggggtaggtgatgggtaacgtagaattgcttgccttattgtacaggtgccaagtacacttttgaataactgttgagaataggtttcctgattagtgatcatgaagaaaacatgcatttttaacctggaaagagcttggcagttaacatggttctggttaccttgattagtgggataatttgttgcagtgtttcagaggtatagaatcatttttggctcaaaatagactgaaaacataattctccaaatcacatttaacaaaattgaatattagaggtttataggcaaaaataaccattttgaagttaaccttgactgctagcactgtctgctccagggatctgagcatcagggatgatctagtgtgtagagagtgttgtgggagcacagggaggaggcgtgtgaggttgaggatccgtctgctgtggattcttctgtttgcagcgctcttctgagacacccaggaaatggggtgctagcagtaagctattgtgagtggcatttcagagccttggtaactagagggagcaggtttctttgta

SEQ ID NO: 28146 - DNA, 2482 bp, Mus musculus
gctttaatccagccccggggaggcagaggcaggaggatctttgcatgtttaaggttggcagtacatagtgagagcccccttccttgtgactcccccacagaaatgcacattgtatagcgccttctccctcaggcttgggagtttcttcttttccagtgggatttttgatgggcaggttttgaatttgagttacttcagcagttacttggaggaggagaattgctacgggtttgggagcagcctagggtacagtgtgagaccaaaacttgatttttttttttttaattcaggttctgcagtcttggagttcccattctgtgattctgtgtccagcccaaaagaaatgccaccaccagatcccttcaaccagtgacccaagggccccccctctttctctctaacaagtgcctcaaaaggagtgggggctggtctcccttttctccctctggcctctgcccctcctggagatgggggtcaaggcagcaggactgaccaagtgactactggtgggccagaggagctccgctgaagccctgcacacccttgatctgagctgggggttctctgggaacctggaatgggttccttgctcctgaatgaaggtcgggtgctacctgtttaaacttcttgcttttattctctaatcgaggcaggcaggagtgggagccacagctgaaccccgagtttgctaaattcttcctgcttccctgtactctttccttctggaatgaacaacacagaggtgatggggctaggtgaccactgcccagtccgctcggaatttcagaccttaaggtcacagccccgccatgtctctccgctggcaccagggtcttgctccagttaggcctctaatcccatgcttctgtagtattaatagcttcccagaatttttttttaattaaaattttaatttgagttcttttaattacccccatcttgctatctctgtcttttccctgaccctttaagaaactttaggtttcccattgagtaagagttaagggatggatcttaacttgaccacattccatttaagacttggagtcctggcctgccctctgtcagcccccctgctggcccaggtgaaaggaagaggagggttccagataaaaagccaggatgtagcaaaattagctgtatctcagggtcaacttcctgtgagggtggtgaggtaaataggttgaaagcgctctttggagtacaggccctcggtcctttatggaagcgtggcttttcaactccaacacttgaaaatagcttggacagtttgggctgcacagtgctttgtaatggggagggctgttctgcacagactacagcatctcttccccacccccgaccccctgcccagtgtggcaaccaaaatatctccagaaattgccaaatgtctcccagggatgaagttacccacagcttgagagtcaaggtatgttttccttaagtgacttccacatggccccccacccccagtcgggtgattcaccttgagccatgggtaagctagcgccctcatagctcagcagagctgcacatccctgtttcagatgtgttgcttgcactcccgtctctgttcttgatctctgcaagagggcctttcacagtgccaagacgggaacggggtgtgctgggatgggaggacaggacagttacgctggctgtccgtccgtacgctatgcgcctctctgctctagtctttgaacccggttaagactcagggactttggaagatcaggtgtcacggagtggctttaaacgggaaagtactgtagaaacggagtctgtaggccttttgttttctcaggtgttgtcattctggccctttctttgcaggctgattagaaaggcagaacaagacaaatgagctcctgcctgttcctagaagagagggctggggtctcattagctctgtaataggaagcttgttttgtggtaatgggtcagggttgtggaaactgatccgctcctggcgactccagccatcccgttatcccttgcctagtgactgagactttcatttgtccaaagctctgcgctccgtatggcatttcaggctctaagactggtcatggatgttcatttggagtttgcctccttgtggttcaggcctgcctcctttaagggaggagcttgcaggcacggaggtcctgtgcccctagcagcatgctcccaggaaggccatgaatgtcaggtcacagtggcgaaaggttgggcactgtgtggggttaactggagaggacacggtgtgggtgacccctgagctccagtcttgtgtcagtttctttgagcacagtcttctggtggatactctcctgcatcgagctaccttctctgtgtgtctgctgccaccacttaacaaggtgattggaatgagtttgcgagtcgtaatttatattaaaaagatgatagacttttaagatacatttttttttccaataaaagaattaagcaaaacggtttcagagtaatcactacagatgtg

SEQ ID NO: 28147 - DNA, 1890 bp, Mus musculus
ttggtggatgagtgccctctggatcaggggctgcctaagttctccgctgaggctgtctttgagaagtgcagtcagatctcactatcccagtctgccagagcctgcacatcaaataagtgaccattggaagtagggtggggaagtgtggaggaggtgactggcctgcctcaaatgcatgttttgagatgtttgaccacttcagcaactacgtcagtggcttcaggatcgggtgtactgttctcataaccttgggaggagaaagagaaagagagcggctgctgtagggacagctctctgcctctcctctcctggctctaccagtaagacaagatttatttaattttattatttaatctgcactgattttcctgtctttggtgggtacagtgtgataggaccactgtcctggcagagcaggactaaaggaatgtagaccccatctcagtgtcttcagaaggactgtgaacagaggcagcgtctgccatgaaaccagttcaccgctcctctccatgaattgaccttttcaatttttttaaagttatttttgagacagagcctcatgtagcccaggctggccttgagctctgtatgtatctgaggctagtcctgaattcctaactctcctgagtgctgagattgtcaagcactgcattaaacctggctggtctcttgtcttgacttcctatatctttggctccttctgtctcagaatgatgggaagcctgacggggacctgaggattgaggtccttgctttctcctggtggccatgggacctcagaggcatttttgccaagagggcagaacctgactgagccctggatatcccctgtcttagtgggtctgccaaggtcttgtcagtctttttctggttttgctcaagttgaagaatgcgtggagagtcttctggtgagacatcctctgtcccgggtcccatttccccacctgtaactgaggttaggaaaagatgtgcccttccttcctcccagcctttctcccctctgcttcctcattacttttgtcctccctgggagcgttcgcgctctgggtcactggattgtttcgtgtttatgtgtgattgtaccaaggaacttagcctcatgtagcatgtacagggttgtaatggtgacccagcagcgagctctctcccagtaatttgttccgcatgtgtagtctcccctcgcctcccccacctcccatcccccttttttccaatcaagctgtttcccctgttcttaccctatataagttgcaaacaatatcgctgaacagtagggtgtgtggtggtttggggcagtctgacttcactttagtgtatgacgtctgtagccaatgggaacgtgaaatattggtgcgatcactgaaccaaagggattgtgttctgtgactttggtactttgttttgcatttttgtttcatattaaatactttctttctgtttgaggtcttgtttctttttaaaagtataatcaggccttccctctggtaatagctgcacctcccacagattcatctcctggtctcacacaagtgattcatctctaggcctccccccatctccgggtctcccacagactcatctccctgtctcccacctgtcctttgatgacccggctatgagatattcctgtttatcttcaacctttccttgactcctgtttccagagcttcccttccagggctgggcggtggtggcgcacgcctttagtcccagcacttgggaggcagaggcaggcggatttctgagttcaaggccagcctggtctacagagtgagttccaggacaaccaggctacacagagaaaccctgtctcgaaaacaacaacaaccaatcaaacaaacacacacctcagttgtagctgggcagtggtggtgcacacctttaatccca

SEQ ID NO: 28148 - DNA, 1717 bp, Mus musculus
aattttatgatggcagtgctacagatgctccatatcttctgggcctacttcattctgcgtatggcccacaagttcataactggaaaggtgaggaaggcccaccccccttttgtaggtctcacttctctcacactgtaactctccaaattccttgtcatgctgcaactctctttaaaaagtatgagggtttgggggttaacaggaaacttagaggcagcccttggatactgaaggatatataacccttttgtccttttcacagctgatagaagatgaacgcagtgacagagaagaaacagagagttcagagggggaggagactgcagctggggcaggagcaaagagccggctcctagctaatggccaccccatcctcaataacaatcatcctaagaatgactgaaccattgtcctagctgcctcccacatcaatgcatgaggccaagaaactagccaagcttccctttaggggcatttgagctctggggagaaaggatatgaggagtctacactgaccttccacttcttttttcacccagttgcctttaaaccagactctaaacagcctatctccaggtagaaaggaggcttggccacatccacatcctgttgagagacatagtctcatttccctctctaccttctaagctacccttcttgctaatccttcttcagctctgagggttggaatcataactcacattcctcattcctaagaatttggagctagctgtttgcctttgactccctgacttcaagccagggttgtgccttactgtcccttttctgggcctcattctgccaaagctggaccaaggttccatctttctaagctccctagctcaggccaagaaagaaagctgagctacttttaactttctcttccttaaatacaagtcaatgaagtgaaggagggtatgcatacatgcccctcaccctaccccagggaccatggttcctaggatctcactgcctccctctctggccttcctgtcccctcccttcagctatgacagctggtgtggagtagaagggcaactagttctgttatttattgaacatttggggtttcagttgtaaagccacaactacaggtaggacctgatatttcggcgagggaccatttcagaccaaaatgtactgttaattttttttaattaaagtatattaaaggttaaataaaacatgactgtgtcagactattaagacttgagaaagggttagtttttttcttaggcctcccttgtggttatgtaacatttttagttaaaaattacacagggcaaataaaatcgaggtataaactaatgatagttgcccactgggaaatgacatggaagatcaaggcaggagataagacaaaccacaatctctactttaccatcttgttagaagactttcaagaaaccatacaaatcagggatggcagatacacagcccatgtgaatcatgaatgcatacaagatgagaaggacctcaggctgatgctagagtggtcatgtctacccaccctagtgcctgctagcaccacgctgggaaagtcctgattgagaatccccatctctatctactaggagctgggaagaagctagatcagagacttggggtcagagttcaacagtcaggaagacccagttcctggggaaaaggatagttcaagcgttctcaaagtgaggaagtcttcctctaaagaagtctccctctgcattcaatggcc

SEQ ID NO: 28149 - DNA, 1221 bp, Mus musculus
gtcatctttaaacttacagcacagttgcagccccaacctgtttgtccagaatgtgtttgtggatacccatgatcttcgcttcccttgggtggccttctttgccagcaagtaagggggagaatgaggaaggggcaagttgtgtggaaatcggggtgaggcgtaccttcctttgtggtcaggcttcacttttaccctctacacttattctttttcgcacttcaggagaatccgggctggaacagaactcacttgggactacaactacgaagtgggcagtgtggaaggcaaggagctgctgtgctgctgtggggccattgaatgcagagggagacttctttagaggaagacttcctcactttgagaacgcttgaactatccttttccccaggaactgggtcttcctgactgttgaactctgaccccaagtctctgatctagcttcttcccagctcctagtagatagagatggggattctcaatcaggactttcccagcgtggtgctagcaggcactagggtgggtagacatgaccactctagcatcagcctgaggtccttctcatcttgtatgcattcatgattcacatgggctgtgtatctgccatccctgatttgtatggtttcttgaaagtcttctaacaagatggtaaagtagagattgtggtttgtcttatctcctgccttgatcttccatgtcatttcccagtgggcaactatcattagtttatacctcgattttatttgccctgtgtaatttttaactaaaaatgttacataaccacaagggaggcctaagaaaaaaactaaccctttctcaagtcttaatagtctgacacagtcatgttttatttaacctttaatatactttaattaaaaaaaattaacagtacattttggtctgaaatggtccctcgccgaaatatcaggtcctacctgtagttgtggctttacaactgaaaccccaaatgttcaataaataacagaactagttgcccttctactccacaccagctgtcatagctgaagggaggggacaggaaggccagagagggaggcagtgagatcctaggaaccatggtccctggggtagggtgaggggcatgtatgcataccctccttcacttcattgacttgtatttaaggaagagaaagttaaaagtagctcagctttctttcttggcctgagctagggagcttagaaagatggaaccttggtccagct

SEQ ID NO: 28150 - DNA, 1160 bp, Mus musculus
aggtgggaatctcttctataaaggacatgataagtgatatatacctgaataggtaggaccagagaggggcaaaggtacttcttaaacagtagaagggaatcagattttggctattgatgtttctttcagtgagagacatcatttaattgtattattttctccgagagatattttaacccaggaagtaccaaggaggtaaacaaaagaaaaaagaaaaaaaaaaattgggaagggcaaagcaacaagctgcagtgacattgacttaatgtcagaggcaaaggtggcaaagtaagcatataatagatttaccctgctggtgggtgtagtactgatgaagaccatcaattctcttgattctcaggcaaaatcctgacagatgactttgcagacaaagaaggcctggagatgggtgatgagtactttgcaaatctggaccacattgaaagtgtggagaacttcaaggaaggatatgagagtgatgtccccacttcctctgacagcagtggggtagatatgaaggaccaggaagatggcaacagcggttcagaggaccctgaagaatccaatgatgacagctctgatgataacttctgtaaggatgaggacttcagcaccagttcagtgtggcgtagctatgctacccggaggcagactcggggtcaaaaggagaatgaattgtctgagatgacttccaaggactcccgccccccagacctcgggcctccacatgttcctatcccttcctcagtatctgtagggggctgcaatccaccttcctctgaagagacacccaagaacaaggtggcctcgtggttgagttgcaatagtgtcagtgaaggtggatttgctgactctgacagccgttcttccttcaagactagtgaaggtggagatggccgtgctgggggaggccggggagaggctgaaagggcctctacctcaggattgagcttcaaggatgaaggagacaataagcagcctaaaaaagaggtaagaactttgagagcagccctactcccctccagaaattacttactttaactcacaaccctggaggtacaaagctgcatctggtgatggccatcctagctggcagactcccaaggtggtgtaaggcattacatggctagaatcagggaatatctatttgtgttaaaagc

SEQ ID NO: 28151 - DNA, 1172 bp, Mus musculus
gtcccaccagggcctccaacccctccagggcctccagctcctccagggcctctagctcctccagccttccatggcatgttagagcgggcaccagctgagccctcctaccgagcccccatggagaagcttttctatttacctcatgtctgcagttacacttgtttgtcccggatcagacccatgagaaacgaacagtatcggggcaagaaccctctattagttccacttctgtatgacttccggaggatgacagcacggcgcagagttaaccgcaaaatgggctttcatgtaatctataagacaccctgtggtctctgccttcggacgatgcaggagatagagcgctacctttttgagactggctgtgactttctgttcctggagatgttctgtttggatccatatgttcttgttgacagaaagtttcaaccctttaagcctttttactatattttggacatcacctatggcaaggaagatgttcccctgtcctgtgttaatgagattgacacaactcccccaccccaggtggcctacagcaaggaacgcattcctggcaagggtgttttcattaacacaggccctgaatttctggttggctgtgactgcaaggatgggtgtcgggataagtgagttggtggggtgtacaggcattgctgtctctgccttcaggtttattacagttgcttttcttttcttttttatttgtattgctttccctgttttcctttacctcctctttcagctagagttctgctaaggtcattatgaaatacagatacagaaactgggtacagtggcacatacctgtaacttcagaatttgaaattcagcattgtggcagtttcatcttgagttctgggccagcctaggcttcataataactttgaagctaggctgagctagctacgcagtgagatcttattgaaagagagagagagagagggagaatgaatgaacatgagatagggagaccagggtctgatcgtcttaaatgtccccaggagtaaccctggaaatgtaggggttatgttctgttcctgtctcctcttgctgtttctgtctccccttaacctttcatccttgtgttcaccatttagattctactttattctcactgtatcttactcatgctttttctcactacctttaccttatccccatcctctgtt

SEQ ID NO: 28152 - DNA, 1238 bp, Mus musculus
cagcggtcttaggggtcgtggccgttgtcgaggccacggggctcgtggaggtaaagctgaagacaaggagtggatccctgtcaccaagctgggccgcctggttaaggacatgaagatcaagtccttggaggagatctacctgttctccctgcctattaagaagtctgagatcattgacttcttcctgggtgcgtccctaaaggatgaggttctgaaaatcatgccagtgcagaagcagactcgggctggccagcggaccaggttcaaggctttcatcgctattgggaactacaatggtcacgttggtcttggtgttaagtgctccaaggaggttgccactgccatcggaggggccatcatcttggccaagctttccatcgtccctgtgtggagaggttactgggggaacaagattggcaagccccacactgttccatgcaaggtgacaggccgctgtggctctgtgctggtgcgtctcatccctgcccccagaggcactggaattgtctctgctcctgtgcccaagaagctcctgatgatggccagtatagatgactgctacacttcagccagaggctgcactgccaccctgggcaattttgctaaggccacctttgatgccatctctaagacttacagctacctgacccccgacctctggaaagagactgtcttcaccaagtctccttatcaggaattcactgatcatcttgtgaaaacccacaccagagtctctgttcagaggacccaggctccagctgtggctaccacacaagggtttttatacaagaaaaataaaagaattaagtctgctgaaaaaaaaaaaaaaaaaaaagaaaaagaaaaagaaggccttggcttaatctcctcacttgtttaacaaaacaatacaaaggactggaagctggggagatggctcagtctccccacaagcatgaaaaactaagaccaggcaccagaacccaagatcaaacacaccaagcctatctttgtagtccaagggctggcaaggtggggggttgggggaggggggaacaggggcccctttagagcttgctggccagccagcttagcctagttgttaagatcagacaatgagagattctttttttttttttttttttttttttggtttttcgagacagggtttctctgtatagccctggctgtcctggaactcactttgtaggccaggctggcctcgaactcagaaatctgcctgcctctgcctcctgagt

SEQ ID NO: 28153 - DNA, 1213 bp, Mus musculus
catcctggctctttattgatcaatcaaaaaccagtttgggtgaccaaaattagcattataacacaagcagcattagaccaaacccacttcatgtttttatggttacttcctaagcattaaaacctagatcctttaataacatattctgaacaagttgagggaggctatgtttgtgtttataagttggagtggaaagggggaaagtgagaggctcctaaccctaacccctgccccctccagaagtcttatcatttaatgtaagcctttttattttcctttgagtgctaagaggcaaatagcaacttagagaaattgcaggaatacttactgtaaaaagtttgccagtggatatttagggtaggaacccatggcttatatcgtggtataagcctgtgattcctagtggagcagtgcatatgtacccaaggatcttgctgcttcccatgatcagttgtgtatgttttttcagagttcactattaactttggtttattttcttgaccaggaactgaaacatttgatcttggaggcagcagatggctttctgtttattgtctcctgtgagactggacgggtggtgtatgtctctgactcagtgactcccgttttgaaccagccacagtctgaatggttcgggagcacactgtatgatcaggtgcacccagatgatgtggataaacttcgagagcagctctctacatcagaaaatgccctaacaggtgagagctggctggacagcagatatgtgggggaaaagtctttatttcactcaagtagttaagatatttaagcccgaaaaaccaaaaaaaaaaaaaaaaaaaaaaagatatttaagcctgtacattggttggttgaatctagcaaagcttctaaaatttttttccttaatgactataattgtttttaattcacgtgcaaaatatccactctgtagcttattcttagaaaatatttcatcagtgcttgtgttcttataaaagctcatttctatcttaataatatcttaaaataggatggagaggctgttggttagtgtataagggacttgtttgttgtcactgtatctctattaggtcatttcccctccaccagtaggtgagactcagtcctttaccatcgtttggagaataagtgccacctgttctcagcaactgtacaggaagtaacaaaatggaaacaaataactaggagttaaaataggagaaactagggc

SEQ ID NO: 28154 - DNA, 2559 bp, Mus musculus
agaacagagaatgaggaaagagttctcagaagagggaggttgagagaactcgccatgcagacttgtgcggctcaggaatggtggtggtgtgggtgggggaagggggtcctggaagggaactcactaaaataagggtatgtgacccaagtctaccctttttctcattaggaaatgctgtccatgctgggagaccaaagcaacacctacaacaatgaagaatttcctgatctaactatgtttccccccttttccgaatagaactattggggtgaggataagggtggggggaaatcactgtttgtttttaaaagcaaatcttttgtaaacagaataaaagttcctctcccttcccttccctcacccctgatatgtaccctttccaccccttgacttgctgaagaaacgttatagaagaaattaaatgaatttcccaggcttttaggatcctctgaaattttgaggataggtgaggcctgaattcctgtccttatttcttctgaccagaagttgcacagacatgatttgtgctggagtcaaggggcagaacagaagaatctgacaggcactaattggatactgtggcttgtttggatagaaattctgaatggagtggaggaaaggagaaatgccctcatcactgaggatcatgaaacacagtaggggtgtgtggagccttgggacgtgagcagtctccagaaagaggcctgagagagagcatgaacacttatctttgtgagtgagtgagtgagtgagtgagtgagtgtgtgtgtgtgtgtgtgtgtgtgtgagagagagagagagagagtaagagacagagacagatggggtgaggggggcatttgagctcctatgttttgttccctattatagagtatatgcaaaatttgtcccagatcttctttgactttgtgcttgctctttaaagtgtcctaagaaaattaattttttcaggtatttttctatttagtgttgcagccaaagagtatttaaattaagtctttgctgcacttaaattcatacccagccaaaatggaactttaggccaacccccagccttctgttgctagggttggtctcctacagacacagtgatcaagctggatgactcctgctctttggtgctttcaactcattgggaagagctgcagatattaccaaaataggctggctacatgaacactgtcagaaatcccagacttgcccacaaggataatgctgcatttttctgtcagagtcacacatgtttttctggagaggttatttctgcatggaaactcaacttcttggattagctatcttgagtgaaagtcctcactgacgagtatgcaaaccaaatagcctcctgcacagtagcctctccttcctgtcaccaaaacagttttaggtctgctgaagtctggtgttctttgctccttctgcaatcttgaaattggggtttgctttagagcacaaacataagtctgtgttaggtggacttaaatcccaacagggtcacttgataattatagccatagaaatgcagatgcaggtaactgcttttaccctttaccgtcctcaggtgagtctcctagatcaacagcctttttttttttttttttccttaaactggctcctgtcaaagattaagttaatatggaaaagacctcttatgtgtattgatggggcatgaggagcccaggcaaggagaggctcgtggagaggctgagggaatgttactaagtttccctccgtttgtctccagtctggtgccaggcagtagagtggaaaaggaggctatttttttattctatgtgcacacatacagtatacatatatatttatatcacattttactgaaccaaaaagttgggtttccaataaaatacttgttttttaataaccgacttgtttttaactgtgatctgaactataatgtacagttattacagggcttctgaagaagggggggcggggagaagcttctctgaggggctcgctctgcttttccttcacggttttatttttgattgttttttcttgttgcccatctgtgctaagccttaactgtggcaaaaataatgacatgtagcaaagattttaaaacaaagtattttttcttttataaattgtgttgtgttgtgtgatattattgattgcggctccctgacccctttacagacatgcacaactaagcattcataagtgagctcgacacacacaggcacagagcgtagttgaatcttcatttcaagactcagagctcacagggccctggtcacttagccctgttctcgtgtacccacctgatcctgacacatcaggagtagtcagtagactactgctcacactgtctgggagtgggggttgtctcatctcacagaagttgctggggagtgttcttggatttgaagccactatggggcatcctgatgtctttccccagtgtgttctcccagttaaaaggagatgaagggattgtgagctttaaacagttcagatgtggatctgggctctctctactcaggtggtacattgagatcctggggtctagaaatcctggggtctgtgccaggaatccag

SEQ ID NO: 28155 - DNA, 1292 bp, Mus musculus
gtcttctggtttgtctgaagacagctacagtctactcatgtataataataaataaatctttaggcctgagcaagcagggactgagcaagtgaagttgaccggagcgagcagggctgaccagagcaagcagaggtcctaaaattcaattcctaacaatcacatgaaagctcacgacactttttccagcctccgcctcggaccctgcagccgccgcgatgttgatgcctaagaagaatcggattgccatctacgaactcctttttaaggagggcgtgatggtcgccaaaaaggatgtccacatgcctaagcaccccgagctggcagacaaaaatgtgcccaaccttcatgtaatgaaggccatgcagtctctcaagtctcgaggctacgtgaaggaacagtttgcttggagacatttctactggtaccttacgaacgagggcatccagtgtccccgagactacctgcacctacccccggagatcgtgcccgccaccctgcgccgcagccgtcccgagaccggcaggcctcggcccaaaggtccagagggtgagcgacctgcaagattcacaagaggggaggctgacagagacacctacagaaggagcgctgtgccccctggagctgacaagaaaactgaggctggggctggctcggccactgagttccagtttagaggcggctttggtcgtggacgtggtcagccacctcagtgaagttggagtttatgttgtattgaataaactttaaagaaaaaaaaaaaaaaagctcacaacaatcagaacaggtacagtgtactcatatacataaaataaatcttttttaaaaaagacttgaaccccacccagtatttgggaggcagaggcaagcagatctccatgattgtgaggtcagtctggtctacagagtaagttccagcaacagccaaaactgttacatggaaaaaccaaaaaggagaggaggaggaggaggaggaggaggaggaggaggaggaagaggaggaacaggaggaggaggagatgatgagataatggcttaatttgaaaggcggaggctgccctatgtgtgtattcatataaaagtaatacagtcctatctacttgatagatgctcaagaactactctatttctttggttgcctttcgtttttgagacagggttgcactgtgtagtcttggtttgcttcacactcgagatactgtttcagcgtcctttgtgggagtattatagacaggaaccatcacacaggttaagaactattattgaactatggctttgtttacattagctggtat

SEQ ID NO: 28156 - DNA, 2324 bp, Mus musculus
cttagcaaaagtactttgactcaggagactacaacatggccaaagccaagatgaagaacaagcagctgccaagtgcaggagcagacaagaacctggtgaccggtgaccacatccccaccccacaggacctgccccagagaaagtcctcgctcgtcaccagcaagcttgcggggtaacctgggcccctctcttccccttcctcacccactggactgttatatattgtaggcagggaatgggcacctagtcagagctcagcttgccatccaggggagacattctgctgggggcttaggttgaagatgggctctgagttcatttctttgggtaaattgaaacttgtacaccctcatgatagcccagtagagacccaagagtaggaaagactaggagtgcagagtgctgcagcttttcctgtggtgagaatgtggaagatgcaagttctcctgttggaggagcaagtccttagacgggctatcgtggagcagtgtgacaggttcagtgtcccaaggctgaattgacatgctgagaaaggtagagtgaaggagatgctctctgtgcttctaagtgtgctgtcccttaggcctctgtgctctgtgttcccatcgtgggtgtttaggggaccttcaaaagagaggagatttctgcttgcttaaaattacagggcccacctaacccctctgctgtgttcctccaacagctgccctgcttctcaaggagtgtaaagtttaacagacgttagctacttatgaaaaagaaaatggtatcttttctcttccagcatgttgctttttgaaagtattatgggataatggaaagagtttaggagttgaaatacttgggctgtagtttttgtcaagctcaacagcactgatgtgtgagcttggccaggtctgtagcctctctgaattgatcctgttcctcgtctgtaaacagacggaaacgcgtgtgtaggctaactctgactctaaagtcctacacctgccatacccttctggtcatcataaaaccaaaattgaggcaggcccatggctgaacctcagctctgtagagccagaagtgctacatgggacgagagagagtttgagatttaagggccatagcttccaacaacagtctcataggtatcatagcctttttgagagagaaagagaacaaacctgaaaaggctgtccctggatgtgtcttgactctgcccattttcctgggtctgctgttgaccctagctgctacaaagctgctctggcagcagactggataggcctgaggagacaggctcattgacgtggcatcttgcttcagatgtatgttaggcatggaggaagaagggatgaagggagctggtccccagagcttagagctactgccagctggagcagctgctccttagcagatgattcactggtggaggatggaaagagggtgcagggagggaggcagcagcctgtcttgctgtgtcatcactagtttggcctggatcttactaaatgccacctgctcgtcatcgacagagagggccagagtgagaactgctcaaaagagcaagatggtgcagtctctctcccctttccagattgcactgtgcccttaggatgtctggcgagtttgtggatgtgtgtgttaggggaaggacatgtaaatatgcccttctcctgattggccactgcccaggtctctggccatcattcagattgggtagaaatagattggtgaggaaggaatggagagagcaggacccctggtctccctggcccccaaactctttgactctcatttgtaatgtatataattttgtgttttttgctccattttctcatgctgtcatccttaatgagaagtccatgtgggaaggggacaaactgaacatcactgtatagtttcttcaatgtcccaaccatgtttacatagatatgtcatgttattatatatataaatatatatataattttgtacgttttcttcatctccgatcttctcgaattctgtacctttttctcccctgtctgagctgccttatctattggttagatttgtgtctccagagctgatatgttcacaatgagtctggtttttagaaaaggacaggagaaatagggaaatcaagctggcttgtcatcccagctgttcaacaaactgaggcaggctggtagcctgggctacagagtgagttcacagctggccttgggaatttagtgagaccctgtctcaaaataaaaagcaaagatagggctaggaatgtagttcgtatgtagaatactttcctaacattcagaagaccctagtttcaacctccagtaatacacatagtagttagtgtgtacaca

SEQ ID NO: 28157 - DNA, 2894 bp, Mus musculus
cactggaaagaactccagaagtgtctcttgcatcccagaagtaggtaattggttcaccattgtttgggggatattttaattcaccgtttctctgtatgtagtgttacaacagcagaaacccatacttgaaaatgtgcttttcttttttgttttctaggatgggtttgtggagttcttccacgtacaggacctagaaggcggcatcagaaatgtgctgctggcttttgcgggtgttgctggagtaggggctggtctggcatatctaataagatagccttgtgagtgcaataggggactcttaaagctccagccaccaaactacatgcatctgtgaaaacatgtgtatttatgaaggtggacttgaagctgcccaggattttaacagtccagttctactgtagcaacatagcaaaaagaaagtggctacaggattgtggctaacaagaataaatacatgggaaaagtgctccccctggaagagtcactgtctgaatgaagcaaagttccctctcagcaaacactgagaggccatggagaaggacttctagaatgaatgaaaggggtggatggaaaggtttgatttcctatctagagatggaagaggggccagtcatcaggctagtcacaaagctcaataaatatccattactctgctcagagtgttgagagagaagccctaattaacaacgttggtgacttgtgtaaaatggatttgtaacctacaagtcaccaaacgatgactagaagctgcagtgctgtacaggaatgtgaagggaggcctctgagcagtccagggtgtgcttgacaaagtcccaagtgctcaggacttttagccctgtctactttggcttggtttggatgattcttaagtttattagcctagtgatggccaaaaagtacttgacttaaggttcactaattagttacaaaactgaacagcctcgatttttaagaaaatttatgaaatgtatttgtctgtaaaaattgtatatatttttacagaaagtctatttctttgaacataagagggaagtcttggatttagtttttttccatacccttttgaaatttgcagcttctctagttagaaatgtatttcttacagctttttaagactttgtcatccgttctagtgtatatgcagagcctgttgtgtgtgtggactggttatagatttataactatgcagggttaattatccaatcttttttttttgtatttaaagatcacaggtagatagatgtaagacatttgatcccctgttgacttacaaaattgtaaatggtaaagcaggctagagtcttaaccatggtgctattcactgggtttacttgtttaacacaagtttatacctggtgtcaataaaacaaatatgtatttcttgtctactaaggattgccaagctttgttttgaatttctgtattggtctctaggtgtagcctttacttcctttactgttggcgtgttatgctcccagttcccctatagagtcgtctacacttcctccctgtgctcttcactggccattttagttatctgcattagaactctcaccccaacccccccaaaactttgaacctaaataacccctcccccatcctaatcagagtcagcacagctttcctgtcagaggataggaacacttgctctttgagccccgtgaccgacagtgaccagggattggcattcttggattggcatgctttccattgttactttgtctattttggtaagaaaaacatcaaaggtccccttgggaatttcaaaggttggaaattatacgtttatacttttattagtttgctccaagtatgactgtgttcacttaagtttagagaaacactgggttttgctaaactcggttaacaaaagccactggtaactgaaggtatttaagctagggtcatttgaaagcttcagcctcagaatgtgacctttagtcagggctgcagataaaaataggcaggaatcaaatgactaagaatgtaatagggaagaagtgccctgcctgccagcttgggagtgatttgtacctgtgtatttatccttgatcatagtttgcttatttatgtttaactcttcggacttcagagcactttatgtagttgaataaaccctagaggttgaggtgactaaaaggttagcctctcataacccagccatggaagttttgtttactaggagcctgacttcccagctcacaaagggtgaaatgaaagctgaagtacagacaggatcttagtaggtattttaggtccagggccatgaagacttggagagcgcagtggctgggcaaggggctgctttggagggaagaagcatgtggtctgagtgctgactagatgaatagttgaggcacatccttcagagaagagggaggggctgcttggaaagatggctctcagcaaaatctgtttgtcttacacgtctctcagggaaaaaacatgcagtcttcaagcatcttccatgtacattctatctgggtgaacaccttcattctggtagagcacctaacactttaacagctgttcccgaaagggttaggaccaactgcaagttaatgtgggttgtaaatgttcccctaacttctgtttcttctgaagagaaaataaacctttttccccccaaagtaaggtgtggtatgggtcttttcttatcgccttcctctcttgtgcaagccttttagggaagtcagttgaacaaatagaagtgaaataaaagcaaaattcagtattgatttgccttatggtaaagaatataggacctgtaatttaaatttgtggttaatgtattcctgttttaaactagttcggtacgtttttgggttgcgggggagaatgcttagcaccacacctggctttctcattgacaagttccttgtatcttaaattta

SEQ ID NO: 28158 - DNA, 1202 bp, Mus musculus
actgggacacctaagaaggagagatgtagccatagcagcccatgcttgccaggttctccctcccgtatccctggaaagtccacccttaagtctagctgtaaacactgggtagcaggggtcttcatacctgtcctcaaatcttgtctctccctacccccatcctccattccctgccttctctttgaggccccgcctacccacatcctcatcccatctaagttctgctttccaggaaaaacactgtttctgctgcctttgaatggcaccatgagaagaatccaaggatcgctggccaaagtaggccagatcagggcatgcaaaggacagagaggggggcaaagctaggtcctgctccccctccctgggaccccagggcttgggaatttgaggaggagaccaaatgggctgagctgagttcttggagctagggaggaggtaaaaggcaccacgtccttcttcagttgagccagccactgaatctacgacttccctgatggacgagtggccctgttcaacccactcatcagccctctgcctgcccagtgaggctggaaggatggggggtgtgtgtgatggacacaacctgtctgatgctggtcccctctccacctccctctgcgcctctctgctcctccagtctgtccctgatgcctctccgtggtctacccagtacacataatcctgtcctgagctggttttggcagctctctggagaagtgaggggtggggggtgacgagaactcctggggctagggccaggcctggctccctctctggaaaagtccaccccaccctcccctgcataggggagcaggagccgacacccccccccccccccgcacaaatgtatgtttgtcctttctccacgcccagggtgaggaaaatgaggttggaagtgggcatcctgaagtcacggtggaccctggctgagcacaaacctatgctgctcctggtcacacccccttgtgggccagtgacaccaaggaaagtgacttgcagggtgctaaccccttcaccccaggctcacttcaggcaaatgagccaatgcagagtggacgggtggagggagggttagtaagggctgggctagcagaggagagatgctgtcctgtcagaatgccagggttttcacggcatccccccccccccaaacatcccaacaggtgtcttttccctcaacctctcacaacagattgagttgt

SEQ ID NO: 28159 - DNA, 1145 bp, Mus musculus
actcagccacatacccgagctctgcaaaggcggtttagcttcttcgtgtcatttcattgtcttcaggacattatgaaatgaagttgcagactaatggaaggagggatacgtgggagaggcttggctatgagagcagaactggagtcaaaacttcggtctgcacactcccagcacagctctgctaccacttgcagaaaataactttcaggaatggggtaacttctcccactgtgtgggtcctggggatcaaattcaggtcttcaggccttacccactgagccatcttgccacccttgacattaaaacactttgtctaaacaggtatgagggggtatgctctcatcccccttcctcagaagaggatgccctgcggacctcaggtggaagctgcggggagagccggtctctcatgaattgaccattaaacaccttgtgttctgttgagacagagcgtggggccaggaggatgtcctgtgctttgcaccttgttagggacttgtcatcagtggctgtacctctgacgtggcctcagggttctgaaggtttgaataccaccttctgaggctggtggctgctgctgtctgatggctgagaacagatggatcctcagagctggccagaccccagcgatccaagccaagtctccagggaggtggacgagaatgctctcttccctgctgcctcctttggggaggctgggtgtggaccttgggaagagcctttgctgcaagctgggcacagggctgtcccagagccaccgatgcgctgaactaagcagagtgtacatgagatttgcagcaggacagaacaggacagtcaactttggcttcctcccaaacaggggagggcttagtggagcccagggtgtggtcagaggaggacagtggctttggtgacccgagcaaagggtaccactgtgtagggatctctccaaggactgcagtgaaacaggccttgatgaggctgaggcgcaggcttctacaacaagttctttgatgttgaaatgagagagcataggtcagggcaactcagggccacccaagggcctggagggaggggtatcactgtccacctcaaattagaaagcaatgttagggatgcagaggctgttcccccaggaccaggctatggggagacctccctct

SEQ ID NO: 28160 - DNA, 1156 bp, Mus musculus
cattacacctcgtgcatgcatacatacatacatacacacacaaaagacatgatccaggtaagatgcaatcccatgggtattggtagtaggaaaagtaatgaggtgaactgatcttcatatgcatccatacacataaaacatgatccaggtagcccaaggaggaacatgcaatcctacggggtactgatggtaggaaaagtaatgagatgaactgatcttcaagttcatctcctcggaactgagcatcagagacttgacaggagagccagtgtctctgatctgcctcatcttcccttgactccctccgccctcacagaactcctcagccttgtggaggtccttgggagcacctgagacactgcagagggtatcaggaatttctttccccaaagtagagttactgaggaactgggaagctcgaagagaagcagcagagttaagagaccacagacgcattgggaaggtacagagcacagaagagtggcagggtggcagagggtgagggcaagggaatatgagctggtcttctgttggctttttatcttgactttgtttcagttttcattttttttagacagatctcatgtagacttggttggcttcctgctatagctaataaagacccaaacccttgacctttctccactccctcccaagtactgagattaaaggttcaaacaaccacacctggtgaaagagtgtgattgtaatctgccacaagattcgctcagagggagtagctctgtcacttgcttctctagttccaaagccctcccccacttgagtgacaggtcacattctttccccaggaacaggagctcttcttcttccatgaactgagccctgggagctgttttttcttgccacgagggacaagagtctataatgccctggtggctttcatcagggtaaggaggacacgagtctagggggaagggatggagccaaggtgtttgagttcggctcaagcacgcaggcatgtgcctagagtcctagcaccaagagactaaaagagaagtgtcatgagtttgaggacagcctgggccacatagtaggatcttgtctcaaagggagaaggagtagggagtgagagcagagtcttgtagaggccgggtgacttaaccaggtgctcctgctgtgtacttggaagcagcct

SEQ ID NO: 28161 - DNA, 2102 bp, Mus musculus
caggcagtgactctgaggcagtacaaacttcattatgtgcagtaaaaagttttctcttgctagatgtggtagcacacacaagtccagcactgggaggcaggggcaagagaagggcacgtttgaggccagcccgggctatagagtagaactttatctcagaaagaaaggaaagtttctttgttgaaagaaaaagctgaatataataatttcaaggttaaaatgggaaatgatcacaatatgtaaagctagggacagaccactcagtgaccaactgtcttttgtaaacaaggaaaagggaaacattttgatggttctccgtatctattctaagcccttgtctcctgctttcccttactttttctccctcagttattctgactaaattgataatgaatgtaggtaaaatgttgtccctgccttcttaaaaatttaagtagacacttaactttactatggtgcctaactggtggttttcagcaaacattaactattagagaaaggaaaatattgtgtctttatagtttctttctaccctcacccatcacagtcctgtattcatcctgttcttgctgtttcagaggcgattgggtggtatccttacatgatactgcgtaggcgtgtcttagaggcagggggtactgagaaagcagcgtcctgaggaatccatgttatccctcagcaaatagcatcttggtgctttcagtacccacctctcaccctcaccctcaccctcatttgagttgcctgagtcattgctgtggaggggagagctttcttccctgcattaaaaactttgtttgtgtttctgcatcgaatccctaaggggaagacaatcgtggatcttggaatgtttctgtctttgtatctgggaagcagacactgcacactaggttttctggtagtgtgttgcaccggggcacacgctgaggacctccagctaggtgtgctgcaccagtgtgttgagcttttgaaggaattccagcaagttcacacaggactctacagaggaaagaaaaggagggctttggattcctcagtggggtgggtagggaatggagggaagggtggcctgtggttgaagacaatccttttgtcttggagcaaaccactttttttttttcctgaagaaaggctgtccagcagagcccgggagctgtgatctctgtgaggtacagcaagaatcctcagaattcacatccgttttgagccagttctttcctctcaagcctttctgccctataggtctcctcacaaaaatgcatgatatcatgacctcgtgttttgggttgggtataacatagcaaagcaagggaaatatagttatatactgagtcttaagacatttgtttagtaaaaaagaaaaaaaggtatcaaacagagaatgggggcgggggcggggaaattgtgactttcagaattgatttttttttcccagaaattaagtgggggtatttttcagtctagaataaaagaatgtgaattctttctaccgctcttatttaaacttaaatatactgtttacttgaaaaggctctcttgactatttgattttctaagaaaacagggaagtatcaggaaagtggtttctgaaatgttgaagcaggataactgtcttcaaaagcatagcggccgccacaagacaggagtgcgttgtacagttcaaggacggacttttcagggcttggggtttgtgggatattttttgttttgttttgtttttgccacaagatcttcagtgtgtttgtttcagggtggaagtgggtgttatatgaagctgtcagatattttaaggaaatcttcctacaacagtaaatgaagacatctgtatatatgtgatatagtgaaacaaaagacatttctggtattcataaagataaaacaaggattttattcttcctgtgtctgtgatttaaactcggtaccatactctggcttttgtatttcaccctaagtttaaaaataaataaacaagatattttttaaagaatgcacaacatagtgtgtcttagcaaggacatgagtcatatgaagcagagtgagtagttgtcactaaggtccttgatgctcactgtaaaaacacaaagagttccatgaatactcta

SEQ ID NO: 28162 - DNA, 1165 bp, Mus musculus
ctactgaccatcagcaaggccaagacccaaataacaccccaacattgcacgttattacctgtactgaccgaagttttatttcgatgtaagtaatctctcaatagatgggataaatactgttatcctccccactcccccagccaaataatgtggctttggttatgtttacttatgcctgtgtgttttgtttttttaaagaaaaaatacaaacaaattggaaaggccctaagtgtggagagaggactggataatagcaaactgttaccatgtatgctttctgaatttggaaggagggcccttcattaaaaaaacaaaacaaaacaaaacaaaacaaaaaaaaaaaaacaaagtggaaaaaaaaaaacaagaaaggaaaaccaaatttaaacaaaaacccaaactgctacttccaatgctctctatagactgttcaaaatgccttccccagatttccatcagtacctgggagggaaaaatgggcgttttggtgcaaagaacggagggcctctaacaaaaggtggcctgggtctctttaaactgtggaatgggtctctgccgagaaaagcttccctaggccgaaagtctggccggggactccgtaaaatcataccactccggccgatggcgtctctgtgtgcgggactcaagggaaggccactgctgctggtgttgcctcccccacctcctccaagggctgggcccaggtgctccagaggatgggaaggcaggctcaggctctctcgtgaacggttaagaccagggccattgaggtccctgggtcctgtgagcaccccaaaatgctcagccatggtcccttgaaggagggaactatggtccttgggaaaaactgacacagccccagttactccatgctctggcagtggtggagttgggaaaggtacaaccccagagtggtcaacagggggtggaggcggggctggagtagcaaaggggacaccagtccctccactgctaagttcccccgggggtggaggaggggggggtggagggaaaggaactccgctgtgctctcctggaggaggtggtgggccagcgtgggccagagatgcctcctttgtaaaggggttcgaaagatccacagagggcagatgagtgggtgcctctcgagagaagataccaccatgatccttaggaggggcaggtg

SEQ ID NO: 28163 - DNA, 1155 bp, Mus musculus
catcagtcatgaaaaatacgggtaagtgagccactgatgatgctgagccactgatttccgtctttgtttcattgaaccagcaaagtggggtttttttgttggtggtggtggtgaaattagtacaattttttcattaaaaatacattaaaaatggatggacaccttagaaaagccaaaaaataatattactacaccaaagaaaaccacatatatatatatatacacacacacacacatatatacacatatatacatatatatacatgtatgtggatttgagagattagatatttagaatactttttcttttaataattgaaacattgcctatattatctttaaatcagcttatttaaaacttcagtatgtatgacaaatttttagttattaaatattcatttaaacagctggttgtggtggcacacacctgaaatctcagcacttgggaaaagaggcaggatatgaggcattcagggatagcctgggctacatgaggccctttctggacaaaaatgatggagatgggtaggaagatggttctgtgagtgaagtgcttgatttcgtaagcctgagggcctgagcttagattgccagcacccacacaacaaccaggcttagctgtgtgtgcctgtagctccactgttgagagtgagtacccactggtagatactggggagaagcagccagtctagcagaaacctgaagttccagattcagtgattgacgtaatctcccaaaattagatagtgacagaggaaggcacacggtgtcattttggtctccaggtacacacaatgtgggagtgtataactgtgcatgtaccacacacaagaaaagtcatgtgcatcaactttaatggctattgtagtatatggtaattcttgttattagacattactatgttttcagcttttcattttataaagaatactgaagtccttgccatgcaaacctgatgagacctacattgaatctccaggatccatgtacaggtggcaggagagatgtgactcctcaaaattctcctctaacccacatcatccacacactagcaatgataatagtgacaggaggactgtactgcacacgcaggtgcagaaggacagacagaagcattgtatctcatctgcaccctgcccagggtagtatttgggg

SEQ ID NO: 28164 - DNA, 1219 bp, Mus musculus
cctttatgtataatcatacaaatatctaagacatggggttataattactttatcatataatcacatttcagctagggatgttgctacacaaatgttattaggtcttttaaaagactgttaagtcttgtttaagtaagtagacatgttagagtgcttgcccaacatgaataaggctctaagttgagttcccagcactggatagggtagaaagcttattacaattctggtctctctggggcatggtggtacattaggaagttgtagtaggatttctaatccaaagggagttgtaggctcaacagcaagttactcttttcaaataagtaaataaatacaattttcacttcttacctagggtacagccaaagaccggagctttggagagatgaagtttaaacagtgccctacagagaacatggctcgtgagcatttcaaaaagcatggggctgaacactactgggaccttgcactgagtgaatctgtgttggagtccaccgactgagactactgttagcccttgtatcttctttgcctttgtttcttctgtcttctcactctacttcccaaccttaccccaccgtgcgtgtgatctcagaactgtgccaggccgataccagggcaaaaagactaccaagttcacccagtcagcctggtgctaccctccatcctgtatgtgcatatgattaaagagttatttttaaaattagtatgatatttttcatatggtcatagatattagaatttggttttgtgggtgatttttccatattcctaggatcctagtagtttaagtgtgtaaatgtctgacttctaagcaaatggtaagtacagttttctggagatagtaagtcagaaagtagtgttaagtggttgtgggatgagtggccaaatgcagtatgtatttcttaacctttatagctagaataataaggtcatatgttgttggtttctttaggtcaagtcctaggaaattagttcttcaaatgggtatggctattttgattgaaatagactacatactatccaagggcatcagtttgtaaactaagacaggaatcagtaatgtagttcaatttccactgttaatgatgccatgtgactcctctcagcgatatgctgaataaccttttaagaagatttaagataggctgtcatggccgggcgtggtggcgcacgcctttaatcccagcactcaggaggcagaggcaggtggatttct

SEQ ID NO: 28165 - DNA, 1157 bp, Mus musculus
gctaaagcaactgagaattcaaggccagcttgggctatgtaatgggacgttaccctgtctttaagaagaaaaagatgggagactaagtcttggtagcccaggctggcctcccactcggaccttcctgccctggctgggttatggtgtgtgctggcacacttggggtgctgttgcctatctgcccagcttctgtcagcaaaaatgcctggggtgtctgcaagaaactaagttgtaagacatttgctggggacacagcggtgaccaaccaaagtttctccacgggtgctgctgcctgtgcctgggagagtggccttacaaaccctaaaagtgcataaacttgttctttagcttcaagaatatgtttttcagctctttcattaaaactcaagaacacagtgtttaaaatcttgattgtaacctttaactttactttttcagcaaaatcttaaaaatttgaaaagtctcgacttgtttaactgtgagatcacaaacctggaagattatagagaaagtatttttgaactgctgcagcagatcacctacctggacggattcgaccaggaggacaacgaagctcccgactcggaggaggaggatgacgacgacgagggtgaggctcttagtttactatttacttgtttggagatagggtgtctctgtagctctggctgtgctggaattcactgtgtagaccaggctgaccccaaacagagagccacctgcctctgcccacttcgtgctgggatcaaaggtgttcaccaccatgcctggcaaccagcaggttttgaagtgaccgcaaagtaaagccaacttcagtgtgtataatgtttgaaaatgtattttggaagggtcctttgcagtgctgggatggggtcatccttgcacatgctcggtacgtgctgacctggatccccagtcctagtaaagtacttctgggtcacaggtaacagtgctgtaaaatgggtgggtttgctttgtttccttttatcgagacagggtctccctgtgtagccctggttgtcctggaactctgtagaccaggctgacctcaaactcagtcccacccccccaactccaagcctccccctctgcccctctgcctcccagtgctgggattaaaggcacgcactgctattgtctggccagaatttgttctt

SEQ ID NO: 28166 - DNA, 2932 bp, Mus musculus
ttacctaagagtcacgttgtcacgcacttggtctgttgattgaccagcgagttgtggtttgtccgtgagcatgtctcttctgtagagtctggttctctgaagtcctttatattctcgaacaaatttcagagtggaaacaacttatattttctcttgatactcattttctactaagattaaaagctttgtaaaataagaaaaactcagttgttaaagtcaagtatcttacatccttccattttagaggaagagggtcttcggggagagaagagaaagcgagatgctgaggatgacggggaggaagacgacgattagacctccaggaccaggccacctgacactcctgggcgctggagagcgatcacattgtctttgtttctttatgtatgatagctgtcccagtaggagatgatgtgtaactttttataggaaaagtgtggttttactattttggccttaccattccggttaagatttgctagtctgttaatcataatgttcttagaaaagaattctcattcatcttcccatagtgaaattctctagcactgtatttagattctggatttttataattcatgcttaatgtattagacatttttagcccataattaaaacattgttgcttttacacaggtgtagtttggtgcatttcattcatagtgttttaaagttatttataaattaaccaattacactcagctgtaatatgaaatggcagtagtcttttgaatgataaagctggtttttttgtttttggttgatttagagacgatccggctgtcattagcttgaaggcatttttgggggtggggttagggtatctgaaggctttcctatcatggtttgggaagtagaagcagagcgagagggttctcttcagaggcaggtcatggactcagttctgctcagtgacagttcagggccctttaaggagcctgtccctttctaaggccagacttgccgtggagcggtctctgggtggccgtgccagcaggctgtcggtcgggtcagctgtgtgtcccctcccagctgctccagaaggttctgtcaccttcattgcttcattcctgttcccatccaaaagaaagctggcaaaagctgtaatgccccagagacttcatctgcacctcagccatctgtctcggtttcaaacaagtggcatggaagagatggagcattcaagttacagtaccgagggcttcgtgtcagaggcaggcgttgctgacggcccgagtctgctaggataagcagcagcgtcctctcgcagaggtcagactgattgccagctgagaactgatgagacgttcagggctagtttctaagttttcctagtgatttggataccaactctgtgaagtatttattatgtttctgagagcaacctttaattcttcctgtagttttgaaagcgtgatcagttgtagcctttgattggaacatagtggcaataggagactgtttgaaaatcaatcttgaagtgttggtatttatttcaaatgaatgtctgaaaaatagaaaaaacatttggggtacgggtatgtgttttctcgtggcttcaaacatgagcggacaggcccctctctctctctccctttgtcccggaagctccatgcacaaggcacttgctttttaagtcttggttgccagtttttgttttccttttgttttatatacttcaggtgggtttttgttttgttttgtctttttctttctttttaaacttagcatcagcatacgtattttgcctctcttctgggacacatcgaaattgcaacagtggggctgctgctctttcaacttcacatgtctgacctggtttttaacatagcaagtatgaacttatttgtagagaagctaataaaagttgcatgcctgactgagataaatgtgtactgagttcagcgcaagtgcagggatcgccaaaggattggctttgtttccttgtttcagtaattggaactcctgctgtcagtctctaaagaattctctttgcaaactatgccaggttcaaaataaatgcttatttttaaaaatgaaatctatatattgactttttatcaatcatctattgtgcaatcaaaattagagttcttgagtttaaaaacaacgcatagggcctccagataactattaagacttatttagcttagtgggtggtattttcatgcaaataagcaagggtgggttttctattctgtagaagttctgggttctgttctaaccctctctgtactgtgcgtgtgtataccatatgtgaagtccttagagactttgaggttgattgatacttttgtgcagctgtgctttgactaacgccatcacagtgttaaacacgaggacgggcagcgctgatcatggggttctgactattttgttttttttcccttactgctgtaacttaagtttttgaaactgcattgctttgaataaattgaagcgttattaataatgactagcttcagtgtgtgattgttcactcttcagaattaccatctactgtttcaaaggtctttagaaacagaaatgacttttgaagggtagtcagacttgtgacaataataggcactagaaaactcatactccaacagcagtggtggtacacacctctaatcccagcacctggaggcagaggcagatggatctcttgagtttgagtccagccagtgctacacaaagaaaccctgtctggaaaaataaaaacaaaattcctttccctcaccaaaattctggattggctcaaatttccctttggagttgcaggttgggccaggactttattgcctatagttcagcaggtatttataaaacaatcacaggattatatggtttttctagaatgagctcaacttctcagcatagtatgttagttccctacatgtgtatcttgaaacaatagatttttataaatccctagttttgggtttatatg

SEQ ID NO: 28167 - DNA, 1134 bp, Mus musculus
tcctggcagagcagaagcagaaggaggttgagaggaagatcatgaatggagggttagttagtgggcctcctccagccaaaaagccagagccggacggtggggaggaccagcccagtgactcccccgcagagcccaaggcgatggccttctctactgcttaccctgggggctttactatccctcggccttctgggggtggagtccactgccaggaaccccggaggcaattggcaggggggccatgtgtagggggcttaccatcatatgccacctttcccagacagtatcctgggcgaccgtacccccaccaggacaacatcccagctctggagccaggcaaagatggagttcacaggggtgccttgttaccaccccagttccgtgtggctgattcctatagcaatggctacagagagcccccagagccagatggatgggctggagctccacggggacttcccccaacccagaccaaatgcaaacaaccgaactgcagcttctatggacaccctgagacaaacaacttgtgctcttgctgttacagggaagaactgaggcggagggagcgggaacctggtggggaactgctggcacacaggttctgagtggctggaaccttagtggggacaggggctaaacaaagaaagttaagctcaactctggctcatcaggacccagcccctgtgttgatggggcaagtgcagagaggggtgtgggggctggagtgctggcagtctggtgggagcagggctgggctagctagcactaccccagggcagtactgctcctgcgcacacagttgacttgagacttcaaggcagaagggggaagctcataacctcttctgtcccaatcccagggcccaagggaaagtagggaaatactaggtgtgtgtgggtgggaggtgggtggacaccttcggggaggaacctggaaagaaagttctcaagtcagttaaggaaaaaatagaccaaagttcattgactttagaaaaaaagcacatggtggtgtagttgggagtattgagtcgatctgagatactgaacaaatttgattttggtttgaattaggtagatattagggttgaataaattctccctgaaggatcaaggcagtaatgtatgtgcttggcct

SEQ ID NO: 28168 - DNA, 1186 bp, Mus musculus
ttttaaggattgagctcagctaagttaagatgtgattttttttttaaatatttttttttaaagcaagttccctttgggaaagagaagagtggtaagaagcaaccttgtatatggggtttcttcaggtgaacgggtgcagagtgatctattttttaactacttagcaataactacatgtgggtttgagtgcacctgagaaggggtggaggagcccagatgtttggctagactgtttgaaacaataccaaaaacctctatagagcactatcctctgctgctgtgtttctgtagaaagcaacctattttactaattttttaaagaaagacaggaccctgacagagaacatttaaaagttactgactcctgcccctacctaagtgggtttctccttcctgtcacttctggagagtgaacttaacaccctggcttcttttgttaagccgtggctgaccttaatctgtggttagtttattaaaataataaaaaatactttgtaagaaaaattatttttgatattagggctggtgttgaagcatgggatgggggctaggggccactttgaaaggtagctagagaactctattttagtgagctgtcgccatgggccgcacggtcccagtgatctgacctgcctttggatatctcccttttcctgagccagccctgttctccagaggggtagggctggacccagtggtgagagctcccttgcaatttgcacaaagcacaagtctggacagcttctgctctgaccagagctatttctaagagctttaaacctgaaggctatcctgcgccaattgtcccttctccttattttttttcctggggaaaaatcatctatgcaattctatacaaatgaattctgtgttcatttgtggatgcaaatgaagaaggggtgagtgcactgcacgtgtccagagttacctggggctgtttctgggctccaatttctctgctgaggtatgtcatcacccactaatggaatgttatccccgaatttgatttaagtcacaaatggctagatgtgcatgtttgtgcgtgtgtgagatgggactccagtgcatgtttcctctgcctagtcagaaaaatgatcaaacacctctctttggtaacaaagctagtcaagacttctttatggaattattaagtttaagaagttgtcccccaccccctcaaaaagtt

SEQ ID NO: 28169 - DNA, 1143 bp, Mus musculus
cacctttaatcccagcacttgccaggcggatttctgagttcgaggccagcctggtctacagagtgagttccaggacagccagggctacacagagaaaccctgtctcgaaaaaccaaaaaaaaaaaaaaaaaaaggagaattgaaaaagggtttcctcatactgcagtttgtaaatgatataaattatatctttttatttagtttttaagatgcaatttctaagagtgagggatggtgttaagctccatgctgtgccttaaaatagaagtaccttccctctccatagctttccaaaatccatagaccagtaaagcagaaatgaccatggctttatattgtacacttgggaggtgatcccgagccgagaacagagcccgttctctgagatcttgctcttgctgttcttcctttcactcccatgtccaaggttccaggcactttatttttctttcaataaaggagcatttgggtaatgattgtctatgagttactcagacacctctgactggactgtgtcctctttttcaaagaggcagtacccagccacatagccataggcaagaggacagaattagaagccattatctgctctggaaacatacataccctggattctaatattttcttcttgccctcaacctgtgtggactgcaggctcaatgagtcacacaggcactcgtgtctgaatatcttgtggatacccagtcacaagttattgtgtattgcctcctgtgcttaagctgtttaacaaaatactatcatgcttccatgtacaattcctgtgccctctccttcccttggctgtgtgagttgggggtagaggaagtgatagaagctgtctaagcagtggggtgggaaggaccttggcctctttctgtgtttataactggatctgtgattcatcctgtgagtcactcagctccaccttcctcctccagctacccctcccagcagcccttgctcctggcacaaacctataaccagagcgagggtctgaaaatggaaaaatctgacacagctccttgcctctctatcccctttccatccagtggacatctatctgcatttgtgctgcaggtggtgagagtcttcctgttaacctaatcctcaactgcagcccctttgtgcttctggttaggcgat

SEQ ID NO: 28170 - DNA, 1231 bp, Mus musculus
gagccatctcaccagccctctcttgtcttcttaaggacttgtttttgaatacagtgtagccctggctagcctggaactctgtagactaggctagctaactcacacagatccacatgcttctgcctccctagtgctgggattaaaagtgggcactccatggcaggctaaaattttcttttcttttttttataatttagcgggttttgtaaattttgttttgttttgttttgttttgttttttttgaaccaaagtctcctgtgccccaggctggtctcaacttgctaggtatgtagttagctactactaatctttctgcctctacctttagcgttctgggcaattcagatatgtgctaccaggtcagatatgtgctaccaggcctgctcttcctaaggcgttcttactggccttttagaattaagtcattgcacgggcatataatttccacccaagtcctgtcctacacagagcaaaaattctgcttgttttatccttggctgtcaccatctctctgtttaagtcagaaggaaagtgaatgcacatttcattgtcttttttcttcacatcaagagaaaagatatttctgatgtgctaaataaacctgggggaatattagcagcatggctactttagccagtgctgtcagtcaccttcagacagattgcctgagcacgtggcactggctgggctttactgtaggaagggttaagaatggtgtcactgtgtttaagtcatcattgtgcactcttctgttttctttgctttggtttccttttttgtcactgtctccttgtgtggtttatccatagggatgtcccagatgcagctggcccaccatggcccccatggcctaggacacccccatgctgggcctccgggctctggggggcagccaccacctcggccacctcctggaatgcctcatcctggacctcctccaatgggcatgcccccccgagggcctccttttggatctcccatgggtgagtgggtgctagcccatttcttatctttgcctttgtgcagctttctttgcccctcgccctgtctggtgccctttctttgacttcccacattcctgctctcatccctactcatctccacattagctgcttcctgttttcatttttgttaactctttttcttcctgcaggtcacccaggtcccatgcctccacacggcatgcgtgggcctcctccattgatgccccctcatggatacacgggtcct

SEQ ID NO: 28171 - DNA, 2473 bp, Mus musculus
gctaactgtcagagaagagctacagtatctggtgactcgctacaaagtgaatcgcagaacatgaaaagggcaagtttgtttccaaagaaacctgttagaagagcacactgcgtgagaaacactttaaacactgcatttaggaaagttacatcaactgaaaagcactatctttttaaaaccctctgcggttcataaatacaggaaggaaaagtatcaggagagaaggaatagtgtaaccatcttgaaactcagcaaataggatcgaattctacccaatcagactgcaagtccagaaactcctgctttctgggcccaatcaagacgaagataagtctataagtatggccacttggcgtctgcaagccgaagtcgcaaaaatatggcccgtacgaagcagaccgcccgcaagtccaccggcggcaaggccccgcgcaagcagctggccaccaaggccgcccgcaagagcgccccggccacgggcggcgtgaagaagccgcaccgctaccggcccggcaccgtggcgctgcgggagatccggcgctaccagaagtcgaccgagctgctgatccgcaagctgccgttccagcgcctggtgcgcgagatcgcgcaggacttcaagacggacctgcgcttccagagctcggccgtcatggcgctgcaggaggcgagcgaggcctacctggtggggctgttcgaggacaccaacctgtgcgccatccacgccaaacgcgtcaccatcatgcccaaggacatccagttggcccgccgcatccgtggggagcgcgcttaagcgccctgtttcccttccatcccccacaaaggctcttttcagagccacctacgttgtcgatgaaagtagctgtgtcagctttgcaaattgattttcagtgtttcaaatacgccctcaagtgtgtcaggcctaacagttaccagtaatcacattccttatcccaggtttattccatttagagctggtcttgagctcactactcaaatatgggccagtccaaaaaaggagttctaattagggtctcagaactgtgaacctgaaaaatagccccaaaattccaagcgtgatacctaagagcgatagttaacttatttcaacctggtgttttaaggatctgtaagcgaagggaacataaagaacagctgaggcaaaactgccgctctcaataacaggctagcatgaaatggaaggctgcgattggctagaaagaatttcctctaagcaccaccaaggctcgcaaccagaatcggtttgagtaggctccgcctccttgacgctgactctgctgtaaatcaaccaataaaaatggaataccgtgtgaaacctcatttgcatacaagctctataagtaccgcatagcaagccgcgctgaaacagttcgtagttgcccggtctaccttacgttgcatctttagacgcggaggaaaatgccggatccagcgaagtctgctcctgccccaaagaagggctctaagaaagctgtcacgaaagtgcagaagaaagatggcaagaagcgcaagcgcagccgcaaggagagctattctgtttacgtgtacaaggtcctgaagcaagtgcaccccgacacgggcatctcatctaaggctatgggaatcatgaattccttcgtgaacgatatcttcgagcgcatcgcaggtgaggcttcccgtctggcgcattacaacaagcgctcgaccatcacttcccgggagatccagacagccgtgcgtctgctgctgccgggagagttggctaaacacgctgtgtcggaaggcaccaaggccgtcaccaagtacaccagctccaagtgaagtgcagcagagacgtgattgatcggctttacccaaaaggctcttttcagagccactttagttctcaaaaaaagactgtaagcactaagggtctgatctagcaggtaaggttaagccatgatgagtctgttaccctgcagcgctctggtgcaacatcgagcgtttcaaagtgttgggcggtgtcttggcttgctcagcctgctctcttatataacccaagactaccagcccagagatggtcccacccacaaggggcctttcccccttgatcactaattgagaaaatgccttagagttgaatctcatggaggcatttcctcaactgaagctcctttctctgtgataaccccagctgtgtcaagttgacacaaaactagccagtacaattgaccccttgtcaacttgacacacaaacacatcactagtaagcctcaacccttacattcttattcatccccaaggtctaaataactttaaaagtcccacagtctttacatattcttaaaatttcaatctctttaaaatatccatctcttttaaaatccgaagtctttttacaattaaaagtctcttaactgtgggctccactaaaacagtttcttccttcaagagggaaactatcagggcacagtcacaatcaaaagcaaaagtcaat

SEQ ID NO: 28172 - DNA, 2473 bp, Mus musculus; identical to SEQ ID NO: 28171

SEQ ID NO: 28173 - DNA, 1316 bp, Mus musculus
catcaagagccttttaaagtacagcggcggagacccgcggcaggcaggcaggttggagcggcgcagggagacccctgcggtagggctggctcctgtgctgcccgactcctgtgctccgacttggagaagacgggcgtccgttcgtccatacccaaaagagtcggccacaaggatgttggcacctgggggtgggccacgagcggccagttaggggtaagagacggtgcaaggtgacttgtccctggtccttcaccgctccagcactgcgcaagtgagaaagtccaacaggccccgggatcgggcggcgaaaggaaggggcgtgatgtcactcctgggtggctgacggggcggggtgtatgcagatgagggtcgcgcaggggctgcggcgtccgcagcggccggggaaacgcgagagatttctcgcgcggcgtaggagagaacgcgggtcgccagatatcagcggagcgccgagacggcatgtgcgacgagggagacccgagatagggcggggctaagtgaccgtgtgttaagagtgcaggggcggcgggtgtgagccggggccgggcgctaggagagcatacttacctggcaggggagataccatgatcacgaaggtggttttcccagggcgaggctcacccattgcactttggggtgtgctgacccctgcgatttccccaaatgcgggaaactcgactgcataatttgtggtagtgggggagctgcgttcgcgcgctcccctggtatttggtagtctaaaagtaaggtacttaattctccttttgcatacatatactatgtcccttgtgttttgagaactctggggcttggcttgcaacttgagtaattttgtttatacttatttcaacttaaaagaaacacgcaatcctagatacttcctcctctcagctcttgatatacataagtatactgtagctgagtcagatctcattaagaacttgctgagatttgaactcaggagcttgccgtcagtgttcttaaccgccgagccaccttacctgcatgcatccttcttttcaagcaagcttttgttaacaaaatgcctcacctgccgaccaggctatatcagatcttagaggagggactagaaaaggggaatgacggagtctgcgactcagtctgaggaaggagtttctcccatgtttttcttataacaggcaagatggcggtcgcacacttgttttttgttttttggaaacagggtttctctgtgtagccttggctatcccgaaactctgtagaccttctgtcctcaaactcacagagggtttgctaactttaggctgtgactatct

SEQ ID NO: 28174 - DNA, 1130 bp, Mus musculus
aaagggacagatattagttgttaaagaaaaaaaaaaggaaggaaaccttaccaaataatagttttggtcccatcggccatatccttacaactttgagagtctgaatttcgttttgccttattatgtagaatttggttaatttaaaaaaaaaaaaaaaagggagacaagatctgggagtggaataaaacaagcaaacacacgtccccgggtgggctcaaaccaccaaccttccagttaacagccaaacgcgctgaccgattgcaccacagagacacataggagaagagcctccccatctttgtaagaaacaaggctggacttaaaagaatgacccattgcattcggactagaatgtgactttccttctggtcccagcagccagagcccgcagagaggagacccccacagtcggtgagtgcctcagtttggtgcactgggtcatgggccagtctacagaggtcatcctctgaatagacacttgggactaaactcattcgcagtgtggtgtctcccctgccaggtaaataggaacgttgggaggtttgcaccttatgtgtctccgtggcgcaatcggtcagcgcgttcggctgttaaccgaaaggttggtggttcgagcccacccggggacgtgtgtttcatgaggggtgtttgcttgtttcattctgctccctggtcttgtctccttttttttaaaaaaattaaccaaattctacataataaggcaaaacaaaattcagactctcaaagttgtaaggatatggccgatgggaccaaaactattatttggtaaggtttccttcctttttttttttttttttttttaacatcttcgcttggctcctggtttgtccccttgcatccgctgcgcttctctcaccaggatcgccgcggccggaggtaaagcttgctctccgaccgggtgagtgaattagaaggaaatcggaaaccaaaagacgcacgagttagttccagtgggcccaaaagtgggcacaaaattgggcagtaaacagtagatggctttgctgttcagctaagcagcctcgtttttctctgccgtcttcctgtttttcttcccctccgaacacatgtttcttttctgactgaccttttctttcctcccttacttccgc

SEQ ID NO: 28175 - DNA, 1165 bp, Mus musculus
cacacatatatgtatatacacatacatatatgtatacatatacatacatatatgtatatatatgtgtgtgagtgtgtgtgtgtttgtatatacacacatacacacacacacatacaaacaggaaggtccctccagtccttcctattgtagagttatatttgtatgttagcggtgggttgtgtgaaccatcatgggttccagttgtccaaggaagaggatgggatgtcccagatcacaccctttcatcaatgagactccatagaggaggaatagaatatcaggccaaagaaataattttttatttttgagggggaaatgtcttctcaggacagagaagtgtagtaaatgaaggaagaccatgtcgctcttgatgggggctcttgtctagttttacgaccatagaggatttgccttcagtttctcatgtcctgagttacagatcatataaaaacgcacaaaactaataactaagaaaaatggatgataaagtttcttatacaactaaggactaatgtagagcaattttatgtgtaggttccatggtgtaatggttagcactctggactctgaatccagcgatccgagttcaaatctcggtgggacctctctatttactcgaagtagaagagcgcttttctttcactttgttcctgaccttataaaaggtttaagttcgcgttcctttcccaggcttcctttgtcttcaggtgagctggagctgcgtggcccccaggtcagtctctgatttagctgatgttagctggacacggagaccttaccttggtgtctgctctggtacaagctacaatggagcttttagtgcctcgacaatattgaactttggttcaccgttttgcattcaggtcgtgtcggaatttccacaacagtggactcagctccacgcatgggattcaagcgtggtctggcttttgtggcttgaagactgggagggcgattttgcttggcagcgcgttggcagaaagggaaactccgagttctgctggtggatctgtaggagcttgtatggaaaacgggaaactggataaggacagctaacgattgcatgagcaggatgaaatttgaaaagaattagaaccgaaggaatgcaggcagcttggctccagaaaacagactcaaaagcatcgggacagaagttaaaaattgt

SEQ ID NO: 28176 - DNA, 1196 bp, Mus musculus
catgtggatgctgggaatcgagtcttttgcaatggagtccttgctcttaactactgaaccaactctcccgtcctataagtaaattttcagagcactaatctattctacttcaagtttctcctgcatcagatccaggccagctggagcgagctacacggttaccccccctcctcccaaaggggaaaataaggatcaggtgaaaatgtttggaaattacaatagtagaatataaagaaagaatatgaaggcggccatgaaggggtagaaaggtagatgaccaggcgtcatccctgatgtcacgggtatgggcgtggtgtatgcagataagcgcgcagggtctgccgggtccgcgctccgtgcagaaatgtgaggggtttctcccgcggcgagggagggagcgcggatacgcgggtgtcagcagagcgcaagaatgtcgtgtgcgacgagggagacccgagatcggccagggctaagtgaccgtgtgttaagagtgtagaggcgacgggtgtgagccggggccgggcagtgggaaagcatacttacctggcaggggagataccatgatcatgaaggtggttttcccagggcgaggctcacccattgcactttggggtgtgctgacccctgcgatttccccaaatgcgggaaactcgactgcataatttgtggtagtgggggactgcgttcgcgctctcccctgatttttgtggtgctaaaagttagattgcattccgcccttctcacgtctctttacgtgttgtttgcgaggcgtggcctcggaggtaaatggtctccttttacctcagataagcttacctttgctctgtgagtaagaatgtagctacacttccaaatttagctattgtcctttgcggtccaaatgaaaatattaccttccgatctaacaatgttaaactagtcccaggcccttctatcgattgccagaatagactagactactacacagacacaccctctcaaatcaggccagctcctgcaacctgcacctacagtttgtcccctgggacaaatgaaaggacaggccctctttcccccccccccccccccccaaatcagagcacacacagatcttggggtctggggcagaaatttcgttcatggaaaaaacaaacaaacaaacaaacacgatcaaaggaagctcgttccctttggcctcagggtttcttagacgccgt

SEQ ID NO: 28177 - DNA, 1287 bp, Mus musculus
aaagaaagtggtaaccctccatgtggatgctgggaatcgagtcttttgcaatggagtccttgctcttaactactgaaccaactctcccgtcctataagtaaatcttcagagcactaatctattctacttcaagtttctcctgcatcagatccaggccagctggagcgagctacacggttaccccccctcctcccaaaggggaaaataaggatcaggtgaaaatgtttggaaattacaatagtagaatataaagaaagaatatgaaggcggccatgaaggggtagaaaggtagatgaccaggcgtcatccctgatgtcacgggtatgggcgtggtgtatgcagataagcgcgcagggtctgccgggtccgcgctccgtgcagaaatgtgaggggtttctcccgcggcgagggagggagcgcggatacgcgggtgtcagcagagcgcaagaatgtcgtgtgcgacgagggagacccgagatcggccagggctaagtgaccgtgtgttaagagtgtagaggcgacgggtgtgagccggggccgggcagtgggaaagcatacttacctggcaggggagataccatgatcatgaaggtggttttcccagggcgaggctcacccattgcactttggggtgtgctgacccctgcgatttccccaaatgcgggaaactcgactgcataatttgtggtagtgggggactgcgttcgcgctctcccctgatttttgtggtgctaaaagttagattgcattccgcccttctcacgtctctttacgtgttgtttgcgaggcgtggcctcggaggtaaatggtctccttttacctcagataagcttacctttgctctgtgagtaagaatgtagctacacttccaaatttagctattgtcctttgcggtccaaatgaaaatattaccttccgatctaacaatgttaaactagtcccaggcccttctatcgattgccagaatagactagactactacacagacacaccctctcaaatcaggccagctcctgcaacctgcacctacagtttgtcccctgggacaaatgaaaggacaggccctctttcccccccccccccccccaaatcagagcacacacagatcttggggtctggggcagaaatttcgttcatggaaaaaacaaacaaacaaacaaacacgatcaaaggaagctcgttccctttggcctcagggtttcttagacgccgtgttcccgtccatgtcctgtccatgacaactgcctctccagctcctccgcttgaggctggctctcccacaatcct

SEQ ID NO: 28178 - DNA, 1098 bp, Mus musculus
tccttccccttcccttctcctcgttcttgactgggtctcaagtatcctgggcgccctggcacgcacttcgcaactgaggatgaccttcaactcctgattttattgcctcttacagtccaagagctgaaattacaagtgtgtgccactctacctggctctgcattggagtattgagtcaacctgaactctacattgatttcacaagtagcagcaattgccctcaccgtccagctgaggcacagtcgcgtgcactcggcgcctctcccaacgctgggggaccaatcacttctgcgggagaacaggagggtctgaagcctcggaagccagcagagattgctgcatggttcgcactggtcgctggcctgcgctccgtcggggcgggcagctcattctggtcgttagcgcccagtgagaagacgccaaaggcaacactggaccgggcagaactggattgaggcttagccaacagggccagcaccgagcaagcatgcagttgcttactgtcaggcacgtggctcgccgtgatcgtatagtggttagtactctgcgttgtggccgcagcaacctcggttcgaatccgagtcacggcagtattgtattctgtgccagcatcttttgccagatctcatctcgctgtactttaccgcctcacaacatgctgtttccaggcattccctaacacaaaggcttttaattccagcacgcaggagacagagacaggaggatctctgtgagttccaggacagccagggctgagaaaccaaacccgacaaaatcaggttagtttgattcttttgaaatctgtgttggggcggttaagatcattgactgttcttccagaggcgattcccagcaaccacatggcggctcacaaccatctgtaataggatctggtgctctcttctggtgtgtctgaagatagctacagtgtactcatgaacataaaataaaaacataaaataaattgtttttagaaaatctgttagtgtgcttacaactccatttgatattctttcagttttgcctctgtgtgttgtgtgtgcgtgtgtacttacaaacacactgtgtctccatccaaaggcccagggaactctaagt

SEQ ID NO: 28179 - DNA, 1209 bp, Mus musculus
ccgttgctatgcaacatcccagaagagcagctgtagtgcgttaggagaccacctgccctgcaaagtaaacaactcacaaacctggggaacaatggtcggcttccccaccccctacatctctcccttcttcctgctcaaaccaggtggatgtagtgctcagagaaggttcttgtcagtccgtgtgtgtcacacagatggggtgttgtcaaggagctataccaagtgtgttttgtctattgataattgaatgatcataataattataacaattaataattgaacttattttggtcacgagtttcaattggaactagcatttcccttctaatgaattgaacctctcagatagtggcaggcagaaatagaaagttctgtcagttgtgcctcaaaactcctaaaatgacaaatttgacccagatttatcacagcttagcatctaggaaggtctgtttcctttctcaatgctggaaaaattaaaagtttcgtgaggaaatgttggtttacgttgctatttttctgtagaaatgcattaagatgtatagcttctcttaccttttcctgatgcactgtcactaagtgctctcaagggtgcattggtggttcaatggtagaattctcgcctcccacgcgggtgacccgggttcgattcccggccaatgcaatgtggtcttttctgtctgctacctacacgtttttctcattgtgaaattagaatcagactaggaccagaatcaaggatttttttttttttcctggaattgaacttttctaactgtggctcaagcaagaatccagtgcaaatttacaaatattgaatatttaccacagctgttctgctattttaaaggtctgtttccattcagtcacccttagcctgaggttcttattctcatgccagaaagtggtttcaccccaatattctaggcagtaaaaagaggatagggttaggaagacttggacaccgccctgatgtttctcaagatccctgaaccgcagctacggaagaatcaaatagaagtctcatgtttagaatgactctcaccagaacaatccaatctgaggacaatatgtaaggacaaaagctaaataaatcctaaccagagagaaatgttattccccaccaggagtaagattaggagttctttagcagagcggggagttatttcagtaaacccaggttcaactgcaaacagtcacacaaatttttct

SEQ ID NO: 28180 - DNA, 1175 bp, Mus musculus
atacccaaaagagtcggccacaaggatgttggcacctgggggtgggccacgagcggccagttaggggtaagagacggtgcaaggtgacttgtccctggtccttcaccgctccagcactgcgccagtgagaaagtccaacaggccccgggatcgggcggcgaaaggaaggggcgtgatgtcactcctgggtggctgacggggcggggtgtatgcagatgagggtcgcgcaggggctgcggcgtccgcagcggccggggaaacgcgagagatttctcgcgcggcgtgggagagaacgcgggtcgccagatgtcagcggagcgccgagacggcgtgtgcgacgagggagacccgagatcgggcggggctaagtgaccgtgtgttaagagtgcaggggcggcgggtgtgagccggggccgggcgctgggagagcatacttacctggcaggggagataccatgatcacgaaggtggttttcccagggcgaggctcacccattgcactttggggtgtgctgacccctgcgatttccccaaatgcgggaaactcgactgcataatttgtggtagtgggggagctgcgttcgcgcgctcccctgataactggtaaccaaaagcagattactttcccccttgtggtcttcgcgtttgcggacgggagagaactttcggccattttccttttagaaatttaacttcttgaaggccaccaggtgacccttacttccctctcacctttccttctacctgtactttctctattaaaaagcctgcagaagtacccttgacaaattgccaaaaatgacacctaaaaaaaaaaaaaaaaaggaaaaacgacaccttaggtaattataggttgtaagaaaaagatttgacctcttggagtttttatttcttaataccaaaggacacccaaggaacgtatctctcaaaattgggtttcaaacctcagccgtttccttcttagttccagtgcttaacacgcaacagacctgcacaccactacactgcatacgagttttaaagttaataaatcagtcacccctccatagtcttctacctacttgaagacagaaacggctgctaggaagcaattcttcttttgtccattggcttttgcttttctttctctctttttcattcttctctcttttttaggctctagcgcacgccccggg

SEQ ID NO: 28181 - DNA, 1163 bp, Mus musculus
gtccgttcgtccatacccaaaagagtcggccacaaggatgttggcacctgggggtgggccacgagcggccagttaggggtaagagacggtgcaaggtgacttgtccctggtccttcaccgctccagcactgcgccagtgagaaagtccaacaggccccgggatcgggcggcgaaaggaaggggcgtgatgtcactcctgggtggctgacggggcggggtgtatgcagatgagggtcgcgcaggggctgcggcgtccgcagcggccggggaaacgcgagagatttctcgcgcggcgtgggagagaacgcgggtcgccagatgtcagcggagcgccgagacggcgtgtgcgacgagggagacccgagatcgggcggggctaagtgaccgtgtgttaagagtgcaggggcggcgggtgtgagccggggccgggcgctgggagagcatacttacctggcaggggagataccatgatcacgaaggtggttttcccagggcgaggctcacccattgcactttggggtgtgctgacccctgcgatttccccaaatgcgggaaactcgactgcataatttgtggtagtgggggagctgcgttcgcgcgctcccctgataactggtaaccaaaagcagattactttcccccttgtggtcttcgcgtttgcggacgggagagaactttcggccattttccttttagaaatttaacttcttgaaggccaccaggtgacccttacttccctctcacctttccttctacctgtactttctctattaaaaagcctgcagaagtacccttgacaaattgccaaaaatgacacctaaaaaaaaaaaaaaaaggaaaaacgacaccttaggtaattataggttgtaagaaaaagatttgacctcttggagtttttatttcttaataccaaaggacacccaaggaacgtatctctcaaaattgggtttcaaacctcagccgtttccttcttagttccagtgcttaacacgcaacagacctgcacaccactacactgcatacgagttttaaagttaataaatcagtcacccctccatagtcttctacctacttgaagacagaaacggctgctaggaagcaattcttcttttgtccattggcttttgcttttctttctctctttttcattcttctctcttttt

SEQ ID NO: 28182 - DNA, 2799 bp, Mus musculus
aataaattagatgcatgggggttgaaatatctcaaaacattatttccttttacacaggcaccagtgtctgccaaaaaggagaagaaagtttcctgcatgttcattcctgatggacgtgtgtcagtctctgctcgaattgacagaaaaggattctgtgaaggtaaaaacatactgcttcaaatgctagacaggatagccagaactgggggtgggggggttgggggtggtacggagagggtcgtagggtagaggcagaggaagtgctgttaacttgcatggctattcatacttcctcattttattttaactctaggtgatgacatctccatccatgctgactttgagaacacgtgttcccgaatcgtggtccccaaagcggctattgtggcccgacacacttaccttgccaatggccagaccaaagtgttcactcagaagctgtcctcagtcagaggcaatcacattatctcagggacttgcgcatcgtggcgtggcaagagcctcagagtgcagaagatcagaccatccatcctgggctgcaacatcctcaaagtcgaatactccttgctggtgagtgggtgagaagagagacaattacctggttacaaattcagtgctttctgtactcaacccatctaacaaactgccatcctcctctctagatctacgtcagtgtccctggctccaagaaagtcatccttgatctgcccctagtgattggcagcaggtctggtctgagcagccggacatccagcatggccagccggacgagctctgagatgagctggatagacctaaacatcccagataccccagaaggtaagctgcagccggataggttcgagttattttgatctgcttgggcttgtggagttggggtgacctggcatttatttcttagtcggacttctgacaccgttttctctcttcagctcctccttgctatatggacatcattcctgaagatcacagactagagagccccaccacccctctgctggacgatgtggacgactctcaagacagccctatctttatgtacgcccctgagttccagttcatgcccccacccacttacactgaggtgagaactgctattctcacagggtcaacattttgtcctaggccttttgaaggaagggttaatgtgggttttctacttaactaaaaaacctgaaaatttcctctctattccccttccaggtggatccgtgcgtccttaacaacaacaacaacaacaacaacgtgcagtgagcctgcaggaaatgaagcatctgtattagcgcatttctttctgcctctctgcttgaactccagtgtttcagagactcagtctctacagcggggaacgggtacaccccagccgctgactcctcaagatgggtggcaatcagtaggcgggtctccggcttcaagtggtgcagaccagtgcccgcactgtggcataggagtgtttgctgggtggatgtcagaacactcttagaaaaattgagacctgaccactttctcggatgttggaaatgaagaacttgtttgtgttgactgagtcagggcactgctgaccttctggcgttgtctttccaaggtttttgttttaaagggacttttaaattgtctaaaatatcagtagaccatcatctgtgccatgggggacagagccaatttcaagtcatggccaaaattttgtaagaggagtgtttttgtgtgttttttaaagtcagtgttccttttttatatctttacaaagaaaagaccttccacggctggtgagcacgcagcctgtgaaattcggggcagctgctccaagttgacttcaccctgggagcagtagtagctgtgcccactgacggccataaaagccattttacagccagttgcactgtgttctcttgtaagcataatcagatgggagaatctgttatttccctgtaaccccttggaattgattctaaggtgatgttcttagcactttagcttgtcaattttgttttagtctccgttatagatgtaagctccaccagtctcttaaggattaagcccagtgacttggagggtgggggttagggtctctatccctgaacattgtagacccaggctggcctgagagatccacctgcctctgcctcctgagtgctgcgatcaaaggcccagcttggttattgcttttgaggctttctcccaacgcacagacttgtgtaattctaacactaatcctgtgaagggttgtggttgacagctggagcctgggtgacattctacattgagatgccccagcactgatcggggcacagaagcccccagaccccatttcctgtccagtgttgggagaaagtgctgctttcactgtggcctcagccctggctcggaagctcactaagccttagcactttgtcctgtgtcagctccacctgagaactgtgcagccagaatgtctgcgagctgatggaggtttcggttttgttgtttttgtattttgtgtatctttttgtatgattaaaaactatattttctacttatccaaatatattttcaccccaaagtggggttatcctttgtaaaaaaaaataaagttttttaatgacaaaaataaatgttcttttcttgtctatgagatactggagaagttactagaaagtgttcccctgtctcaatactgaaagcccgtggagagagaagtctcttgacgctgagtgacataacggctggtttggcctctgttcagacggaggaatccgtagggtctggtagtagaagctaattaaccacgtccatagtcagaaaactccttcaggatcaggc

SEQ ID NO: 28183 - DNA, 1940 bp, Mus musculus
tccttcatttgggggcttccctaccttatccagaagatctggcttccttttgttttgtgagacatcttattatggcctggaactcatcctatagattaggagggcttcatgcttgtggttgtatcctgctgaaatcataggcatgggtcacaatgagaaactgcctaggaacaagagaatgatacactcaattcacatggggtgggtaggtggcactacctgagctgcttctgagcttacctacccctgctagcagtctagctttctgggtgtgagaagagggtaagggttgaggctgatactggtacacgcacatgtgagcacacacttttttccatttgttcatgtagcccaggctggtctcaaactcttcttctggctgagaatggccctgagctccagacctcccgcatcagcctctccctaggattacagtgactaccaccgcagctgccttaatcctcccctcagtgacaagaagcatcttgttctttagaaacggtagctgttctgtttagagagaaccatgttcctctcttgtccactgagctgtaactctgaatttgtggagaattctatgtagtaagctcaatttcccttctttctgtggtctctgctacattgtattattgttcagtgcactttctatcaagttgggacagttaatgctactataatgcgacttcccatgtgacaattgcagtttgattttaggttaggagctgggtctggtggtgcaggtctgccatctcagctacaaaggaggccaaggcaagattggaaattcaaggtctaccccagctagagcaagttcaggggcaacctgggtaatttagcaagactctatctcaaaaatatgaagtaaaaacaggactgaggatatagcttagtggaagagagtcagcctggcatgtgaagcctgaatttaatctctactgcaaaaaggggaggggagggaaggggaggggagaagacacttggcaggaagaggagggaggggagcagagttagatcagttagctccctgggtcggaacaaggtgaaaagcagctttcttgcttttgaaatcatctttgtgacaaggacacatggggtcagggtagggtgtccagttaaaatagtgtcactgcttagaaaggggtacttggattcctttagttagcttagctctgtctcttgtttcataaaacacactgggttagaatagaggctcctgcattacatggtttgtgtcactgttttttgttgggttttctttttggtttttcgagacagggtttctctgtatagccctggctgtcctagaactcactctgtagaccaggctggcctcgaactcagaaatctgcccgcttctgcctcccaagtgctgggattaaaggcatgtgtcacgttttaaattgatagttataacctcgatgccacgaatcctgcagtttctcctgtgctcctttctttgtgtcagatgggttaagggttatcagtttggggaagaattgtccttgtaccccctggaattatttttctcaaaaatccaagactccaaagaacatgggaaaaattgttctgtccacttttgacgttgaagattttggttatccttttcgtactttctatgtattttctatgtaaaattttacacaattaaaaatgtttttttgtctagtaagccagaatgacttttttcccctgtgacaggatcttgtgtagccaaggctggcttccaaatgtggccaaggttggccttgaatactttatccttctacctctacttcccaagtactgaagtcagggccatgttggggttaaaatcggaaaatgattttgctggcttgttgcttagtatctctgggaaaaaaattgatgaaggaaaggaatgaggtgtatgataaaactgaaccgctccagacgcaaagtaaaccgtctaaaggtttctatgt

SEQ ID NO: 28184 - DNA, 1299 bp, Mus musculus
atcttcacgaggcggggggcgaagatttcgccatggatgaggatggggacggtgaggagagtggaggcgactgcgggaagaggggaaggtgcgagaggggaatgcagtagaaattttcctgggacgtcaccccacgaactgggtctgaaaagatagactcctcccccttgggaaaggaattaggggcggaactgggaagggactgaagctggagtctgtgtcgaagcttccagatagtctaggaaacgcgacaggttttttttgttttttttttcaaatgactcttatttttgttgcttcttattttctcacctggaactctagaaagcatccacaaactaaaagaaaaagcaaagaaacggaagggccgcggctttggctccggtgagtgtggggaatagggtagagtggtctaagaggcagaagcccgcgaatttgggagtgtgagggggacacatttggaggacagttttcggtgatctggtatgaattcttttagaagaggggtcccgagcgcggatgcgggaggattacgacagtgtggagcaggacggcgatgaacctggaccacagcgctgtaagtaaataggacctatggggagtctgtgtgcactggcactcaaatgcaaagtaaagagttgtttaaccagtctcagaaaattgcttattgtaggttcttttcagaatttttcttttttagtttgtttggttttgggtttttttgttgttgttgttttggatacagggtttctctgttaagccctggctgtcctgaaactctttttgtagaccaggttggcctcaaactcacaaatctgcctgcctctgcctcctgaatactgggctttttagcttacatgttcatacaacactttccctacccaacagctgttgaaggttggattctctttgtcactggagtccacgaagaagccactgaagaagatatccatgacaaattcgctgaatatggggaaataaaaaatattcaccttaatttggacaggcgcacgggatacttgaaggtagattttcttgcttccctcacttacaactcttagatacattgattatgttgtttttgtgagttgatcaagcacaggtaggaagtgaaatgacattggaaattgattttgttacccacatgaaagagacagaaacagaatgagcatgtttgtgtatataatggggatatgtggtgtatagctgcgaaatttttcttgtaactatgcatttctggtttaaggaaaagagtacttggttggtgaagtaaaattctgatactttttgttgtttgtt

SEQ ID NO: 28185 - DNA, 1421 bp, Mus musculus
taaaagtgtgtgtgtgacgcctggctaagctttgatacttttatatgctcccctaggggtatactctagttgaatatgaaacatacaaagaggctcaggctgccatggaaggactaaatggtcaagatttgatggggcagccaatcagtgtggactggtgttttgttcgtggaccaccaaagggcaagaggaggtaagatgaagggatgggggttgtacatttatttatcttagtaaagggaacatgagcaagataaataaggattcagtattagatctctgatattccccttctgttttttcattttcttagaggaggccgaagacgaagcaggagtccagaccggagacgccgttgataaatcctctgtcgactgggtggtctctctacaagtccatttggttatgctgccttggataaacagggctagggcggaccttgtgtttatatttaatttcttaccctatctacttggcattgcttttgagttttagaaaaaaataaatgttccattttgttttctatgtttattactttactgttctggaaactgaacaactacagtggggcattgtgaatgattgtgaagatccttctgtctggcgtggcattctaagtttctagaaaggctcatggagactgttcagcatttctttgtcttagaagataagggtagggataatgagatttttcttgtggaattaaggaatgtattttgcataactcttgtgagcagatgttatattagtgtctcttgcttctctgtcagagcctgtgcagctggccttgaacttcaggggctttgtgatgcttagcctactctatgttgaatatggtgctgaactgtgaagtttattagttcttacaatgtaaaagaaacccagcttgatgggctggagagatggctcagtagttaagggcactgactgtccttccagaggtcctgagttcaattcccagcacccacatggtggctcaccatgggatcccatgccctctgaagatagctacaacatactcatataaataatttttttttttaagaaaaaaaacccagcttgggtactatgtaacaatatgcacacctttaatcccagcacttgggaagcaggtggatcttttggtttaaggccaacctggtctacaggagagttttaggatagccagggctgcacagagagatcctgtctcaagaaaaaaagacattgctatccctttatcatagggttttggttgtttttttttttgggggggggttttgtttttttttttaatttttctgagacagggtttctctgtgtagccctgactgtctcccctgtgcctcccaggtgctaggattaaaggcgtgcaccaccactgcccggcttttatcatagtttttagttgaaattattttttggtatgtctgtagcagctg

SEQ ID NO: 28186 - DNA, 1193 bp, Mus musculus
tcaggtaagtggccatgtttaggaagatccaagatctcggaagagtccattctagacacatgatgtgctcttcccctgcccagtgtccctagggatttaaaaatgctttcctgtgaggggagaacatggtcctttccctgcccccgtcactccatagtcacacctgtgatttcgtagccccactcttcctgctcactcacccccacacggactcagaaccttccctagtggatgttccacacatttcagacacccacaaggccaagaactggatgtctgaaggggctgtctcaaggcaaggcacaggagaagggtctgggggagtagggtggaggcagaggttcccagcttttcttctcaagaatgctgtatgatccctgagggctggtaccccacgaggtggttctgaggtgagtgaggtgctgagtcaagacaacacgtcaagctgtgcccttcatctctccagcactacggcccttcagttatcacttcgctagatgaacaggacacccttggccacttcttccagtaccggggaaccccttcccacttcctgggcccactggcccccacactggggagctctcaccgcagctccactccagcgccccctcctggtcgtgtcagcagcattgtggctcctgggagctccttgagggaagggcatggaggacccctgccttcaggtccctctttgactggctgtcggtcagacgtcatttccttggactgagctttttggattatgaaatcaatctccattggccccagcactgagcagatcacgttgtgggttccgaacccctggctgctctgatccctcaggggtcattggccaaaggccaggccagagcttcatggatacctgcttttggccttatcgctgcctaacaggccagtactcacagggttaacatttaacctttttatggtggcacattcctctgggtatggtaacctaggcagtgggaggcagatgggatagggactgagggatgagggggtccttagcctttaccagatcttcagcctcttggggaaaggcactttcctgcctcctctcccaagactctccgttccctacccaaacccaaatatctggtctttgacatccattccgttctctttgaccatacagtcgggcgacaggtcagagatggacagagaactctattttggattgcagatttctt

SEQ ID NO: 28187 - DNA, 1175 bp, Mus musculus
tccagcccattattcctgacctctctcagcctagatctttaatagagtaacttgttcagcatagcttggattctgtagttctgtattgaggaccctttgaagacgtaggttgatagattttggagtcaattcaccaagcaagtcaactaccatcctcttcatatctgtaaaatggtggtggctgctgaaataaaagcagtgctttgcaccaaccacagtaatgcatacctatgattcggtactcaggagagtaaggctgaaggactgaatttatttattaatcactgtcacagttattaataaaggcttgtgtagagtttgctcagtaaatattagttgcctttcctttcttccacccaggatgctgatagacaaatggaaactgggcagcctgctccatgtgactgattatgtcataaccatagcccctgattggctaagaaggaaagaagatcagtgctgacagtaccaagtggatggctgtttatcttgcccattccaaataacgtacaatttctctctttatttctgtggacaaacaggaaattcctaagacgccagaccacgccccgtccaggaccttctatctgtacactgtgaatgtgctctcagctgccaggatgctgttgcacaggtgctataaggtaacgtgtgggcctcctcctcgtccctcacacagtcgcgccctttacctccttagcccactctacccacttaacagaacggcgtgcatttctctctgtcttctctttcctcagagcatagccaacttgatagaacggcgacagtttgaaacaaaggagaacaagtgagtgcagcctcccgtgagtcatgttcagtttggttttgggttttaaagctgatccaataactaaaagatgatgtggtccatttctcctttacctcgtacccgtgggccccaacacccacattaacatttccaaggtccagagcctgagggaaaacttgctacagaaatggagaccatagcccaatacccagtctagttgcactgagtcataggtttgcattggcataaccatgcctcagtttacccttgctgaccataccaccaactaaattaccttgcagatttatgaggcatgtgcttgaccccgagttttaagtgctactgagaggcagtaaatgtttcagaaacaaagttctatttgtaa

SEQ ID NO: 28188 - DNA, 1178 bp, Mus musculus
acccgggtggggatgggagtgggaagggagtatcaagggtgggaaaaagaagaacccacaaagtagcaaagaccattcacactgcatagcagctaaaatgtcctgctttgatctccaacactgtatagaactgggtgtgtttatgtttatgatcccacgacttgaaaggaggggctgggaagttcaaggtcaccctcagatacacaacaagtgtaaggcttccctgggctccaggagaaccacattcaaaacagaaaactagaagaaagataaagatcagacaaaataagccgggcgtggtggcacacaggcctttaatcccagcacttgggaggtagaagcaggcggatttctgagttcgaggccagcttggtctacagagtgagttccaggacagccagggctacacagagaaaccctgtctcgaaaaaccaaaaaaaaaaaaaaaaaaaaaaaaatcagacataataggaacatcacagcaaagaattctcttgatttcctgcactgacattggctacactaacccacagaggaagtaagattctatatgcagtcaagtcaaattcagtccctgccctgtcatggtgggaactggcctagatggctgccacaacaagttctgctgctcatgggccccgggtctcctgtcctggaacctggggataagtttggctgcagacactatactctaaacataggggttctcaggacagacaaaaggcaagtcctgtttcaactcaggcccagttgctttaaaaaataaaactagaaagagattcactagactctgctggtgatctgttgcttactaggctctgggaggtgtgccgtgttgccagcagtagggagctatatagcgtcaggtctctcctgtctttcttttgggtcctatctaggtgaaaaaagccctttgtgtcctcattcaccacaacctggtcctctatcatgtgcacaagcgcggtgtggtggagtatgaagcccagtgcagccgggtactgaggatgcttaggtatccccggtacatctacaccaccaaaacgctgtacggtgacaccggagagctgattgttgaggagctcctgctgaatggcaaaatgacaatgtcagctgttgtgaagaaagtagccgaccgactcacagagaccatggagggtcagtactggatctaagctctt

SEQ ID NO: 28189 - DNA, 1360 bp, Mus musculus
gggaatcattgttgcctagaactagaattctaggtgtttaccaccataatgctttgatatgcacctacacagtgaaatgataaccagtcctgctttgagtagtttcagattccttacttttgatagcttaggctgttcagaaacatggttcaattcttattttgtggtaaagtacctaaaatggggatattcagaaaagttcattttgtgtgcttttacttccctaacttctatagtatatttaaaagtgtgcttttatagaacatattttttgtttgttttgagacagtgtctcattaagtagttctggctgtccttaacttgttatgaagaccatgctgtccttaaactcacaaagatctgcatgtagcctcccaagtgctgggattaaagactgtgctaccatacctttaaagagtaaaatttactctgaaaaatgtcatatgtatataacatgtgttttgggcatatttgtttttgttattaaaattttttaaatttttttctgagatagactttctctgtgtagtcctggctgtcctgaaactcactctgtgaagtacaggctggctttcaactcacagagggccgtctgcctctgtcttccaagtgctgtggttgcatgtgtgggggtatcttgcctgcatatatgtatatgcattgcttgtgtgcctggtgtccagggaggccaaaagaaggcattggatctcctggaactggagttacaaatagttattagctgctgtgttgatgctggaaattgaacatggctcctctggaagagcagccagtgttcttaactgctgagccatctttccagtcctcatgtataatgcattttgattttatccaccaactactacttccctcctacttcctccaggaccctttcatctgatctccctctaacttcatgttttcttttattatttttagtggtagtgcagttagtgttgaccatatggtcattagtgtgggccattcactggggcatgggcaacctactagcagccacatcctcaaaaaaaagtgactttctcctcagctgctgtcaattgccagtggttccccacctcagagttggacctcaggagttcttccctagtctatgctggaattaaaaaaaaaaaaagatatatatgtttaatatataaattttaaatgtgtatgagtattttgtctgcatgcctgtgtagaggtcagaagagagtgttagatcctctggaactggaattatagagggtgataagccaccaggtaggtgctgggagccaaacccatatcctctgtaagagcagtgtgtgctcttaaccactgagccatcgctccagcccccaagatggaattttgactggcttgg

SEQ ID NO: 28190 - DNA, 1351 bp, Mus musculus
actaaagaccacacctgaaccagggctgcctgcgttagtcctgttatcatagctgtaaattgtatcaaaactaaacaaacaaaatagtagatggatttaggaatcatgtaagaaacccccaacccataatattaatgcaaacgagtgtatttcttctctaaatttaaagttaggacttacaggtggaattgtatcgacaaccaaatgcctcttgttcctgaattgagtgatagttttataagtgtgaaacttaattatgtcagttttctcctgcttgagtagaatcaattccttaaagtctaggtagggttctactgttatgttgtcttgtaatggatgtctctacctcctccttcaatctctatcctaccattagtggatttcacagcaaatagagaagaagccagagccctaaggtcttttttttcttaattgtataagagtacaagtatctgctcctggccccattagcaaggtaagactaattcaggggtctgagactctaacgctgttctgtcttgatgatcagagagcaaatcaagaaaattacagtgggaaggaaaaatgccgtgtcactatatactttgattttcttattttagttcaggaagcacagtttccctaaacatcaccatggcatgtcttacttagccttgggttggtagaaatctgattttggttcctctgtgacattaaattgagcagcatatagacgggagatgtgggagattttactactgaaatgttcttaatgactgtcaactcattgtttattgtctttcatactagaaaccttacaataattttcttcataaaataatttccttcaaaaatacaattccttcattaaaaataggattattttattactgcttctataccagtttacagttttggtaattcattgtttatttaggaattaaagttgtatgtttcttgttttagtttgtaaagctcatttttcatgtctgaaacttttcctgttctgttcacttctagctatacttggaatcaatctgatcaatgtaatcatggccaaaacaacttagtttgggaaggtagattgtgttttacattctagcgatgctcatacacatactctgtacgtgtttgaaatggaataaatggagattgtggagcatgtcattaagcttcagcgtctcaaaaggacacgcacggtggagccgcagaggagctgttggtgcccagaaagggcctggaggcgagcagcagctccatgtgtggagtgactatagtgcttcatagttcagaatgagcagaacaagggcgctataatttggtgaggagtccttccccaggttttgttgactcacagtctgatttgggggta

SEQ ID NO: 28191 - DNA, 1482 bp, Mus musculus
ccacacactaggctagcctggccagccactgggcccaggaacccttctgtccccatctctccagcactaggattacaagcacacaccaccattcctggctttgttacaaaggtgttggggatcaaactcaagtcctcacacaaggcaagcaccccaccacctgagctgttattccaggccctggctagatattttgaatattaattgcattgtcctgtcaattattcatcattcctttaaatcctctgaaaatagattagatgtgtgtaccatttctcctttccaaggtaataaaccaggataggaacaatagtgtgtgtgtccgtgtgtatgattagagactcctgttcaggttaatattccaataccaaagattctctagacatggttgtttaactagctaacaaatacattgtttactttccaattaattctttaatattgtttacaaaagcatcttgtatggtcagatgaatcgagtctgagaacttgagctcggatactgatttgagtatctgctaagctgggttccttcataagtcgtctggggtgtaagtgtggtctcaaaactctaaaaagagaccgatgtcaccacccatactctggatccctccaccatgcccctggggtgcctctgttactttgtagtgcatagaagactatcatctgtccatccctgtccaacatccagcaaggcagatggcactttgtcacccagacatctgttaaactggactgaaccccagttctcatgataaaatataaaaccttaatgtggttgagagtggctaaggtacatgccactcttgcaaaggacccaggttcagtttcctgctcccacatcagttcacagatgcctgtcactccagctccaagggacccgacaccctcgtctggactctgtgggaacccgccctcatgaacacttacccacacataaccacacacacacaattttaagataatcaaaataaaccttttaaagccttaacacacaaatcactgtcataagagttaggagggagtaaggctcttcatcagcttgcccttggtgagccggtttctactgtatttaccaaggacaatgtgattgagaatttccacaccacagcagggtctccgctgattaaagcttccgtgatgtggggtggttagaactacaggtccagagcccagtgacagtttctccaggtgatctctagcctaaagagtaattccttgcccacctctagcatcctgataaacaagttggaatgtgttcacttaacggaataattcttcgccaatcaaagggctaaatgtcacatagcatctgaggcctctgcctgagtaacctgcttctctgatgtttccacaaatgtatttttttaagccttgattcatacctttctttgttctgtaattatatatatttttaaaaatccattaaactgcttacatgttggaatgtagacttggggtaacctgagtctttgttctcaa

SEQ ID NO: 28192 - DNA, 1214 bp, Mus musculus
ttggttgatttcagccctgagtttgattatttcctgccgtctactcttcttgggtgaatttgcttcctttagttctagagcttctaagtgtgctatcaggctgctagtgtgtgctctctctagtttctttctggaggcactcagggctatgagttttcctcttagtactgccttcattgtgtcccataagtttgggtatgttgtggcttcattttcattaaactctaaaaagtctttaatttctttatttcattcttgaccaaggaatcattgagtgttgttcagtttccacgtgaatgttgcctttctattatttaagttttattgaagatcagccttagtctatggtgatcagataggatgcatgggataatttcaatatttttgtatctgttcaggccggttttgtgaccaattatatggtcaattttggaggaggtaccatgtggctctgagaaggtatatccttttgttttaggataaaatgttctgtagatatcaattaaatccatttctttcataacttctgttaatgtccatgtgtctctgtttagtttgtttccaggatctgtccattgatgagagtggggtgttgaagtctcccactattattgtgtgaggtacaatgtgtgctttggggttgtttgaatttctggagtccagctttactaaagtttctttaatgaatgtggctgcccttgtatttggagcatagatattcagaattgagagttcatcttggtagattttacctttgatgagtatgaagtgcccatccttgtcttttttgataactttgggttggaagttaattttattcgatattagaatggctactccagcttgtttcttcggaccatttgcttggaaaattgttttccagcctttcactcagaggtagtgtctgtccttttccctgaggtgggtttcctgtaagcaacaaaatgttgggttctgtatgtgtagccagtctgttagtctatgtctttttattggggaattaagtccattgatgttaagagaaattaaagaaaagtaattgttgcttcctgttatttttgttgttaaagttgggattctgttcttgcggctgtcttcttttaggtttgttgaaggattactttcttgctttttctagggtgtagtttccattcttgtgttggtgttttccctttattatcctttgaagggctggattcatggaaagatatttt

SEQ ID NO: 28193 - DNA, 1656 bp, Mus musculus
ccagaaaaaaattcttctgacaaaaataattgtaattcctgacacttactaaacatggagtctaagcctctctctctgtttttacttactgtgagccaggcacagtttaaacacttctgaaaacaactgtacacattgtccatgttttataagtcggaaatctggagcacagagccaggaactggtcctgcgtaatcaggtcaggttcttcggtggtctccatgattttgataaactgatttcacttactaactgccaactgcatgctaaaaaaataatgacacaccacaagcctggcactcaggaggctaagacaagaggattgcaagttctacaccagcctgggctccacagtgaggccacatttctaagaagacaataaatttgtcctcataatgcctcctttgtcacaaaaccctggcaggttggccaccctgtgtcactgggaagcataggcatgaggcactggctggggactaccccagggaagcagggccaccactcactcggtcttttgctgggtgggcgtcatgctcggactccgcagacgtctctcctttttcatcagggccagccaccaggggctcggccatggaggaaacgatggggattttcttagcttggaagtagctgtaggccatctttccacagaccaacagagtgacgtgcttcccgctgctcttgattctctccaccactctgtcgtagggttcctcttgcacgttctccccgttcacttcgatgatgacgtcctcattctccagcccagccttgtcagcagggccaccctgctgtacctgtgaacagaggttctgagtcggttccaagcatggaagaaggcgtgccgggcagcttccctcctgaacagcctcaacacttgttaactgcgctcctttatggcctatacaccctgaactccactgggctcagccacactggcaaagcactgcactgaacatgtgctgggctgaaggcatcacgcccccatcttaggatcccaacttggaagctacagggtggtctcattgctctcccctacagggttcaggcaccgtgcacatccacagcagtgggcaaggagcactctcagaggcggacttccaagtgtgaccactgttagtgtcacggagacttgtggcttgcactgaaaaaaaaatcccatcctaattggctgtttgctgagctgtcagaactagtcaccatacctctttgacaaaggagccaggctgaccccgaatggcattcaggtgaaagccgtagctatcgtcctctttaagcagcctgcagagcttgggcttgtgaccctccgcgtcctctgtgggctctgagcctgtggcctccagaggagcagggatcggagctgggccttccttgacagaaccattaggcagttcttgactttggcagtaaagaagtggagagaaccgagcctttggaaaataaaggggaaaaaatatacatctgagcaattacacgtcactgaatgtcatggcttaatacacagggtgtctcacatgtatgctcctcctcaacaggaggaggggagagtctaaagtttctttcctactgccagagaaggtagaaacgtgcacagacacatacatgtgcataacagaaacagtgcacagttctgcaccagaccccagagctgtctca

SEQ ID NO: 28194 - DNA, 1179 bp, Mus musculus
ggcagccttaaattgaagactggcgggactgggagtggaacgtgggaggcgtggggggggggggcgggaccttaagcatggcggggggccgacggaactgccctccctggggacctcggccgcgcatagcattgtggaagttgtagtttttacgggtctgagtttccagatcggacgaagtctcaggactcactttcccgtgctcctgtgcgcagacttaattggagcaggtccgtgggaggtcaggagattgcgtggggagcttggttataaaatgtggacccgaatcccgggtgtccgaggaacttctgcttttgcggcctccccttcacacggtttgaagtgcaagtttcaggtccaagtaactgccctgactgagcctgcatgcagtaggggcggccggcagacgctaggcttaaactactagacaatctttctgctcccacccctttctctccacctccggcctgactgtcgctgggtcgccccgctagagtcgcttgttctgagagcttggatgcacttgccctccagttcccgcgaacttctgagtagctgctgagccgcgttgcctgcggagccctcagcttccacagcctccatcatgcgcgtgtgggtccccgtgggtgtcctgacctcgctggcttactgcttccaccagcggcgggtggccctggccgagcagcgggctcctaatggccagcgtccggtggaccgcaacctactggagctgaaaatggtgcaggtggtgtttcgacacggggcacggagtccgctcaagcctctcccgctggaggagcaggtgagaggcggcccacagaggggttcttggggacacactttagcgtcccccgtcggggctcgggctgggtccagaccagagggaaacaacagtagactggccctcaggctgtggcctggagtcatcatcccatgctcatcccaaaccaccggtgtggtgtgtaagccttcctggctagggcagcccctgccccccaaactttcagttgcttggtgtagtgaaacttttcaaagatgcataagaatgtcccaggcgggggttcttatttaaatgcagattctgattctgcggatgtggagttgggtcacgtttcgtagttctgtggttgaacttgagttcaaggaccttgtaagtgcctggttgttaataacagagat

SEQ ID NO: 28195 - DNA, 1147 bp, Mus musculus
ccaggcatgatgatgtccatgcaaggcatgatgggaccccaacagaacatcatgattcccccacaaatgaggccccggggcatggctgctgatgtgggcatgggtgggtttagccaaggacctggtaacccaggaaacatgatgttttaagctgctacgattggatgtgccgatccttgtcaagatgagattccaggtcctgtgagctgctttgatggagttccaggagtccttactgttggtcatgcaataggagaagagggacccggggctgctttgagggaggagggaaccaagaatgtatggatttaccggaaaacaaattattcatttaatcaacaggtgtgtttttttaagatttattttttaaaaattatttttgtggacatggggatcccgtgacggcacctacttttgggagtctgtagccgtgtttgagaattgccatcggtcatgtgttgcaccgttctgtgtttacgtcctttggactggcttctcccaggattcttttctggttttttttttttacttttgatttgggctttattttgtgtgtatgtgtgtactgtactatattgtaaaagggattttagcagagactttagtctttggggcaagaggagaacaggaatgctgggctgtttactttcgatggagaatccatcttcagaccttggactattttctttcaactccagtgtatagaaaaaccaaactacgacctcagagcagagtattaacgaaaagcacaaaaaaaggaactgagttcagcgaggggtggggggaggggggacatttttctttttaaaaatactgaagcttgggacgtttgttcttcggttcacgtgctcctcagcacggtctgtctccagtgtacaacctgcccgccctcacggtttcctctctctcctccttcagttccttggttacgtgtgtttccttcctgtgaccccgctggtggccctctgctttcccctctcttcttccccttggcagctgcaatacccaggctctctggggttctccctgaagcctcgcccctgcctcggatgccctctggcctcttgtccctccctgccctccccgccctggtgtactcttccttgcccgccttgtttcttgttctccttttcttaggaattcccaa

SEQ ID NO: 28196 - DNA, 1176 bp, Mus musculus
tcttgggttctataagagagcaggctgagcaagccaggggaggcaagctagtaaagaacattcctccatggcttctgcatcagctcctgctccctgacctgtttgagttccagtcctgacttcctttggtgataaagagcagtatggaagtgtaagccgaataaaccctttccttcccaacttgcttcttggtcatgatgtttgtgcaggaatagagaccttgactaagatggggtgggggtggggtgtctctcattggactggacctaaccagtgatgttaggctggatggccaataaacccctgggagctcttctctacatccccagtgctggggttataagcatatgacctctctccctctccctccccctccccctctccctctccctcaccctcccctccccctcttcctctccctctccctccccctctccctcacactccccctcccctcctctctctctgtctctctgtctctctgtctctctctctctctctctctctctctgtctctctctctctgtgtctctctctctctgtctctgtctgtgtgtgtgtgtgtgtgtgtgtgtgtgtgcactaagggttgaatttaggtccttatgcttgcgtggcaagttttagcttgcaatttccttatggctaaggctgttgaatactttaaaaataattactggctgtttgtagttcttgagaactgttttttcagtccattgattcgtttcctaatgggcagttttggattttttggtgtttagtttttgctgttctttagttgttctagatattaaccccatattaggcatactggggaaagctgtctttcccaccctgcaggctgtttgctctgctggcaggtcctcttgctgtgcagaaacatttgaacaccacgtgatcccagtcttgtgctactggagttctcctcaaagttcttgcccttatctctatcttgaagtattcctcatgttttcctttagctatttaggcgtttaccgttttaaatcacgttctttggttcgcactgaactgattttgctaaaggtaagagagatgaatctaagctgatttttccgcctgtggaaattcagacttgcaagcaccgtttatttaataggttatcttatttcaagcacattttggcaactttgtcaaaaattaggtggccacagccat

SEQ ID NO: 28197 - DNA, 1193 bp, Mus musculus
gcaggtctttctcagagtgtgcttttgtccttcgtagtgatagaacctagtggggaaacccccactcaattcccaatctggcgcgcacccaaagaatcacgaaaaggccttgatgtaattacaggaggtagtttaatgacggagctccggaccgacatgcatcccacacaggagataacgaatgttggccacgaggctcgaaagctaggggtttttatggggtaaggggtttaggggtgtggaattcagcatagcgacacactattggcttattcaaacatcagcagaaaaattacatgtatgtgcagggtgtcagagttctgtgagttgttgactcagttcagatagccctattatgtcttcacattcccctttatcttatggtcaagctgttcccaggaatgttttaactacggggcatacccaggtttgtttttcttttttctcagccccaggcagcctctaggctcacaaacaaccagcaatttatgagtatttaatatgacttacaggtcttgaaatttcatctttctttcagtagctgtcccggctgagttctgggccctcggctgtggtctatgccgtgctgtgtgtgtaatggtggctctttaatgtctatacatttccagaattctatcacctcctttactagatttgttcttttcattatttctatgagtgtgtgtcatttatttttctagcttttgaattctagttttctcaaactatgatctcataagatgcaagacatactattcttttttttttaacatttggtaagatgtaaaagattaaataggtggtggtacacacacctttaaacccagcacttgggaggcagaggcaggtggatctctgagttagaggtcagcttgggctacatagcaagaccatgtctcaaaaacaaccacaaacaagcagggggatttgatttgtggcctaggatggatgagttttagagaccatcctgtgggctgcagaggctgtatcctgctcctgttggaggaactcttccgtttgttctgtgcaacagtttatctctgaggtcactttgctgtttcttagtttggtcgacctctctggacatgagagtgggtactgaaatctctactattatcaaatcaggtcctgcctgaccttgtatgtctgatactgtttgttttttattaaattggaagccccagtgttggtgt

SEQ ID NO: 28198 - DNA, 1172 bp, Mus musculus
ctgtgactttgacctcaagccccctggtgaagaagggtcagctccaggccttgcagtttgagttgaactgcagttaagtcctctgatgctctagggccgtggggcacctagggcaaggcactcttagggatcccggagtacaagcagagctcatgttcagagtgctctcggggtgtggagcgtgatgacaggaggagacccctgctccagcttcagaggaaggcaaacactgagccgccagtcacatcccctcacctgctccccatacttctgcttatcaagcgcaggctgccatggggcggccgttcaggattacttgggaatggtcagaactacacatggccgccacttcaactgcgtttaaaagaacacgcatgtgttatgatgagttctcttataagatgattgtattgtctccctaaaggtagactcccccccttgggaatgattagaattggggctctgtctatgaaaagggtaaactgctgtctgctttgggatgggccgattgtttcccagagtccttgaagaagaattaatagattaattttctcctctgtgtcaaggctacagctacgagcgtgtggatggctccgtgagaggagaggagagacacctggccattaagaactttggaaaccagcccatttttgtttttctcctgagcacccgggcaggtaggtcacacaggtcttgatgagagcaggcaactgatgtggtaggacacctttgtatcccaaccattagtatactccccggcgtctctgaaaggtgaggccattactaaggggtaaaaaggagagaattgaggccgttgccatggttgatggaggggctggacttctagcatgggaccttatactcaagctgtggccccatcaaagagtgggactgaagcctgagtccatagaaatcattctatcctgctttgactcctgccctgggagtgtccagagagatttctatgggaagttgtatccacaggcatggatgcggatcttcttcccagctgtgactggggggtgagggcctctctgctagttcttttcctctaacagcagaagcttaaaatgcagttatagcaaaattgctagctacttagaattatcacaatgtcgatatatatatatatatatatatatatatgtacatatatatatatatataacttc

SEQ ID NO: 28199 - DNA, 1214 bp, Mus musculus
attcagtttgtagataggtttggaattagggaaaacttccgtatctttcatccctgaaagattttttttttatgtgcctacatttttctttaattaaaaaaaaaaagcttatccatccatgttaacaggctgttaaaggacctcaggcttttgacaaatggttcttaagcttttcttctctagtctaggcaattctacagtcttgggttaatatggccagccatgtgtacctcgctacccaagcacagctctagacacaagttcatgcagactcactggatgctcatgcaggctcactgggtgctcatgcgaggtttccctaccattaaagatgtgtgaggcaaggaactaccctcggtgttcataaccgtgcacagtattgctctttgcaccaaatattaacaaagtatttttttctttcgcctcttccctttaaatgtgtttgatgatggaatggggtcactgataaccactgactgagaagtattccaacctactcaggattgaaaggaaatattttttccagtatcttgacacttccattttacagataaatgtaagtcaatcattaggcactgtttctggttgagagccttcctgtctcctgagatgagccagccacattgaaagggacctgctggtcagttcacctacctcctggctctcccacatgagggtggcacagcaagtcctctgcacacctctgaggcctcttatcacaagggtgaataggaagatggggaggtttctgtcctgcagggagtacagatcgctcaatgccttggtacatgagtcctgggagatgccgcttcagccatcccaagccacctccctcagctgagactctgtggagaaccctcgtggtccagtcagctttctgaatagtgttccattttgaaagccaaggcctcatcttggtttttcatcaactctaaggcccttcagttatgtcgaaaggttttatttattttttctgtttttcctcagtgctgatttagaagtgggccacccaggaggattcaaaagccttgcttgtttcccagtaggattgttgtatctacacttcctgttaacagtctaagctgggatcatctgtgtttgtgcattaagttttgacccctcaaagttgtagctatggaagggtggggaaagctgtcttcagtctctcactcaggctgatgcttctctgacgggtgaggctgtggtgatagagg

SEQ ID NO: 28200 - DNA, 1202 bp, Mus musculus
caaggacctgagtctgaaccccaggatacgctcatgtcaaagctgaccacacaagcttctaatcgcaaggctggggagacaggcaggccggttactagggcttaaagcctggccagtaagactgactaaaactcagccatttaatattttcttctcaagacagcatctctctgtgtagctgtcctagaaatcactctgttcaccaggctgtcctagaactcagaaagtatgtgtgctaccatgcccaggttttgttgttgtttgtttgcttgtttttagtgtttttccacaagcatccctggtacccttgggggccaaaatgtgtcagagcccatggatctggagttacagttgtgatctgccgcgtgcatgctgagaatctagtcttctagaagatcagccaatactctcaactgtcactgttctctaccctagagtggtttctctgttgaggaagcagcagactttggagttttgctgccctctgctgggaatactcatggtctttgatgtgaaccagaacatctgagcacttgcgaccagaccctttccttatggtaaaaagccaaaggagtagatctgcggtgacttgatgttctgctgtgatgtgcagatttctgagagggcaaataaactaaaaagcgtctaaaaaaaaaaaagactaagagaacaactgaagaggttgtccagagtccggaggaaataggcaagaatgctcaggctacacagatctttttattaagtactaggatcaaagtcagaaccaagtggagatgaggggctatatcaccagtgctcagtatatcaagacagcgtctcaccatgtagccctaggctgggttagaattccaaatcttgcttttacctgcagtgctaggcatgggtctctgtgtcatgctacagtgctcttcttgaacatttgtaatagccaaggtgattcattgtgtacatacgaattgcttcaagtttgtaaagctcatcagccaggactgccttttaatcctcaaagagtccatgaatgggaagagattgtaattcccattcccccgtgtggaaactgaggcgcgtggtactatataactcacctaaggccctactgctggaatgctgagctagagctagaagtcatgccttttggctcacagttctgtctttttggttttttctaccagttcacctgctgcatttgttagaagcaacat

SEQ ID NO: 28201 - DNA, 1206 bp, Mus musculus
cttgttatgtgtcacccagccaggggcttatgtcagctggacatgagccctcccaggcaggagtccatgttcagcatctgaagcatcctgctttctgagttctttctcccgaaggtggaaagcttgatgctgaaggaggggagggtggaccacgtgagcctttctgaccgagcctgccagacctgacccttcgtttcttccccccattctccctctaagctctaagatatttctggagatcgacaaccgacagtgtgttcaagattcagaccagtgcttcaaaaacacagatgcggcagctgctctcctggcttctcatgccatccaagggaccctatcctaccctctagtgtctgttttcagtgagtggcattagtgctggagtggggctgggaagggccttcactggggctcacccttctggtaggaagaggttgctgtttctacatcactgtccctatgtctgaactctcaggtgaactggagagtccaagaaacgcccagcttctctatctgctcgcggtcgctgttgtcatcatcctgttcttcatcctgctgggggtcatcatggccaagcggaagcgcaagcatggcttcctctggctgccggaagggttcaccctccgccgagactctagcaatcacaagcgccgtgaacctgtgggacaggatgccgtggggctgaagtaagagggctttacaataagacacagttcacagggagaagcagagatgagcagatgggcatattactgaatcataatctcaaattctaaattcacctttagtcaccttgaccacagctcctaatggcttgtctaggtctttgagtatggccgcctctttctgtgcacacctgacgaagtgccgctcaatgtttgagtgggagaacactcaaaagacatggtcttttagtgagaagagaaagaatgagtgctcagaagtgtcacatctcacattgcccatcagagttggtgtggtggccctgtaggtgaaagtgcccccgccacgtctgctgacctgagtgtgatccccagtgcccataagctagaaggacggaagtgacttcctcatgttgtgctgtgagtgtgtaatataattagagggctggagggatacttcagtagtcaagaaaggaactgacctgggttcagtgcccagcacccatgctgggcagcttacagcccctgtgattccagctgccac

SEQ ID NO: 28202 - DNA, 1192 bp, Mus musculus
gttccttaatctcctaacggtgtgtgtgtgtgtgtgtgtgtgtgtgtgtgtgtgtgtgtgtgtgcgttgctgagaatcgaacccgtggccttactcagtctaattatgctcaactaggagttataaatacccagccaataaatggtctttaagaggaaagaagttactatgagatttaattccctcgtggagacagcgtatttctgtttatttccaatataaatcagcctgctggcataaatcgtgcgtgttaaagctcacccggggcaggtaagggcttcactgctggaagtgtagtctgtgtaggatttaaaaaaaaaaaaaaaaatgtgtgggaggctctgcccggggaggcggagtcagcagagtttaagcatttctgaccaatcaaaaggagactgttggcgcgaggagggggaggataaagggggagcgggagatcgagaaccctgcccagtcaccggagccagccctgcttgcagtttcctgaactaagtgcttctgcccacccacagcaactgattctaaggcctgactctagcaatggccttcgcaaatctgcgcaaagtactcatcagtgacagcctggacccctgctgccggaagatcctgcaagatggagggctgcaggtggtggagaagcagaacttgagcaaggaggagctgatagctgaactccaggtaaggcgagccggacacaagcgtaatcaccgggcatctttatggccaaacccgctgaccccagtggttccagggctgtcctcccctatcttatcagttggtcccggggcctccggagattcgggaccagcagtgggagggaggaaaagcagagaggaacgaatggcctggaggtgcagaatgcaaactttttgtgctttttgctaccgcgtgtttcttgccggcgctgcaaagtgcagctgctccatctggtcctgcgggatgccagaacctctctcgaatgccagaacctctctggagctttcgtgcctggcgacccaggctgcgagctcccggctcggggtgctacacgcacaccatccctgctcagtgcagactcctggggtgggggcagggggcgcggggcgctggctctgctcctgcgggtcccgtggcatttgtggcagcggactcgcaccgccttttgtctgatgcaagaccttggcgctctttcccccgccccggggagcgc

SEQ ID NO: 28203 - DNA, 1201 bp, Mus musculus
tgaagagagcaacagtatactcacatacataaaataaataaataaatggtaagttctgagagacagagagacagagaggagaggaagttagtttaccaggggctggagcatggctcagtgaccaatggcatgaagtttttttcccagcactcatgttgggcagcccacaactgcctgcaaatgccagcactaaggggtcagatatctctggctttagcatgcacctgtattcacataactaaaaattacacacttaaaataataacaatttgccatatggattgggtcacactattacaaggactgggagaaaacatagcatgctgtctttaacctggagactcaggacagcagcgtaatccagaccagacttaaaggctaacttgtcagtggtgcatagtcagttcaaggaattcagagccaagagactggacagggactcctgtgcaagtcccggagtctgggaaccataaactatgacattccaagatgggtcagctcaaggaaagaacaaactggcctttcccacatttttgaggcggccccttgatggattggttaggacctgctaacattgacaaggataagtcttcatttactgactcagtgtccaatcttttctagaaataccctcagacaacccccctgaaaaaaagtaaaattaaaaaagaaaaggtttcactagctatctgttacaccctgtcgcctcagaagctgagagcaaaggctgcatacagcctagtgtgcctcttcaccccttcccattgttgtttacaggcccagcaggttgtttttttcttgagacaggggctctacataacccaggctgtactggtctactgtgtagaccaggttagctttgaactgatagagctcctctgccttctggatgctgagattaatggagtgtaccaccatgctggcccaagaataaataaatgtgtgtgtgtgtgtgtgtgtgtgtgtgtgtgtgtgtgtagagttagaaatacaaacaactgacaactatggttgacttcaaaaggaaaattttattgttatttcctattagctctatagagaatggaaatgtaaaaatatttcaaatgataatgttatagcagtcaggcagcatggtgcctgtaactgtgcctcctgacaaatcccactgcacactaccttgtccaactagaccctctccacagtgagtaggttcatcttc

SEQ ID NO: 28204 - DNA, 1378 bp, Mus musculus
cccgtgatagagaaactaaaggaaacaactatttcaaaagtcagacaagtccaggtaagtgtctgttgtagacacgttaatgtaccgtatgctgggcaataccaaacagacttatatctgtagtcagggtaagctttctgttgtctgttgcagagatagggtttttataacactgacaacagaagcacttagtgagctaaggaaacaagacagtgcccactcagacgctgctacactgactaaagattacttttttgtattcttctccaggatgccattggcttcaatatggctggtctcgattatctcaagagagagtgtgaagcaaagagtgaagtgatgttttttgcagaagctactagtcacttggaagagaagaagaaaaaacgaaaaaacaggaaaaggatgattttaacactgacttagaactggaatgcagtgttttttcctgcttcttctcaaaggagcgtacacataaactgagctgttgtggagttggcaacataaaaataccaaaaaaagatcatgttgtagatcttggggtacagatgtcagccttggttgaagaaaccaacatggctgtgactactgtctttcatcttttgaaaaggacggatttagtttaaaaatctgcatttttcagagttggacctttaaattgtgtcaagaagcaaaataatattttttaattgtgtatttgattccgaagtgtctcatatttatggcagattatttgtattagagcttttctgtttaccgtgtgtgtcattgtcctctaaaggaagcgccatggactggggctgaaagggatgatggcctgctaagagctgcctgcttacaccagtgcaggttggtgagtctgcatgtaaggtcataatgctgtttgtacttttggaaatacaatagctttttcattaaaaccacttaaaatgacttgctggttccctgaatattaggggaggggtctggtatttatatatgtatgtctacatggtaggaatttgaaaagtagggatatctagaaaaaagtagattaactcagataactttggatctaggctttttttaagtgggaatttaccaattattaacttagactcccttgttatggtctaatgactaaactctagtcagattttttttgtttccttaagataacgaccagagagaaggccatactgagtttatcttcctaaatttctatctaatggaacctgtaaatgtgaccttgtttgcaaaagcatctaccgatttgaagtcatttgggatgaagatagtctctaaatgagttaatccttacaaggggtgacacaaagaaattcaaagtaagttgtactatgtgaacaaggcaaaggatgagtgatgcagctcctgtcag

SEQ ID NO: 28205 - DNA, 1099 bp, Mus musculus
ctggctctgacacgctccattggaacaggtgactgaggtctgctccacgctgcatgcacgccagccatttccaatgcacttttccatttattacaagcccctttctttggcacatgctgttaatttgtgttgttacctaatgttctcctattttttctctacacaggaaaatgggccttattttgcatcttatcctccatcaccagatttgtgacctgcgccttcccagtgcttctcggtcacaggattccatttaaccacaactcgccacctatcggagtgatgttcatttttgctgtacagatccagagagcttttgtccccacctctctggtatttttttattgactatatattttctggcacataaacaatctaaaactggtaggccattctgaactgcatacattttaaatttgtatatttgtatcaaatggaaatgctcatttttagagcattaatagaaactggggatcaacttttgagtgtctccagtttcctaaaggacactggactctgtcacacaggccaccaacgttgctcacatcatctcttacagtgcacgcttccggactctgttacataggccgccaccattgttcatagcatctcttaaacagtgcacgctctctctgtgtatttaagtgtttctcaaaatatatagaaccaatgtatgctaaacggatgcattgttccctcagatcctggctttaataccatttacattttatacagacgatctgattataatatagaattgcccatgaccaagaatattgaaatgtgtatgatcaaaactgtaaaaaccttcaacaacatagaattggcagattgttggcccaagctacagctgagctgtgcgtgcttcttgggttgtctactttgttcctattgacactgctctgatctcagtgtggagagcatgagactgtaccttcaactgtcttctttaatcatgtgactcgtgactcgtctctttaccaaaagaatgtttgtgctcccagcactcctaagtaaagaccatttcccaggactccatccctgaccacattgctgtcttctcagagtcatcaatgattgtgttggttcagtatcactt

SEQ ID NO: 28206 - DNA, 1398 bp, Mus musculus
atattggtgttagctctttttagaaagtctgatagaattctgagctaaaaccatctgaccctgagtttttctttcttttttgggggggagggggagtggagacttaatgactgcttctatttccttaggacttataggactatttaatgactttatctggatttaactctggtaagaggtatttatcaagaaaatcatccggcaccacggtcctctacccctgcgtggtgtatgaccgtgggcccgagagcgctcttgaataaaaatcctcttgcaatttgcagcaagaacgtttctcgttggtgattttggggtgttgcctctcctgagtcagaacgtgggggagtcctcacgttgtgggtctttcatttggtgcgttggccgggaaacgcgaccacccctcacacccgagaaccgacttggaggtttggggatcccctcttgtgtgcgtgtgtgccggccagtgtctctgttttgagtgtctgttttctgaaacgaacgttggaacatgtgcttgttgtgttgggttgtttgtgtcttgtcctatgtttctgaagcatggcaaagtctgagtttggatccatctgagtttattgagtttgtgtcttggtttcagggtttcaagatcatgggtttgagtcccatctcgtgctttggtttcagggttacgagatcgtgggttcaagtcccaccttgtgccttggttttacaccttgcagagtgaggaataagtgtgcttctctggttttggtcgtctaggtagaagtggacgatggtgtttgtagacgatggggtgatggggttttctgaaatgcgcgcgtctgtatttgcagctgtccttttgggccgtaaggaccggaggactgtggtcggcagacgtgctaggaggaccacaggctgtggccctgggggacgccctgggaggtaaggagagccagggacgcctggccgtctccggatcggtcagagggaccgagttctgttgaagcggaagcttccccctccaacatagtctaattcttttgcctgcttgtggaggacaagaaagggtcgagtgtgtctggatctgttggtttctgttttatgtgtttttgtgtatgtgtttagagctatgtgaaaatctagaaaagcaaaggtaattctcataggtgctttataccctgattagagatagtttacacctgagatgtgagagaatgggttttgagaaaagcagtactctccgactatctggggataatttggtaaaataaaataaaataaacaatatcaattggtctttggagccctgcacctgtagtaaggaatctagtgtggctggagaagccctgctaggagctaattataaacgctgctcttatagggaccagcagcttctcaagttctatggtaagggaa

SEQ ID NO: 28207 - DNA, 1353 bp, Mus musculus
agaattctgttagaggctagaaaaatagcccggaagccaacggtggtctacacagctacaaaatgagatcgacatgagattccctttgactcaccccagttggaactgcaacgtggctaaaggtagggagagcttaaacatctatcgccaggctccggtctccaaggtgcctcaaaatgggcccactaatttggctaaggtaagaggtaatgcaggggccaattgaacctccctcaatgttccttgaaaggcttataaaagcctcaggtggttcactccctttgatcttacctcggaagcccagaaggcctcagtggccatggcctttcataaggcagtcagctcccgatattagaaagaaacttcagagattagaaggtgtattacaagaaggagacagttatgcgatctggtaaaagaggcagagaaagtgtgtgtgtgtgaaagagagaggcgggaggcaaaagaaagagaaaacgggagagatcatagacaagaaaaaaagttgccacagtggtaggagaaaaagaaaagacaggatctagacaggaaacctgggcaaccaaagactgagcctcagctaaagaggctcagctgtgtcagacagaagttacttatttgggatacacccttcgaggtggaaagcagtggctaaaagaagccagaaaaagactgtaactcagatccccaccccaactacaccaaggcaataagaaaattcttgggcaacgccagcttctacagactctagatacctgggttgacgaccttagctgcccagttgtaccccctaaccaaggaaggggaggtgtttgtgtggaccccagatcaccagaaagtctctatgtaaaagagagagcaggtgtcaccagaaaagtcctttctcagactttgggactttgaaaaaggccagtggcttacctatccaagaagttacacccttttgccagcgggtggttttcttgcctgaaagctattgctgccataatctgcttgtcaaggatgctgataagctcactctgggacagcaaataactgtagtggcatcccacactcttaaaagcattacaaacgctcctgtgacacatcagagctttttgttgattggatagctctcctaccctttgtgctcttcagggatagaaacacccctggacagtttagactgacccccctataaattactctacagggggccccctccactggtaaaaatagcctttgtacatggtgctgacatgctgctttcccagcctttgttctctaggctcaaggtgctccagtgagtgagacagcgagcaaaaagcagctccagaaggcctactcaagagaagaagacctgctacattagac

SEQ ID NO: 28208 - DNA, 2422 bp, Mus musculus
gagtctatgtttttaagtttctccaagatattatccatccaaagaattactagaatagcttcggaataattttcagtggcaaatgtgtgacgtaaagaatcatactcactaaaattggcatgaacctaagggacttacagacctgcactggttatttttgttgttgatactgctctatattttggcagaaaaaagggtaaatttttatcaagaactatagttcttattataatataagataaatagtaatgctataaattttctgtcccttgaatttctgtgataattcaagacactttctctcttttatttcatacatacatcatctattgatgacaataaatttgagaacgctataatattttatgaaacactttgcttatgaattctactgtggatttctgaaaacttatttccttggttggtagcttttctttttagccccgtactagcttattactagcagatttaaactgtggaaaaaatataattggacatgttataagttgactgagcatcttccagtgaaaaccattatctgatcctcagattgagccagtactccaaaaacttgccacctcaaacttgttcagtattgataaaagacaacatggagagagtgagctctagcacatgtcaaaactgtatcttttcctacttgaaatttttaaactgtaaatgagaatggtagatggctattactttagaaaaaaagatgaggttttggttctcagagaaaaagaaagtgagccttcctcatacagcacaagcccactcccaagtcaaaggaaagtgaggagctgaaggtgccaaagaccagtgcagcaagcaggggaacctctgttacactcatgcagtaaaggcgccatcttggttccctgggaatgctccaaggagacaagagtccccccacctacccagtgctctgcattgtccacgtgatcctagagcagtagagagaaggcccaggtgtgagcaggacatgttcacacaaagatcttaagactgtcacttgactgtcctcaccctcctgataagaactagagcttgtaacaatgctttttcctctttgaataccaaaggcgattaaagtcaggtacaaacgactgccagtgtcatgtttgattttgttaatagaatttttaaaataattttttccaaaatctaccattatcccatattttgcttactttttgtgtgttttcctccatcgttcatatacttggtgtttgtaaaccttagtactttagactccatatcattgtgtttataaaccctgaagataacccagaaatgctcattaactgatgtctctccaaaaagctggtacctcaccttcagctttgggcagagtcgtgcagattaaataatacataaaagtagggactattgaacaccttctaattccagatttattgctcattttagaatcacaccttttggttcaaacctgagttttagaaactaatgaaccaatatgaagctcgtaaaactaagaatgagcccttcaccaagaagtctcactgcagaacagcaagttccgaggtgaaggtctttcttcaggtgggctgcacattttgtgcgcctctaacaccagcctgtcggtgtcgtccagctggggtatgtgcgcaggaaagcctgggtgttagaggaacgcattctttttgcagaatattgactacctgattccctatgatgtcatctcgggcgccacggcttcccttggcaggttttaaacaagcagtctgaggtcacgatcctcagcttctcctcctttttgctcttcattaccaaagtgtttgtcagcactctgaatttgtcggtaaagactgacaatgagtctcccttcaggctggagttctctgagcgagtgcattcgtgagagaatgagggaacaaacaggtacagagcatgtcatacgcgtcacgctccgcctggcaccaccccggccttacagcatgtcacatgattccagtggcatcttctgtatgagagtgttccatagcattttaaatattccccaaaatgaatcatgtttcaaaattcttaattttatatttcatttaaattaaaaagggagataaaaggtttataatatattttaaacactgttactatataatactaacaacaaaaattgtagttaataactaaagactcttgaaaaatgtcaaagaaatatttgatttctgttgcatctttgactaaaatatttacttcagaaataaaatcatttgtattttgttattactttaattacatgattaagatcaatactttgtagaagtctgtgttactttatatctaaaagaaaaattgtcccttaattcatgggtacactgtgcagttgtaaattgttttttctcgagtatacttcctaataacggtggcatctgtatttctcgcatatagagaaaacata

SEQ ID NO: 28209 - DNA, 1203 bp, Mus musculus
aaatgattgctcaccccttgactatggcaatctgtttacatttaacttctctctaatttaaaattttactcataaactaattttatataatattctattatcaatcagttatcaaaaactatgaatgatagtatgtgtactttttttaaacaatgtctgtaaattacgaagtgatgtgtcttctgctgttcttacagccttcactgtttcataggctttgcacaggtatgtgaatttttttaagaaatttattcatcaggtctagctctgcatcttcatcggaactgctcagaatcaattactggttttctctgcagtccccagtgagcccacttggtttcctgcggcattgactcgtgttttgtccttttcttttcagatacttgtacctgctgttctctggcgatgaccttctacctttagaccactgggtgtttaacacagaggcgcaccctctgccggtgttgcgcttagccaacagcactctttcaggtaatcctgctgtccgatgagcacagccccagaaggaccattcttacctgtgttttgtttacatggaccactacagagactgtctgcagaggagaggcggctgtgggaaactgggactcttatgtcagtatgccggatgaaactcttccctgcaagacttttcacttgtacatatatcaactttgaaattattccattttatacctgaccaaaacaagttctggtacatgtaggacagagacctgatgtgttttgattcttactgagatggccacatgagaaacaatgtcttattctatactgtcagtgcaagtcaagaccatagagcaccttacaggagctagagatggctttttgaaccagttatacatttgttttctcccacagtggagcagctctcaaatcaaatataacacattgtgtagcccctttcctccattttaacaatggaacaaaccgaatgagcaggaaccgaggaacatgtaactacattgtagcaagaagacttgggaaagaaacaaacagatactggccctgtctgaattttccagctcctcattggatttttaccagactggcaaccatttcattcccaacctaggcattgaaatctgtttagattgagtttttctctgaggggcatgatctcatgaagaatatttttcaagtcgttgtctccatataatatgctgaacctggtatttatcataa

SEQ ID NO: 28210 - DNA, 1164 bp, Mus musculus
acgcccggcgccgctgcttggaagccgcggaggctgcggagcggtggagcggaggaggctccggaggggaccgagtggaaccgacctactgcaactcgtcgtcttcgccgggcgcctcccggggcgggcagccgcctctgagcatcgcgccggggcgcgggcatggcagaacccaccttgcagcttctctgcggtgtggctcgcccgatccactctcgggaatgaagaggagactcgcgatcatccggtgaggcaccgagagccaaatggcgagaagatctgacgggacagaaaccaacgatcgcttgggaggtcacccgggcttctggatgtaatcggagagcgtgaaagaggtggcctcgtaaataataataataataaaaaagcacaacaatcctttgagaggagggaaattgagtttattctttttttttttttggccgaggttttgagaaacggttcgatgtgttgtacgtttgatataagatgagaactttataaagtattccgtccaagagcctaaacgatgactaccccagcgctgctgcccctctctggtcgtaggataccacctttgaacctggggccgccctccttcccacatcacagggctaccttgagactctccgagaagtttatccttctcctcatccttagtgccttcatcaccctgtgttttggggcattcttcttccttccagactcttcaaaacacaaacgctttgatctgggcttagaagatgtgttaattcctcacgtagatgccggcaaaggagctaaaaaccccggcgtcttcctgatccatggacccgacgaacacagacacaggttcgtttgttacttaaattatggtacttccttttgggagagcaaggtacagttcactgctttcttgtctctcccccctccccctcctgcccctgtgaatgatcagggtgttgaacgttgttggttcagagctgcctgggtagaaccatacatagactggaaggactcctagggttccttggtttttcccggcagaacgaagtgttcagtcagactcttctgctgtggacagcagggagcggagatacagggagtcagcatgcgcgtattgagaacgtgtttctgcctttctgccaccatgtgaagtcactgaatcttgacagcttgctagacttt

SEQ ID NO: 28211 - DNA, 1748 bp, Mus musculus
cgttattatttgctcttaggtttgtctgtgaggggacagtggaagagaagatcttacagctccaagaaaaaaagaaagatttggcaaaacaggtcctttctggatccgaaggacctgtcaccaagctcacactggctgacctcaagatcctctttggcatctagcttcgtctgctggagtgatgctctttccatgatcctggagtcttagatttcatcctactcgaagtgaggcttgttcctatgctaggaattgaggatgggttaccaggttaacaaaccagttagtcagtcagcttgtgtaatgtgggccatagaaacccattggttatttcagaattaagcctggcatgttagtgcatgcctgtaatccagcaagaagatggagaggtccactttggcctgttgtagactctttctcaaaacaaaccacaaagtgctctggaaggcagccatgtagtccatacttcccagcacctgaaaggctgagtggggattgtgagttagaggccagtttatgccacagagtacatttcaggccagcctgggctacagaatgagaccgtgtcttagaaaaacaaagtaaaaccagtgaagctttggcgttggatggcctggaagctgagtctggaagaactgtgtaagtgctgggtgtgatgctcagggagccattacaagcatagtgacacatgcttagaatgctggcactttgtaggcaaaggcaagaggatctcgagtctaaggttagcctgggtaacagtgagttctttagcagccttaattacatgggaagaccctgtctgtcaaacagcctcaaagccctgtgctgccatgtttgggactgatggcggacctggtcttattaccttgcctatgtaggctctgtcctgtttccctgctggcaggctgcgtcttgtaagcctctttgtaaccaaccatccctatgaggctggctgaatctaggcaggtttagggtcaagatatttcatatatcttgagttgagtattaatcatggtatcatctagcatctctcatttagcctgtgcatcatggtttcatttagggatatatcaacatcagtgtgactgtgtcactcagtttcatcactgtatcatttgatatcacagtatttcatatagtatttgtcttatttaatgtttatgtccatttcagttgccagtggcatttaatctgttgtgtcacttagtttctgccattgtaccacattgtgttatcattggtatggtcttaataaacgccttcggccgtgcacagaggtgatgctgtgtgttcaccaaaccccacctcctttccctcagagcaccagagagcacctgctgtgggtaaggtctgcattactgagttctagctgctgggccacgcagaggagtgacgtacggagacagaatgccctgagcagctctcccaatgcttcttcttgctatttctgtgaacctgctggaggtacaaactgaaaagatgttgtggccttaggaagggtaaataccactagatcagggattctcgtctttcttttaaaaatgattgagaatttcatatcatatcctccaccattgcttttccatcccaatttaatgaactctttttaaacccagtgtctacacaatgctgactgtacacagggccatgcactggaacactggcagcctgtcagaggtcgcatccctgaggaagtgaccatcttttaccatatggcgtgggaaatcataaggccctctccatccatg

SEQ ID NO: 28212 - DNA, 2864 bp, Mus musculus
caccgcactaatgctcccactttctgtcttctgcccagtgctgaacgccttcaagtacccgctgctgatcggcgtgggcctgtccacagtcatcgggctcctgtcctgcctcatcggatactgcagttcccattggtgctgtaagaaggaggttcgggagacgcgtcgggagcgccgcaggctcatgtccatggagatggattaagcagttggagatggagggacagaggaacattgtaggagcggtgggggtgagaagaggactctgatatttttacaaccgagtgtgttacactaaaaccagtcctctctaatctcaggtgggactcggcgctctctcttttctgcatgtcaagttctgagcgaggacatgtttaccagcacacagctcttcttcccacggcactttctgatatgtaacaatcgagtgtgtgtttcccccagctgcagctttttaatggttaaccccccaccccaccccccacccccgtctaattagttttctcctagcggcttatcgatcctctgatttgtgtgtgttgctcacttttgatttagggatctcggtgaggtagggcgaaggcattcagagttggtcattgtgggtaagagggtaccggcccacccgaaagccagcatccacgagcagccagcatcgggagagctgctacctgctgccctccaccctggctcagagctgatatagacctgtgccaaggcaagctgtggctttgactgccctgcccatcccccattgtcaggggtttaaaactctataacttcttggcccgtaagccttttgtttcccctccttctctaccctcttccgttttccgggtttgtttctgtgagtgaggatacggcagccctggagtctagaattcggctttccaccaagcaccttatctcgccaccttagccttaagaatgagtatgaaaaaaatccagcaccacctctgtccagggcagaaggtctgggaggaggaggaggaggaggacacgggggggggggggggggggaggaggggggcgggggggggggaggaactgatgctcgcccacccacgtgctcgctctggtagttcttaggccactgtgctccaggaaccccagggtgagtgggagcagagggcagccgtgccgccgagccaggtgccctgtcccttcatgagaggcactgtccctggtgccacaggaccgccatgggagccacaaaagtgccacattgagcttcttcacaggaaggcaggttgctgcctgcaagactgacggacttcaaggaatcagaaattgcctagagcaagcgtgtgttctccatgaccttttcagtccttgaagtctttctaagctccccgcagggggtagtgaagaggggtatactttgtgaacgtttgctttcctattagaaacatgaagggaacccagctatttagtgttatgtgaatggcctgtaaaatagggttgagagcagctgcctctgcctggctgggcccagcaggaacgggacagcgggcaggcacatcttccaggtcaccagtgcctgctccatcagggcctcagccacacagattctctcacctcagcatagccttcctgagcctcccctgagtactgaggctcaccacccagctggtaccctcgccctgccttctgcctctgaaggatttaacattgttgtcttccaaggggggacggggagaagagtcctttctcttaagcaataaagtaatccgaaaacatggccatcacgtgcagctctagtcaacacggaccaggatgcgctgagcccccacccccacccccgccttctctccatgtggcccacggtggcttttgtattttccacccaatttcctctgcttgttttgagcccaccttgggggctgctcgtgtaatgagattttgagaaggtagctctagcccaggtggggtccaggtttagagtcagtagcagatgcaccccacacaagcaagagaggccagagaaaggggaggcttggcagacacggttggtctacatgtcgctttcttgttgctagctcagacgtgaggcacaggtgactgtacaaacaggaattaggggagagaaccaggtgttaggagcagccttcgagcctgtgccattactgaagaagattcagggtcttggcagtacagccctccttaggaggatgagagagacttagcctggggtgagatgagccctagatgtacataaagccacagtggtccacgtgggtactggatgatgagatgagtgatcggacctacctttccctttcgtctgatgttgagatttgaacctgagttgtggaggccatgcccaaacccccatgttgcttagggttgggagaggggccagaaacctcaggacctagttccttttgggaatcttaccatgctggggtgtgtgtcttgttaagtgtggtcaaacactcttgatgtaccaaatagtgctccccatgaagcgctcttcctgaggcccccaccctgcaacactgctctgggggagggagaggccgagccaggccttggcacatgaaattgcacttcttaaagagaaaactttatagaaggttgggtatttttcctaatcacaaaaatctcccgctgaaagaacctaagctacattcagattgaagcctcgaaaattactttaaattgtttactttacgatgtttacacacacggctcacttttttagaaaaataagaaaactgcaaactctggctttttaacaacttttcagattttttcatgcatgggatatgctggcccctgactcaccagctggattaatcctcatttagaaatgtcccgagatgtggatatgtgtgtcttccccctcccagccacatgcccag

SEQ ID NO: 28213 - DNA, 1151 bp, Mus musculus
gagcagaaggcccttggcttccccctacctcccaaatcttaggtgaagttctgtcctgtccaacactagcccagagttacagggggaggatgattcgggagagtagtctgtgcttagctaagttgacacactctaagccccacagtttcacaatgcagcattaaagatttatggcttcagcctgccacagtctctcagaggccccagaactggaagcacactgtcaggttgagttcagttagctaacggtctagtgtgtgtgttcgttgtgacctgagagtctgttccttggtggtagaggctctccatctctgacagtcctccgtgccatcattgtctgtgatgcaggaggtaatggttagtcgaggcagagaaagcattggctggaaagaacccgttagttctcactcaggtggattcaagcctcctttctcccttgtgacccaaggaacctcgtgtgaaggctaagggatttctggatataaatggctacagaggactgcaggcctgggaactatcacacaagaactatctattgagagaatcaggtttcactctctggaccacccttcttcaccctgtgacctgttagttacaccatcccttcagctacctggtggatatttcaacctgtctggacctcactggctgttcttaacctgtgggtctcgatccctttgggggttttgtatcaaatatcccacatatcagatatttacattatgatcagaacagtagcaaaattatggttatgaaatgacaacagaataattttatggttggggtcaccacaacgtgaagcactgtgttaaagggtcacagcgttaagaaggttggagactactgccctactgtgtcctttggaaaatggttttcgctggctattagcttcccaactccttcaacacagctgccacctccagctctgactctcatttcccttccctgttgttcagtagaggagaggaccccggggtatcccttggcttccacatgtgctctgggtacccactctgtggtggggatcattgttgaagccactcaccttctgtgtttgtgttcagccgcccgttacctcaccatttctcaaagatgcagttggcatagtgaccctgcataaagcctccttcaccccgtggaagggagtgctt

SEQ ID NO: 28214 - DNA, 1166 bp, Mus musculus
atgctggaggtgggagctggaaagatgcgggcctggacttggggtcaatgggaagacccaagtttccatttacctccaatggtcacgtgctattgttcaagatactattcgaggccttctctgccggctaccccaccatcaccaccagctcagctctcttttgctgtcaggctagctccgctgtccccagccatcaccatgatcatctacagggatcttatcagccatggtcattagaacagagggtgccattgatgactcactcattgatggaaatgcttccgccaaaggcccggagggtgaaggtacccaaagcactgttgtcaccagtgttgacattgtcatgagccatcatcacttataagaaaccagcttcacaaaagaggcccataaaaagtacatcaaagactacatgaaatcactcaaaggcaaacttcaagaacaggaaccggaaagagtcgagctttttatgactggagctgtggagcaaattaagcacattcaggctaatttcagtagctatcagttttttattagtgaaagcatgaatccatatggtatggttgttctcctggactaccgtggagatggtgtgactccattcatgattttctttaaagatggcttagagatggaaaaatgttaacaaattggatctatcgctgtcaccgtaattggctgctgcttaccatccatacaacaccaggacttaggacaaatgggactgatgtcatcttgagcttttattttgaccatgatttatttggagcggaggcattgttttttaagggaaaaaaaatgtcatgtgggttgtctaaaaaaaaaatgcattcaaattaaaaaaataaataaagaaaagaaactatttgagatatggctaacaggaacttagtggctattacagatattcctagcagctgctcggaaatactgccttgaacttctgtgacctttgcacaggtgacctttgctgagtgtggtcctagctaggctccaggcttcactgcttgctccatctctcctgcaccctagtttgcccaaaatgtaaactttccttctccaagctgttcttaaaacatttcctcagtggttcacaacctcttatatctgataacctgcatatcagatgtctatattacaattcgtaacagtagtgaaattcagtt
